(19) United States
(12) Patent Application Publication
(10) Pub. No.: US 2007/0281896 A1
(43) Pub. Date: Dec. 6, 2007

(54) Novel compositions and methods in cancer

(76) Inventors: David W. Morris, Davis, CA (US); Marc S. Malandro, Gibsonia, PA (US)

Correspondence Address: NOVARTIS VACCINES AND DIAGNOSTICS, INC.;CORPORATE INTELLECTUAL PROPERTY-R338, P.O. BOX 8097, EMERYVILLE, CA, 94662-8097, US

(21) Appl. No.: 10/676,684

(22) Filed: Sep. 30, 2003

(51) Int. Cl. A61K 48/00; A61P 43/00; C07H 21/04; C07K 14/00; C07K 16/18; C12N 15/00; C12N 5/06; C12Q 1/68; G01N 33/53

(52) U.S. Cl. 514/44; 435/320.1; 435/325; 435/330; 435/6; 435/7.23; 514/1; 530/350; 530/387.3; 530/387.7; 530/388.8; 530/389.7; 536/22.1

(57) ABSTRACT

The present invention relates to novel sequences for use in detection, diagnosis and treatment of cancers, especially lymphomas. The invention provides cancer-associated (CA) polynucleotide sequences whose expression is associated with cancer. The present invention provides CA polypeptides associated with cancer that are present on the cell surface and present novel therapeutic targets against cancer. The present invention further provides diagnostic compositions and methods for the detection of cancer. The present invention provides monoclonal and polyclonal antibodies specific for the CA polypeptides. The present invention also provides diagnostic tools and therapeutic compositions and methods for screening, prevention and treatment of cancer.

### CROSS-REFERENCE TO RELATED APPLICATIONS

[0001] This application is related to the following U.S. applications: U.S. Ser. No. 10/034,650, filed Dec. 20, 2001; U.S. Ser. No. 10/035,832, filed Dec. 26, 2001; U.S. Ser. No. 10/004,113, filed Oct. 23, 2001; U.S. Ser. No. 09/997,722, filed Nov. 30, 2001; U.S. Ser. No. 10/085,117, filed Feb. 27, 2002; U.S. Ser. No. 10/087,192, filed Mar. 1, 2002; U.S. Ser. No. 10/322,281, filed Dec. 17, 2002; U.S. Ser. No. 10/322,696, filed Dec. 17, 2002, U.S. Ser. No. 10/331,053, filed Dec. 26, 2002; U.S. Ser. No. 10/330,773, filed Dec. 27, 2002; U.S. Ser. No. 10/367,094, filed Feb. 14, 2003; U.S. Ser. No. 10/388,838, filed Mar. 14, 2003, U.S. Ser. No. 10/417,375 filed Apr. 15, 2003, U.S. Ser. No. 10/461,862, filed Jun. 13, 2003, U.S. Ser. No. 10/663,431 filed Sep. 15, 2003, U.S. Ser. No. Unknown (Attorney Docket 529452001900) filed Sep. 23, 2003, U.S. Ser. No. Unknown (Attorney Docket 529452002700), filed Sep. 24, 2003, and U.S. Ser. No. Unknown (Attorney Docket 529452002500), filed Sep. 29, 2003, all of which are expressly incorporated herein by reference in their entirety.

### DESCRIPTION OF ACCOMPANYING CD-ROMs

[0002] Tables 1-49 are filed herewith in CD-ROM in accordance with 37 C.F.R. §§ 1.52 and 1.58. Two identical copies (marked “Copy 1” and “Copy 2”) of this CD-ROM are submitted.

[0003] Contents of the CD-ROM disks submitted herewith are hereby incorporated by reference into the Specification.

### TECHNICAL FIELD OF THE INVENTION

[0004] This invention relates generally to the field of cancer-associated genes. Specifically, it relates to novel sequences for use in diagnosis and treatment of cancer and tumors, as well as the use of the novel compositions in screening methods. The present invention provides methods of using cancer associated polynucleotides, their corresponding gene products and antibodies specific for the gene products in the detection, diagnosis, prevention and/or treatment of associated cancers.

### BACKGROUND OF THE INVENTION

[0005] Oncogenes are genes that can cause cancer. Carcinogenesis can occur by a wide variety of mechanisms, including infection of cells by viruses containing oncogenes, activation of protooncogenes in the host genome, and mutations of protooncogenes and tumor suppressor genes. Carcinogenesis is fundamentally driven by somatic cell evolution (i.e. mutation and natural selection of variants with progressive loss of growth control). The genes that serve as targets for these somatic mutations are classified as either protooncogenes or tumor suppressor genes, depending on whether their mutant phenotypes are dominant or recessive, respectively.

[0006] There are a number of viruses known to be involved in human cancer as well as in animal cancer. Of particular interest here are viruses that do not contain oncogenes themselves; these are slow-transforming retroviruses. They induce tumors by integrating into the host genome and affecting neighboring protooncogenes in a variety of ways. Provirus insertion mutation is a normal consequence of the retroviral life cycle. In infected cells, a DNA copy of the retrovirus genome (called a provirus) is integrated into the host genome. A newly integrated provirus can affect gene expression in cis at or near the integration site by one of two mechanisms. Type I insertion mutations up-regulate transcription of proximal genes as a consequence of regulatory sequences (enhancers and/or promoters) within the proviral long terminal repeats (LTRs). Type II insertion mutations cause truncation of coding regions due to either integration directly within an open reading frame or integration within an intron flanked on both sides by coding sequences. The analysis of sequences at or near the insertion sites has led to the identification of a number of new protooncogenes.

[0007] With respect to lymphoma and leukemia, retroviruses such as AKV murine leukemia virus (MLV) or SL3-3 MLV, are potent inducers of tumors when inoculated into susceptible newborn mice, or when carried in the germline. A number of sequences have been identified as relevant in the induction of lymphoma and leukemia by analyzing the insertion sites; see Sorensen et al., J. of Virology 74:2161 (2000); Hansen et al., Genome Res. 10(2):237-43 (2000); Sorensen et al., J. Virology 70:4063 (1996); Sorensen et al., J. Virology 67:7118 (1993); Joosten et al., Virology 268:308 (2000); and Li et al., Nature Genetics 23:348 (1999); all of which are expressly incorporated by reference herein. With respect to cancers, especially breast cancer, prostate cancer and cancers with epithelial origin, the mammalian retrovirus, mouse mammary tumor virus (MMTV) is a potent inducer of tumors when inoculated into susceptible newborn mice, or when carried in the germ line. Mammary Tumors in the Mouse, edited by J. Hilgers and M. Sluyser; Elsevier/North-Holland Biomedical Press; New York, N.Y.

[0008] The pattern of gene expression in a particular living cell is characteristic of its current state. Nearly all differences in the state or type of a cell are reflected in the differences in RNA levels of one or more genes. Comparing expression patterns of uncharacterized genes may provide clues to their function. High throughput analysis of expression of hundreds or thousands of genes can help in (a) identification of complex genetic diseases, (b) analysis of differential gene expression over time, between tissues and disease states, and (c) drug discovery and toxicology studies. Increase or decrease in the levels of expression of certain genes correlate with cancer biology. For example, oncogenes are positive regulators of tumorigenesis, while tumor suppressor genes are negative regulators of tumorigenesis. (Marshall, Cell, 64: 313-326 (1991); Weinberg, Science, 254: 1138-1146 (1991)).

[0009] Accordingly, it is an object of the invention to provide polynucleotide and polypeptide sequences involved in cancer and, in particular, in oncogenesis.

[0010] Immunotherapy, or the use of antibodies for therapeutic purposes has been used in recent years to treat cancer. Passive immunotherapy involves the use of monoclonal antibodies in cancer treatments. See for example, Cancer: Principles and Practice of Oncology, 6^{th} Edition (2001) Chapt. 20 pp. 495-508. Inherent therapeutic biological activity of these antibodies include direct inhibition of tumor cell growth or survival, and the ability to recruit the natural cell killing activity of the body's immune system. These agents are administered alone or in conjunction with radiation or chemotherapeutic agents. Rituxan® and Herceptin®, approved for treatment of lymphoma and breast cancer, respectively, are two examples of such therapeutics. Alternatively, antibodies are used to make antibody conjugates where the antibody is linked to a toxic agent and directs that agent to the tumor by specifically binding to the tumor. Mylotarg® is an example of an approved antibody conjugate used for the treatment of leukemia.

[0011] Accordingly, it is another object of this invention to provide antigens (cancer-associated polypeptides) associated with a variety of cancers as targets for diagnostic and/or therapeutic antibodies. These antigens are also useful for drug discovery (e.g., small molecules) and for further characterization of cellular regulation, growth, and differentiation.

### SUMMARY OF THE INVENTION

[0012] In accordance with the objects outlined above, the present invention provides methods for screening for compositions that modulate cancer, especially lymphoma and leukemia. The present invention also provides methods for screening for compositions which modulate carcinomas, especially mammary adenocarcinomas. Also provided herein are methods of inhibiting proliferation of a cell, preferably a lymphoma cell or a breast cancer cell. Methods of treatment of cancer, including diagnosis, are also provided herein.

[0013] In one aspect, a method of screening drug candidates comprises providing a cell that expresses a cancer-associated (CA) gene or fragments thereof. Preferred embodiments of CA genes are genes that are differentially expressed in cancer cells, preferably lymphatic, breast, prostate or epithelial cells, compared to other cells. Preferred embodiments of CA genes used in the methods herein include, but are not limited to the nucleic acids selected from Tables 1-49 (human genomic sequences of SEQ ID NOS: 4, 20, 26, 36, 44, 54, 68, 74, 91, 105, 115, 149, 159, 165, 189, 203, 217, 229, 239, 249, 257, 267, 273, 281, 288, 296, 306, 314, 326, 336, 348, 366, 377, 383, 386, 389, 399, 409, 417, 431, 445, 459, 472, 482, and 498, and sequences of SEQ ID NOS: 5, 7, 9, 11, 13, 21, 27, 29, 37, 39, 45, 47, 49, 55, 57, 59, 61, 63, 69, 75, 77, 79, 81, 92, 94, 96, 98, 100, 106, 108, 110, 116, 118, 120, 122, 124, 126, 128, 130, 132, 134, 136, 138, 140, 150, 152, 160, 166, 168, 170, 172, 174, 176, 178, 180, 190, 192, 194, 204, 206, 208, 210, 212, 218, 220, 222, 224, 230, 232, 234, 240, 242, 244, 250, 258, 260, 268, 274, 282, 284, 286, 289, 297, 307, 315, 317, 319, 321, 327, 329, 337, 339, 349, 351, 367, 369, 378, 384, 387, 390, 392, 394, 400, 402, 404, 410, 412, 418, 420, 422, 424, 426, 432, 434, 436, 438, 446, 448, 450, 452, 454, 460, 462, 464, 473, 475, 477, 483, 485, 487, 489, 491, 499, 501, 503, and 505 corresponding to the human mRNAs generated therefrom). The methods further include adding a drug candidate to the cell and determining the effect of the drug candidate on the expression of the CA gene.

[0014] In one embodiment, the method of screening drug candidates includes comparing the level of expression in the absence of the drug candidate to the level of expression in the presence of the drug candidate.

[0015] Also provided herein is a method of screening for a bioactive agent capable of binding to a CA protein (CAP), the method comprising combining the CAP and a candidate bioactive agent, and determining the binding of the candidate agent to the CAP.

[0016] Further provided herein is a method for screening for a bioactive agent capable of modulating the activity of a CAP. In one embodiment, the method comprises combining the CAP and a candidate bioactive agent, and determining the effect of the candidate agent on the bioactivity of the CAP.

[0017] Also provided is a method of evaluating the effect of a candidate cancer drug comprising administering the drug to a patient and removing a cell sample from the patient. The expression profile of the cell is then determined. This method may further comprise comparing the expression profile of the patient to an expression profile of a healthy individual.

[0018] In a further aspect, a method for inhibiting the activity of a CA protein is provided. In one embodiment, the method comprises administering to a patient an inhibitor of a CA protein preferably selected from the group consisting of the sequences outlined in Tables 1-49 (SEQ ID NOS: 6, 8, 10, 12, 14, 22, 28, 30, 38, 40, 46, 48, 50, 56, 58, 60, 62, 64, 70, 76, 78, 80, 82, 93, 95, 97, 99, 101, 107, 109, 111, 117, 119, 121, 123, 125, 127, 129, 131, 133, 135, 137, 139, 141, 151, 153, 161, 167, 169, 171, 173, 175, 177, 179, 181, 191, 193, 195, 205, 207, 209, 211, 213, 219, 221, 223, 225, 231, 233, 235, 241, 243, 245, 251, 259, 261, 269, 275, 283, 285, 287, 290, 298, 308, 316, 318, 320, 322, 328, 330, 338, 340, 350, 352, 368, 370, 379, 385, 388, 391, 393, 395, 401, 403, 405, 411, 413, 419, 421, 423, 425, 427, 433, 435, 437, 439, 447, 449, 451, 453, 455, 461, 463, 465, 474, 476, 478, 484, 486, 488, 490, 492, 500, 502, 504, and 506).

[0019] A method of neutralizing the effect of a CA protein, preferably a protein encoded by a nucleic acid selected from the group of sequences outlined in Tables 1-49 (human genomic sequences of SEQ ID NOS: 4, 20, 26, 36, 44, 54, 68, 74, 91, 105, 115, 149, 159, 165, 189, 203, 217, 229, 239, 249, 257, 267, 273, 281, 288, 296, 306, 314, 326, 336, 348, 366, 377, 383, 386, 389, 399, 409, 417, 431, 445, 459, 472, 482, and 498, and sequences of SEQ ID NOS: 5, 7, 9, 11, 13, 21, 27, 29, 37, 39, 45, 47, 49, 55, 57, 59, 61, 63, 69, 75, 77, 79, 81, 92, 94, 96, 98, 100, 106, 108, 110, 116, 118, 120, 122, 124, 126, 128, 130, 132, 134, 136, 138, 140, 150, 152, 160, 166, 168, 170, 172, 174, 176, 178, 180, 190, 192, 194, 204, 206, 208, 210, 212, 218, 220, 222, 224, 230, 232, 234, 240, 242, 244, 250, 258, 260, 268, 274, 282, 284, 286, 289, 297, 307, 315, 317, 319, 321, 327, 329, 337, 339, 349, 351, 367, 369, 378, 384, 387, 390, 392, 394, 400, 402, 404, 410, 412, 418, 420, 422, 424, 426, 432, 434, 436, 438, 446, 448, 450, 452, 454, 460, 462, 464, 473, 475, 477, 483, 485, 487, 489, 491, 499, 501, 503, and 505 corresponding to the human mRNAs generated therefrom), is also provided. Preferably, the method comprises contacting an agent specific for said protein with said protein in an amount sufficient to effect neutralization.

[0020] Moreover, provided herein is a biochip comprising a nucleic acid segment which encodes a CA protein, preferably selected from the sequences outlined in Tables 1-49 (SEQ ID NOS: 5, 7, 9, 11, 13, 21, 27, 29, 37, 39, 45, 47, 49, 55, 57, 59, 61, 63, 69, 75, 77, 79, 81, 92, 94, 96, 98, 100, 106, 108, 110, 116, 118, 120, 122, 124, 126, 128, 130, 132, 134, 136, 138, 140, 150, 152, 160, 166, 168, 170, 172, 174, 176, 178, 180, 190, 192, 194, 204, 206, 208, 210, 212, 218, 220, 222, 224, 230, 232, 234, 240, 242, 244, 250, 258, 260, 268, 274, 282, 284, 286, 289, 297, 307, 315, 317, 319, 321, 327, 329, 337, 339, 349, 351, 367, 369, 378, 384, 387, 390, 392, 394, 400, 402, 404, 410, 412, 418, 420, 422, 424, 426, 432, 434, 436, 438, 446, 448, 450, 452, 454, 460, 462, 464, 473, 475, 477, 483, 485, 487, 489, 491, 499, 501, 503, and 505).

[0021] Also provided herein is a method for diagnosing or determining the propensity to cancers, especially lymphoma or leukemia or carcinoma by sequencing at least one carcinoma or lymphoma gene of an individual. In yet another aspect of the invention, a method is provided for determining cancer including lymphoma and leukemia gene copy numbers in an individual.

[0022] The invention provides an isolated nucleic acid comprising at least 10, 12, 15, 20 or 30 contiguous nucleotides of a sequence selected from the group consisting of the polynucleotide sequences SEQ ID NOS: 5, 7, 9, 11, 13, 21, 27, 29, 37, 39, 45, 47, 49, 55, 57, 59, 61, 63, 69, 75, 77, 79, 81, 92, 94, 96, 98, 100, 106, 108, 110, 116, 118, 120, 122, 124, 126, 128, 130, 132, 134, 136, 138, 140, 150, 152, 160, 166, 168, 170, 172, 174, 176, 178, 180, 190, 192, 194, 204, 206, 208, 210, 212, 218, 220, 222, 224, 230, 232, 234, 240, 242, 244, 250, 258, 260, 268, 274, 282, 284, 286, 289, 297, 307, 315, 317, 319, 321, 327, 329, 337, 339, 349, 351, 367, 369, 378, 384, 387, 390, 392, 394, 400, 402, 404, 410, 412, 418, 420, 422, 424, 426, 432, 434, 436, 438, 446, 448, 450, 452, 454, 460, 462, 464, 473, 475, 477, 483, 485, 487, 489, 491, 499, 501, 503, and 505 shown in Tables 1-49, or its complement, or an expression vector comprising the isolated nucleic acids and host cells comprising them.

[0023] In some embodiments, the polynucleotide, or its complement or a fragment thereof, further comprises a detectable label, is attached to a solid support, is prepared at least in part by chemical synthesis, is an antisense fragment, is single stranded, is double stranded or comprises a microarray.

[0024] The invention provides an isolated polypeptide, encoded within an open reading frame of a CA sequence selected from the group consisting of the polynucleotide sequences of SEQ ID NOS: 4, 20, 26, 36, 44, 54, 68, 74, 91, 105, 115, 149, 159, 165, 189, 203, 217, 229, 239, 249, 257, 267, 273, 281, 288, 296, 306, 314, 326, 336, 348, 366, 377, 383, 386, 389, 399, 409, 417, 431, 445, 459, 472, 482, and 498 shown in Tables 1-49, or its complement. The invention provides an isolated polypeptide, wherein said polypeptide comprises the amino acid sequence encoded by a polynucleotide selected from the group consisting of SEQ ID NOS: 5, 7, 9, 11, 13, 21, 27, 29, 37, 39, 45, 47, 49, 55, 57, 59, 61, 63, 69, 75, 77, 79, 81, 92, 94, 96, 98, 100, 106, 108, 110, 116, 118, 120, 122, 124, 126, 128, 130, 132, 134, 136, 138, 140, 150, 152, 160, 166, 168, 170, 172, 174, 176, 178, 180, 190, 192, 194, 204, 206, 208, 210, 212, 218, 220, 222, 224, 230, 232, 234, 240, 242, 244, 250, 258, 260, 268, 274, 282, 284, 286, 289, 297, 307, 315, 317, 319, 321, 327, 329, 337, 339, 349, 351, 367, 369, 378, 384, 387, 390, 392, 394, 400, 402, 404, 410, 412, 418, 420, 422, 424, 426, 432, 434, 436, 438, 446, 448, 450, 452, 454, 460, 462, 464, 473, 475, 477, 483, 485, 487, 489, 491, 499, 501, 503, and 505 shown in Tables 1-49. The invention provides an isolated polypeptide, wherein said polypeptide comprises the amino acid sequence encoded by a polypeptide selected from the group consisting of SEQ ID NOS: 6, 8, 10, 12, 14, 22, 28, 30, 38, 40, 46, 48, 50, 56, 58, 60, 62, 64, 70, 76, 78, 80, 82, 93, 95, 97, 99, 101, 107, 109, 111, 117, 119, 121, 123, 125, 127, 129, 131, 133, 135, 137, 139, 141, 151, 153, 161, 167, 169, 171, 173, 175, 177, 179, 181, 191, 193, 195, 205, 207, 209, 211, 213, 219, 221, 223, 225, 231, 233, 235, 241, 243, 245, 251, 259, 261, 269, 275, 283, 285, 287, 290, 298, 308, 316, 318, 320, 322, 328, 330, 338, 340, 350, 352, 368, 370, 379, 385, 388, 391, 393, 395, 401, 403, 405, 411, 413, 419, 421, 423, 425, 427, 433, 435, 437, 439, 447, 449, 451, 453, 455, 461, 463, 465, 474, 476, 478, 484, 486, 488, 490, 492, 500, 502, 504, and 506 shown in Tables 1-49.

[0025] The invention further provides an isolated polypeptide, comprising the amino acid sequence of an epitope of the amino acid sequence of a CA polypeptide selected from the group consisting of SEQ ID NOS: 6, 8, 10, 12, 14, 22, 28, 30, 38, 40, 46, 48, 50, 56, 58, 60, 62, 64, 70, 76, 78, 80, 82, 93, 95, 97, 99, 101, 107, 109, 111, 117, 119, 121, 123, 125, 127, 129, 131, 133, 135, 137, 139, 141, 151, 153, 161, 167, 169, 171, 173, 175, 177, 179, 181, 191, 193, 195, 205, 207, 209, 211, 213, 219, 221, 223, 225, 231, 233, 235, 241, 243, 245, 251, 259, 261, 269, 275, 283, 285, 287, 290, 298, 308, 316, 318, 320, 322, 328, 330, 338, 340, 350, 352, 368, 370, 379, 385, 388, 391, 393, 395, 401, 403, 405, 411, 413, 419, 421, 423, 425, 427, 433, 435, 437, 439, 447, 449, 451, 453, 455, 461, 463, 465, 474, 476, 478, 484, 486, 488, 490, 492, 500, 502, 504, and 506 shown in Tables 1-49, wherein the polypeptide or fragment thereof may be attached to a solid support. In one embodiment the invention provides an isolated antibody (monoclonal or polyclonal) or antigen binding fragment thereof, that binds to such a polypeptide. The isolated antibody or antigen binding fragment thereof may be attached to a solid support, or further comprises a detectable label.

[0026] In one embodiment, the invention provides a kit for diagnosing the presence of cancer in a test sample, said kit comprising at least one polynucleotide that selectively hybridizes to a CA polynucleotide sequence shown in Tables 1-49, or its complement. In another embodiment. the invention provides an electronic library comprising a CA polynucleotide, a CA polypeptide, or fragment thereof, shown in Tables 1-49.

[0027] In one embodiment, the invention provides a method of screening for anticancer activity comprising: (a) providing a cell that expresses a cancer associated (CA) gene encoded by a nucleic acid sequence selected from the group consisting of the CA sequences shown in Tables 1-49, or fragment thereof, (b) contacting a tissue sample derived from a cancer cell with an anticancer drug candidate; (c) monitoring an effect of the anticancer drug candidate on an expression of the CA polynucleotide in the tissue sample, and optionally (d) comparing the level of expression in the absence of said drug candidate to the level of expression in the presence of the drug candidate.

[0028] In one embodiment, the invention provides a method for detecting cancer associated with expression of a polypeptide in a test cell sample, comprising the steps of: (i) detecting a level of expression of at least one polypeptide selected from the group consisting of SEQ ID NOS: 6, 8, 10, 12, 14, 22, 28, 30, 38, 40, 46, 48, 50, 56, 58, 60, 62, 64, 70, 76, 78, 80, 82, 93, 95, 97, 99, 101, 107, 109, 111, 117, 119, 121, 123, 125, 127, 129, 131, 133, 135, 137, 139, 141, 151, 153, 161, 167, 169, 171, 173, 175, 177, 179, 181, 191, 193, 195, 205, 207, 209, 211, 213, 219, 221, 223, 225, 231, 233, 235, 241, 243, 245, 251, 259, 261, 269, 275, 283, 285, 287, 290, 298, 308, 316, 318, 320, 322, 328, 330, 338, 340, 350, 352, 368, 370, 379, 385, 388, 391, 393, 395, 401, 403, 405, 411, 413, 419, 421, 423, 425, 427, 433, 435, 437, 439, 447, 449, 451, 453, 455, 461, 463, 465, 474, 476, 478, 484, 486, 488, 490, 492, 500, 502, 504, and 506 shown in Tables 1-49, or a fragment thereof; and (ii) comparing the level of expression of the polypeptide in the test sample with a level of expression of polypeptide in a normal cell sample, wherein an altered level of expression of the polypeptide in the test cell sample relative to the level of polypeptide expression in the normal cell sample is indicative of the presence of cancer in the test cell sample.

[0029] In another embodiment, the invention provides a method for detecting cancer associated with expression of a polypeptide in a test cell sample, comprising the steps of: (i) detecting a level of activity of at least one polypeptide selected from the group consisting of SEQ ID NOS: 6, 8, 10, 12, 14, 22, 28, 30, 38, 40, 46, 48, 50, 56, 58, 60, 62, 64, 70, 76, 78, 80, 82, 93, 95, 97, 99, 101, 107, 109, 111, 117, 119, 121, 123, 125, 127, 129, 131, 133, 135, 137, 139, 141, 151, 153, 161, 167, 169, 171, 173, 175, 177, 179, 181, 191, 193, 195, 205, 207, 209, 211, 213, 219, 221, 223, 225, 231, 233, 235, 241, 243, 245, 251, 259, 261, 269, 275, 283, 285, 287, 290, 298, 308, 316, 318, 320, 322, 328, 330, 338, 340, 350, 352, 368, 370, 379, 385, 388, 391, 393, 395, 401, 403, 405, 411, 413, 419, 421, 423, 425, 427, 433, 435, 437, 439, 447, 449, 451, 453, 455, 461, 463, 465, 474, 476, 478, 484, 486, 488, 490, 492, 500, 502, 504, and 506 shown in Tables 1-49, or a fragment thereof, wherein said activity corresponds to at least one activity for the polypeptide listed in Tables 1-49; and (ii) comparing the level of activity of the polypeptide in the test sample with a level of activity of polypeptide in a normal cell sample, wherein an altered level of activity of the polypeptide in the test cell sample relative to the level of polypeptide activity in the normal cell sample is indicative of the presence of cancer in the test cell sample.

[0030] In another embodiment, the invention provides a method for detecting cancer associated with the presence of an antibody in a test serum sample, comprising the steps of: (i) detecting a level of an antibody against an antigenic polypeptide selected from the group consisting of SEQ ID NOS: 6, 8, 10, 12, 14, 22, 28, 30, 38, 40, 46, 48, 50, 56, 58, 60, 62, 64, 70, 76, 78, 80, 82, 93, 95, 97, 99, 101, 107, 109, 111, 117, 119, 121, 123, 125, 127, 129, 131, 133, 135, 137, 139, 141, 151, 153, 161, 167, 169, 171, 173, 175, 177, 179, 181, 191, 193, 195, 205, 207, 209, 211, 213, 219, 221, 223, 225, 231, 233, 235, 241, 243, 245, 251, 259, 261, 269, 275, 283, 285, 287, 290, 298, 308, 316, 318, 320, 322, 328, 330, 338, 340, 350, 352, 368, 370, 379, 385, 388, 391, 393, 395, 401, 403, 405, 411, 413, 419, 421, 423, 425, 427, 433, 435, 437, 439, 447, 449, 451, 453, 455, 461, 463, 465, 474, 476, 478, 484, 486, 488, 490, 492, 500, 502, 504, and 506 shown in Tables 1-49, or antigenic fragment thereof; and (ii) comparing said level of said antibody in the test sample with a level of said antibody in the control sample, wherein an altered level of antibody in said test sample relative to the level of antibody in the control sample is indicative of the presence of cancer in the test serum sample.

[0031] The invention provides a method for screening for a bioactive agent capable of modulating the activity of a CA protein (CAP), wherein said CAP is encoded by a nucleic acid comprising a nucleic acid sequence selected from the group consisting of the polynucleotide sequences SEQ ID NOS: 5, 7, 9, 11, 13, 21, 27, 29, 37, 39, 45, 47, 49, 55, 57, 59, 61, 63, 69, 75, 77, 79, 81, 92, 94, 96, 98, 100, 106, 108, 110, 116, 118, 120, 122, 124, 126, 128, 130, 132, 134, 136, 138, 140, 150, 152, 160, 166, 168, 170, 172, 174, 176, 178, 180, 190, 192, 194, 204, 206, 208, 210, 212, 218, 220, 222, 224, 230, 232, 234, 240, 242, 244, 250, 258, 260, 268, 274, 282, 284, 286, 289, 297, 307, 315, 317, 319, 321, 327, 329, 337, 339, 349, 351, 367, 369, 378, 384, 387, 390, 392, 394, 400, 402, 404, 410, 412, 418, 420, 422, 424, 426, 432, 434, 436, 438, 446, 448, 450, 452, 454, 460, 462, 464, 473, 475, 477, 483, 485, 487, 489, 491, 499, 501, 503, and 505 shown in Tables 1-49, said method comprising: a) combining said CAP and a candidate bioactive agent; and b) determining the effect of the candidate agent on the bioactivity of said CAP. According to the method the bioactive agent: affects the expression of the CA protein (CAP); affects the activity of the CA protein (CAP), wherein such activity is selected from the activities listed in Tables 1-49.

[0032] In one embodiment, the invention provides a method for diagnosing cancer comprising: a) determining the expression of one or more genes comprising a nucleic acid sequence selected from the group consisting of the human genomic and mRNA sequences outlined in Tables 1-49, in a first tissue type of a first individual; and b) comparing said expression of said gene(s) from a second normal tissue type from said first individual or a second unaffected individual; wherein a difference in said expression indicates that the first individual has cancer.

[0033] In another embodiment the invention provides a method for treating cancers comprising administering to a patient a bioactive agent modulating the activity of a CA protein (CAP), wherein said CAP is encoded by a nucleic acid comprising a nucleic acid sequence selected from the group consisting of the human nucleic acid sequences in Tables 1-49 and further wherein the bioactive agent binds to the CA protein; wherein the CA protein comprises SEQ ID NOS: 6, 8, 10, 12, 14, 22, 28, 30, 38, 40, 46, 48, 50, 56, 58, 60, 62, 64, 70, 76, 78, 80, 82, 93, 95, 97, 99, 101, 107, 109, 111, 117, 119, 121, 123, 125, 127, 129, 131, 133, 135, 137, 139, 141, 151, 153, 161, 167, 169, 171, 173, 175, 177, 179, 181, 191, 193, 195, 205, 207, 209, 211, 213, 219, 221, 223, 225, 231, 233, 235, 241, 243, 245, 251, 259, 261, 269, 275, 283, 285, 287, 290, 298, 308, 316, 318, 320, 322, 328, 330, 338, 340, 350, 352, 368, 370, 379, 385, 388, 391, 393, 395, 401, 403, 405, 411, 413, 419, 421, 423, 425, 427, 433, 435, 437, 439, 447, 449, 451, 453, 455, 461, 463, 465, 474, 476, 478, 484, 486, 488, 490, 492, 500, 502, 504, and 506 shown in Tables 1-49 and has an activity selected from the group consisting of: G-protein coupled receptor, nucleotide binding, nucleic acid binding, calcium binding protein, apoptosis, cell cycle regulator, chromatin protein. transcription factor, transport protein, signal transduction, nuclear receptor, growth factor, protein kinase, protein phosphorylase, peptidase, electron transport, thioredoxin, semaphorin, signalling, and motility as shown in Tables 1-49.

[0034] The invention also provides a method for detecting a presence or an absence of cancer cells in an individual, the method comprising: contacting cells from the individual with the antibody according to the invention; and detecting a complex of a CAP from the cancer cells and the antibody, wherein detection of the complex correlates with the presence of cancer cells in the individual. In one embodiment the invention provides a method for inhibiting growth of cancer cells in an individual, the method comprising: administering to the individual an effective amount of a pharmaceutical composition according to the invention. In another embodiment the invention provides a method for delivering a therapeutic agent to cancer cells in an individual, the method comprising: administering to the individual an effective amount of a pharmaceutical composition according to according to the invention.

[0035] Novel sequences associated with cancer are also provided herein. Other aspects of the invention will become apparent to the skilled artisan by the following description of the invention.

### BRIEF DESCRIPTION OF THE FIGURES

[0036] FIG. 1 depicts PCR amplification of host-provirus junction fragments.

[0037] FIG. 2 shows an example of average threshold cycle (C_{T}) values for a housekeeper gene and target gene.

[0038] FIG. 3 shows an example of the calculated difference (ΔΔC_{T}) between the C_{T} values of target and housekeeper genes (ΔC_{T}) for various samples.

[0039] FIG. 4 shows the ΔΔC_{T} and comparative expression level for each sample from FIG. 3.

### DETAILED DESCRIPTION OF PREFERRED EMBODIMENTS

[0040] The present invention is directed to a number of sequences associated with cancers, especially lymphoma, breast cancer or prostate cancer. The relatively tight linkage between clonally-integrated proviruses and protooncogenes forms “provirus tagging”, in which slow-transforming retroviruses that act by an insertion mutation mechanism are used to isolate protooncogenes. In some models, uninfected animals have low cancer rates, and infected animals have high cancer rates. It is known that many of the retroviruses involved do not carry transduced host protooncogenes or pathogenic trans-acting viral genes, and thus the cancer incidence must therefore be a direct consequence of proviral integration effects into host protooncogenes. Since proviral integration is random, rare integrants will “activate” host protooncogenes that provide a selective growth advantage, and these rare events result in new proviruses at clonal stoichiometries in tumors. In contrast to mutations caused by chemicals, radiation, or spontaneous errors, protooncogene insertion mutations can be easily located by virtue of the fact that a convenient-sized genetic marker of known sequence (the provirus) is present at the site of mutation. Host sequences that flank clonally integrated proviruses can be cloned using a variety of strategies. Once these sequences are in hand, the tagged protooncogenes can be subsequently identified. The presence of provirus at the same locus in two or more independent tumors is prima facie evidence that a protooncogene is present at or very near the provirus integration sites. This is because the genome is too large for random integrations to result in observable clustering. Any clustering that is detected is unequivocal evidence for biological selection (i.e. the tumor phenotype). Moreover, the pattern of proviral integrants (including orientations) provides compelling positional information that makes localization of the target gene at each cluster relatively simple. The three mammalian retroviruses that are known to cause cancer by an insertion mutation mechanism are FeLV (leukemia/lymphoma in cats), MLV (leukemia/lymphoma in mice and rats), and MMTV (mammary cancer in mice).

[0041] Thus, the use of oncogenic retroviruses, whose sequences insert into the genome of the host organism resulting in cancer, allows the identification of host sequences involved in cancer. These sequences may then be used in a number of different ways, including diagnosis, prognosis, screening for modulators (including both agonists and antagonists), antibody generation (for immunotherapy and imaging), etc. However, as will be appreciated by those in the art, oncogenes that are identified in one type of cancer such as lymphoma or leukemia have a strong likelihood of being involved in other types of cancers as well. Thus, while the sequences outlined herein are initially identified as correlated with lymphoma, they can also be found in other types of cancers as well, outlined below.

Definitions

[0042] Accordingly, the present invention provides nucleic acid and protein sequences that are associated with cancer, herein termed “cancer associated” or “CA” sequences. In one embodiment, the present invention provides nucleic acid and protein sequences that are associated with cancers that originate in lymphatic tissue, herein termed “lymphoma associated,” “leukemia associated” or “LA” sequences. In another embodiment, the present invention provides nucleic acid and protein sequences that are associated with carcinomas which originate in breast tissue, herein termed “breast cancer associated” or “BC” sequences.

[0043] Suitable cancers that can be diagnosed or screened for using the methods of the present invention include cancers classified by site or by histological type. Cancers classified by site include cancer of the oral cavity and pharynx (lip, tongue, salivary gland, floor of mouth, gum and other mouth, nasopharynx, tonsil, oropharynx, hypopharynx, other oral/pharynx); cancers of the digestive system (esophagus; stomach; small intestine; colon and rectum; anus, anal canal, and anorectum; liver; intrahepatic bile duct; gallbladder; other biliary; pancreas; retroperitoneum; peritoneum, omentum, and mesentery; other digestive); cancers of the respiratory system (nasal cavity, middle ear, and sinuses; larynx; lung and bronchus; pleura; trachea, mediastinum, and other respiratory); cancers of the mesothelioma; bones and joints; and soft tissue, including heart; skin cancers, including melanomas and other non-epithelial skin cancers; Kaposi's sarcoma and breast cancer; cancer of the female genital system (cervix uteri; corpus uteri; uterus, nos; ovary; vagina; vulva; and other female genital); cancers of the male genital system (prostate gland; testis; penis; and other male genital); cancers of the urinary system (urinary bladder; kidney and renal pelvis; ureter; and other urinary); cancers of the eye and orbit; cancers of the brain and nervous system (brain; and other nervous system); cancers of the endocrine system (thyroid gland and other endocrine, including thymus); lymphomas (Hodgkin's disease and non-Hodgkin's lymphoma), multiple myeloma, and leukemias (lymphocytic leukemia; myeloid leukemia; monocytic leukemia; and other leukemias).

[0044] Other cancers, classified by histological type, that may be associated with the sequences of the invention include, but are not limited to, Neoplasm, malignant; Carcinoma, NOS; Carcinoma, undifferentiated, NOS; Giant and spindle cell carcinoma; Small cell carcinoma, NOS; Papillary carcinoma, NOS; Squamous cell carcinoma, NOS; Lymphoepithelial carcinoma; Basal cell carcinoma, NOS; Pilomatrix carcinoma; Transitional cell carcinoma, NOS; Papillary transitional cell carcinoma; Adenocarcinoma, NOS; Gastrinoma, malignant; Cholangiocarcinoma; Hepatocellular carcinoma, NOS; Combined hepatocellular carcinoma and cholangiocarcinoma; Trabecular adenocarcinoma; Adenoid cystic carcinoma; Adenocarcinoma in adenomatous polyp; Adenocarcinoma, familial polyposis coli; Solid carcinoma, NOS; Carcinoid tumor, malignant; Bronchiolo-alveolar adenocarcinoma; Papillary adenocarcinoma, NOS; Chromophobe carcinoma; Acidophil carcinoma; Oxyphilic adenocarcinoma; Basophil carcinoma; Clear cell adenocarcinoma, NOS; Granular cell carcinoma; Follicular adenocarcinoma, NOS; Papillary and follicular adenocarcinoma; Nonencapsulating sclerosing carcinoma; Adrenal cortical carcinoma; Endometroid carcinoma; Skin appendage carcinoma; Apocrine adenocarcinoma; Sebaceous adenocarcinoma; Ceruminous adenocarcinoma; Mucoepidermoid carcinoma; Cystadenocarcinoma, NOS; Papillary cystadenocarcinoma, NOS; Papillary serous cystadenocarcinoma; Mucinous cystadenocarcinoma, NOS; Mucinous adenocarcinoma; Signet ring cell carcinoma; Infiltrating duct carcinoma; Medullary carcinoma, NOS; Lobular carcinoma; Inflammatory carcinoma; Paget's disease, mammary; Acinar cell carcinoma; Adenosquamous carcinoma; Adenocarcinoma w/squamous metaplasia; Thymoma, malignant; Ovarian stromal tumor, malignant; Thecoma, malignant; Granulosa cell tumor, malignant; Androblastoma, malignant; Sertoli cell carcinoma; Leydig cell tumor, malignant; Lipid cell tumor, malignant; Paraganglioma, malignant; Extra-mammary paraganglioma, malignant; Pheochromocytoma; Glomangiosarcoma; Malignant melanoma, NOS; Amelanotic melanoma; Superficial spreading melanoma; Malig melanoma in giant pigmented nevus; Epithelioid cell melanoma; Blue nevus, malignant; Sarcoma, NOS; Fibrosarcoma, NOS; Fibrous histiocytoma, malignant; Myxosarcoma; Liposarcoma, NOS; Leiomyosarcoma, NOS; Rhabdomyosarcoma, NOS; Embryonal rhabdomyosarcoma; Alveolar rhabdomyosarcoma; Stromal sarcoma, NOS; Mixed tumor, malignant, NOS; Mullerian mixed tumor; Nephroblastoma; Hepatoblastoma; Carcinosarcoma, NOS; Mesenchymoma, malignant; Brenner tumor, malignant; Phyllodes tumor, malignant; Synovial sarcoma, NOS; Mesothelioma, malignant; Dysgerminoma; Embryonal carcinoma, NOS; Teratoma, malignant, NOS; Struma ovarii, malignant; Choriocarcinoma; Mesonephroma, malignant; Hemangiosarcoma; Hemangioendothelioma, malignant; Kaposi's sarcoma; Hemangiopericytoma, malignant; Lymphangiosarcoma; Osteosarcoma, NOS; Juxtacortical osteosarcoma; Chondrosarcoma, NOS; Chondroblastoma, malignant; Mesenchymal chondrosarcoma; Giant cell tumor of bone; Ewing's sarcoma; Odontogenic tumor, malignant; Ameloblastic odontosarcoma; Ameloblastoma, malignant; Ameloblastic fibrosarcoma; Pinealoma, malignant; Chordoma; Glioma, malignant; Ependymoma, NOS; Astrocytoma, NOS; Protoplasmic astrocytoma; Fibrillary astrocytoma; Astroblastoma; Glioblastoma, NOS; Oligodendroglioma, NOS; Oligodendroblastoma; Primitive neuroectodermal; Cerebellar sarcoma, NOS; Ganglioneuroblastoma; Neuroblastoma, NOS; Retinoblastoma, NOS; Olfactory neurogenic tumor; Meningioma, malignant; Neurofibrosarcoma; Neurilemmoma, malignant; Granular cell tumor, malignant; Malignant lymphoma, NOS; Hodgkin's disease, NOS; Hodgkin's; paragranuloma, NOS; Malignant lymphoma, small lymphocytic; Malignant lymphoma, large cell, diffuse; Malignant lymphoma, follicular, NOS; Mycosis fungoides; Other specified non-Hodgkin's lymphomas; Malignant histiocytosis; Multiple myeloma; Mast cell sarcoma; Immunoproliferative small intestinal disease; Leukemia, NOS; Lymphoid leukemia, NOS; Plasma cell leukemia; Erythroleukemia; Lymphosarcoma cell leukemia; Myeloid leukemia, NOS; Basophilic leukemia; Eosinophilic leukemia; Monocytic leukemia, NOS; Mast cell leukemia; Megakaryoblastic leukemia; Myeloid sarcoma; and Hairy cell leukemia.

[0045] In addition, the CA genes may be involved in other diseases such as, but not limited to, diseases associated with aging or neurodegeneration.

[0046] “Association” in this context means that the nucleotide or protein sequences are either differentially expressed, activated, inactivated or altered in cancers as compared to normal tissue. As outlined below, CA sequences include those that are up-regulated (i.e. expressed at a higher level), as well as those that are down-regulated (i.e. expressed at a lower level), in cancers. CA sequences also include sequences that have been altered (i.e., truncated sequences or sequences with substitutions, deletions or insertions, including point mutations) and show either the same expression profile or an altered profile. In a preferred embodiment, the CA sequences are from humans; however, as will be appreciated by those in the art, CA sequences from other organisms may be useful in animal models of disease and drug evaluation; thus, other CA sequences are provided, from vertebrates, including mammals, including rodents (rats, mice, hamsters, guinea pigs, etc.), primates, and farm animals (including sheep, goats, pigs, cows, horses, etc). In some cases, prokaryotic CA sequences may be useful. CA sequences from other organisms may be obtained using the techniques outlined below.

[0047] CA sequences include both nucleic acid and amino acid sequences. In a preferred embodiment, the CA sequences are recombinant nucleic acids. By the term “recombinant nucleic acid” herein is meant nucleic acid, originally formed in vitro, in general, by the manipulation of nucleic acid by polymerases and endonucleases, in a form not normally found in nature. Thus a recombinant nucleic acid is also an isolated nucleic acid, in a linear form, or cloned in a vector formed in vitro by ligating DNA molecules that are not normally joined, are both considered recombinant for the purposes of this invention. It is understood that once a recombinant nucleic acid is made and reintroduced into a host cell or organism, it will replicate using the in vivo cellular machinery of the host cell rather than in vitro manipulations; however, such nucleic acids, once produced recombinantly, although subsequently replicated in vivo, are still considered recombinant or isolated for the purposes of the invention. As used herein a “polynucleotide” or “nucleic acid” is a polymeric form of nucleotides of any length, either ribonucleotides or deoxyribonucleotides. This term refers only to the primary structure of the molecule. Thus, this term includes double- and single-stranded DNA and RNA. It also includes known types of modifications, for example, labels which are known in the art, methylation, “caps”, substitution of one or more of the naturally occurring nucleotides with an analog, internucleotide modifications such as, for example, those with uncharged linkages (e.g., phosphorothioates, phosphorodithioates, etc.), those containing pendant moieties, such as, for example proteins (including e.g., nucleases, toxins, antibodies, signal peptides, poly-L-lysine, etc.), those with intercalators (e.g., acridine, psoralen, etc.), those containing chelators (e.g., metals, radioactive metals, etc.), those containing alkylators, those with modified linkages (e.g., alpha anomeric nucleic acids, etc.), as well as unmodified forms of the polynucleotide.

[0048] As used herein, a polynucleotide “derived from” a designated sequence refers to a polynucleotide sequence which is comprised of a sequence of approximately at least about 6 nucleotides, preferably at least about 8 nucleotides, more preferably at least about 10-12 nucleotides, and even more preferably at least about 15-20 nucleotides corresponding to a region of the designated nucleotide sequence. “Corresponding” means homologous to or complementary to the designated sequence. Preferably, the sequence of the region from which the polynucleotide is derived is homologous to or complementary to a sequence that is unique to a CA gene.

[0049] Similarly, a “recombinant protein” is a protein made using recombinant techniques, i.e. through the expression of a recombinant nucleic acid as depicted above. A recombinant protein is distinguished from naturally occurring protein by at least one or more characteristics. For example, the protein may be isolated or purified away from some or all of the proteins and compounds with which it is normally associated in its wild type host, and thus may be substantially pure. For example, an isolated protein is unaccompanied by at least some of the material with which it is normally associated in its natural state, preferably constituting at least about 0.5%, more preferably at least about 5% by weight of the total protein in a given sample. A substantially pure protein comprises about 50-75% by weight of the total protein, with about 80% being preferred, and about 90% being particularly preferred. The definition includes the production of a CA protein from one organism in a different organism or host cell. Alternatively, the protein may be made at a significantly higher concentration than is normally seen, through the use of an inducible promoter or high expression promoter, such that the protein is made at increased concentration levels. Alternatively, the protein may be in a form not normally found in nature, as in the addition of an epitope tag or amino acid substitutions, insertions and deletions, as discussed below.

[0050] In a preferred embodiment, the CA sequences are nucleic acids. As will be appreciated by those in the art and is more fully outlined below, CA sequences are useful in a variety of applications, including diagnostic applications, which will detect naturally occurring nucleic acids, as well as screening applications; for example, biochips comprising nucleic acid probes to the CA sequences can be generated. In the broadest sense, use of “nucleic acid,” “polynucleotide” or “oligonucleotide” or equivalents herein means at least two nucleotides covalently linked together. In some embodiments, an oligonucleotide is an oligomer of 6, 8, 10, 12, 20, 30 or up to 100 nucleotides. A “polynucleotide” or “oligonucleotide” may comprise DNA, RNA, PNA or a polymer of nucleotides linked by phosphodiester and/or any alternate bonds.

[0051] A nucleic acid of the present invention generally contains phosphodiester bonds, although in some cases, as outlined below (for example, in antisense applications or when a nucleic acid is a candidate drug agent), nucleic acid analogs may have alternate backbones, comprising, for example, phosphoramidate (Beaucage et al., Tetrahedron 49(10):1925 (1993) and references therein; Letsinger, J. Org. Chem. 35:3800 (1970); Sprinzl et al., Eur. J. Biochem. 81:579 (1977); Letsinger et al., Nucl. Acids Res. 14:3487 (1986); Sawai et al, Chem. Lett. 805 (1984), Letsinger et al., J. Am. Chem. Soc. 110:4470 (1988); and Pauwels et al., Chemica Scripta 26:141 91986)), phosphorothioate (Mag et al., Nucleic Acids Res. 19:1437 (1991); and U.S. Pat. No. 5,644,048), phosphorodithioate (Briu et al., J. Am. Chem. Soc. 111:2321 (1989), O-methylphosphoroamidite linkages (see Eckstein, Oligonucleotides and Analogues: A Practical Approach, Oxford University Press), and peptide nucleic acid backbones and linkages (see Egholm, J. Am. Chem. Soc. 114:1895 (1992); Meier et al., Chem. Int. Ed. Engl. 31:1008 (1992); Nielsen, Nature, 365:566 (1993); Carlsson et al., Nature 380:207 (1996), all of which are incorporated by reference). Other analog nucleic acids include those with positive backbones (Denpcy et al., Proc. Natl. Acad. Sci. USA 92:6097 (1995); non-ionic backbones (U.S. Pat. Nos. 5,386,023, 5,637,684, 5,602,240, 5,216,141 and 4,469,863; Kiedrowshi et al., Angew. Chem. Intl. Ed. English 30:423 (1991); Letsinger et al., J. Am. Chem. Soc. 110:4470 (1988); Letsinger et al., Nucleoside & Nucleotide 13:1597 (1994); Chapters 2 and 3, ASC Symposium Series 580, “Carbohydrate Modifications in Antisense Research”, Ed. Y. S. Sanghui and P. Dan Cook; Mesmaeker et al., Bioorganic & Medicinal Chem. Lett. 4:395 (1994); Jeffs et al., J. Biomolecular NMR 34:17 (1994); Tetrahedron Lett. 37:743 (1996)) and non-ribose backbones, including those described in U.S. Pat. Nos. 5,235,033 and 5,034,506, and Chapters 6 and 7, ASC Symposium Series 580, “Carbohydrate Modifications in Antisense Research”, Ed. Y. S. Sanghui and P. Dan Cook. Nucleic acids containing one or more carbocyclic sugars are also included within one definition of nucleic acids (see Jenkins et al., Chem. Soc. Rev. (1995) pp 169-176). Several nucleic acid analogs are described in Rawls, C & E News Jun. 2, 1997 page 35. All of these references are hereby expressly incorporated by reference. These modifications of the ribose-phosphate backbone may be done for a variety of reasons, for example to increase the stability and half-life of such molecules in physiological environments for use in anti-sense applications or as probes on a biochip.

[0052] As will be appreciated by those in the art, all of these nucleic acid analogs may find use in the present invention. In addition, mixtures of naturally occurring nucleic acids and analogs can be made; alternatively, mixtures of different nucleic acid analogs, and mixtures of naturally occurring nucleic acids and analogs may be made.

[0053] The nucleic acids may be single stranded or double stranded, as specified, or contain portions of both double stranded or single stranded sequence. As will be appreciated by those in the art, the depiction of a single strand “Watson” also defines the sequence of the other strand “Crick”; thus the sequences described herein also includes the complement of the sequence. The nucleic acid may be DNA, both genomic and cDNA, RNA, or a hybrid, where the nucleic acid contains any combination of deoxyribo- and ribo-nucleotides, and any combination of bases, including uracil, adenine, thymine, cytosine, guanine, inosine, xanthine, hypoxanthine, isocytosine, isoguanine, etc. As used herein, the term “nucleoside” includes nucleotides and nucleoside and nucleotide analogs, and modified nucleosides such as amino modified nucleosides. In addition, “nucleoside” includes non-naturally occurring analog structures. Thus for example the individual units of a peptide nucleic acid, each containing a base, are referred to herein as a nucleoside.

[0054] As used herein, the term “tag,” “sequence tag” or “primer tag sequence” refers to an oligonucleotide with specific nucleic acid sequence that serves to identify a batch of polynucleotides bearing such tags therein. Polynucleotides from the same biological source are covalently tagged with a specific sequence tag so that in subsequent analysis the polynucleotide can be identified according to its source of origin. The sequence tags also serve as primers for nucleic acid amplification reactions.

[0055] A “microarray” is a linear or two-dimensional array of preferably discrete regions, each having a defined area, formed on the surface of a solid support. The density of the discrete regions on a microarray is determined by the total numbers of target polynucleotides to be detected on the surface of a single solid phase support, preferably at least about 50/cm², more preferably at least about 100/cm², even more preferably at least about 500/cm², and still more preferably at least about 1,000/cm². As used herein, a DNA microarray is an array of oligonucleotide primers placed on a chip or other surfaces used to amplify or clone target polynucleotides. Since the position of each particular group of primers in the array is known, the identities of the target polynucleotides can be determined based on their binding to a particular position in the microarray.

[0056] A “linker” is a synthetic oligodeoxyribonucleotide that contains a restriction site. A linker may be blunt end-ligated onto the ends of DNA fragments to create restriction sites that can be used in the subsequent cloning of the fragment into a vector molecule.

[0057] The term “label” refers to a composition capable of producing a detectable signal indicative of the presence of the target polynucleotide in an assay sample. Suitable labels include radioisotopes, nucleotide chromophores, enzymes, substrates, fluorescent molecules, chemiluminescent moieties, magnetic particles, bioluminescent moieties, and the like. As such, a label is any composition detectable by spectroscopic, photochemical, biochemical, immunochemical, electrical, optical, chemical, or any other appropriate means. The term “label” is used to refer to any chemical group or moiety having a detectable physical property or any compound capable of causing a chemical group or moiety to exhibit a detectable physical property, such as an enzyme that catalyzes conversion of a substrate into a detectable product. The term “label” also encompasses compounds that inhibit the expression of a particular physical property. The label may also be a compound that is a member of a binding pair, the other member of which bears a detectable physical property.

[0058] The term “support” refers to conventional supports such as beads, particles, dipsticks, fibers, filters, membranes, and silane or silicate supports such as glass slides.

[0059] The term “amplify” is used in the broad sense to mean creating an amplification product which may include, for example, additional target molecules, or target-like molecules or molecules complementary to the target molecule, which molecules are created by virtue of the presence of the target molecule in the sample. In the situation where the target is a nucleic acid, an amplification product can be made enzymatically with DNA or RNA polymerases or reverse transcriptases.

[0060] As used herein, a “biological sample” refers to a sample of tissue or fluid isolated from an individual, including but not limited to, for example, blood, plasma, serum, spinal fluid, lymph fluid, skin, respiratory, intestinal and genitourinary tracts, tears, saliva, milk, cells (including but not limited to blood cells), tumors, organs, and also samples of in vitro cell culture constituents.

[0061] The term “biological sources” as used herein refers to the sources from which the target polynucleotides are derived. The source can be of any form of “sample” as described above, including but not limited to, cell, tissue or fluid. “Different biological sources” can refer to different cells/tissues/organs of the same individual, or cells/tissues/organs from different individuals of the same species, or cells/tissues/organs from different species.

Cancer-Associated Sequences

[0062] The CA sequences of the invention were initially identified by infection of mice with a retrovirus such as murine leukemia virus (MLV) resulting in lymphoma. Retroviruses have a genome that is made out of RNA. After a retrovirus infects a host cell, a double stranded DNA copy of the retrovirus genome (a “provirus”) is inserted into the genomic DNA of the host cell. The integrated provirus may affect the expression of host genes at or near the site of integration—a phenomenon known as retroviral insertional mutagenesis. Possible changes in the expression of host cell genes include: (i) increased expression of genes near the site of integration resulting from the proximity of elements in the provirus that act as transcriptional promoters and enhancers, (ii) functional inactivation of a gene caused by the integration of a provirus into the gene itself thus preventing the synthesis of a functional gene product, or (iii) expression of a mutated protein that has a different activity to the normal protein. Typically such a protein would be prematurely truncated and lack a regulatory domain near the C terminus. Such a protein might be constitutively active, or act as a dominant negative inhibitor of the normal protein. For example, retrovirus enhancers, including that of SL3-3, are known to act on genes up to approximately 200 kilobases from the insertion site. Moreover, many of these sequences are also involved in other cancers and disease states. Sequences of mouse genes according to this invention, that are identified in this manner are shown as mDxx-yyy in Tables 1-49.

[0063] A CA sequence can be initially identified by substantial nucleic acid and/or amino acid sequence homology to the CA sequences outlined herein. Such homology can be based upon the overall nucleic acid or amino acid sequence, and is generally determined as outlined below, using either homology programs or hybridization conditions.

[0064] In one embodiment, CA sequences are those that are up-regulated in cancers; that is, the expression of these genes is higher in cancer tissue as compared to normal tissue of the same differentiation stage. “Up-regulation” as used herein means increased expression by about 50%, preferably about 100%, more preferably about 150% to about 200%, with up-regulation from 300% to 1000% being preferred.

[0065] In another embodiment, CA sequences are those that are down-regulated in cancers; that is, the expression of these genes is lower in cancer tissue as compared to normal tissue of the same differentiation stage. “Down-regulation” as used herein means decreased expression by about 50%, preferably about 100%, more preferably about 150% to about 200%, with down-regulation from 300% to 1000% to no expression being preferred.

[0066] In yet another embodiment, CA sequences are those that have altered sequences but show either the same or an altered expression profile as compared to normal lymphoid tissue of the same differentiation stage. “Altered CA sequences” as used herein also refers to sequences that are truncated, contain insertions or contain point mutations.

[0067] CA proteins of the present invention may be classified as secreted proteins, transmembrane proteins or intracellular proteins. In a preferred embodiment the CA protein is an intracellular protein. Intracellular proteins may be found in the cytoplasm and/or in the nucleus. Intracellular proteins are involved in all aspects of cellular function and replication (including, for example, signaling pathways); aberrant expression of such proteins results in unregulated or disregulated cellular processes. For example, many intracellular proteins have enzymatic activity such as protein kinase activity, protein phosphatase activity, protease activity, nucleotide cyclase activity, polymerase activity and the like. Intracellular proteins also serve as docking proteins that are involved in organizing complexes of proteins, or targeting proteins to various subcellular localizations, and are involved in maintaining the structural integrity of organelles.

[0068] An increasingly appreciated concept in characterizing intracellular proteins is the presence in the proteins of one or more motifs for which defined functions have been attributed. In addition to the highly conserved sequences found in the enzymatic domain of proteins, highly conserved sequences have been identified in proteins that are involved in protein-protein interaction. For example, Src-homology-2 (SH2) domains bind tyrosine-phosphorylated targets in a sequence dependent manner. PTB domains, which are distinct from SH2 domains, also bind tyrosine phosphorylated targets. SH3 domains bind to proline-rich targets. In addition, PH domains, tetratricopeptide repeats and WD domains to name only a few, have been shown to mediate protein-protein interactions. Some of these may also be involved in binding to phospholipids or other second messengers. As will be appreciated by one of ordinary skill in the art, these motifs can be identified on the basis of primary sequence; thus, an analysis of the sequence of proteins may provide insight into both the enzymatic potential of the molecule and/or molecules with which the protein may associate.

[0069] In a preferred embodiment, the CA sequences are transmembrane proteins. Transmembrane proteins are molecules that span the phospholipid bilayer of a cell. They may have an intracellular domain, an extracellular domain, or both. The intracellular domains of such proteins may have a number of functions including those already described for intracellular proteins. For example, the intracellular domain may have enzymatic activity and/or may serve as a binding site for additional proteins. Frequently the intracellular domain of transmembrane proteins serves both roles. For example certain receptor tyrosine kinases have both protein kinase activity and SH2 domains. In addition, autophosphorylation of tyrosines on the receptor molecule itself creates binding sites for additional SH2 domain containing proteins.

[0070] Transmembrane proteins may contain from one to many transmembrane domains. For example, receptor tyrosine kinases, certain cytokine receptors, receptor guanylyl cyclases and receptor serine/threonine protein kinases contain a single transmembrane domain. However, various other proteins including channels and adenylyl cyclases contain numerous transmembrane domains. Many important cell surface receptors are classified as “seven transmembrane domain” proteins, as they contain 7 membrane spanning regions. Important transmembrane protein receptors include, but are not limited to insulin receptor, insulin-like growth factor receptor, human growth hormone receptor, glucose transporters, transferrin receptor, epidermal growth factor receptor, low density lipoprotein receptor, leptin receptor, interleukin receptors, e.g. IL-1 receptor, IL-2 receptor, etc. CA proteins may be derived from genes that regulate apoptosis (IL-3, GM-CSF and Bcl-x) or are shown to have a role in the regulation of apoptosis.

[0071] Characteristics of transmembrane domains include approximately 20 consecutive hydrophobic amino acids that may be followed by charged amino acids. Therefore, upon analysis of the amino acid sequence of a particular protein, the localization and number of transmembrane domains within the protein may be predicted.

[0072] The extracellular domains of transmembrane proteins are diverse; however, conserved motifs are found repeatedly among various extracellular domains. Conserved structure and/or functions have been ascribed to different extracellular motifs. For example, cytokine receptors are characterized by a cluster of cysteines and a WSXWS (W=tryptophan, S=serine, X=any amino acid) motif. Immunoglobulin-like domains are highly conserved. Mucin-like domains may be involved in cell adhesion and leucine-rich repeats participate in protein-protein interactions.

[0073] Many extracellular domains are involved in binding to other molecules. In one aspect, extracellular domains are receptors. Factors that bind the receptor domain include circulating ligands, which may be peptides, proteins, or small molecules such as adenosine and the like. For example, growth factors such as EGF, FGF and PDGF are circulating growth factors that bind to their cognate receptors to initiate a variety of cellular responses. Other factors include cytokines, mitogenic factors, neurotrophic factors and the like. Extracellular domains also bind to cell-associated molecules. In this respect, they mediate cell-cell interactions. Cell-associated ligands can be tethered to the cell for example via a glycosylphosphatidylinositol (GPI) anchor, or may themselves be transmembrane proteins. Extracellular domains also associate with the extracellular matrix and contribute to the maintenance of the cell structure.

[0074] CA proteins that are transmembrane are particularly preferred in the present invention as they are good targets for immunotherapeutics, as are described herein. In addition, as outlined below, transmembrane proteins can be also useful in imaging modalities.

[0075] It will also be appreciated by those in the art that a transmembrane protein can be made soluble by removing transmembrane sequences, for example through recombinant methods. Furthermore, transmembrane proteins that have been made soluble can be made to be secreted through recombinant means by adding an appropriate signal sequence.

[0076] In a preferred embodiment, the CA proteins are secreted proteins; the secretion of which can be either constitutive or regulated. These proteins have a signal peptide or signal sequence that targets the molecule to the secretory pathway. Secreted proteins are involved in numerous physiological events; by virtue of their circulating nature, they serve to transmit signals to various other cell types. The secreted protein may function in an autocrine manner (acting on the cell that secreted the factor), a paracrine manner (acting on cells in close proximity to the cell that secreted the factor) or an endocrine manner (acting on cells at a distance). Thus secreted molecules find use in modulating or altering numerous aspects of physiology. CA proteins that are secreted proteins are particularly preferred in the present invention as they serve as good targets for diagnostic markers, for example for blood tests.

CA Sequences and Homologs

[0077] A CA sequence is initially identified by substantial nucleic acid and/or amino acid sequence homology to the CA sequences outlined herein. Such homology can be based upon the overall nucleic acid or amino acid sequence, and is generally determined as outlined below, using either homology programs or hybridization conditions.

[0078] As used herein, a nucleic acid is a “CA nucleic acid” if the overall homology of the nucleic acid sequence to one of the nucleic acids of Tables 1-49 is preferably greater than about 75%, more preferably greater than about 80%, even more preferably greater than about 85% and most preferably greater than 90%. In some embodiments the homology will be as high as about 93 to 95 or 98%. In a preferred embodiment, the sequences that are used to determine sequence identity or similarity are selected from those of the nucleic acids of Tables 1-49. In another embodiment, the sequences are naturally occurring allelic variants of the sequences of the nucleic acids of Tables 1-49. In another embodiment, the sequences are sequence variants as further described herein.

[0079] Homology in this context means sequence similarity or identity, with identity being preferred. A preferred comparison for homology purposes is to compare the sequence containing sequencing errors to the correct sequence. This homology will be determined using standard techniques known in the art, including, but not limited to, the local homology algorithm of Smith & Waterman, Adv. Appl. Math. 2:482 (1981), by the homology alignment algorithm of Needleman & Wunsch, J. Mol. Biol. 48:443 (1970), by the search for similarity method of Pearson & Lipman, PNAS USA 85:2444 (1988), by computerized implementations of these algorithms (GAP, BESTFIT, FASTA, and TFASTA in the Wisconsin Genetics Software Package, Genetics Computer Group, 575 Science Drive, Madison, Wis.), the Best Fit sequence program described by Devereux et al., Nucl. Acid Res. 12:387-395 (1984), preferably using the default settings, or by inspection.

[0080] One example of a useful algorithm is PILEUP. PILEUP creates a multiple sequence alignment from a group of related sequences using progressive, pairwise alignments. It can also plot a tree showing the clustering relationships used to create the alignment. PILEUP uses a simplification of the progressive alignment method of Feng & Doolittle, J. Mol. Evol. 35:351-360 (1987); the method is similar to that described by Higgins & Sharp CABIOS 5:151-153 (1989). Useful PILEUP parameters include a default gap weight of 3.00, a default gap length weight of 0.10, and weighted end gaps.

[0081] Another example of a useful algorithm is the BLAST (Basic Local Alignment Search Tool) algorithm, described in Altschul et al., J. Mol. Biol. 215, 403-410, (1990) and Karlin et al., PNAS USA 90:5873-5787 (1993). A particularly useful BLAST program is the WU-BLAST-2 program which was obtained from Altschul et al., Methods in Enzymology, 266: 460-480 (1996); http://blast.wustl.edu/]. WU-BLAST-2 uses several search parameters, most of which are set to the default values. The adjustable parameters are set with the following values: overlap span=1, overlap fraction=0.125, word threshold (T)=11. The HSP S and HSP S2 parameters are dynamic values and are established by the program itself depending upon the composition of the particular sequence and composition of the particular database against which the sequence of interest is being searched; however, the values may be adjusted to increase sensitivity. A percent amino acid sequence identity value is determined by the number of matching identical residues divided by the total number of residues of the “longer” sequence in the aligned region. The “longer” sequence is the one having the most actual residues in the aligned region (gaps introduced by WU-Blast-2 to maximize the alignment score are ignored).

[0082] Thus, “percent (%) nucleic acid sequence identity” is defined as the percentage of nucleotide residues in a candidate sequence that are identical with the nucleotide residues of the nucleic acids of Tables 1-49. A preferred method utilizes the BLASTN module of WU-BLAST-2 set to the default parameters, with overlap span and overlap fraction set to 1 and 0.125, respectively.

[0083] The alignment may include the introduction of gaps in the sequences to be aligned. In addition, for sequences which contain either more or fewer nucleotides than those of the nucleic acids of Tables 1-49, it is understood that the percentage of homology will be determined based on the number of homologous nucleosides in relation to the total number of nucleosides. Thus homology of sequences shorter than those of the sequences identified herein will be determined using the number of nucleosides in the shorter sequence.

[0084] In another embodiment of the invention, polynucleotide compositions are provided that are capable of hybridizing under moderate to high stringency conditions to a polynucleotide sequence provided herein, or a fragment thereof, or a complementary sequence thereof. Hybridization techniques are well known in the art of molecular biology. For purposes of illustration, suitable moderately stringent conditions for testing the hybridization of a polynucleotide of this invention with other polynucleotides include prewashing in a solution of 5×SSC (“saline sodium citrate”; 9 mM NaCl, 0.9 mM sodium citrate), 0.5% SDS, 1.0 mM EDTA (pH 8.0); hybridizing at 50-60° C., 5×SSC, overnight; followed by washing twice at 65° C. for 20 minutes with each of 2×, 0.5× and 0.2×SSC containing 0.1% SDS. One skilled in the art will understand that the stringency of hybridization can be readily manipulated, such as by altering the salt content of the hybridization solution and/or the temperature at which the hybridization is performed. For example, in another embodiment, suitable highly stringent hybridization conditions include those described above, with the exception that the temperature of hybridization is increased, e.g., to 60-65° C., or 65-70° C. Stringent conditions may also be achieved with the addition of destabilizing agents such as formamide.

[0085] Thus nucleic acids that hybridize under high stringency to the nucleic acids identified in the figures, or their complements, are considered CA sequences. High stringency conditions are known in the art; see for example Maniatis et al., Molecular Cloning: A Laboratory Manual, 2d Edition, 1989, and Short Protocols in Molecular Biology, ed. Ausubel, et al., both of which are hereby incorporated by reference. Stringent conditions are sequence-dependent and will be different in different circumstances. Longer sequences hybridize specifically at higher temperatures. An extensive guide to the hybridization of nucleic acids is found in Tijssen, Techniques in Biochemistry and Molecular Biology—Hybridization with Nucleic Acid Probes, “Overview of principles of hybridization and the strategy of nucleic acid assays” (1993). Generally, stringent conditions are selected to be about 5-10° C. lower than the thermal melting point (Tₘ) for the specific sequence at a defined ionic strength pH. The Tₘ is the temperature (under defined ionic strength, pH and nucleic acid concentration) at which 50% of the probes complementary to the target hybridize to the target sequence at equilibrium (as the target sequences are present in excess, at Tₘ, 50% of the probes are occupied at equilibrium). Stringent conditions will be those in which the salt concentration is less than about 1.0 M sodium ion, typically about 0.01 to 1.0 M sodium ion concentration (or other salts) at pH 7.0 to 8.3 and the temperature is at least about 30° C. for short probes (e.g. 10 to 50 nucleotides) and at least about 60° C. for longer probes (e.g. greater than 50 nucleotides). In another embodiment, less stringent hybridization conditions are used; for example, moderate or low stringency conditions may be used, as are known in the art; see Maniatis and Ausubel, supra, and Tijssen, supra.

[0086] In addition, the CA nucleic acid sequences of the invention are fragments of larger genes, i.e. they are nucleic acid segments. Alternatively, the CA nucleic acid sequences can serve as indicators of oncogene position, for example, the CA sequence may be an enhancer that activates a protooncogene. “Genes” in this context includes coding regions, non-coding regions, and mixtures of coding and non-coding regions. Accordingly, as will be appreciated by those in the art, using the sequences provided herein, additional sequences of the CA genes can be obtained, using techniques well known in the art for cloning either longer sequences or the full-length sequences; see Maniatis et al., and Ausubel, et al., supra, hereby expressly incorporated by reference. In general, this is done using PCR, for example, kinetic PCR.

Detection of CA Expression

[0087] Once the CA nucleic acid is identified, it can be cloned and, if necessary, its constituent parts recombined to form the entire CA nucleic acid. Once isolated from its natural source, e.g., contained within a plasmid or other vector or excised therefrom as a linear nucleic acid segment, the recombinant CA nucleic acid can be further used as a probe to identify and isolate other CA nucleic acids, for example additional coding regions. It can also be used as a “precursor” nucleic acid to make modified or variant CA nucleic acids and proteins. In a preferred embodiment, once a CA gene is identified its nucleotide sequence is used to design probes specific for the CA gene.

[0088] The CA nucleic acids of the present invention are used in several ways. In a first embodiment, nucleic acid probes hybridizable to CA nucleic acids are made and attached to biochips to be used in screening and diagnostic methods, or for gene therapy and/or antisense applications. Alternatively, the CA nucleic acids that include coding regions of CA proteins can be put into expression vectors for the expression of CA proteins, again either for screening purposes or for administration to a patient.

[0089] Recent developments in DNA microarray technology make it possible to conduct a large scale assay of a plurality of target CA nucleic acid molecules on a single solid phase support. U.S. Pat. No. 5,837,832 (Chee et al.) and related patent applications describe immobilizing an array of oligonucleotide probes for hybridization and detection of specific nucleic acid sequences in a sample. Target polynucleotides of interest isolated from a tissue of interest are hybridized to the DNA chip and the specific sequences detected based on the target polynucleotides' preference and degree of hybridization at discrete probe locations. One important use of arrays is in the analysis of differential gene expression, where the profile of expression of genes in different cells, often a cell of interest and a control cell, is compared and any differences in gene expression among the respective cells are identified. Such information is useful for the identification of the types of genes expressed in a particular cell or tissue type and diagnosis of cancer conditions based on the expression profile.

[0090] Typically, RNA from the sample of interest is subjected to reverse transcription to obtain labeled cDNA. See U.S. Pat. No. 6,410,229 (Lockhart et al.) The cDNA is then hybridized to oligonucleotides or cDNAs of known sequence arrayed on a chip or other surface in a known order. The location of the oligonucleotide to which the labeled cDNA hybridizes provides sequence information on the cDNA, while the amount of labeled hybridized RNA or cDNA provides an estimate of the relative representation of the RNA or cDNA of interest. See Schena, et al. Science 270:467-470 (1995). For example, use of a cDNA microarray to analyze gene expression patterns in human cancer is described by DeRisi, et al. (Nature Genetics 14:457-460 (1996)).

[0091] In a preferred embodiment, nucleic acid probes corresponding to CA nucleic acids (both the nucleic acid sequences outlined in the figures and/or the complements thereof) are made. Typically, these probes are synthesized based on the disclosed sequences of this invention. The nucleic acid probes attached to the biochip are designed to be substantially complementary to the CA nucleic acids, i.e. the target sequence (either the target sequence of the sample or to other probe sequences, for example in sandwich assays), such that specific hybridization of the target sequence and the probes of the present invention occurs. As outlined below, this complementarity need not be perfect, in that there may be any number of base pair mismatches that will interfere with hybridization between the target sequence and the single stranded nucleic acids of the present invention. It is expected that the overall homology of the genes at the nucleotide level probably will be about 40% or greater, probably about 60% or greater, and even more probably about 80% or greater; and in addition that there will be corresponding contiguous sequences of about 8-12 nucleotides or longer. However, if the number of mutations is so great that no hybridization can occur under even the least stringent of hybridization conditions, the sequence is not a complementary target sequence. Thus, by “substantially complementary” herein is meant that the probes are sufficiently complementary to the target sequences to hybridize under normal reaction conditions, particularly high stringency conditions, as outlined herein. Whether or not a sequence is unique to a CA gene according to this invention can be determined by techniques known to those of skill in the art. For example, the sequence can be compared to sequences in databanks, e.g., GeneBank, to determine whether it is present in the uninfected host or other organisms. The sequence can also be compared to the known sequences of other viral agents, including those that are known to induce cancer.

[0092] A nucleic acid probe is generally single stranded but can be partly single and partly double stranded. The strandedness of the probe is dictated by the structure, composition, and properties of the target sequence. In general, the oligonucleotide probes range from about 6, 8, 10, 12, 15, 20, 30 to about 100 bases long, with from about 10 to about 80 bases being preferred, and from about 30 to about 50 bases being particularly preferred. That is, generally entire genes are rarely used as probes. In some embodiments, much longer nucleic acids can be used, up to hundreds of bases. The probes are sufficiently specific to hybridize to complementary template sequence under conditions known by those of skill in the art. The number of mismatches between the probes sequences and their complementary template (target) sequences to which they hybridize during hybridization generally do not exceed 15%, usually do not exceed 10% and preferably do not exceed 5%, as determined by FASTA (default settings).

[0093] Oligonucleotide probes can include the naturally-occurring heterocyclic bases normally found in nucleic acids (uracil, cytosine, thymine, adenine and guanine), as well as modified bases and base analogues. Any modified base or base analogue compatible with hybridization of the probe to a target sequence is useful in the practice of the invention. The sugar or glycoside portion of the probe can comprise deoxyribose, ribose, and/or modified forms of these sugars, such as, for example, 2′-O-alkyl ribose. In a preferred embodiment, the sugar moiety is 2′-deoxyribose; however, any sugar moiety that is compatible with the ability of the probe to hybridize to a target sequence can be used.

[0094] In one embodiment, the nucleoside units of the probe are linked by a phosphodiester backbone, as is well known in the art. In additional embodiments, internucleotide linkages can include any linkage known to one of skill in the art that is compatible with specific hybridization of the probe including, but not limited to phosphorothioate, methylphosphonate, sulfamate (e.g., U.S. Pat. No. 5,470,967) and polyamide (i.e., peptide nucleic acids). Peptide nucleic acids are described in Nielsen et al. (1991) Science 254: 1497-1500, U.S. Pat. No. 5,714,331, and Nielsen (1999) Curr. Opin. Biotechnol. 10:71-75.

[0095] In certain embodiments, the probe can be a chimeric molecule; i.e., can comprise more than one type of base or sugar subunit, and/or the linkages can be of more than one type within the same primer. The probe can comprise a moiety to facilitate hybridization to its target sequence, as are known in the art, for example, intercalators and/or minor groove binders. Variations of the bases, sugars, and internucleoside backbone, as well as the presence of any pendant group on the probe, will be compatible with the ability of the probe to bind, in a sequence-specific fashion, with its target sequence. A large number of structural modifications, both known and to be developed, are possible within these bounds. Advantageously, the probes according to the present invention may have structural characteristics such that they allow the signal amplification, such structural characteristics being, for example, branched DNA probes as those described by Urdea et al. (Nucleic Acids Symp. Ser., 24:197-200 (1991)) or in the European Patent No. EP-0225,807. Moreover, synthetic methods for preparing the various heterocyclic bases, sugars, nucleosides and nucleotides that form the probe, and preparation of oligonucleotides of specific predetermined sequence, are well-developed and known in the art. A preferred method for oligonucleotide synthesis incorporates the teaching of U.S. Pat. No. 5,419,966.

[0096] Multiple probes may be designed for a particular target nucleic acid to account for polymorphism and/or secondary structure in the target nucleic acid, redundancy of data and the like. In some embodiments, where more than one probe per sequence is used, either overlapping probes or probes to different sections of a single target CA gene are used. That is, two, three, four or more probes, with three being preferred, are used to build in a redundancy for a particular target. The probes can be overlapping (i.e. have some sequence in common), or specific for distinct sequences of a CA gene. When multiple target polynucleotides are to be detected according to the present invention, each probe or probe group corresponding to a particular target polynucleotide is situated in a discrete area of the microarray.

[0097] Probes may be in solution, such as in wells or on the surface of a micro-array, or attached to a solid support. Examples of solid support materials that can be used include a plastic, a ceramic, a metal, a resin, a gel and a membrane. Useful types of solid supports include plates, beads, magnetic material, microbeads, hybridization chips, membranes, crystals, ceramics and self-assembling monolayers. A preferred embodiment comprises a two-dimensional or three-dimensional matrix, such as a gel or hybridization chip with multiple probe binding sites (Pevzner et al., J. Biomol. Struc. & Dyn. 9:399-410, 1991; Maskos and Southern, Nuc. Acids Res. 20:1679-84, 1992). Hybridization chips can be used to construct very large probe arrays that are subsequently hybridized with a target nucleic acid. Analysis of the hybridization pattern of the chip can assist in the identification of the target nucleotide sequence. Patterns can be manually or computer analyzed, but it is clear that positional sequencing by hybridization lends itself to computer analysis and automation. Algorithms and software, which have been developed for sequence reconstruction, are applicable to the methods described herein (R. Drmanac et al., J. Biomol. Struc. & Dyn. 5:1085-1102, 1991; P. A. Pevzner, J. Biomol. Struc. & Dyn. 7:63-73, 1989).

[0098] As will be appreciated by those in the art, nucleic acids can be attached or immobilized to a solid support in a wide variety of ways. By “immobilized” herein is meant the association or binding between the nucleic acid probe and the solid support is sufficient to be stable under the conditions of binding, washing, analysis, and removal as outlined below. The binding can be covalent or non-covalent. By “non-covalent binding” and grammatical equivalents herein is meant one or more of either electrostatic, hydrophilic, and hydrophobic interactions. Included in non-covalent binding is the covalent attachment of a molecule, such as streptavidin, to the support and the non-covalent binding of the biotinylated probe to the streptavidin. By “covalent binding” and grammatical equivalents herein is meant that the two moieties, the solid support and the probe, are attached by at least one bond, including sigma bonds, pi bonds and coordination bonds. Covalent bonds can be formed directly between the probe and the solid support or can be formed by a cross linker or by inclusion of a specific reactive group on either the solid support or the probe or both molecules. Immobilization may also involve a combination of covalent and non-covalent interactions.

[0099] Nucleic acid probes may be attached to the solid support by covalent binding such as by conjugation with a coupling agent or by, covalent or non-covalent binding such as electrostatic interactions, hydrogen bonds or antibody-antigen coupling, or by combinations thereof. Typical coupling agents include biotin/avidin, biotin/streptavidin, Staphylococcus aureus protein A/IgG antibody Fc fragment, and streptavidin/protein A chimeras (T. Sano and C. R. Cantor, Bio/Technology 9:1378-81 (1991)), or derivatives or combinations of these agents. Nucleic acids may be attached to the solid support by a photocleavable bond, an electrostatic bond, a disulfide bond, a peptide bond, a diester bond or a combination of these sorts of bonds. The array may also be attached to the solid support by a selectively releasable bond such as 4,4′-dimethoxytrityl or its derivative. Derivatives which have been found to be useful include 3 or 4 [bis-(4-methoxyphenyl)]-methyl-benzoic acid, N-succinimidyl-3 or 4 [bis-(4-methoxyphenyl)]-methyl-benzoic acid, N-succinimidyl-3 or 4 [bis-(4-methoxyphenyl)]-hydroxymethyl-benzoic acid, N-succinimidyl-3 or 4 [bis-(4-methoxyphenyl)]-chloromethyl-benzoic acid, and salts of these acids.

[0100] In general, the probes are attached to the biochip in a wide variety of ways, as will be appreciated by those in the art. As described herein, the nucleic acids can either be synthesized first, with subsequent attachment to the biochip, or can be directly synthesized on the biochip.

[0101] The biochip comprises a suitable solid substrate. By “substrate” or “solid support” or other grammatical equivalents herein is meant any material that can be modified to contain discrete individual sites appropriate for the attachment or association of the nucleic acid probes and is amenable to at least one detection method. The solid phase support of the present invention can be of any solid materials and structures suitable for supporting nucleotide hybridization and synthesis. Preferably, the solid phase support comprises at least one substantially rigid surface on which the primers can be immobilized and the reverse transcriptase reaction performed. The substrates with which the polynucleotide microarray elements are stably associated may be fabricated from a variety of materials, including plastics, ceramics, metals, acrylamide, cellulose, nitrocellulose, glass, polystyrene, polyethylene vinyl acetate, polypropylene, polymethacrylate, polyethylene, polyethylene oxide, polysilicates, polycarbonates, Teflon®, fluorocarbons, nylon, silicon rubber, polyanhydrides, polyglycolic acid, polylactic acid, polyorthoesters, polypropylfumerate, collagen, glycosaminoglycans, and polyamino acids. Substrates may be two-dimensional or three-dimensional in form, such as gels, membranes, thin films, glasses, plates, cylinders, beads, magnetic beads, optical fibers, woven fibers, etc. A preferred form of array is a three-dimensional array. A preferred three-dimensional array is a collection of tagged beads. Each tagged bead has different primers attached to it. Tags are detectable by signaling means such as color (Luminex, Illumina) and electromagnetic field (Pharmaseq) and signals on tagged beads can even be remotely detected (e.g., using optical fibers). The size of the solid support can be any of the standard microarray sizes, useful for DNA microarray technology, and the size may be tailored to fit the particular machine being used to conduct a reaction of the invention. In general, the substrates allow optical detection and do not appreciably fluoresce.

[0102] In a preferred embodiment, the surface of the biochip and the probe may be derivatized with chemical functional groups for subsequent attachment of the two. Thus, for example, the biochip is derivatized with a chemical functional group including, but not limited to, amino groups, carboxy groups, oxo groups and thiol groups, with amino groups being particularly preferred. Using these functional groups, the probes can be attached using functional groups on the probes. For example, nucleic acids containing amino groups can be attached to surfaces comprising amino groups, for example using linkers as are known in the art; for example, homo- or hetero-bifunctional linkers as are well known (see 1994 Pierce Chemical Company catalog, technical section on cross-linkers, pages 155-200, incorporated herein by reference). In addition, in some cases, additional linkers, such as alkyl groups (including substituted and heteroalkyl groups) may be used.

[0103] In this embodiment, the oligonucleotides are synthesized as is known in the art, and then attached to the surface of the solid support. As will be appreciated by those skilled in the art, either the 5′ or 3′ terminus may be attached to the solid support, or attachment may be via an internal nucleoside. In an additional embodiment, the immobilization to the solid support may be very strong, yet non-covalent. For example, biotinylated oligonucleotides can be made, which bind to surfaces covalently coated with streptavidin, resulting in attachment.

[0104] The arrays may be produced according to any convenient methodology, such as preforming the polynucleotide microarray elements and then stably associating them with the surface. Alternatively, the oligonucleotides may be synthesized on the surface, as is known in the art. A number of different array configurations and methods for their production are known to those of skill in the art and disclosed in WO 95/25116 and WO 95/35505 (photolithographic techniques), U.S. Pat. No. 5,445,934 (in situ synthesis by photolithography), U.S. Pat. No. 5,384,261 (in situ synthesis by mechanically directed flow paths); and U.S. Pat. No. 5,700,637 (synthesis by spotting, printing or coupling); the disclosure of which are herein incorporated in their entirety by reference. Another method for coupling DNA to beads uses specific ligands attached to the end of the DNA to link to ligand-binding molecules attached to a bead. Possible ligand-binding partner pairs include biotin-avidin/streptavidin, or various antibody/antigen pairs such as digoxygenin-antidigoxygenin antibody (Smith et al., “Direct Mechanical Measurements of the Elasticity of Single DNA Molecules by Using Magnetic Beads,” Science 258:1122-1126 (1992)). Covalent chemical attachment of DNA to the support can be accomplished by using standard coupling agents to link the 5′-phosphate on the DNA to coated microspheres through a phosphoamidate bond. Methods for immobilization of oligonucleotides to solid-state substrates are well established. See Pease et al., Proc. Natl. Acad. Sci. USA 91(11):5022-5026 (1994). A preferred method of attaching oligonucleotides to solid-state substrates is described by Guo et al., Nucleic Acids Res. 22:5456-5465 (1994). Immobilization can be accomplished either by in situ DNA synthesis (Maskos and Southern, Nucleic Acids Research, 20:1679-1684 (1992) or by covalent attachment of chemically synthesized oligonucleotides (Guo et al., supra) in combination with robotic arraying technologies.

[0105] In addition to the solid-phase technology represented by biochip arrays, gene expression can also be quantified using liquid-phase arrays. One such system is kinetic polymerase chain reaction (PCR). Kinetic PCR allows for the simultaneous amplification and quantification of specific nucleic acid sequences. The specificity is derived from synthetic oligonucleotide primers designed to preferentially adhere to single-stranded nucleic acid sequences bracketing the target site. This pair of oligonucleotide primers form specific, non-covalently bound complexes on each strand of the target sequence. These complexes facilitate in vitro transcription of double-stranded DNA in opposite orientations. Temperature cycling of the reaction mixture creates a continuous cycle of primer binding, transcription, and re-melting of the nucleic acid to individual strands. The result is an exponential increase of the target dsDNA product. This product can be quantified in real time either through the use of an intercalating dye or a sequence specific probe. SYBR® Greene I, is an example of an intercalating dye, that preferentially binds to dsDNA resulting in a concomitant increase in the fluorescent signal. Sequence specific probes, such as used with TaqMan® technology, consist of a fluorochrome and a quenching molecule covalently bound to opposite ends of an oligonucleotide. The probe is designed to selectively bind the target DNA sequence between the two primers. When the DNA strands are synthesized during the PCR reaction, the fluorochrome is cleaved from the probe by the exonuclease activity of the polymerase resulting in signal dequenching. The probe signaling method can be more specific than the intercalating dye method, but in each case, signal strength is proportional to the dsDNA product produced. Each type of quantification method can be used in multi-well liquid phase arrays with each well representing primers and/or probes specific to nucleic acid sequences of interest. When used with messenger RNA preparations of tissues or cell lines, an array of probe/primer reactions can simultaneously quantify the expression of multiple gene products of interest. See Germer, S., et al., Genome Res. 10:258-266 (2000); Heid, C. A., et al., Genome Res. 6, 986-994 (1996).

Expression of CA Proteins

[0106] In a preferred embodiment, CA nucleic acids encoding CA proteins are used to make a variety of expression vectors to express CA proteins which can then be used in screening assays, as described below. The expression vectors may be either self-replicating extrachromosomal vectors or vectors which integrate into a host genome. Generally, these expression vectors include transcriptional and translational regulatory nucleic acid operably linked to the nucleic acid encoding the CA protein. The term “control sequences” refers to DNA sequences necessary for the expression of an operably linked coding sequence in a particular host organism. The control sequences that are suitable for prokaryotes, for example, include a promoter, optionally an operator sequence, and a ribosome binding site. Eukaryotic cells are known to utilize promoters, polyadenylation signals, and enhancers.

[0107] Nucleic acid is “operably linked” when it is placed into a functional relationship with another nucleic acid sequence. For example, DNA for a presequence or secretory leader is operably linked to DNA for a polypeptide if it is expressed as a preprotein that participates in the secretion of the polypeptide; a promoter or enhancer is operably linked to a coding sequence if it affects the transcription of the sequence; or a ribosome binding site is operably linked to a coding sequence if it is positioned so as to facilitate translation. Generally, “operably linked” means that the DNA sequences being linked are contiguous, and, in the case of a secretory leader, contiguous and in reading phase. However, enhancers do not have to be contiguous. Linking is accomplished by ligation at convenient restriction sites. If such sites do not exist, synthetic oligonucleotide adaptors or linkers are used in accordance with conventional practice. The transcriptional and translational regulatory nucleic acid will generally be appropriate to the host cell used to express the CA protein; for example, transcriptional and translational regulatory nucleic acid sequences from Bacillus are preferably used to express the CA protein in Bacillus. Numerous types of appropriate expression vectors, and suitable regulatory sequences are known in the art for a variety of host cells.

[0108] In general, the transcriptional and translational regulatory sequences may include, but are not limited to, promoter sequences, ribosomal binding sites, transcriptional start and stop sequences, translational start and stop sequences, and enhancer or activator sequences. In a preferred embodiment, the regulatory sequences include a promoter and transcriptional start and stop sequences.

[0109] Promoter sequences encode either constitutive or inducible promoters. The promoters may be either naturally occurring promoters or hybrid promoters. Hybrid promoters, which combine elements of more than one promoter, are also known in the art, and are useful in the present invention.

[0110] In addition, the expression vector may comprise additional elements. For example, the expression vector may have two replication systems, thus allowing it to be maintained in two organisms, for example in mammalian or insect cells for expression and in a prokaryotic host for cloning and amplification. Furthermore, for integrating expression vectors, the expression vector contains at least one sequence homologous to the host cell genome, and preferably two homologous sequences that flank the expression construct. The integrating vector may be directed to a specific locus in the host cell by selecting the appropriate homologous sequence for inclusion in the vector. Constructs for integrating vectors are well known in the art.

[0111] In addition, in a preferred embodiment, the expression vector contains a selectable marker gene to allow the selection of transformed host cells. Selection genes are well known in the art and will vary with the host cell used.

[0112] The CA proteins of the present invention are produced by culturing a host cell transformed with an expression vector containing nucleic acid encoding a CA protein, under the appropriate conditions to induce or cause expression of the CA protein. The conditions appropriate for CA protein expression will vary with the choice of the expression vector and the host cell, and will be easily ascertained by one skilled in the art through routine experimentation. For example, the use of constitutive promoters in the expression vector will require optimizing the growth and proliferation of the host cell, while the use of an inducible promoter requires the appropriate growth conditions for induction. In addition, in some embodiments, the timing of the harvest is important. For example, the baculoviral systems used in insect cell expression are lytic viruses, and thus harvest time selection can be crucial for product yield.

[0113] Appropriate host cells include yeast, bacteria, archaebacteria, fungi, and insect, plant and animal cells, including mammalian cells. Of particular interest are Drosophila melanogaster cells, Saccharomyces cerevisiae and other yeasts, E. coli, Bacillus subtilis, Sf9 cells, C129 cells, 293 cells, Neurospora, BHK, CHO, COS, HeLa cells, THP1 cell line (a macrophage cell line) and human cells and cell lines.

[0114] In a preferred embodiment, the CA proteins are expressed in mammalian cells. Mammalian expression systems are also known in the art, and include retroviral systems. A preferred expression vector system is a retroviral vector system such as is generally described in PCT/US97/01019 and PCT/US97/01048, both of which are hereby expressly incorporated by reference. Of particular use as mammalian promoters are the promoters from mammalian viral genes, since the viral genes are often highly expressed and have a broad host range. Examples include the SV40 early promoter, mouse mammary tumor virus LTR promoter, adenovirus major late promoter, herpes simplex virus promoter, and the CMV promoter. Typically, transcription termination and polyadenylation sequences recognized by mammalian cells are regulatory regions located 3′ to the translation stop codon and thus, together with the promoter elements, flank the coding sequence. Examples of transcription terminator and polyadenylation signals include those derived form SV40.

[0115] The methods of introducing exogenous nucleic acid into mammalian hosts, as well as other hosts, are well known in the art, and will vary with the host cell used. Techniques include dextran-mediated transfection, calcium phosphate precipitation, polybrene mediated transfection, protoplast fusion, electroporation, viral infection, encapsulation of the polynucleotide(s) in liposomes, and direct microinjection of the DNA into nuclei.

[0116] In a preferred embodiment, CA proteins are expressed in bacterial systems. Bacterial expression systems are well known in the art. Promoters from bacteriophage may also be used and are known in the art. In addition, synthetic promoters and hybrid promoters are also useful; for example, the tac promoter is a hybrid of the trp and lac promoter sequences. Furthermore, a bacterial promoter can include naturally occurring promoters of non-bacterial origin that have the ability to bind bacterial RNA polymerase and initiate transcription. In addition to a functioning promoter sequence, an efficient ribosome binding site is desirable. The expression vector may also include a signal peptide sequence that provides for secretion of the CA protein in bacteria. The protein is either secreted into the growth media (gram-positive bacteria) or into the periplasmic space, located between the inner and outer membrane of the cell (gram-negative bacteria). The bacterial expression vector may also include a selectable marker gene to allow for the selection of bacterial strains that have been transformed. Suitable selection genes include genes that render the bacteria resistant to drugs such as ampicillin, chloramphenicol, erythromycin, kanamycin, neomycin and tetracycline. Selectable markers also include biosynthetic genes, such as those in the histidine, tryptophan and leucine biosynthetic pathways. These components are assembled into expression vectors. Expression vectors for bacteria are well known in the art, and include vectors for Bacillus subtilis, E. coli, Streptococcus cremoris, and Streptococcus lividans, among others. The bacterial expression vectors are transformed into bacterial host cells using techniques well known in the art, such as calcium chloride treatment, electroporation, and others.

[0117] In one embodiment, CA proteins are produced in insect cells. Expression vectors for the transformation of insect cells, and in particular, baculovirus-based expression vectors, are well known in the art.

[0118] In a preferred embodiment, CA protein is produced in yeast cells. Yeast expression systems are well known in the art, and include expression vectors for Saccharomyces cerevisiae, Candida albicans and C. maltosa, Hansenula polymorpha, Kluyveromyces fragilis and K. lactis, Pichia guillerimondii and P. pastoris, Schizosaccharomyces pombe, and Yarrowia lipolytica.

[0119] The CA protein may also be made as a fusion protein, using techniques well known in the art. Thus, for example, for the creation of monoclonal antibodies. If the desired epitope is small, the CA protein may be fused to a carrier protein to form an immunogen. Alternatively, the CA protein may be made as a fusion protein to increase expression, or for other reasons. For example, when the CA protein is a CA peptide, the nucleic acid encoding the peptide may be linked to other nucleic acid for expression purposes.

[0120] In one embodiment, the CA nucleic acids, proteins and antibodies of the invention are labeled. By “labeled” herein is meant that a compound has at least one element, isotope or chemical compound attached to enable the detection of the compound. In general, labels fall into three classes: a) isotopic labels, which may be radioactive or heavy isotopes; b) immune labels, which may be antibodies or antigens; and c) colored or fluorescent dyes. The labels may be incorporated into the CA nucleic acids, proteins and antibodies at any position. For example, the label should be capable of producing, either directly or indirectly, a detectable signal. The detectable moiety may be a radioisotope, such as ³H, ¹⁴C, ³²P, ³⁵S, or ¹²⁵I, a fluorescent or chemiluminescent compound, such as fluorescein isothiocyanate, rhodamine, or luciferin, or an enzyme, such as alkaline phosphatase, beta-galactosidase or horseradish peroxidase. Any method known in the art for conjugating the antibody to the label may be employed, including those methods described by Hunter et al., Nature, 144:945 (1962); David et al., Biochemistry, 13:1014 (1974); Pain et al., J. Immunol. Meth., 40:219 (1981); and Nygren, J. Histochem. and Cytochem., 30:407 (1982).

[0121] Accordingly, the present invention also provides CA protein sequences. A CA protein of the present invention may be identified in several ways. “Protein” in this sense includes proteins, polypeptides, and peptides. As will be appreciated by those in the art, the nucleic acid sequences of the invention can be used to generate protein sequences. There are a variety of ways to do this, including cloning the entire gene and verifying its frame and amino acid sequence, or by comparing it to known sequences to search for homology to provide a frame, assuming the CA protein has homology to some protein in the database being used. Generally, the nucleic acid sequences are input into a program that will search all three frames for homology. This is done in a preferred embodiment using the following NCBI Advanced BLAST parameters. The program is blastx or blastn. The database is nr. The input data is as “Sequence in FASTA format”. The organism list is “none”. The “expect” is 10; the filter is default. The “descriptions” is 500, the “alignments” is 500, and the “alignment view” is pairwise. The “query Genetic Codes” is standard (1). The matrix is BLOSUM 62; gap existence cost is 11, per residue gap cost is 1; and the lambda ratio is 0.85 default. This results in the generation of a putative protein sequence.

[0122] In general, the term “polypeptide” as used herein refers to both the full-length polypeptide encoded by the recited polynucleotide, the polypeptide encoded by the gene represented by the recited polynucleotide, as well as portions or fragments thereof. The present invention encompasses variants of the naturally occurring proteins, wherein such variants are homologous or substantially similar to the naturally occurring protein, and can be of an origin of the same or different species as the naturally occurring protein (e.g., human, murine, or some other species that naturally expresses the recited polypeptide, usually a mammalian species). In general, variant polypeptides have a sequence that has at least about 80%, at least about 81%, at least about 82%, at least about 83%, at least about 84%, at least about 85%, at least about 86%, at least about 87%, at least about 88%, at least about 89%, usually at least about 90%, at least 91%, at least 92%, at least 93%, at least 94%, at least 95%, at least 96%, at least 97%, at least 98% and more usually at least about 99% sequence identity with a differentially expressed polypeptide described herein, as determined by the Smith-Waterman homology search algorithm using an affine gap search with a gap open penalty of 12 and a gap extension penalty of 2, BLOSUM matrix of 62. The Smith-Waterman homology search algorithm is taught in Smith and Waterman, Adv. Appl. Math. (1981) 2: 482-489. The variant polypeptides can be naturally or non-naturally glycosylated, i.e., the polypeptide has a glycosylation pattern that differs from the glycosylation pattern found in the corresponding naturally occurring protein.

[0123] Also within the scope of the invention are variants. Variants of polypeptides include mutants, fragments, and fusions. Mutants can include amino acid substitutions, additions or deletions. The amino acid substitutions can be conservative amino acid substitutions or substitutions to eliminate non-essential amino acids, such as to alter a glycosylation site, a phosphorylation site or an acetylation site, or to minimize misfolding by substitution or deletion of one or more cysteine residues that are not necessary for function. Conservative amino acid substitutions are those that preserve the general charge, hydrophobicity/hydrophilicity, and/or steric bulk of the amino acid substituted. Variants can be designed so as to retain or have enhanced biological activity of a particular region of the protein (e.g., a functional domain and/or, where the polypeptide is a member of a protein family, a region associated with a consensus sequence). Selection of amino acid alterations for production of variants can be based upon the accessibility (interior vs. exterior) of the amino acid (see, e.g., Go et al, Int. J. Peptide Protein Res. (1980) 15:211), the thermostability of the variant polypeptide (see, e.g., Querol et al., Prot. Eng. (1996) 9:265), desired glycosylation sites (see, e.g., Olsen and Thomsen, J. Gen. Microbiol. (1991) 137:579), desired disulfide bridges (see, e.g., Clarke et al., Biochemistry (1993) 32:4322; and Wakarchuk et al., Protein Eng. (1994) 7:1379), desired metal binding sites (see, e.g., Toma et al., Biochemistry (1991) 30:97, and Haezerbrouck et al., Protein Eng. (1993) 6:643), and desired substitutions within proline loops (see, e.g., Masul et al., Appl. Env. Microbiol. (1994) 60:3579). Cysteine-depleted muteins can be produced as disclosed in U.S. Pat. No. 4,959,314.

[0124] Variants also include fragments of the polypeptides disclosed herein, particularly biologically active fragments and/or fragments corresponding to functional domains. Fragments of interest will typically be at least about 8 amino acids (aa) 10 aa, 15 aa, 20 aa, 25 aa, 30 aa, 35 aa, 40 aa, to at least about 45 aa in length, usually at least about 50 aa in length, at least about 75 aa, at least about 100 aa, at least about 125 aa, at least about 150 aa in length, at least about 200 aa, at least about 300 aa, at least about 400 aa and can be as long as 500 aa in length or longer, but will usually not exceed about 1000 aa in length, where the fragment will have a stretch of amino acids that is identical to a polypeptide encoded by a polynucleotide having a sequence of any one of the polynucleotide sequences provided herein, or a homolog thereof. The protein variants described herein are encoded by polynucleotides that are within the scope of the invention. The genetic code can be used to select the appropriate codons to construct the corresponding variants.

[0125] While altered expression of the polynucleotides associated with cancer is observed, altered levels of expression of the polypeptides encoded by these polynucleotides may likely play a role in cancers.

[0126] Also included within one embodiment of CA proteins are amino acid variants of the naturally occurring sequences, as determined herein. Preferably, the variants are preferably greater than about 75% homologous to the wild-type sequence, more preferably greater than about 80%, even more preferably greater than about 85% and most preferably greater than 90%. The present application is also directed to proteins containing polypeptides at least 80%, 85%, 90%, 95%, 96%, 97%, 98% or 99% identical to a CA polypeptide sequence set forth herein. As for nucleic acids, homology in this context means sequence similarity or identity, with identity being preferred. This homology will be determined using standard techniques known in the art as are outlined above for the nucleic acid homologies.

[0127] CA proteins of the present invention may be shorter or longer than the wild type amino acid sequences. Thus, in a preferred embodiment, included within the definition of CA proteins are portions or fragments of the wild type sequences herein. In addition, as outlined above, the CA nucleic acids of the invention may be used to obtain additional coding regions, and thus additional protein sequence, using techniques known in the art.

[0128] In a preferred embodiment, the CA proteins are derivative or variant CA proteins as compared to the wild-type sequence. That is, as outlined more fully below, the derivative CA peptide will contain at least one amino acid substitution, deletion or insertion, with amino acid substitutions being particularly preferred. The amino acid substitution, insertion or deletion may occur at any residue within the CA peptide.

[0129] Also included in an embodiment of CA proteins of the present invention are amino acid sequence variants. These variants fall into one or more of three classes: substitutional, insertional or deletional variants. These variants ordinarily are prepared by site-specific mutagenesis of nucleotides in the DNA encoding the CA protein, using cassette or PCR mutagenesis or other techniques well known in the art, to produce DNA encoding the variant, and thereafter expressing the DNA in recombinant cell culture as outlined above. However, variant CA protein fragments having up to about 100-150 residues may be prepared by in vitro synthesis using established techniques. Amino acid sequence variants are characterized by the predetermined nature of the variation, a feature that sets them apart from naturally occurring allelic or interspecies variation of the CA protein amino acid sequence. The variants typically exhibit the same qualitative biological activity as the naturally occurring analogue, although variants can also be selected which have modified characteristics as will be more fully outlined below.

[0130] While the site or region for introducing an amino acid sequence variation is predetermined, the mutation per se need not be predetermined. For example, in order to optimize the performance of a mutation at a given site, random mutagenesis may be conducted at the target codon or region and the expressed CA variants screened for the optimal combination of desired activity. Techniques for making substitution mutations at predetermined sites in DNA having a known sequence are well known, for example, M13 primer mutagenesis and LAR mutagenesis. Screening of the mutants is done using assays of CA protein activities.

[0131] Amino acid substitutions are typically of single residues; insertions usually will be on the order of from about 1 to 20 amino acids, although considerably larger insertions may be tolerated. Deletions range from about 1 to about 20 residues, although in some cases deletions may be much larger.

[0132] Substitutions, deletions, insertions or any combination thereof may be used to arrive at a final derivative. Generally these changes are done on a few amino acids to minimize the alteration of the molecule. However, larger changes may be tolerated in certain circumstances. When small alterations in the characteristics of the CA protein are desired, substitutions are generally made in accordance with the following chart:

CHART 1

| Original Residue | Exemplary Substitutions |
|---|---|
| Ala | Ser |
| Arg | Lys |
| Asn | Gln, His |
| Asp | Glu |
| Cys | Ser |
| Gln | Asn |
| Glu | Asp |
| Gly | Pro |
| His | Asn, Gln |
| Ile | Leu, Val |
| Leu | Ile, Val |
| Lys | Arg, Gln, Glu |
| Met | Leu, Ile |
| Phe | Met, Leu, Tyr |
| Ser | Thr |
| Thr | Ser |
| Trp | Tyr |
| Tyr | Trp, Phe |
| Val | Ile, Leu |

[0133] Substantial changes in function or immunological identity are made by selecting substitutions that are less conservative than those shown in Chart I. For example, substitutions may be made full length to more significantly affect one or more of the following: the structure of the polypeptide backbone in the area of the alteration (e.g., the alpha-helical or beta-sheet structure); the charge or hydrophobicity of the molecule at the target site; and the bulk of the side chain. The substitutions which in general are expected to produce the greatest changes in the polypeptide's properties are those in which (a) a hydrophilic residue, e.g. seryl or threonyl is substituted for (or by) a hydrophobic residue, e.g. leucyl, isoleucyl, phenylalanyl, valyl or alanyl; (b) a cysteine or proline is substituted for (or by) any other residue; (c) a residue having an electropositive side chain, e.g. lysyl, arginyl, or histidyl, is substituted for (or by) an electronegative residue, e.g. glutamyl or aspartyl; or (d) a residue having a bulky side chain, e.g. phenylalanine, is substituted for (or by) one not having a side chain, e.g. glycine.

[0134] The variants typically exhibit the same qualitative biological activity and will elicit the same immune response as the naturally-occurring analogue, although variants also are selected to modify the characteristics of the CA proteins as needed. Alternatively, the variant may be designed such that the biological activity of the CA protein is altered. For example, glycosylation sites may be altered or removed, dominant negative mutations created, etc.

[0135] Covalent modifications of CA polypeptides are included within the scope of this invention, for example for use in screening. One type of covalent modification includes reacting targeted amino acid residues of a CA polypeptide with an organic derivatizing agent that is capable of reacting with selected side chains or the N- or C-terminal residues of a CA polypeptide. Derivatization with bifunctional agents is useful, for instance, for crosslinking CA polypeptides to a water-insoluble support matrix or surface for use in the method for purifying anti-CA antibodies or screening assays, as is more fully described below. Commonly used crosslinking agents include, e.g., 1,1-bis(diazoacetyl)-2-phenylethane, glutaraldehyde, N-hydroxysuccinimide esters, for example, esters with 4-azidosalicylic acid, homobifunctional imidoesters, including disuccinimidyl esters such as 3,3′-dithiobis(succinimidylpropionate), bifunctional maleimides such as bis-N-maleimido-1,8-octane and agents such as methyl-3-[(p-azidophenyl)dithio]propioimidate.

[0136] Other modifications include deamidation of glutaminyl and asparaginyl residues to the corresponding glutamyl and aspartyl residues, respectively, hydroxylation of proline and lysine, phosphorylation of hydroxyl groups of seryl, threonyl or tyrosyl residues, methylation of the a-amino groups of lysine, arginine, and histidine side chains [T. E. Creighton, Proteins: Structure and Molecular Properties, W.H. Freeman & Co., San Francisco, pp. 79-86 (1983)], acetylation of the N-terminal amine, and amidation of any C-terminal carboxyl group.

[0137] Another type of covalent modification of the CA polypeptide included within the scope of this invention comprises altering the native glycosylation pattern of the polypeptide. “Altering the native glycosylation pattern” is intended for purposes herein to mean deleting one or more carbohydrate moieties found in native sequence CA polypeptide, and/or adding one or more glycosylation sites that are not present in the native sequence CA polypeptide.

[0138] Addition of glycosylation sites to CA polypeptides may be accomplished by altering the amino acid sequence thereof. The alteration may be made, for example, by the addition of, or substitution by, one or more serine or threonine residues to the native sequence CA polypeptide (for O-linked glycosylation sites). The CA amino acid sequence may optionally be altered through changes at the DNA level, particularly by mutating the DNA encoding the CA polypeptide at preselected bases such that codons are generated that will translate into the desired amino acids.

[0139] Another means of increasing the number of carbohydrate moieties on the CA polypeptide is by chemical or enzymatic coupling of glycosides to the polypeptide. Such methods are described in the art, e.g., in WO 87/05330 published 11 Sep. 1987, and in Aplin and Wriston, LA Crit. Rev. Biochem., pp. 259-306 (1981).

[0140] Removal of carbohydrate moieties present on the CA polypeptide may be accomplished chemically or enzymatically or by mutational substitution of codons encoding for amino acid residues that serve as targets for glycosylation. Chemical deglycosylation techniques are known in the art and described, for instance, by Hakimuddin, et al., Arch. Biochem. Biophys., 259:52 (1987) and by Edge et al., Anal. Biochem., 118:131 (1981). Enzymatic cleavage of carbohydrate moieties on polypeptides can be achieved by the use of a variety of endo- and exo-glycosidases as described by Thotakura et al., Meth. Enzymol., 138:350 (1987).

[0141] Another type of covalent modification of CA comprises linking the CA polypeptide to one of a variety of nonproteinaceous polymers, e.g., polyethylene glycol, polypropylene glycol, or polyoxyalkylenes, in the manner set forth in U.S. Pat. No. 4,640,835; 4,496,689; 4,301,144; 4,670,417; 4,791,192 or 4,179,337.

[0142] CA polypeptides of the present invention may also be modified in a way to form chimeric molecules comprising a CA polypeptide fused to another, heterologous polypeptide or amino acid sequence. In one embodiment, such a chimeric molecule comprises a fusion of a CA polypeptide with a tag polypeptide that provides an epitope to which an anti-tag antibody can selectively bind. The epitope tag is generally placed at the amino- or carboxyl-terminus of the CA polypeptide, although internal fusions may also be tolerated in some instances. The presence of such epitope-tagged forms of a CA polypeptide can be detected using an antibody against the tag polypeptide. Also, provision of the epitope tag enables the CA polypeptide to be readily purified by affinity purification using an anti-tag antibody or another type of affinity matrix that binds to the epitope tag. In an alternative embodiment, the chimeric molecule may comprise a fusion of a CA polypeptide with an immunoglobulin or a particular region of an immunoglobulin. For a bivalent form of the chimeric molecule, such a fusion could be to the Fc region of an IgG molecule.

[0143] Various tag polypeptides and their respective antibodies are well known in the art. Examples include poly-histidine (poly-his) or poly-histidine-glycine (poly-his-gly) tags; the flu HA tag polypeptide and its antibody 12CA5 [Field et al., Mol. Cell. Biol., 8:2159-2165 (1988)]; the c-myc tag and the 8F9, 3C7, 6E10, G4, B7 and 9E10 antibodies thereto [Evan et al., Molecular and Cellular Biology, 5:3610-3616 (1985)]; and the Herpes Simplex virus glycoprotein D (gD) tag and its antibody [Paborsky et al., Protein Engineering, 3(6):547-553 (1990)]. Other tag polypeptides include the Flag-peptide [Hopp et al., BioTechnology, 6:1204-1210 (1988)]; the KT3 epitope peptide [Martin et al., Science, 255:192-194 (1992)]; tubulin epitope peptide [Skinner et al., J. Biol. Chem., 266:15163-15166 (1991)]; and the T7 gene 10 protein peptide tag [Lutz-Freyermuth et al., Proc. Natl. Acad. Sci. USA, 87:6393-6397 (1990)].

[0144] Also included with the definition of CA protein in one embodiment are other CA proteins of the CA family, and CA proteins from other organisms, which are cloned and expressed as outlined below. Thus, probe or degenerate polymerase chain reaction (PCR) primer sequences may be used to find other related CA proteins from humans or other organisms. As will be appreciated by those in the art, particularly useful probe and/or PCR primer sequences include the unique areas of the CA nucleic acid sequence. As is generally known in the art, preferred PCR primers are from about 15 to about 35 nucleotides in length, with from about 20 to about 30 being preferred, and may contain inosine as needed. The conditions for the PCR reaction are well known in the art.

[0145] In addition, as is outlined herein, CA proteins can be made that are longer than those encoded by the nucleic acids of the figures, for example, by the elucidation of additional sequences, the addition of epitope or purification tags, the addition of other fusion sequences, etc.

[0146] CA proteins may also be identified as being encoded by CA nucleic acids. Thus, CA proteins are encoded by nucleic acids that will hybridize to the sequences of the sequence listings, or their complements, as outlined herein.

CA Antigens and Antibodies Thereto

[0147] In one embodiment, the invention provides CA specific antibodies. In a preferred embodiment, when the CA protein is to be used to generate antibodies, for example for immunotherapy, the CA protein should share at least one epitope or determinant with the full-length protein. By “epitope” or “determinant” herein is meant a portion of a protein that will generate and/or bind an antibody or T-cell receptor in the context of MHC. Thus, in most instances, antibodies made to a smaller CA protein will be able to bind to the full-length protein. In a preferred embodiment, the epitope is unique; that is, antibodies generated to a unique epitope show little or no cross-reactivity.

[0148] Any polypeptide sequence encoded by the CA polynucleotide sequences may be analyzed to determine certain preferred regions of the polypeptide. Regions of high antigenicity are determined from data by DNASTAR analysis by choosing values that represent regions of the polypeptide that are likely to be exposed on the surface of the polypeptide in an environment in which antigen recognition may occur in the process of initiation of an immune response. For example, the amino acid sequence of a polypeptide encoded by a CA polynucleotide sequence may be analyzed using the default parameters of the DNASTAR computer algorithm (DNASTAR, Inc., Madison, Wis.; http://www.dnastar.com/).

[0149] Polypeptide features that may be routinely obtained using the DNASTAR computer algorithm include, but are not limited to, Garnier-Robson alpha-regions, beta-regions, turn-regions, and coil-regions (Garnier et al. J. Mol. Biol., 120: 97 (1978)); Chou-Fasman alpha-regions, beta-regions, and turn-regions (Adv. in Enzymol., 47:45-148 (1978)); Kyte-Doolittle hydrophilic regions and hydrophobic regions (J. Mol. Biol., 157:105-132 (1982)); Eisenberg alpha- and beta-amphipathic regions; Karplus-Schulz flexible regions; Emini surface-forming regions (J. Virol., 55(3):836-839 (1985)); and Jameson-Wolf regions of high antigenic index (CABIOS, 4(1):181-186 (1988)). Kyte-Doolittle hydrophilic regions and hydrophobic regions, Emini surface-forming regions, and Jameson-Wolf regions of high antigenic index (i.e., containing four or more contiguous amino acids having an antigenic index of greater than or equal to 1.5, as identified using the default parameters of the Jameson-Wolf program) can routinely be used to determine polypeptide regions that exhibit a high degree of potential for antigenicity. One approach for preparing antibodies to a protein is the selection and preparation of an amino acid sequence of all or part of the protein, chemically synthesizing the sequence and injecting it into an appropriate animal, typically a rabbit, hamster or a mouse. Oligopeptides can be selected as candidates for the production of an antibody to the CA protein based upon the oligopeptides lying in hydrophilic regions, which are thus likely to be exposed in the mature protein. Additional oligopeptides can be determined using, for example, the Antigenicity Index, Welling, G. W. et al., FEBS Lett. 188:215-218 (1985), incorporated herein by reference.

[0150] In one embodiment, the term “antibody” includes antibody fragments, as are known in the art, including Fab, Fab₂, single chain antibodies (Fv for example), chimeric antibodies, etc., either produced by the modification of whole antibodies or those synthesized de novo using recombinant DNA technologies.

[0151] Methods of preparing polyclonal antibodies are known to the skilled artisan. Polyclonal antibodies can be raised in a mammal, for example, by one or more injections of an immunizing agent and, if desired, an adjuvant. Typically, the immunizing agent and/or adjuvant will be injected in the mammal by multiple subcutaneous or intraperitoneal injections. The immunizing agent may include a protein encoded by a nucleic acid of the figures or fragment thereof or a fusion protein thereof. It may be useful to conjugate the immunizing agent to a protein known to be immunogenic in the mammal being immunized. Examples of such immunogenic proteins include but are not limited to keyhole limpet hemocyanin, serum albumin, bovine thyroglobulin, and soybean trypsin inhibitor. Examples of adjuvants that may be employed include Freund's complete adjuvant and MPL-TDM adjuvant (monophosphoryl Lipid A, synthetic trehalose dicorynomycolate). The immunization protocol may be selected by one skilled in the art without undue experimentation.

[0152] The antibodies may, alternatively, be monoclonal antibodies. Monoclonal antibodies may be prepared using hybridoma methods, such as those described by Kohler and Milstein, Nature, 256:495 (1975). In a hybridoma method, a mouse, hamster, or other appropriate host animal, is typically immunized with an immunizing agent to elicit lymphocytes that produce or are capable of producing antibodies that will specifically bind to the immunizing agent. Alternatively, the lymphocytes may be immunized in vitro. The immunizing agent will typically include a polypeptide encoded by a nucleic acid of Tables 1-49, or fragment thereof or a fusion protein thereof. Generally, either peripheral blood lymphocytes (“PBLs”) are used if cells of human origin are desired, or spleen cells or lymph node cells are used if non-human mammalian sources are desired. The lymphocytes are then fused with an immortalized cell line using a suitable fusing agent, such as polyethylene glycol, to form a hybridoma cell (Goding, Monoclonal Antibodies: Principles and Practice, Academic Press, (1986) pp. 59-103). Immortalized cell lines are usually transformed mammalian cells, particularly myeloma cells of rodent, bovine and human origin. Usually, rat or mouse myeloma cell lines are employed. The hybridoma cells may be cultured in a suitable culture medium that preferably contains one or more substances that inhibit the growth or survival of the unfused, immortalized cells. For example, if the parental cells lack the enzyme hypoxanthine guanine phosphoribosyl transferase (HGPRT or HPRT), the culture medium for the hybridomas typically will include hypoxanthine, aminopterin, and thymidine (“HAT medium”), which substances prevent the growth of HGPRT-deficient cells.

[0153] Monoclonal antibody technology is used in implementing research, diagnosis and therapy. Monoclonal antibodies are used in radioimmunoassays, enzyme-linked immunosorbent assays, immunocytopathology, and flow cytometry for in vitro diagnosis, and in vivo for diagnosis and immunotherapy of human disease. Waldmann, T. A. (1991) Science 252:1657-1662. In particular, monoclonal antibodies have been widely applied to the diagnosis and therapy of cancer, wherein it is desirable to target malignant lesions while avoiding normal tissue. See, e.g., U.S. Pat. Nos. 4,753,894 to Frankel, et al.; 4,938,948 to Ring et al.; and 4,956,453 to Bjorn et al.

[0154] In one embodiment, the antibodies are bispecific antibodies. Bispecific antibodies are monoclonal, preferably human or humanized, antibodies that have binding specificities for at least two different antigens. A number of “humanized” antibody molecules comprising an antigen-binding site derived from a non-human immunoglobulin have been described, including chimeric antibodies having rodent V regions and their associated CDRs fused to human constant domains (Winter et al. (1991) Nature 349:293-299; Lobuglio et al. (1989) Proc. Nat. Acad. Sci. USA 86:4220-4224; Shaw et al. (1987) J Immunol. 138:4534-4538; and Brown et al. (1987) Cancer Res. 47:3577-3583), rodent CDRs grafted into a human supporting FR prior to fusion with an appropriate human antibody constant domain (Riechmann et al. (1988) Nature 332:323-327; Verhoeyen et al. (1988) Science 239:1534-1536; and Jones et al. (1986) Nature 321:522-525), and rodent CDRs supported by recombinantly veneered rodent FRs (European Patent Publication No. 519,596, published Dec. 23, 1992). These “humanized” molecules are designed to minimize unwanted immunological response toward rodent antihuman antibody molecules which limits the duration and effectiveness of therapeutic applications of those moieties in human recipients. In the present case, one of the binding specificities is for a protein encoded by a nucleic acid of Tables 1-49, or a fragment thereof, the other one is for any other antigen, and preferably for a cell-surface protein or receptor or receptor subunit, preferably one that is tumor specific.

[0155] In a preferred embodiment, the antibodies to CA are capable of reducing or eliminating the biological function of CA, as is described below. That is, the addition of anti-CA antibodies (either polyclonal or preferably monoclonal) to CA (or cells containing CA) may reduce or eliminate the CA activity. Generally, at least a 25% decrease in activity is preferred, with at least about 50% being particularly preferred and about a 95-100% decrease being especially preferred.

[0156] In a preferred embodiment the antibodies to the CA proteins are humanized antibodies. “Humanized” antibodies refer to a molecule having an antigen binding site that is substantially derived from an immunoglobulin from a non-human species and the remaining immunoglobulin structure of the molecule based upon the structure and/or sequence of a human immunoglobulin. The antigen binding site may comprise either complete variable domains fused onto constant domains or only the complementarity determining regions (CDRs) grafted onto appropriate framework regions in the variable domains. Antigen binding sites may be wild type or modified by one or more amino acid substitutions, e.g., modified to resemble human immunoglobulin more closely. Alternatively, a humanized antibody may be derived from a chimeric antibody that retains or substantially retains the antigen-binding properties of the parental, non-human, antibody but which exhibits diminished immunogenicity as compared to the parental antibody when administered to humans. The phrase “chimeric antibody,” as used herein, refers to an antibody containing sequence derived from two different antibodies (see, e.g., U.S. Pat. No. 4,816,567) that typically originate from different species. Typically, in these chimeric antibodies, the variable region of both light and heavy chains mimics the variable regions of antibodies derived from one species of mammals, while the constant portions are homologous to the sequences in antibodies derived from another. Most typically, chimeric antibodies comprise human and murine antibody fragments, generally human constant and mouse variable regions. Humanized antibodies include human immunoglobulins (recipient antibody) in which residues form a complementary determining region (CDR) of the recipient are replaced by residues from a CDR of a non-human species (donor antibody) such as mouse, rat or rabbit having the desired specificity, affinity and capacity. In some instances, Fv framework residues of the human immunoglobulin are replaced by corresponding non-human residues. Humanized antibodies may also comprise residues that are found neither in the recipient antibody nor in the imported CDR or framework sequences. In general, the humanized antibody will comprise substantially all of at least one, and typically two, variable domains, in which all or substantially all of the CDR regions correspond to those of a non-human immunoglobulin and all or substantially all of the framework residues (FR) regions are those of a human immunoglobulin consensus sequence. The humanized antibody optimally also will comprise at least a portion of an immunoglobulin constant region (Fc), typically that of a human immunoglobulin (Jones et al., Nature, 321:522-525 (1986); Riechmann et al., Nature, 332:323-329 (1988); and Presta, Curr. Op. Struct. Biol., 2:593-596 (1992)). One clear advantage to such chimeric forms is that, for example, the variable regions can conveniently be derived from presently known sources using readily available hybridomas or B cells from non human host organisms in combination with constant regions derived from, for example, human cell preparations. While the variable region has the advantage of ease of preparation, and the specificity is not affected by its source, the constant region being human, is less likely to elicit an immune response from a human subject when the antibodies are injected than would the constant region from a non-human source. However, the definition is not limited to this particular example.

[0157] Because humanized antibodies are far less immunogenic in humans than the parental mouse monoclonal antibodies, they can be used for the treatment of humans with far less risk of anaphylaxis. Thus, these antibodies may be preferred in therapeutic applications that involve in vivo administration to a human such as, e.g., use as radiation sensitizers for the treatment of neoplastic disease or use in methods to reduce the side effects of, e.g., cancer therapy. Methods for humanizing non-human antibodies are well known in the art. Generally, a humanized antibody has one or more amino acid residues introduced into it from a source that is non-human. These non-human amino acid residues are often referred to as import residues, which are typically taken from an import variable domain. Humanization can be essentially performed following the method of Winter and co-workers (Jones et al., Nature 321:522-525 (1986); Riechmann et al., Nature 332:323-327 (1988); Verhoeyen et al., Science 239:1534-1536 (1988)), by substituting rodent CDRs or CDR sequences for the corresponding sequences of a human antibody. Accordingly, such humanized antibodies are chimeric antibodies (U.S. Pat. No. 4,816,567), wherein substantially less than an intact human variable domain has been substituted by the corresponding sequence from a non-human species. In practice, humanized antibodies are typically human antibodies in which some CDR residues and possibly some FR residues are substituted by residues from analogous sites in rodent antibodies.

[0158] Human antibodies can also be produced using various techniques known in the art, including phage display libraries [Hoogenboom and Winter, J. Mol. Biol., 227:381 (1991); Marks et al., J. Mol. Biol., 222:581 (1991)]. The techniques of Cole et al. and Boerner et al. are also available for the preparation of human monoclonal antibodies [Cole et al., Monoclonal Antibodies and Cancer Therapy, Alan R. Liss, p. 77 (1985) and Boerner et al., J. Immunol., 147(1):86-95 (1991)]. Humanized antibodies may be achieved by a variety of methods including, for example: (1) grafting the non-human complementarity determining regions (CDRs) onto a human framework and constant region (a process referred to in the art as “humanizing”), or, alternatively, (2) transplanting the entire non-human variable domains, but “cloaking” them with a human-like surface by replacement of surface residues (a process referred to in the art as “veneering”). In the present invention, humanized antibodies will include both “humanized” and “veneered” antibodies. Similarly, human antibodies can be made by introducing human immunoglobulin loci into transgenic animals, e.g., mice in which the endogenous immunoglobulin genes have been partially or completely inactivated. Upon challenge, human antibody production is observed, which closely resembles that seen in humans in all respects, including gene rearrangement, assembly, and antibody repertoire. This approach is described, for example, in U.S. Pat. Nos. 5,545,807; 5,545,806; 5,569,825; 5,625,126; 5,633,425; 5,661,016, and in the following scientific publications: Marks et al., Bio/Technology 10, 779-783 (1992); Lonberg et al., Nature 368 856-859 (1994); Morrison, Nature 368, 812-13 (1994); Fishwild et al., Nature Biotechnology 14, 845-51 (1996); Neuberger, Nature Biotechnology 14, 826 (1996); Lonberg and Huszar, Intern. Rev. Immunol. 13 65-93 (1995); Jones et al., Nature 321:522-525 (1986); Morrison et al., Proc. Natl. Acad. Sci, U.S.A., 81:6851-6855 (1984); Morrison and Oi, Adv. Immunol., 44:65-92 (1988); Verhoeyer et al., Science 239:1534-1536 (1988); Padlan, Molec. Immun. 28:489-498 (1991); Padlan, Molec. Immunol. 31(3):169-217 (1994); and Kettleborough, C. A. et al., Protein Eng. 4(7):773-83 (1991) each of which is incorporated herein by reference.

[0159] The phrase “complementarity determining region” refers to amino acid sequences which together define the binding affinity and specificity of the natural Fv region of a native immunoglobulin binding site. See, e.g., Chothia et al., J. Mol. Biol. 196:901-917 (1987); Kabat et al., U.S. Dept. of Health and Human Services NIH Publication No. 91-3242 (1991). The phrase “constant region” refers to the portion of the antibody molecule that confers effector functions. In the present invention, mouse constant regions are substituted by human constant regions. The constant regions of the subject humanized antibodies are derived from human immunoglobulins. The heavy chain constant region can be selected from any of the five isotypes: alpha, delta, epsilon, gamma or mu. One method of humanizing antibodies comprises aligning the non-human heavy and light chain sequences to human heavy and light chain sequences, selecting and replacing the non-human framework with a human framework based on such alignment, molecular modeling to predict the conformation of the humanized sequence and comparing to the conformation of the parent antibody. This process is followed by repeated back mutation of residues in the CDR region that disturb the structure of the CDRs until the predicted conformation of the humanized sequence model closely approximates the conformation of the non-human CDRs of the parent non-human antibody. Such humanized antibodies may be further derivatized to facilitate uptake and clearance, e.g, via Ashwell receptors. See, e.g., U.S. Pat. Nos. 5,530,101 and 5,585,089 which are incorporated herein by reference.

[0160] Humanized antibodies to CA polypeptides can also be produced using transgenic animals that are engineered to contain human immunoglobulin loci. For example, WO 98/24893 discloses transgenic animals having a human Ig locus wherein the animals do not produce functional endogenous immunoglobulins due to the inactivation of endogenous heavy and light chain loci. WO 91/10741 also discloses transgenic non-primate mammalian hosts capable of mounting an immune response to an immunogen, wherein the antibodies have primate constant and/or variable regions, and wherein the endogenous immunoglobulin-encoding loci are substituted or inactivated. WO 96/30498 discloses the use of the Cre/Lox system to modify the immunoglobulin locus in a mammal, such as to replace all or a portion of the constant or variable region to form a modified antibody molecule. WO 94/02602 discloses non-human mammalian hosts having inactivated endogenous Ig loci and functional human Ig loci. U.S. Pat. No. 5,939,598 discloses methods of making transgenic mice in which the mice lack endogenous heavy chains, and express an exogenous immunoglobulin locus comprising one or more xenogeneic constant regions.

[0161] Using a transgenic animal described above, an immune response can be produced to a selected antigenic molecule, and antibody-producing cells can be removed from the animal and used to produce hybridomas that secrete human monoclonal antibodies. Immunization protocols, adjuvants, and the like are known in the art, and are used in immunization of, for example, a transgenic mouse as described in WO 96/33735. The monoclonal antibodies can be tested for the ability to inhibit or neutralize the biological activity or physiological effect of the corresponding protein.

[0162] In the present invention, CA polypeptides of the invention and variants thereof are used to immunize a transgenic animal as described above. Monoclonal antibodies are made using methods known in the art, and the specificity of the antibodies is tested using isolated CA polypeptides. Methods for preparation of the human or primate CA or an epitope thereof include, but are not limited to chemical synthesis, recombinant DNA techniques or isolation from biological samples. Chemical synthesis of a peptide can be performed, for example, by the classical Merrifeld method of solid phase peptide synthesis (Merrifeld, J. Am. Chem. Soc. 85:2149, 1963 which is incorporated by reference) or the FMOC strategy on a Rapid Automated Multiple Peptide Synthesis system (E. I. du Pont de Nemours Company, Wilmington, Del.) (Caprino and Han, J. Org. Chem. 37:3404, 1972 which is incorporated by reference).

[0163] Polyclonal antibodies can be prepared by immunizing rabbits or other animals by injecting antigen followed by subsequent boosts at appropriate intervals. The animals are bled and sera assayed against purified CA proteins usually by ELISA or by bioassay based upon the ability to block the action of CA proteins. When using avian species, e.g., chicken, turkey and the like, the antibody can be isolated from the yolk of the egg. Monoclonal antibodies can be prepared after the method of Milstein and Kohler by fusing splenocytes from immunized mice with continuously replicating tumor cells such as myeloma or lymphoma cells. (Milstein and Kohler, Nature 256:495-497, 1975; Gulfre and Milstein, Methods in Enzymology: Immunochemical Techniques 73:1-46, Langone and Banatis eds., Academic Press, 1981 which are incorporated by reference). The hybridoma cells so formed are then cloned by limiting dilution methods and supernates assayed for antibody production by ELISA, RIA or bioassay.

[0164] The unique ability of antibodies to recognize and specifically bind to target proteins provides an approach for treating an overexpression of the protein. Thus, another aspect of the present invention provides for a method for preventing or treating diseases involving overexpression of a CA polypeptide by treatment of a patient with specific antibodies to the CA protein.

[0165] Specific antibodies, either polyclonal or monoclonal, to the CA proteins can be produced by any suitable method known in the art as discussed above. For example, murine or human monoclonal antibodies can be produced by hybridoma technology or, alternatively, the CA proteins, or an immunologically active fragment thereof, or an anti-idiotypic antibody, or fragment thereof can be administered to an animal to elicit the production of antibodies capable of recognizing and binding to the CA proteins. Such antibodies can be from any class of antibodies including, but not limited to IgG, IgA, IgM, IgD, and IgE or in the case of avian species, IgY and from any subclass of antibodies.

[0166] By immunotherapy is meant treatment of a cancer with an antibody raised against a CA protein. As used herein, immunotherapy can be passive or active. Passive immunotherapy as defined herein is the passive transfer of antibody to a recipient (patient). Active immunization is the induction of antibody and/or T-cell responses in a recipient (patient). Induction of an immune response is the result of providing the recipient with an antigen to which antibodies are raised. As appreciated by one of ordinary skill in the art, the antigen may be provided by injecting a polypeptide against which antibodies are desired to be raised into a recipient, or contacting the recipient with a nucleic acid capable of expressing the antigen and under conditions for expression of the antigen.

[0167] In a preferred embodiment, oncogenes which encode secreted growth factors may be inhibited by raising antibodies against CA proteins that are secreted proteins as described above. Without being bound by theory, antibodies used for treatment, bind and prevent the secreted protein from binding to its receptor, thereby inactivating the secreted CA protein.

[0168] In another preferred embodiment, the CA protein to which antibodies are raised is a transmembrane protein. Without being bound by theory, antibodies used for treatment, bind the extracellular domain of the CA protein and prevent it from binding to other proteins, such as circulating ligands or cell-associated molecules. The antibody may cause down-regulation of the transmembrane CA protein. As will be appreciated by one of ordinary skill in the art, the antibody may be a competitive, non-competitive or uncompetitive inhibitor of protein binding to the extracellular domain of the CA protein. The antibody is also an antagonist of the CA protein. Further, the antibody prevents activation of the transmembrane CA protein. In one aspect, when the antibody prevents the binding of other molecules to the CA protein, the antibody prevents growth of the cell. The antibody may also sensitize the cell to cytotoxic agents, including, but not limited to TNF-α, TNF-β, IL-1, INF-γ and IL-2, or chemotherapeutic agents including 5FU, vinblastine, actinomycin D, cisplatin, methotrexate, and the like. In some instances the antibody belongs to a sub-type that activates serum complement when complexed with the transmembrane protein thereby mediating cytotoxicity. Thus, cancers may be treated by administering to a patient antibodies directed against the transmembrane CA protein.

[0169] In another preferred embodiment, the antibody is conjugated to a therapeutic moiety. In one aspect the therapeutic moiety is a small molecule that modulates the activity of the CA protein. In another aspect the therapeutic moiety modulates the activity of molecules associated with or in close proximity to the CA protein. The therapeutic moiety may inhibit enzymatic activity such as protease or protein kinase activity associated with cancer.

[0170] In a preferred embodiment, the therapeutic moiety may also be a cytotoxic agent. In this method, radioisotopes, natural toxins, chemotherapy agents, or other substances (such as biological response modifiers) are chemically linked or conjugated to a monoclonal antibody to form “immunoconjugates” and “immunotoxins” which target the cytotoxic agent to tumor tissue or cells resulting in a reduction in the number of afflicted cells, thereby reducing symptoms associated with cancers, including lymphoma. Cytotoxic agents are numerous and varied and include, but are not limited to, cytotoxic drugs or toxins or active fragments of such toxins. Suitable toxins and their corresponding fragments include diphtheria A chain, exotoxin A chain, ricin A chain, abrin A chain, curcin, crotin, phenomycin, enomycin and the like. Cytotoxic agents also include radiochemicals made by conjugating radioisotopes to antibodies raised against CA proteins, or binding of a radionuclide to a chelating agent that has been covalently attached to the antibody. Targeting the therapeutic moiety to transmembrane CA proteins not only serves to increase the local concentration of therapeutic moiety in the cancer of interest, i.e., lymphoma, but also serves to reduce deleterious side effects that may be associated with the therapeutic moiety. A number of investigators have used monoclonal antibodies as carriers of cytotoxic substances in attempts to selectively direct those agents to malignant tissue. More particularly, a number of monoclonal antibodies have been conjugated to toxins such as ricin, abrin, diphtheria toxin and Pseudomonas exotoxin or to enzymatically active portions (A chains) thereof via heterobifunctional agents. See, e.g., U.S. Pat. No. 4,753,894 to Frankel et al.; Nevelle, et al. (1982) Immunol Rev 62:75-91; Ross et al. (1980) Eur. J Biochem 104; Vitteta et al. (1982) Immunol Rev 62:158-183; Raso et al. (1982) Cancer Res 42:457-464, and Trowbridge et al. (1981) Nature 294:171-173.

[0171] In another preferred embodiment, the CA protein against which the antibodies are raised is an intracellular protein. In this case, the antibody may be conjugated to a protein that facilitates entry into the cell. In one case, the antibody enters the cell by endocytosis. In another embodiment, a nucleic acid encoding the antibody is administered to the individual or cell. Moreover, wherein the CA protein can be targeted within a cell, e.g., the nucleus, an antibody thereto contains a signal for that target localization, e.g., a nuclear localization signal.

[0172] The CA antibodies of the invention specifically bind to CA proteins. By “specifically bind” herein is meant that the antibodies bind to the protein with a binding constant in the range of 10⁻⁴-10⁻⁶ M⁻¹, with a preferred range being 10⁻⁷-10⁻⁹ M⁻¹.

[0173] In a preferred embodiment, the CA protein is purified or isolated after expression. CA proteins may be isolated or purified in a variety of ways known to those skilled in the art depending on what other components are present in the sample. Standard purification methods include electrophoretic, molecular, immunological and chromatographic techniques, including ion exchange, hydrophobic, affinity, and reverse-phase HPLC chromatography, and chromatofocusing. For example, the CA protein may be purified using a standard anti-CA antibody column. Ultrafiltration and diafiltration techniques, in conjunction with protein concentration, are also useful. For general guidance in suitable purification techniques, see Scopes, R., Protein Purification, Springer-Verlag, NY (1982). The degree of purification necessary will vary depending on the use of the CA protein. In some instances no purification will be necessary.

Detection of Cancer Phenotype

[0174] Once expressed and purified if necessary, the CA proteins and nucleic acids are useful in a number of applications. In one aspect, the expression levels of genes are determined for different cellular states in the cancer phenotype; that is, the expression levels of genes in normal tissue and in cancer tissue (and in some cases, for varying severities of lymphoma that relate to prognosis, as outlined below) are evaluated to provide expression profiles. An expression profile of a particular cell state or point of development is essentially a “fingerprint” of the state; while two states may have any particular gene similarly expressed, the evaluation of a number of genes simultaneously allows the generation of a gene expression profile that is unique to the state of the cell. By comparing expression profiles of cells in different states, information regarding which genes are important (including both up- and down-regulation of genes) in each of these states is obtained. Then, diagnosis may be done or confirmed: does tissue from a particular patient have the gene expression profile of normal or cancer tissue.

[0175] “Differential expression,” or equivalents used herein, refers to both qualitative as well as quantitative differences in the temporal and/or cellular expression patterns of genes, within and among the cells. Thus, a differentially expressed gene can qualitatively have its expression altered, including an activation or inactivation, in, for example, normal versus cancer tissue. That is, genes may be turned on or turned off in a particular state, relative to another state. As is apparent to the skilled artisan, any comparison of two or more states can be made. Such a qualitatively regulated gene will exhibit an expression pattern within a state or cell type which is detectable by standard techniques in one such state or cell type, but is not detectable in both. Alternatively, the determination is quantitative in that expression is increased or decreased; that is, the expression of the gene is either up-regulated, resulting in an increased amount of transcript, or down-regulated, resulting in a decreased amount of transcript. The degree to which expression differs need only be large enough to quantify via standard characterization techniques as outlined below, such as by use of Affymetrix GeneChip® expression arrays, Lockhart, Nature Biotechnology, 14:1675-1680 (1996), hereby expressly incorporated by reference. Other techniques include, but are not limited to, quantitative reverse transcriptase PCR, Northern analysis and RNase protection. As outlined above, preferably the change in expression (i.e. upregulation or downregulation) is at least about 50%, more preferably at least about 100%, more preferably at least about 150%, more preferably, at least about 200%, with from 300 to at least 1000% being especially preferred.

[0176] As will be appreciated by those in the art, this may be done by evaluation at either the gene transcript, or the protein level; that is, the amount of gene expression may be monitored using nucleic acid probes to the DNA or RNA equivalent of the gene transcript, and the quantification of gene expression levels, or, alternatively, the final gene product itself (protein) can be monitored, for example through the use of antibodies to the CA protein and standard immunoassays (ELISAs, etc.) or other techniques, including mass spectroscopy assays, 2D gel electrophoresis assays, etc. Thus, the proteins corresponding to CA genes, i.e. those identified as being important in a particular cancer phenotype, i.e., lymphoma, can be evaluated in a diagnostic test specific for that cancer.

[0177] In a preferred embodiment, gene expression monitoring is done and a number of genes, i.e. an expression profile, is monitored simultaneously, although multiple protein expression monitoring can be done as well. Similarly, these assays may be done on an individual basis as well.

[0178] In this embodiment, the CA nucleic acid probes may be attached to biochips as outlined herein for the detection and quantification of CA sequences in a particular cell. The assays are done as is known in the art. As will be appreciated by those in the art, any number of different CA sequences may be used as probes, with single sequence assays being used in some cases, and a plurality of the sequences described herein being used in other embodiments. In addition, while solid-phase assays are described, any number of solution based assays may be done as well.

[0179] In a preferred embodiment, both solid and solution based assays may be used to detect CA sequences that are up-regulated or down-regulated in cancers as compared to normal tissue. In instances where the CA sequence has been altered but shows the same expression profile or an altered expression profile, the protein will be detected as outlined herein.

[0180] In a preferred embodiment nucleic acids encoding the CA protein are detected. Although DNA or RNA encoding the CA protein may be detected, of particular interest are methods wherein the mRNA encoding a CA protein is detected. The presence of mRNA in a sample is an indication that the CA gene has been transcribed to form the mRNA, and suggests that the protein is expressed. Probes to detect the mRNA can be any nucleotide/deoxynucleotide probe that is complementary to and base pairs with the mRNA and includes but is not limited to oligonucleotides, cDNA or RNA. Probes also should contain a detectable label, as defined herein. In one method the mRNA is detected after immobilizing the nucleic acid to be examined on a solid support such as nylon membranes and hybridizing the probe with the sample. Following washing to remove the non-specifically bound probe, the label is detected. In another method detection of the mRNA is performed in situ. In this method permeabilized cells or tissue samples are contacted with a detectably labeled nucleic acid probe for sufficient time to allow the probe to hybridize with the target mRNA. Following washing to remove the non-specifically bound probe, the label is detected. For example a digoxygenin labeled riboprobe (RNA probe) that is complementary to the mRNA encoding a CA protein is detected by binding the digoxygenin with an anti-digoxygenin secondary antibody and developed with nitro blue tetrazolium and 5-bromo-4-chloro-3-indoyl phosphate.

[0181] In a preferred embodiment, any of the three classes of proteins as described herein (secreted, transmembrane or intracellular proteins) are used in diagnostic assays. The CA proteins, antibodies, nucleic acids, modified proteins and cells containing CA sequences are used in diagnostic assays. This can be done on an individual gene or corresponding polypeptide level, or as sets of assays.

[0182] As described and defined herein, CA proteins find use as markers of cancers, including lymphomas such as, but not limited to, Hodgkin's and non-Hodgkin's lymphoma. Detection of these proteins in putative cancer tissue or patients allows for a determination or diagnosis of the type of cancer. Numerous methods known to those of ordinary skill in the art find use in detecting cancers. In one embodiment, antibodies are used to detect CA proteins. A preferred method separates proteins from a sample or patient by electrophoresis on a gel (typically a denaturing and reducing protein gel, but may be any other type of gel including isoelectric focusing gels and the like). Following separation of proteins, the CA protein is detected by immunoblotting with antibodies raised against the CA protein. Methods of immunoblotting are well known to those of ordinary skill in the art.

[0183] In another preferred method, antibodies to the CA protein find use in in situ imaging techniques. In this method cells are contacted with from one to many antibodies to the CA protein(s). Following washing to remove non-specific antibody binding, the presence of the antibody or antibodies is detected. In one embodiment the antibody is detected by incubating with a secondary antibody that contains a detectable label. In another method the primary antibody to the CA protein(s) contains a detectable label. In another preferred embodiment each one of multiple primary antibodies contains a distinct and detectable label. This method finds particular use in simultaneous screening for a plurality of CA proteins. As will be appreciated by one of ordinary skill in the art, numerous other histological imaging techniques are useful in the invention.

[0184] In a preferred embodiment the label is detected in a fluorometer that has the ability to detect and distinguish emissions of different wavelengths. In addition, a fluorescence activated cell sorter (FACS) can be used in the method.

[0185] In another preferred embodiment, antibodies find use in diagnosing cancers from blood samples. As previously described, certain CA proteins are secreted/circulating molecules. Blood samples, therefore, are useful as samples to be probed or tested for the presence of secreted CA proteins. Antibodies can be used to detect the CA proteins by any of the previously described immunoassay techniques including ELISA, immunoblotting (Western blotting), immunoprecipitation, BIACORE technology and the like, as will be appreciated by one of ordinary skill in the art.

[0186] In a preferred embodiment, in situ hybridization of labeled CA nucleic acid probes to tissue arrays is done. For example, arrays of tissue samples, including CA tissue and/or normal tissue, are made. In situ hybridization as is known in the art can then be done.

[0187] It is understood that when comparing the expression fingerprints between an individual and a standard, the skilled artisan can make a diagnosis as well as a prognosis. It is further understood that the genes that indicate diagnosis may differ from those that indicate prognosis.

[0188] In a preferred embodiment, the CA proteins, antibodies, nucleic acids, modified proteins and cells containing CA sequences are used in prognosis assays. As above, gene expression profiles can be generated that correlate to cancer, especially lymphoma, severity, in terms of long term prognosis. Again, this may be done on either a protein or gene level, with the use of genes being preferred. As above, the CA probes are attached to biochips for the detection and quantification of CA sequences in a tissue or patient. The assays proceed as outlined for diagnosis.

Screening for CA-Targeted Drugs

[0189] In one embodiment, any of the CA sequences as described herein are used in drug screening assays. The CA proteins, antibodies, nucleic acids, modified proteins and cells containing CA sequences are used in drug screening assays or by evaluating the effect of drug candidates on a “gene expression profile” or expression profile of polypeptides. In one embodiment, the expression profiles are used, preferably in conjunction with high throughput screening techniques to allow monitoring for expression profile genes after treatment with a candidate agent, Zlokarnik, et al., Science 279, 84-8 (1998), Heid, et al., Genome Res., 6:986-994 (1996).

[0190] In another embodiment, the CA proteins, antibodies, nucleic acids, modified proteins and cells containing the native or modified CA proteins are used in screening assays. That is, the present invention provides novel methods for screening for compositions that modulate the cancer phenotype. As above, this can be done by screening for modulators of gene expression or for modulators of protein activity. Similarly, this may be done on an individual gene or protein level or by evaluating the effect of drug candidates on a “gene expression profile”. In a preferred embodiment, the expression profiles are used, preferably in conjunction with high throughput screening techniques to allow monitoring for expression profile genes after treatment with a candidate agent, see Zlokarnik, supra.

[0191] Having identified the CA genes herein, a variety of assays to evaluate the effects of agents on gene expression may be executed. In a preferred embodiment, assays may be run on an individual gene or protein level. That is, having identified a particular gene as aberrantly regulated in cancer, candidate bioactive agents may be screened to modulate the gene's regulation. “Modulation” thus includes both an increase and a decrease in gene expression or activity. The preferred amount of modulation will depend on the original change of the gene expression in normal versus tumor tissue, with changes of at least 10%, preferably 50%, more preferably 100-300%, and in some embodiments 300-1000% or greater. Thus, if a gene exhibits a 4 fold increase in tumor compared to normal tissue, a decrease of about four fold is desired; a 10 fold decrease in tumor compared to normal tissue gives a 10 fold increase in expression for a candidate agent is desired, etc. Alternatively, where the CA sequence has been altered but shows the same expression profile or an altered expression profile, the protein will be detected as outlined herein.

[0192] As will be appreciated by those in the art, this may be done by evaluation at either the gene or the protein level; that is, the amount of gene expression may be monitored using nucleic acid probes and the quantification of gene expression levels, or, alternatively, the level of the gene product itself can be monitored, for example through the use of antibodies to the CA protein and standard immunoassays. Alternatively, binding and bioactivity assays with the protein may be done as outlined below.

[0193] In a preferred embodiment, gene expression monitoring is done and a number of genes, i.e. an expression profile, is monitored simultaneously, although multiple protein expression monitoring can be done as well.

[0194] In this embodiment, the CA nucleic acid probes are attached to biochips as outlined herein for the detection and quantification of CA sequences in a particular cell. The assays are further described below.

[0195] Generally, in a preferred embodiment, a candidate bioactive agent is added to the cells prior to analysis. Moreover, screens are provided to identify a candidate bioactive agent that modulates a particular type of cancer, modulates CA proteins, binds to a CA protein, or interferes between the binding of a CA protein and an antibody.

[0196] The term “candidate bioactive agent” or “drug candidate” or grammatical equivalents as used herein describes any molecule, e.g., protein, oligopeptide, small organic or inorganic molecule, polysaccharide, polynucleotide, etc., to be tested for bioactive agents that are capable of directly or indirectly altering either the cancer phenotype, binding to and/or modulating the bioactivity of a CA protein, or the expression of a CA sequence, including both nucleic acid sequences and protein sequences. In a particularly preferred embodiment, the candidate agent suppresses a CA phenotype, for example to a normal tissue fingerprint. Similarly, the candidate agent preferably suppresses a severe CA phenotype. Generally a plurality of assay mixtures are run in parallel with different agent concentrations to obtain a differential response to the various concentrations. Typically, one of these concentrations serves as a negative control, i.e., at zero concentration or below the level of detection.

[0197] In one aspect, a candidate agent will neutralize the effect of a CA protein. By “neutralize” is meant that activity of a protein is either inhibited or counter acted against so as to have substantially no effect on a cell.

[0198] Candidate agents encompass numerous chemical classes, though typically they are organic or inorganic molecules, preferably small organic compounds having a molecular weight of more than 100 and less than about 2,500 Daltons. Preferred small molecules are less than 2000, or less than 1500 or less than 1000 or less than 500 D. Candidate agents comprise functional groups necessary for structural interaction with proteins, particularly hydrogen bonding, and typically include at least an amine, carbonyl, hydroxyl or carboxyl group, preferably at least two of the functional chemical groups. The candidate agents often comprise cyclical carbon or heterocyclic structures and/or aromatic or polyaromatic structures substituted with one or more of the above functional groups. Candidate agents are also found among biomolecules including peptides, saccharides, fatty acids, steroids, purines, pyrimidines, derivatives, structural analogs or combinations thereof. Particularly preferred are peptides.

[0199] Candidate agents are obtained from a wide variety of sources including libraries of synthetic or natural compounds. For example, numerous means are available for random and directed synthesis of a wide variety of organic compounds and biomolecules, including expression of randomized oligonucleotides. Alternatively, libraries of natural compounds in the form of bacterial, fungal, plant and animal extracts are available or readily produced. Additionally, natural or synthetically produced libraries and compounds are readily modified through conventional chemical, physical and biochemical means. Known pharmacological agents may be subjected to directed or random chemical modifications, such as acylation, alkylation, esterification, or amidification to produce structural analogs.

[0200] In one embodiment, the candidate bioactive agents are proteins. By “protein” herein is meant at least two covalently attached amino acids, which includes proteins, polypeptides, oligopeptides and peptides. The protein may be made up of naturally occurring amino acids and peptide bonds, or synthetic peptidomimetic structures. Thus “amino acid”, or “peptide residue”, as used herein means both naturally occurring and synthetic amino acids. For example, homo-phenylalanine, citrulline and norleucine are considered amino acids for the purposes of the invention. “Amino acid” also includes imino acid residues such as proline and hydroxyproline. The side chains may be in either the (R) or the (S) configuration. In the preferred embodiment, the amino acids are in the (S) or L-configuration. If non-naturally occurring side chains are used, non-amino acid substituents may be used, for example to prevent or retard in vivo degradations.

[0201] In a preferred embodiment, the candidate bioactive agents are naturally occurring proteins or fragments of naturally occurring proteins. Thus, for example, cellular extracts containing proteins, or random or directed digests of proteinaceous cellular extracts, may be used. In this way libraries of prokaryotic and eukaryotic proteins may be made for screening in the methods of the invention. Particularly preferred in this embodiment are libraries of bacterial, fungal, viral, and mammalian proteins, with the latter being preferred, and human proteins being especially preferred.

[0202] In another preferred embodiment, the candidate bioactive agents are peptides of from about 5 to about 30 amino acids, with from about 5 to about 20 amino acids being preferred, and from about 7 to about 15 being particularly preferred. The peptides may be digests of naturally occurring proteins as is outlined above, random peptides, or “biased” random peptides. By “randomized” or grammatical equivalents herein is meant that each nucleic acid and peptide consists of essentially random nucleotides and amino acids, respectively. Since generally these random peptides (or nucleic acids, discussed below) are chemically synthesized, they may incorporate any nucleotide or amino acid at any position. The synthetic process can be designed to generate randomized proteins or nucleic acids, to allow the formation of all or most of the possible combinations over the length of the sequence, thus forming a library of randomized candidate bioactive proteinaceous agents.

[0203] In one embodiment, the library is fully randomized, with no sequence preferences or constants at any position. In a preferred embodiment, the library is biased. That is, some positions within the sequence are either held constant, or are selected from a limited number of possibilities. For example, in a preferred embodiment, the nucleotides or amino acid residues are randomized within a defined class, for example, of hydrophobic amino acids, hydrophilic residues, sterically biased (either small or large) residues, towards the creation of nucleic acid binding domains, the creation of cysteines, for cross-linking, prolines for SH-3 domains, serines, threonines, tyrosines or histidines for phosphorylation sites, etc., or to purines, etc.

[0204] In one embodiment, the candidate bioactive agents are nucleic acids. As described generally for proteins, nucleic acid candidate bioactive agents may be naturally occurring nucleic acids, random nucleic acids, or “biased” random nucleic acids. In another embodiment, the candidate bioactive agents are organic chemical moieties, a wide variety of which are available in the literature.

[0205] In assays for testing alteration of the expression profile of one or more CA genes, after the candidate agent has been added and the cells allowed to incubate for some period of time, a nucleic acid sample containing the target sequences to be analyzed is prepared. The target sequence is prepared using known techniques (e.g., converted from RNA to labeled cDNA, as described above) and added to a suitable microarray. For example, an in vitro reverse transcription with labels covalently attached to the nucleosides is performed. Generally, the nucleic acids are labeled with a label as defined herein, especially with biotin-FITC or PE, Cy3 and Cy5.

[0206] As will be appreciated by those in the art, these assays can be direct hybridization assays or can comprise “sandwich assays”, which include the use of multiple probes, as is generally outlined in U.S. Pat. Nos. 5,681,702, 5,597,909, 5,545,730, 5,594,117, 5,591,584, 5,571,670, 5,580,731, 5,571,670, 5,591,584, 5,624,802, 5,635,352, 5,594,118, 5,359,100, 5,124,246 and 5,681,697, all of which are hereby incorporated by reference. In this embodiment, in general, the target nucleic acid is prepared as outlined above, and then added to the biochip comprising a plurality of nucleic acid probes, under conditions that allow the formation of a hybridization complex.

[0207] A variety of hybridization conditions may be used in the present invention, including high, moderate and low stringency conditions as outlined above. The assays are generally run under stringency conditions that allow formation of the label probe hybridization complex only in the presence of target. Stringency can be controlled by altering a step parameter that is a thermodynamic variable, including, but not limited to, temperature, formamide concentration, salt concentration, chaotropic salt concentration, pH, organic solvent concentration, etc. These parameters may also be used to control non-specific binding, as is generally outlined in U.S. Pat. No. 5,681,697. Thus it may be desirable to perform certain steps at higher stringency conditions to reduce non-specific binding.

[0208] The reactions outlined herein may be accomplished in a variety of ways, as will be appreciated by those in the art. Components of the reaction may be added simultaneously, or sequentially, in any order, with preferred embodiments outlined below. In addition, the reaction may include a variety of other reagents in the assays. These include reagents like salts, buffers, neutral proteins, e.g. albumin, detergents, etc which may be used to facilitate optimal hybridization and detection, and/or reduce non-specific or background interactions. Also reagents that otherwise improve the efficiency of the assay, such as protease inhibitors, nuclease inhibitors, anti-microbial agents, etc., may be used, depending on the sample preparation methods and purity of the target. In addition, either solid phase or solution based (i.e., kinetic PCR) assays may be used.

[0209] Once the assay is run, the data are analyzed to determine the expression levels, and changes in expression levels as between states, of individual genes, forming a gene expression profile.

[0210] In a preferred embodiment, as for the diagnosis and prognosis applications, having identified the differentially expressed gene(s) or mutated gene(s) important in any one state, screens can be run to test for alteration of the expression of the CA genes individually. That is, screening for modulation of regulation of expression of a single gene can be done. Thus, for example, in the case of target genes whose presence or absence is unique between two states, screening is done for modulators of the target gene expression.

[0211] In addition, screens can be done for novel genes that are induced in response to a candidate agent. After identifying a candidate agent based upon its ability to suppress a CA expression pattern leading to a normal expression pattern, or modulate a single CA gene expression profile so as to mimic the expression of the gene from normal tissue, a screen as described above can be performed to identify genes that are specifically modulated in response to the agent. Comparing expression profiles between normal tissue and agent treated CA tissue reveals genes that are not expressed in normal tissue or CA tissue, but are expressed in agent treated tissue. These agent specific sequences can be identified and used by any of the methods described herein for CA genes or proteins. In particular these sequences and the proteins they encode find use in marking or identifying agent-treated cells. In addition, antibodies can be raised against the agent-induced proteins and used to target novel therapeutics to the treated CA tissue sample.

[0212] Thus, in one embodiment, a candidate agent is administered to a population of CA cells, that thus has an associated CA expression profile. By “administration” or “contacting” herein is meant that the candidate agent is added to the cells in such a manner as to allow the agent to act upon the cell, whether by uptake and intracellular action, or by action at the cell surface. In some embodiments, nucleic acid encoding a proteinaceous candidate agent (i.e. a peptide) may be put into a viral construct such as a retroviral construct and added to the cell, such that expression of the peptide agent is accomplished; see PCT US97/01019, hereby expressly incorporated by reference.

[0213] Once the candidate agent has been administered to the cells, the cells can be washed if desired and are allowed to incubate under preferably physiological conditions for some period of time. The cells are then harvested and a new gene expression profile is generated, as outlined herein.

[0214] Thus, for example, CA tissue may be screened for agents that reduce or suppress the CA phenotype. A change in at least one gene of the expression profile indicates that the agent has an effect on CA activity. By defining such a signature for the CA phenotype, screens for new drugs that alter the phenotype can be devised. With this approach, the drug target need not be known and need not be represented in the original expression screening platform, nor does the level of transcript for the target protein need to change.

[0215] In a preferred embodiment, as outlined above, screens may be done on individual genes and gene products (proteins). That is, having identified a particular differentially expressed gene as important in a particular state, screening of modulators of either the expression of the gene or the gene product itself can be done. The gene products of differentially expressed genes are sometimes referred to herein as “CA proteins” or “CAP”. The CAP may be a fragment, or alternatively, be the full-length protein to the fragment encoded by the nucleic acids of Tables 1-49 (human genomic sequences of SEQ ID NOS: 4, 20, 26, 36, 44, 54, 68, 74, 91, 105, 115, 149, 159, 165, 189, 203, 217, 229, 239, 249, 257, 267, 273, 281, 288, 296, 306, 314, 326, 336, 348, 366, 377, 383, 386, 389, 399, 409, 417, 431, 445, 459, 472, 482, and 498, and sequences of SEQ ID NOS: 5, 7, 9, 11, 13, 21, 27, 29, 37, 39, 45, 47, 49, 55, 57, 59, 61, 63, 69, 75, 77, 79, 81, 92, 94, 96, 98, 100, 106, 108, 110, 116, 118, 120, 122, 124, 126, 128, 130, 132, 134, 136, 138, 140, 150, 152, 160, 166, 168, 170, 172, 174, 176, 178, 180, 190, 192, 194, 204, 206, 208, 210, 212, 218, 220, 222, 224, 230, 232, 234, 240, 242, 244, 250, 258, 260, 268, 274, 282, 284, 286, 289, 297, 307, 315, 317, 319, 321, 327, 329, 337, 339, 349, 351, 367, 369, 378, 384, 387, 390, 392, 394, 400, 402, 404, 410, 412, 418, 420, 422, 424, 426, 432, 434, 436, 438, 446, 448, 450, 452, 454, 460, 462, 464, 473, 475, 477, 483, 485, 487, 489, 491, 499, 501, 503, and 505 corresponding to the human mRNAs generated therefrom). In a preferred embodiment, the CAP is selected from the human protein sequences shown in Tables 1-49 (of SEQ ID NOS: 6, 8, 10, 12, 14, 22, 28, 30, 38, 40, 46, 48, 50, 56, 58, 60, 62, 64, 70, 76, 78, 80, 82, 93, 95, 97, 99, 101, 107, 109, 111, 117, 119, 121, 123, 125, 127, 129, 131, 133, 135, 137, 139, 141, 151, 153, 161, 167, 169, 171, 173, 175, 177, 179, 181, 191, 193, 195, 205, 207, 209, 211, 213, 219, 221, 223, 225, 231, 233, 235, 241, 243, 245, 251, 259, 261, 269, 275, 283, 285, 287, 290, 298, 308, 316, 318, 320, 322, 328, 330, 338, 340, 350, 352, 368, 370, 379, 385, 388, 391, 393, 395, 401, 403, 405, 411, 413, 419, 421, 423, 425, 427, 433, 435, 437, 439, 447, 449, 451, 453, 455, 461, 463, 465, 474, 476, 478, 484, 486, 488, 490, 492, 500, 502, 504, and 506). In another embodiment, the sequences are sequence variants as further described herein.

[0216] Preferably, the CAP is a fragment approximately 14 to 24 amino acids in length. More preferably the fragment is a soluble fragment. Preferably, the fragment includes a non-transmembrane region. In a preferred embodiment, the fragment has an N-terminal Cys to aid in solubility. In one embodiment, the C-terminus of the fragment is kept as a free acid and the N-terminus is a free amine to aid in coupling, e.g., to a cysteine.

[0217] In one embodiment the CA proteins are conjugated to an immunogenic agent as discussed herein. In one embodiment the CA protein is conjugated to BSA.

[0218] In a preferred embodiment, screening is done to alter the biological function of the expression product of the CA gene. Again, having identified the importance of a gene in a particular state, screening for agents that bind and/or modulate the biological activity of the gene product can be run as is more fully outlined below.

[0219] In a preferred embodiment, screens are designed to first find candidate agents that can bind to CA proteins, and then these agents may be used in assays that evaluate the ability of the candidate agent to modulate the CAP activity and the cancer phenotype. Thus, as will be appreciated by those in the art, there are a number of different assays that may be run; binding assays and activity assays.

[0220] In a preferred embodiment, binding assays are done. In general, purified or isolated gene product is used; that is, the gene products of one or more CA nucleic acids are made. In general, this is done as is known in the art. For example, antibodies are generated to the protein gene products, and standard immunoassays are run to determine the amount of protein present. Alternatively, cells comprising the CA proteins can be used in the assays.

[0221] Thus, in a preferred embodiment, the methods comprise combining a CA protein and a candidate bioactive agent, and determining the binding of the candidate agent to the CA protein. Preferred embodiments utilize the human or mouse CA protein, although other mammalian proteins may also be used, for example for the development of animal models of human disease. In some embodiments, as outlined herein, variant or derivative CA proteins may be used.

[0222] Generally, in a preferred embodiment of the methods herein, the CA protein or the candidate agent is non-diffusably bound to an insoluble support having isolated sample receiving areas (e.g. a microtiter plate, an array, etc.). The insoluble support may be made of any composition to which the compositions can be bound, is readily separated from soluble material, and is otherwise compatible with the overall method of screening. The surface of such supports may be solid or porous and of any convenient shape. Examples of suitable insoluble supports include microtiter plates, arrays, membranes and beads. These are typically made of glass, plastic (e.g., polystyrene), polysaccharides, nylon or nitrocellulose, Teflon®, etc. Microtiter plates and arrays are especially convenient because a large number of assays can be carried out simultaneously, using small amounts of reagents and samples.

[0223] The particular manner of binding of the composition is not crucial so long as it is compatible with the reagents and overall methods of the invention, maintains the activity of the composition and is nondiffusable. Preferred methods of binding include the use of antibodies (which do not sterically block either the ligand binding site or activation sequence when the protein is bound to the support), direct binding to “sticky” or ionic supports, chemical crosslinking, the synthesis of the protein or agent on the surface, etc. Following binding of the protein or agent, excess unbound material is removed by washing. The sample receiving areas may then be blocked through incubation with bovine serum albumin (BSA), casein or other innocuous protein or other moiety.

[0224] In a preferred embodiment, the CA protein is bound to the support, and a candidate bioactive agent is added to the assay. Alternatively, the candidate agent is bound to the support and the CA protein is added. Novel binding agents include specific antibodies, non-natural binding agents identified in screens of chemical libraries, peptide analogs, etc. Of particular interest are screening assays for agents that have a low toxicity for human cells. A wide variety of assays may be used for this purpose, including labeled in vitro protein-protein binding assays, electrophoretic mobility shift assays, immunoassays for protein binding, functional assays (phosphorylation assays, etc.) and the like.

[0225] The determination of the binding of the candidate bioactive agent to the CA protein may be done in a number of ways. In a preferred embodiment, the candidate bioactive agent is labeled, and binding determined directly. For example, this may be done by attaching all or a portion of the CA protein to a solid support, adding a labeled candidate agent (for example a fluorescent label), washing off excess reagent, and determining whether the label is present on the solid support. Various blocking and washing steps may be utilized as is known in the art.

[0226] By “labeled” herein is meant that the compound is either directly or indirectly labeled with a label which provides a detectable signal, e.g. radioisotope, fluorescers, enzyme, antibodies, particles such as magnetic particles, chemiluminescers, or specific binding molecules, etc. Specific binding molecules include pairs, such as biotin and streptavidin, digoxin and antidigoxin etc. For the specific binding members, the complementary member would normally be labeled with a molecule which provides for detection, in accordance with known procedures, as outlined above. The label can directly or indirectly provide a detectable signal.

[0227] In some embodiments, only one of the components is labeled. For example, the proteins (or proteinaceous candidate agents) may be labeled at tyrosine positions using ¹²⁵I, or with fluorophores. Alternatively, more than one component may be labeled with different labels; using ¹²⁵I for the proteins, for example, and a fluorophore for the candidate agents.

[0228] In a preferred embodiment, the binding of the candidate bioactive agent is determined through the use of competitive binding assays. In this embodiment, the competitor is a binding moiety known to bind to the target molecule (i.e. CA protein), such as an antibody, peptide, binding partner, ligand, etc. Under certain circumstances, there may be competitive binding as between the bioactive agent and the binding moiety, with the binding moiety displacing the bioactive agent.

[0229] In one embodiment, the candidate bioactive agent is labeled. Either the candidate bioactive agent, or the competitor, or both, is added first to the protein for a time sufficient to allow binding, if present. Incubations may be performed at any temperature which facilitates optimal activity, typically between 4 and 40° C. Incubation periods are selected for optimum activity, but may also be optimized to facilitate rapid high throughput screening. Typically between 0.1 and 1 hour will be sufficient. Excess reagent is generally removed or washed away. The second component is then added, and the presence or absence of the labeled component is followed, to indicate binding.

[0230] In a preferred embodiment, the competitor is added first, followed by the candidate bioactive agent. Displacement of the competitor is an indication that the candidate bioactive agent is binding to the CA protein and thus is capable of binding to, and potentially modulating, the activity of the CA protein. In this embodiment, either component can be labeled. Thus, for example, if the competitor is labeled, the presence of label in the wash solution indicates displacement by the agent. Alternatively, if the candidate bioactive agent is labeled, the presence of the label on the support indicates displacement.

[0231] In an alternative embodiment, the candidate bioactive agent is added first, with incubation and washing, followed by the competitor. The absence of binding by the competitor may indicate that the bioactive agent is bound to the CA protein with a higher affinity. Thus, if the candidate bioactive agent is labeled, the presence of the label on the support, coupled with a lack of competitor binding, may indicate that the candidate agent is capable of binding to the CA protein.

[0232] In a preferred embodiment, the methods comprise differential screening to identity bioactive agents that are capable of modulating the activity of the CA proteins. In this embodiment, the methods comprise combining a CA protein and a competitor in a first sample. A second sample comprises a candidate bioactive agent, a CA protein and a competitor. The binding of the competitor is determined for both samples, and a change, or difference in binding between the two samples indicates the presence of an agent capable of binding to the CA protein and potentially modulating its activity. That is, if the binding of the competitor is different in the second sample relative to the first sample, the agent is capable of binding to the CA protein.

[0233] Alternatively, a preferred embodiment utilizes differential screening to identify drug candidates that bind to the native CA protein, but cannot bind to modified CA proteins. The structure of the CA protein may be modeled, and used in rational drug design to synthesize agents that interact with that site. Drug candidates that affect CA bioactivity are also identified by screening drugs for the ability to either enhance or reduce the activity of the protein.

[0234] Positive controls and negative controls may be used in the assays. Preferably all control and test samples are performed in at least triplicate to obtain statistically significant results. Incubation of all samples is for a time sufficient for the binding of the agent to the protein. Following incubation, all samples are washed free of non-specifically bound material and the amount of bound, generally labeled agent determined. For example, where a radiolabel is employed, the samples may be counted in a scintillation counter to determine the amount of bound compound.

[0235] A variety of other reagents may be included in the screening assays. These include reagents like salts, neutral proteins, e.g. albumin, detergents, etc which may be used to facilitate optimal protein-protein binding and/or reduce non-specific or background interactions. Also reagents that otherwise improve the efficiency of the assay, such as protease inhibitors, nuclease inhibitors, anti-microbial agents, etc., may be used. The mixture of components may be added in any order that provides for the requisite binding.

[0236] Screening for agents that modulate the activity of CA proteins may also be done. In a preferred embodiment, methods for screening for a bioactive agent capable of modulating the activity of CA proteins comprise the steps of adding a candidate bioactive agent to a sample of CA proteins, as above, and determining an alteration in the biological activity of CA proteins. “Modulating the activity of a CA protein” includes an increase in activity, a decrease in activity, or a change in the type or kind of activity present. Thus, in this embodiment, the candidate agent should both bind to CA proteins (although this may not be necessary), and alter its biological or biochemical activity as defined herein. The methods include both in vitro screening methods, as are generally outlined above, and in vivo screening of cells for alterations in the presence, distribution, activity or amount of CA proteins.

[0237] Thus, in this embodiment, the methods comprise combining a CA sample and a candidate bioactive agent, and evaluating the effect on CA activity. By “CA activity” or grammatical equivalents herein is meant one of the CA protein's biological activities, including, but not limited to, its role in tumorigenesis, including cell division, preferably in lymphatic tissue, cell proliferation, tumor growth and transformation of cells. In one embodiment, CA activity includes activation of or by a protein encoded by a nucleic acid of Tables 1-49. An inhibitor of CA activity is the inhibition of any one or more CA activities.

[0238] In a preferred embodiment, the activity of the CA protein is increased; in another preferred embodiment, the activity of the CA protein is decreased. Thus, bioactive agents that are antagonists are preferred in some embodiments, and bioactive agents that are agonists may be preferred in other embodiments.

[0239] In a preferred embodiment, the invention provides methods for screening for bioactive agents capable of modulating the activity of a CA protein. The methods comprise adding a candidate bioactive agent, as defined above, to a cell comprising CA proteins. Preferred cell types include almost any cell. The cells contain a recombinant nucleic acid that encodes a CA protein. In a preferred embodiment, a library of candidate agents is tested on a plurality of cells.

[0240] In one aspect, the assays are evaluated in the presence or absence or previous or subsequent exposure of physiological signals, for example hormones, antibodies, peptides, antigens, cytokines, growth factors, action potentials, pharmacological agents including chemotherapeutics, radiation, carcinogenics, or other cells (i.e. cell-cell contacts). In another example, the determinations are determined at different stages of the cell cycle process.

[0241] In this way, bioactive agents are identified. Compounds with pharmacological activity are able to enhance or interfere with the activity of the CA protein.

Applications of the Invention

[0242] In one embodiment, a method of inhibiting cancer cell division is provided. In another embodiment, a method of inhibiting tumor growth is provided. In a further embodiment, methods of treating cells or individuals with cancer are provided.

[0243] The method comprises administration of a cancer inhibitor. In particular embodiments, the cancer inhibitor is an antisense molecule, a pharmaceutical composition, a therapeutic agent or small molecule, or a monoclonal, polyclonal, chimeric or humanized antibody. In particular embodiments, a therapeutic agent is coupled with a an antibody, preferable a monoclonal antobody.

[0244] In other embodiments, methods for detection or diagnosis of cancer cells in an individual are provided. In particular embodiments, the diagnostic/detection agent is a small molecule that pereferentially binds to a CAP according to the invention. In one embodiment, the diagnostic/detection agent is an antibody, preferably a monoclonal antobody, preferably linked to a detectable agent.

[0245] In other embodiments of the invention, animal models and transgenic animals are provided, which find use in generating animal models of cancers, particularly lymphomas and carcinomas.

(a) Antisense Molecules

[0246] In one embodiment, the cancer inhibitor is an antisense molecule. Antisense molecules as used herein include antisense or sense oligonucleotides comprising a single-stranded nucleic acid sequence (either RNA or DNA) capable of binding to target mRNA (sense) or DNA (antisense) sequences for cancer molecules. Antisense or sense oligonucleotides, according to the present invention, comprise a fragment generally at least about 14 nucleotides, preferably from about 14 to 30 nucleotides. The ability to derive an antisense or a sense oligonucleotide, based upon a cDNA sequence encoding a given protein is described in, for example, Stein and Cohen, Cancer Res. 48:2659, (1988) and van der Krol et al., BioTechniques 6:958, (1988).

[0247] Antisense molecules can be modified or unmodified RNA, DNA, or mixed polymer oligonucleotides. These molecules function by specifically binding to matching sequences resulting in inhibition of peptide synthesis (Wu-Pong, November 1994, BioPharm, 20-33) either by steric blocking or by activating an RNase H enzyme. Antisense molecules can also alter protein synthesis by interfering with RNA processing or transport from the nucleus into the cytoplasm (Mukhopadhyay & Roth, 1996, Crit. Rev. in Oncogenesis 7, 151-190). In addition, binding of single stranded DNA to RNA can result in nuclease-mediated degradation of the heteroduplex (Wu-Pong, supra). Backbone modified DNA chemistry which have thus far been shown to act as substrates for RNase H are phosphorothioates, phosphorodithioates, borontrifluoridates, and 2′-arabino and 2′-fluoro arabino-containing oligonucleotides.

[0248] Antisense molecules may be introduced into a cell containing the target nucleotide sequence by formation of a conjugate with a ligand binding molecule, as described in WO 91/04753. Suitable ligand binding molecules include, but are not limited to, cell surface receptors, growth factors, other cytokines, or other ligands that bind to cell surface receptors. Preferably, conjugation of the ligand binding molecule does not substantially interfere with the ability of the ligand binding molecule to bind to its corresponding molecule or receptor, or block entry of the sense or antisense oligonucleotide or its conjugated version into the cell. Alternatively, a sense or an antisense oligonucleotide may be introduced into a cell containing the target nucleic acid sequence by formation of an oligonucleotide-lipid complex, as described in WO 90/10448. It is understood that the use of antisense molecules or knock out and knock in models may also be used in screening assays as discussed above, in addition to methods of treatment.

(b) RNA Interference

[0249] RNA interference refers to the process of sequence-specific post transcriptional gene silencing in animals mediated by short interfering RNAs (siRNA) (Fire et al., Nature, 391, 806 (1998)). The corresponding process in plants is referred to as post transcriptional gene silencing or RNA silencing and is also referred to as quelling in fungi. The presence of dsRNA in cells triggers the RNAi response though a mechanism that has yet to be fully characterized. This mechanism appears to be different from the interferon response that results from dsRNA mediated activation of protein kinase PKR and 2′,5′-oligoadenylate synthetase resulting in non-specific cleavage of mRNA by ribonuclease L. (reviewed in Sharp, P. A., RNA interference—2001, Genes & Development 15:485-490 (2001)).

[0250] Small interfering RNAs (siRNAs) are powerful sequence-specific reagents designed to suppress the expression of genes in cultured mammalian cells through a process known as RNA interference (RNAi). Elbashir, S. M. et al. Nature 411:494-498 (2001); Caplen, N. J. et al. Proc. Natl. Acad. Sci. USA 98:9742-9747 (2001); Harborth, J. et al. J. Cell Sci. 114:4557-4565 (2001). The term “short interfering RNA” or “siRNA” refers to a double stranded nucleic acid molecule capable of RNA interference “RNAi”, (see Kreutzer et al., WO 00/44895; Zernicka-Goetz et al. WO 01/36646; Fire, WO 99/32619; Mello and Fire, WO 01/29058). As used herein, siRNA molecules are limited to RNA molecules but further encompasses chemically modified nucleotides and non-nucleotides. siRNA gene-targeting experiments have been carried out by transient siRNA transfer into cells (achieved by such classic methods as liposome-mediated transfection, electroporation, or microinjection).

[0251] Molecules of siRNA are 21- to 23-nucleotide RNAs, with characteristic 2- to 3-nucleotide 3′-overhanging ends resembling the RNase III processing products of long double-stranded RNAs (dsRNAs) that normally initiate RNAi. When introduced into a cell, they assemble with yet-to-be-identified proteins of an endonuclease complex (RNA-induced silencing complex), which then guides target mRNA cleavage. As a consequence of degradation of the targeted mRNA, cells with a specific phenotype characteristic of suppression of the corresponding protein product are obtained. The small size of siRNAs, compared with traditional antisense molecules, prevents activation of the dsRNA-inducible interferon system present in mammalian cells. This avoids the nonspecific phenotypes normally produced by dsRNA larger than 30 base pairs in somatic cells.

[0252] Intracellular transcription of small RNA molecules is achieved by cloning the siRNA templates into RNA polymerase III (Pol III) transcription units, which normally encode the small nuclear RNA (snRNA) U6 or the human RNase P RNA H1. Two approaches have been developed for expressing siRNAs: in the first, sense and antisense strands constituting the siRNA duplex are transcribed by individual promoters (Lee, N. S. et al. Nat. Biotechnol. 20, 500-505 (2002). Miyagishi, M. & Taira, K. Nat. Biotechnol. 20, 497-500 (2002).); in the second, siRNAs are expressed as fold-back stem-loop structures that give rise to siRNAs after intracellular processing (Paul, C. P. et al. Nat. Biotechnol. 20:505-508 (2002)). The endogenous expression of siRNAs from introduced DNA templates is thought to overcome some limitations of exogenous siRNA delivery, in particular the transient loss of phenotype. U6 and H1 RNA promoters are members of the type III class of Pol III promoters. (Paule, M. R. & White, R. J. Nucleic Acids Res. 28, 1283-1298 (2000)).

[0253] Co-expression of sense and antisense siRNAs mediate silencing of target genes, whereas expression of sense or antisense siRNA alone do not greatly affect target gene expression. Transfection of plasmid DNA, rather than synthetic siRNAs, may appear advantageous, considering the danger of RNase contamination and the costs of chemically synthesized siRNAs or siRNA transcription kits. Stable expression of siRNAs allows new gene therapy applications, such as treatment of persistent viral infections. Considering the high specificity of siRNAs, the approach also allows the targeting of disease-derived transcripts with point mutations, such as RAS or TP53 oncogene transcripts, without alteration of the remaining wild-type allele. Finally, by high-throughput sequence analysis of the various genomes, the DNA-based methodology may also be a cost-effective alternative for automated genome-wide loss-of-function phenotypic analysis, especially when combined with miniaturized array-based phenotypic screens. (Ziauddin, J. & Sabatini, D. M. Nature 411:107-110 (2001)).

[0254] The presence of long dsRNAs in cells stimulates the activity of a ribonuclease III enzyme referred to as dicer. Dicer is involved in the processing of the dsRNA into short pieces of dsRNA known as short interfering RNAs (siRNA) (Berstein et al., 2001, Nature, 409:363 (2001)). Short interfering RNAs derived from dicer activity are typically about 21-23 nucleotides in length and comprise about 19 base pair duplexes. Dicer has also been implicated in the excision of 21 and 22 nucleotide small temporal RNAs (stRNA) from precursor RNA of conserved structure that are implicated in translational control (Hutvagner et al., Science, 293, 834 (2001)). The RNAi response also features an endonuclease complex containing a siRNA, commonly referred to as an RNA-induced silencing complex (RISC), which mediates cleavage of single stranded RNA having sequence homologous to the siRNA. Cleavage of the target RNA takes place in the middle of the region complementary to the guide sequence of the siRNA duplex (Elbashir et al., Genes Dev., 15, 188 (2001)).

[0255] This invention provides an expression system comprising an isolated nucleic acid molecule comprising a sequence capable of specifically hybridizing to the CA sequences. In an embodiment, the nucleic acid molecule is capable of inhibiting the expression of the CA protein. A method of inhibiting expression of CA inside a cell by a vector-directed expression of a short RNA which short RNA can fold in itself and create a double strand RNA having CA mRNA sequence identity and able to trigger posttranscriptional gene silencing, or RNA interference (RNAi), of the CA gene inside the cell. In another method a short double strand RNA having CA mRNA sequence identity is delivered inside the cell to trigger posttranscriptional gene silencing, or RNAi, of the CA gene. In various embodiments, the nucleic acid molecule is at least a 7 mer, at least a 10 mer, or at least a 20 mer. In a further embodiment, the sequence is unique.

(c) Pharmaceutical Compositions

[0256] Pharmaceutical compositions encompassed by the present invention include as active agent, the polypeptides, polynucleotides, antisense oligonucleotides, or antibodies of the invention disclosed herein in a therapeutically effective amount. An “effective amount” is an amount sufficient to effect beneficial or desired results, including clinical results. An effective amount can be administered in one or more administrations. For purposes of this invention, an effective amount of an adenoviral vector is an amount that is sufficient to palliate, ameliorate, stabilize, reverse, slow or delay the progression of the disease state.

[0257] The compositions can be used to treat cancer as well as metastases of primary cancer. In addition, the pharmaceutical compositions can be used in conjunction with conventional methods of cancer treatment, e.g., to sensitize tumors to radiation or conventional chemotherapy. The terms “treatment”, “treating”, “treat” and the like are used herein to generally refer to obtaining a desired pharmacologic and/or physiologic effect. The effect may be prophylactic in terms of completely or partially preventing a disease or symptom thereof and/or may be therapeutic in terms of a partial or complete stabilization or cure for a disease and/or adverse effect attributable to the disease. “Treatment” as used herein covers any treatment of a disease in a mammal, particularly a human, and includes: (a) preventing the disease or symptom from occurring in a subject which may be predisposed to the disease or symptom but has not yet been diagnosed as having it; (b) inhibiting the disease symptom, i.e., arresting its development; or (c) relieving the disease symptom, i.e., causing regression of the disease or symptom.

[0258] Where the pharmaceutical composition comprises an antibody that specifically binds to a gene product encoded by a differentially expressed polynucleotide, the antibody can be coupled to a drug for delivery to a treatment site or coupled to a detectable label to facilitate imaging of a site comprising cancer cells, such as prostate cancer cells. Methods for coupling antibodies to drugs and detectable labels are well known in the art, as are methods for imaging using detectable labels.

[0259] A “patient” for the purposes of the present invention includes both humans and other animals, particularly mammals, and organisms. Thus the methods are applicable to both human therapy and veterinary applications. In the preferred embodiment the patient is a mammal, and in the most preferred embodiment the patient is human.

[0260] The term “therapeutically effective amount” as used herein refers to an amount of a therapeutic agent to treat, ameliorate, or prevent a desired disease or condition, or to exhibit a detectable therapeutic or preventative effect. The effect can be detected by, for example, chemical markers or antigen levels. Therapeutic effects also include reduction in physical symptoms, such as decreased body temperature. The precise effective amount for a subject will depend upon the subject's size and health, the nature and extent of the condition, and the therapeutics or combination of therapeutics selected for administration. The effective amount for a given situation is determined by routine experimentation and is within the judgment of the clinician. For purposes of the present invention, an effective dose will generally be from about 0.01 mg/kg to about 5 mg/kg, or about 0.01 mg/kg to about 50 mg/kg or about 0.05 mg/kg to about 10 mg/kg of the compositions of the present invention in the individual to which it is administered.

[0261] A pharmaceutical composition can also contain a pharmaceutically acceptable carrier. The term “pharmaceutically acceptable carrier” refers to a carrier for administration of a therapeutic agent, such as antibodies or a polypeptide, genes, and other therapeutic agents. The term refers to any pharmaceutical carrier that does not itself induce the production of antibodies harmful to the individual receiving the composition, and which can be administered without undue toxicity. Suitable carriers can be large, slowly metabolized macromolecules such as proteins, polysaccharides, polylactic acids, polyglycolic acids, polymeric amino acids, amino acid copolymers, and inactive virus particles. Such carriers are well known to those of ordinary skill in the art. Pharmaceutically acceptable carriers in therapeutic compositions can include liquids such as water, saline, glycerol and ethanol. Auxiliary substances, such as wetting or emulsifying agents, pH buffering substances, and the like, can also be present in such vehicles. Typically, the therapeutic compositions are prepared as injectables, either as liquid solutions or suspensions; solid forms suitable for solution in, or suspension in, liquid vehicles prior to injection can also be prepared. Liposomes are included within the definition of a pharmaceutically acceptable carrier. Pharmaceutically acceptable salts can also be present in the pharmaceutical composition, e.g., mineral acid salts such as hydrochlorides, hydrobromides, phosphates, sulfates, and the like; and the salts of organic acids such as acetates, propionates, malonates, benzoates, and the like. A thorough discussion of pharmaceutically acceptable excipients is available in Remington: The Science and Practice of Pharmacy (1995) Alfonso Gennaro, Lippincott, Williams, & Wilkins.

[0262] The pharmaceutical compositions can be prepared in various forms, such as granules, tablets, pills, suppositories, capsules, suspensions, salves, lotions and the like. Pharmaceutical grade organic or inorganic carriers and/or diluents suitable for oral and topical use can be used to make up compositions containing the therapeutically-active compounds. Diluents known to the art include aqueous media, vegetable and animal oils and fats. Stabilizing agents, wetting and emulsifying agents, salts for varying the osmotic pressure or buffers for securing an adequate pH value, and skin penetration enhancers can be used as auxiliary agents.

[0263] The pharmaceutical compositions of the present invention comprise a CA protein in a form suitable for administration to a patient. In the preferred embodiment, the pharmaceutical compositions are in a water soluble form, such as being present as pharmaceutically acceptable salts, which is meant to include both acid and base addition salts. “Pharmaceutically acceptable acid addition salt” refers to those salts that retain the biological effectiveness of the free bases and that are not biologically or otherwise undesirable, formed with inorganic acids such as hydrochloric acid, hydrobromic acid, sulfuric acid, nitric acid, phosphoric acid and the like, and organic acids such as acetic acid, propionic acid, glycolic acid, pyruvic acid, oxalic acid, maleic acid, malonic acid, succinic acid, fumaric acid, tartaric acid, citric acid, benzoic acid, cinnamic acid, mandelic acid, methanesulfonic acid, ethanesulfonic acid, p-toluenesulfonic acid, salicylic acid and the like. “Pharmaceutically acceptable base addition salts” include those derived from inorganic bases such as sodium, potassium, lithium, ammonium, calcium, magnesium, iron, zinc, copper, manganese, aluminum salts and the like. Particularly preferred are the ammonium, potassium, sodium, calcium, and magnesium salts. Salts derived from pharmaceutically acceptable organic non-toxic bases include salts of primary, secondary, and tertiary amines, substituted amines including naturally occurring substituted amines, cyclic amines and basic ion exchange resins, such as isopropylamine, trimethylamine, diethylamine, triethylamine, tripropylamine, and ethanolamine.

[0264] The pharmaceutical compositions may also include one or more of the following: carrier proteins such as serum albumin; buffers; fillers such as microcrystalline cellulose, lactose, corn and other starches; binding agents; sweeteners and other flavoring agents; coloring agents; and polyethylene glycol. Additives are well known in the art, and are used in a variety of formulations.

[0265] The compounds having the desired pharmacological activity may be administered in a physiologically acceptable carrier to a host, as previously described. The agents may be administered in a variety of ways, orally, parenterally e.g., subcutaneously, intraperitoneally, intravascularly, etc. Depending upon the manner of introduction, the compounds may be formulated in a variety of ways. The concentration of therapeutically active compound in the formulation may vary from about 0.1-100% wgt/vol. Once formulated, the compositions contemplated by the invention can be (1) administered directly to the subject (e.g., as polynucleotide, polypeptides, small molecule agonists or antagonists, and the like); or (2) delivered ex vivo, to cells derived from the subject (e.g., as in ex vivo gene therapy). Direct delivery of the compositions will generally be accomplished by parenteral injection, e.g., subcutaneously, intraperitoneally, intravenously or intramuscularly, intratumoral or to the interstitial space of a tissue. Other modes of administration include oral and pulmonary administration, suppositories, and transdermal applications, needles, and gene guns or hyposprays. Dosage treatment can be a single dose schedule or a multiple dose schedule.

[0266] Methods for the ex vivo delivery and reimplantation of transformed cells into a subject are known in the art and described in e.g., International Publication No. WO 93/14778. Examples of cells useful in ex vivo applications include, for example, stem cells, particularly hematopoetic, lymph cells, macrophages, dendritic cells, or tumor cells. Generally, delivery of nucleic acids for both ex vivo and in vitro applications can be accomplished by, for example, dextran-mediated transfection, calcium phosphate precipitation, polybrene mediated transfection, protoplast fusion, electroporation, encapsulation of the polynucleotide(s) in liposomes, and direct microinjection of the DNA into nuclei, all well known in the art.

[0267] Once differential expression of a gene corresponding to a CA polynucleotide described herein has been found to correlate with a proliferative disorder, such as neoplasia, dysplasia, and hyperplasia, the disorder can be amenable to treatment by administration of a therapeutic agent based on the provided polynucleotide, corresponding polypeptide or other corresponding molecule (e.g., antisense, ribozyme, etc.). In other embodiments, the disorder can be amenable to treatment by administration of a small molecule drug that, for example, serves as an inhibitor (antagonist) of the function of the encoded gene product of a gene having increased expression in cancerous cells relative to normal cells or as an agonist for gene products that are decreased in expression in cancerous cells (e.g., to promote the activity of gene products that act as tumor suppressors).

[0268] The dose and the means of administration of the inventive pharmaceutical compositions are determined based on the specific qualities of the therapeutic composition, the condition, age, and weight of the patient, the progression of the disease, and other relevant factors. For example, administration of polynucleotide therapeutic compositions agents includes local or systemic administration, including injection, oral administration, particle gun or catheterized administration, and topical administration. Preferably, the therapeutic polynucleotide composition contains an expression construct comprising a promoter operably linked to a polynucleotide of at least 12, 22, 25, 30, or 35 contiguous nt of the polynucleotide disclosed herein. Various methods can be used to administer the therapeutic composition directly to a specific site in the body. For example, a small metastatic lesion is located and the therapeutic composition injected several times in several different locations within the body of tumor. Alternatively, arteries that serve a tumor are identified, and the therapeutic composition injected into such an artery, in order to deliver the composition directly into the tumor. A tumor that has a necrotic center is aspirated and the composition injected directly into the now empty center of the tumor. An antisense composition is directly administered to the surface of the tumor, for example, by topical application of the composition. X-ray imaging is used to assist in certain of the above delivery methods.

[0269] Targeted delivery of therapeutic compositions containing an antisense polynucleotide, subgenomic polynucleotides, or antibodies to specific tissues can also be used. Receptor-mediated DNA delivery techniques are described in, for example, Findeis et al., Trends Biotechnol. (1993) 11:202; Chiou et al., Gene Therapeutics: Methods And Applications Of Direct Gene Transfer (J. A. Wolff, ed.) (1994); Wu et al., J. Biol. Chem. (1988) 263:621; Wu et al., J. Biol. Chem. (1994) 269:542; Zenke et al., Proc. Natl. Acad. Sci. (USA) (1990) 87:3655; Wu et al., J. Biol. Chem. (1991) 266:338. Therapeutic compositions containing a polynucleotide are administered in a range of about 100 ng to about 200 mg of DNA for local administration in a gene therapy protocol. Concentration ranges of about 500 ng to about 50 mg, about 1 μg to about 2 mg, about 5 μg to about 500 μg, and about 20 μg to about 100 μg of DNA can also be used during a gene therapy protocol. Factors such as method of action (e.g., for enhancing or inhibiting levels of the encoded gene product) and efficacy of transformation and expression are considerations that will affect the dosage required for ultimate efficacy of the antisense subgenomic polynucleotides. Where greater expression is desired over a larger area of tissue, larger amounts of antisense subgenomic polynucleotides or the same amounts re-administered in a successive protocol of administrations, or several administrations to different adjacent or close tissue portions of, for example, a tumor site, may be required to effect a positive therapeutic outcome. In all cases, routine experimentation in clinical trials will determine specific ranges for optimal therapeutic effect.

[0270] The therapeutic polynucleotides and polypeptides of the present invention can be delivered using gene delivery vehicles. The gene delivery vehicle can be of viral or non-viral origin (see generally, Jolly, Cancer Gene Therapy (1994) 1:51; Kimura, Human Gene Therapy (1994) 5:845; Connelly, Human Gene Therapy (1995) 1:185; and Kaplitt, Nature Genetics (1994) 6:148). Expression of such coding sequences can be induced using endogenous mammalian or heterologous promoters. Expression of the coding sequence can be either constitutive or regulated.

[0271] Viral-based vectors for delivery of a desired polynucleotide and expression in a desired cell are well known in the art. Exemplary viral-based vehicles include, but are not limited to, recombinant retroviruses (see, e.g., WO 90/07936; WO 94/03622; WO 93/25698; WO 93/25234; U.S. Pat. No. 5,219,740; WO 93/11230; WO 93/10218; U.S. Pat. No. 4,777,127; GB Patent No. 2,200,651; EP 0 345 242; and WO 91/02805), alphavirus-based vectors (e.g., Sindbis virus vectors, Semliki forest virus (ATCC VR-67; ATCC VR-1247), Ross River virus (ATCC VR-373; ATCC VR-1246) and Venezuelan equine encephalitis virus (ATCC VR-923; ATCC VR-1250; ATCC VR 1249; ATCC VR-532)), and adeno-associated virus (AAV) vectors (see, e.g., WO 94/12649, WO 93/03769; WO 93/19191; WO 94/28938; WO 95/11984 and WO 95/00655). Administration of DNA linked to killed adenovirus as described in Curiel, Hum. Gene Ther. (1992) 3:147 can also be employed.

[0272] Non-viral delivery vehicles and methods can also be employed, including, but not limited to, polycationic condensed DNA linked or unlinked to killed adenovirus alone (see, e.g., Curiel, Hum. Gene Ther. (1992) 3:147); ligand-linked DNA (see, e.g., Wu, J. Biol. Chem. (1989) 264:16985); eukaryotic cell delivery vehicles cells (see, e.g., U.S. Pat. No. 5,814,482; WO 95/07994; WO 96/17072; WO 95/30763; and WO 97/42338) and nucleic charge neutralization or fusion with cell membranes. Naked DNA can also be employed. Exemplary naked DNA introduction methods are described in WO 90/11092 and U.S. Pat. No. 5,580,859. Liposomes that can act as gene delivery vehicles are described in U.S. Pat. No. 5,422,120; WO 95/13796; WO 94/23697; WO 91/14445; and EP 0524968. Additional approaches are described in Philip, Mol. Cell Biol. (1994) 14:2411, and in Woffendin, Proc. Natl. Acad. Sci. (1994) 91:1581.

[0273] Further non-viral delivery suitable for use includes mechanical delivery systems such as the approach described in Woffendin et al., Proc. Natl. Acad. Sci. USA (1994) 91(24):11581. Moreover, the coding sequence and the product of expression of such can be delivered through deposition of photopolymerized hydrogel materials or use of ionizing radiation (see, e.g., U.S. Pat. No. 5,206,152 and WO 92/11033). Other conventional methods for gene delivery that can be used for delivery of the coding sequence include, for example, use of hand-held gene transfer particle gun (see, e.g., U.S. Pat. No. 5,149,655); use of ionizing radiation for activating transferred gene (see, e.g., U.S. Pat. No. 5,206,152 and WO 92/11033).

[0274] The administration of the CA proteins and modulators of the present invention can be done in a variety of ways as discussed above, including, but not limited to, orally, subcutaneously, intravenously, intranasally, transdermally, intraperitoneally, intramuscularly, intrapulmonary, vaginally, rectally, or intraocularly. In some instances, for example, in the treatment of wounds and inflammation, the CA proteins and modulators may be directly applied as a solution or spray.

[0275] In a preferred embodiment, CA proteins and modulators are administered as therapeutic agents, and can be formulated as outlined above. Similarly, CA genes (including both the full-length sequence, partial sequences, or regulatory sequences of the CA coding regions) can be administered in gene therapy applications, as is known in the art. These CA genes can include antisense applications, either as gene therapy (i.e. for incorporation into the genome) or as antisense compositions, as will be appreciated by those in the art.

[0276] Thus, in one embodiment, methods of modulating CA gene activity in cells or organisms are provided. In one embodiment, the methods comprise administering to a cell an anti-CA antibody that reduces or eliminates the biological activity of an endogenous CA protein. Alternatively, the methods comprise administering to a cell or organism a recombinant nucleic acid encoding a CA protein. As will be appreciated by those in the art, this may be accomplished in any number of ways. In a preferred embodiment, for example when the CA sequence is down-regulated in cancer, the activity of the CA gene product is increased by increasing the amount of CA expression in the cell, for example by overexpressing the endogenous CA gene or by administering a gene encoding the CA sequence, using known gene-therapy techniques. In a preferred embodiment, the gene therapy techniques include the incorporation of the exogenous gene using enhanced homologous recombination (EHR), for example as described in PCT/US93/03868, hereby incorporated by reference in its entirety. Alternatively, for example when the CA sequence is up-regulated in cancer, the activity of the endogenous CA gene is decreased, for example by the administration of a CA antisense nucleic acid.

(d) Vaccines

[0277] In a preferred embodiment, CA genes are administered as DNA vaccines, either single genes or combinations of CA genes. Naked DNA vaccines are generally known in the art. Brower, Nature Biotechnology, 16:1304-1305 (1998).

[0278] In one embodiment, CA genes of the present invention are used as DNA vaccines. Methods for the use of genes as DNA vaccines are well known to one of ordinary skill in the art, and include placing a CA gene or portion of a CA gene under the control of a promoter for expression in a patient with cancer. The CA gene used for DNA vaccines can encode full-length CA proteins, but more preferably encodes portions of the CA proteins including peptides derived from the CA protein. In a preferred embodiment a patient is immunized with a DNA vaccine comprising a plurality of nucleotide sequences derived from a CA gene. Similarly, it is possible to immunize a patient with a plurality of CA genes or portions thereof. Without being bound by theory, expression of the polypeptide encoded by the DNA vaccine, cytotoxic T-cells, helper T-cells and antibodies are induced that recognize and destroy or eliminate cells expressing CA proteins.

[0279] In a preferred embodiment, the DNA vaccines include a gene encoding an adjuvant molecule with the DNA vaccine. Such adjuvant molecules include cytokines that increase the immunogenic response to the CA polypeptide encoded by the DNA vaccine. Additional or alternative adjuvants are known to those of ordinary skill in the art and find use in the invention.

(e) Antibodies

[0280] In one embodiment, a cancer inhibitor is an antibody as discussed above. In one embodiment, the CA proteins of the present invention may be used to generate polyclonal and monoclonal antibodies to CA proteins, which are useful as described herein. Similarly, the CA proteins can be coupled, using standard technology, to affinity chromatography columns. These columns may then be used to purify CA antibodies. In a preferred embodiment, the antibodies are generated to epitopes unique to a CA protein; that is, the antibodies show little or no cross-reactivity to other proteins. These antibodies find use in a number of applications. For example, the CA antibodies may be coupled to standard affinity chromatography columns and used to purify CA proteins. The antibodies may also be used therapeutically as blocking polypeptides, as outlined above, since they will specifically bind to the CA protein.

[0281] The present invention further provides methods for detecting the presence of and/or measuring a level of a polypeptide in a biological sample, which CA polypeptide is encoded by a CA polynucleotide that is differentially expressed in a cancer cell, using an antibody specific for the encoded polypeptide. The methods generally comprise: a) contacting the sample with an antibody specific for a polypeptide encoded by a CA polynucleotide that is differentially expressed in a prostate cancer cell; and b) detecting binding between the antibody and molecules of the sample.

[0282] Detection of specific binding of the antibody specific for the encoded cancer-associated polypeptide, when compared to a suitable control is an indication that encoded polypeptide is present in the sample. Suitable controls include a sample known not to contain the encoded CA polypeptide or known not to contain elevated levels of the polypeptide; such as normal tissue, and a sample contacted with an antibody not specific for the encoded polypeptide, e.g., an anti-idiotype antibody. A variety of methods to detect specific antibody-antigen interactions are known in the art and can be used in the method, including, but not limited to, standard immunohistological methods, immunoprecipitation, an enzyme immunoassay, and a radioimmunoassay. In general, the specific antibody will be detectably labeled, either directly or indirectly. Direct labels include radioisotopes; enzymes whose products are detectable (e.g., luciferase, β-galactosidase, and the like); fluorescent labels (e.g., fluorescein isothiocyanate, rhodamine, phycoerythrin, and the like); fluorescence emitting metals, e.g., ¹⁵²Eu, or others of the lanthanide series, attached to the antibody through metal chelating groups such as EDTA; chemiluminescent compounds, e.g., luminol, isoluminol, acridinium salts, and the like; bioluminescent compounds, e.g., luciferin, aequorin (green fluorescent protein), and the like. The antibody may be attached (coupled) to an insoluble support, such as a polystyrene plate or a bead. Indirect labels include second antibodies specific for antibodies specific for the encoded polypeptide (“first specific antibody”), wherein the second antibody is labeled as described above; and members of specific binding pairs, e.g., biotin-avidin, and the like. The biological sample may be brought into contact with and immobilized on a solid support or carrier, such as nitrocellulose, that is capable of immobilizing cells, cell particles, or soluble proteins. The support may then be washed with suitable buffers, followed by contacting with a detectably-labeled first specific antibody. Detection methods are known in the art and will be chosen as appropriate to the signal emitted by the detectable label. Detection is generally accomplished in comparison to suitable controls, and to appropriate standards.

[0283] In some embodiments, the methods are adapted for use in vivo, e.g., to locate or identify sites where cancer cells are present. In these embodiments, a detectably-labeled moiety, e.g., an antibody, which is specific for a cancer-associated polypeptide is administered to an individual (e.g., by injection), and labeled cells are located using standard imaging techniques, including, but not limited to, magnetic resonance imaging, computed tomography scanning, and the like. In this manner, cancer cells are differentially labeled.

(f) Detection and Diagnosis of Cancers

[0284] Without being bound by theory, it appears that the various CA sequences are important in cancers. Accordingly, disorders based on mutant or variant CA genes may be determined. In one embodiment, the invention provides methods for identifying cells containing variant CA genes comprising determining all or part of the sequence of at least one endogenous CA genes in a cell. As will be appreciated by those in the art, this may be done using any number of sequencing techniques. In a preferred embodiment, the invention provides methods of identifying the CA genotype of an individual comprising determining all or part of the sequence of at least one CA gene of the individual. This is generally done in at least one tissue of the individual, and may include the evaluation of a number of tissues or different samples of the same tissue. The method may include comparing the sequence of the sequenced CA gene to a known CA gene, i.e., a wild-type gene. As will be appreciated by those in the art, alterations in the sequence of some CA genes can be an indication of either the presence of the disease, or propensity to develop the disease, or prognosis evaluations.

[0285] The sequence of all or part of the CA gene can then be compared to the sequence of a known CA gene to determine if any differences exist. This can be done using any number of known homology programs, such as Bestfit, etc. In a preferred embodiment, the presence of a difference in the sequence between the CA gene of the patient and the known CA gene is indicative of a disease state or a propensity for a disease state, as outlined herein.

[0286] In a preferred embodiment, the CA genes are used as probes to determine the number of copies of the CA gene in the genome. For example, some cancers exhibit chromosomal deletions or insertions, resulting in an alteration in the copy number of a gene.

[0287] In another preferred embodiment CA genes are used as probes to determine the chromosomal location of the CA genes. Information such as chromosomal location finds use in providing a diagnosis or prognosis in particular when chromosomal abnormalities such as translocations, and the like are identified in CA gene loci.

[0288] The present invention provides methods of using the polynucleotides described herein for detecting cancer cells, facilitating diagnosis of cancer and the severity of a cancer (e.g., tumor grade, tumor burden, and the like) in a subject, facilitating a determination of the prognosis of a subject, and assessing the responsiveness of the subject to therapy (e.g., by providing a measure of therapeutic effect through, for example, assessing tumor burden during or following a chemotherapeutic regimen). Detection can be based on detection of a polynucleotide that is differentially expressed in a cancer cell, and/or detection of a polypeptide encoded by a polynucleotide that is differentially expressed in a cancer cell. The detection methods of the invention can be conducted in vitro or in vivo, on isolated cells, or in whole tissues or a bodily fluid e.g., blood, plasma, serum, urine, and the like).

[0289] In some embodiments, methods are provided for detecting a cancer cell by detecting expression in the cell of a transcript that is differentially expressed in a cancer cell. Any of a variety of known methods can be used for detection, including, but not limited to, detection of a transcript by hybridization with a polynucleotide that hybridizes to a polynucleotide that is differentially expressed in a prostate cancer cell; detection of a transcript by a polymerase chain reaction using specific oligonucleotide primers; in situ hybridization of a cell using as a probe a polynucleotide that hybridizes to a gene that is differentially expressed in a prostate cancer cell. The methods can be used to detect and/or measure mRNA levels of a gene that is differentially expressed in a cancer cell. In some embodiments, the methods comprise: a) contacting a sample with a polynucleotide that corresponds to a differentially expressed gene described herein under conditions that allow hybridization; and b) detecting hybridization, if any.

[0290] Detection of differential hybridization, when compared to a suitable control, is an indication of the presence in the sample of a polynucleotide that is differentially expressed in a cancer cell. Appropriate controls include, for example, a sample that is known not to contain a polynucleotide that is differentially expressed in a cancer cell, and use of a labeled polynucleotide of the same “sense” as the polynucleotide that is differentially expressed in the cancer cell. Conditions that allow hybridization are known in the art, and have been described in more detail above. Detection can also be accomplished by any known method, including, but not limited to, in situ hybridization, PCR (polymerase chain reaction), RT-PCR (reverse transcription-PCR), TMA, bDNA, and Nasbau and “Northern” or RNA blotting, or combinations of such techniques, using a suitably labeled polynucleotide. A variety of labels and labeling methods for polynucleotides are known in the art and can be used in the assay methods of the invention. Specificity of hybridization can be determined by comparison to appropriate controls.

[0291] Polynucleotides generally comprising at least 10 nt, at least 12 nt or at least 15 contiguous nucleotides of a polynucleotide provided herein, such as, for example, those having the sequence as depicted in Tables 1-49, are used for a variety of purposes, such as probes for detection of and/or measurement of, transcription levels of a polynucleotide that is differentially expressed in a prostate cancer cell. As will be readily appreciated by the ordinarily skilled artisan, the probe can be detectably labeled and contacted with, for example, an array comprising immobilized polynucleotides obtained from a test sample (e.g., mRNA). Alternatively, the probe can be immobilized on an array and the test sample detectably labeled. These and other variations of the methods of the invention are well within the skill in the art and are within the scope of the invention.

[0292] Nucleotide probes are used to detect expression of a gene corresponding to the provided polynucleotide. In Northern blots, mRNA is separated electrophoretically and contacted with a probe. A probe is detected as hybridizing to an mRNA species of a particular size. The amount of hybridization can be quantitated to determine relative amounts of expression, for example under a particular condition. Probes are used for in situ hybridization to cells to detect expression. Probes can also be used in vivo for diagnostic detection of hybridizing sequences. Probes are typically labeled with a radioactive isotope. Other types of detectable labels can be used such as chromophores, fluorophores, and enzymes. Other examples of nucleotide hybridization assays are described in WO92/02526 and U.S. Pat. No. 5,124,246.

[0293] PCR is another means for detecting small amounts of target nucleic acids (see, e.g., Mullis et al., Meth. Enzymol. (1987) 155:335; U.S. Pat. No. 4,683,195; and U.S. Pat. No. 4,683,202). Two primer oligonucleotides that hybridize with the target nucleic acids are used to prime the reaction. The primers can be composed of sequence within or 3′ and 5′ to the CA polynucleotides disclosed herein. Alternatively, if the primers are 3′ and 5′ to these polynucleotides, they need not hybridize to them or the complements. After amplification of the target with a thermostable polymerase, the amplified target nucleic acids can be detected by methods known in the art, e.g., Southern blot. mRNA or cDNA can also be detected by traditional blotting techniques (e.g., Southern blot, Northern blot, etc.) described in Sambrook et al., “Molecular Cloning: A Laboratory Manual” (New York, Cold Spring Harbor Laboratory, 1989) (e.g., without PCR amplification). In general, mRNA or cDNA generated from mRNA using a polymerase enzyme can be purified and separated using gel electrophoresis, and transferred to a solid support, such as nitrocellulose. The solid support is exposed to a labeled probe, washed to remove any unhybridized probe, and duplexes containing the labeled probe are detected.

[0294] Methods using PCR amplification can be performed on the DNA from a single cell, although it is convenient to use at least about 10⁵ cells. The use of the polymerase chain reaction is described in Saiki et al. (1985) Science 239:487, and a review of current techniques may be found in Sambrook, et al. Molecular Cloning: A Laboratory Manual, CSH Press 1989, pp. 14.2-14.33. A detectable label may be included in the amplification reaction. Suitable detectable labels include fluorochromes, (e.g. fluorescein isothiocyanate (FITC), rhodamine, Texas Red, phycoerythrin, allophycocyanin, 6-carboxyfluorescein (6-FAM), 2′,7′-dimethoxy-4′,5′-dichloro-6-carboxyfluorescein, 6-carboxy-X-rhodamine (ROX), 6-carboxy-2′,4′,7′,4,7-hexachlorofluorescein (HEX), 5-carboxyfluorescein (5-FAM) or N,N,N′,N′-tetramethyl-6-carboxyrhodamine (TAMRA)), radioactive labels, (e.g. ³²P, ³⁵S, ³H, etc.), and the like. The label may be a two stage system, where the polynucleotides is conjugated to biotin, haptens, etc. having a high affinity binding partner, e.g. avidin, specific antibodies, etc., where the binding partner is conjugated to a detectable label. The label may be conjugated to one or both of the primers. Alternatively, the pool of nucleotides used in the amplification is labeled, so as to incorporate the label into the amplification product.

[0295] The detection methods can be provided as part of a kit. Thus, the invention further provides kits for detecting the presence and/or a level of a polynucleotide that is differentially expressed in a cancer cell (e.g., by detection of an mRNA encoded by the differentially expressed gene of interest), and/or a polypeptide encoded thereby, in a biological sample. Procedures using these kits can be performed by clinical laboratories, experimental laboratories, medical practitioners, or private individuals. The kits of the invention for detecting a polypeptide encoded by a polynucleotide that is differentially expressed in a cancer cell may comprise a moiety that specifically binds the polypeptide, which may be an antibody that binds the polypeptide or fragment thereof. The kits of the invention used for detecting a polynucleotide that is differentially expressed in a prostate cancer cell may comprise a moiety that specifically hybridizes to such a polynucleotide. The kit may optionally provide additional components that are useful in the procedure, including, but not limited to, buffers, developing reagents, labels, reacting surfaces, means for detection, control samples, standards, instructions, and interpretive information. Accordingly, the present invention provides kits for detecting prostate cancer comprising at least one of polynucleotides having the sequence as shown in Tables 1-49 or fragments thereof.

[0296] The present invention further relates to methods of detecting/diagnosing a neoplastic or preneoplastic condition in a mammal (for example, a human). “Diagnosis” as used herein generally includes determination of a subject's susceptibility to a disease or disorder, determination as to whether a subject is presently affected by a disease or disorder, prognosis of a subject affected by a disease or disorder (e.g., identification of pre-metastatic or metastatic cancerous states, stages of cancer, or responsiveness of cancer to therapy), and therametrics (e.g., monitoring a subject's condition to provide information as to the effect or efficacy of therapy).

[0297] The terms “treatment”, “treating”, “treat” and the like are used herein to generally refer to obtaining a desired pharmacologic and/or physiologic effect. The effect may be prophylactic in terms of completely or partially preventing a disease or symptom thereof and/or may be therapeutic in terms of a partial or complete stabilization or cure for a disease and/or adverse effect attributable to the disease. “Treatment” as used herein covers any treatment of a disease in a mammal, particularly a human, and includes: (a) preventing the disease or symptom from occurring in a subject which may be predisposed to the disease or symptom but has not yet been diagnosed as having it; (b) inhibiting the disease symptom, i.e., arresting its development; or (c) relieving the disease symptom, i.e., causing regression of the disease or symptom.

[0298] An “effective amount” is an amount sufficient to effect beneficial or desired results, including clinical results. An effective amount can be administered in one or more administrations.

[0299] A “cell sample” encompasses a variety of sample types obtained from an individual and can be used in a diagnostic or monitoring assay. The definition encompasses blood and other liquid samples of biological origin, solid tissue samples such as a biopsy specimen or tissue cultures or cells derived therefrom, and the progeny thereof. The definition also includes samples that have been manipulated in any way after their procurement, such as by treatment with reagents, solubilization, or enrichment for certain components, such as proteins or polynucleotides. The term “cell sample” encompasses a clinical sample, and also includes cells in culture, cell supernatants, cell lysates, serum, plasma, biological fluid, and tissue samples.

[0300] As used herein, the terms “neoplastic cells”, “neoplasia”, “tumor”, “tumor cells”, “cancer” and “cancer cells”, (used interchangeably) refer to cells which exhibit relatively autonomous growth, so that they exhibit an aberrant growth phenotype characterized by a significant loss of control of cell proliferation (i.e., de-regulated cell division). Neoplastic cells can be malignant or benign.

[0301] The terms “individual,” “subject,” “host,” and “patient,” are used interchangeably herein and refer to any mammalian subject for whom diagnosis, treatment, or therapy is desired, particularly humans. Other subjects may include cattle, dogs, cats, guinea pigs, rabbits, rats, mice, horses, and so on. Examples of conditions that can be detected/diagnosed in accordance with these methods include cancers. Polynucleotides corresponding to genes that exhibit the appropriate expression pattern can be used to detect cancer in a subject. For a review of markers of cancer, see, e.g., Hanahan et al. Cell 100:57-70 (2000).

[0302] One detection/diagnostic method comprises: (a) obtaining from a mammal (e.g., a human) a biological sample, (b) detecting the presence in the sample of a CA protein and (c) comparing the amount of product present with that in a control sample. In accordance with this method, the presence in the sample of elevated levels of a CA gene product indicates that the subject has a neoplastic or preneoplastic condition.

[0303] Biological samples suitable for use in this method include biological fluids such as serum, plasma, pleural effusions, urine and cerebro-spinal fluid, CSF, tissue samples (e.g., mammary tumor or prostate tissue slices) can also be used in the method of the invention, including samples derived from biopsies. Cell cultures or cell extracts derived, for example, from tissue biopsies can also be used.

[0304] The compound is preferably a binding protein, e.g., an antibody, polyclonal or monoclonal, or antigen binding fragment thereof, which can be labeled with a detectable marker (e.g., fluorophore, chromophore or isotope, etc). Where appropriate, the compound can be attached to a solid support such as a bead, plate, filter, resin, etc. Determination of formation of the complex can be effected by contacting the complex with a further compound (e.g., an antibody) that specifically binds to the first compound (or complex). Like the first compound, the further compound can be attached to a solid support and/or can be labeled with a detectable marker.

[0305] The identification of elevated levels of CA protein in accordance with the present invention makes possible the identification of subjects (patients) that are likely to benefit from adjuvant therapy. For example, a biological sample from a post primary therapy subject (e.g., subject having undergone surgery) can be screened for the presence of circulating CA protein, the presence of elevated levels of the protein, determined by studies of normal populations, being indicative of residual tumor tissue. Similarly, tissue from the cut site of a surgically removed tumor can be examined (e.g., by immunofluorescence), the presence of elevated levels of product (relative to the surrounding tissue) being indicative of incomplete removal of the tumor. The ability to identify such subjects makes it possible to tailor therapy to the needs of the particular subject. Subjects undergoing non-surgical therapy, e.g., chemotherapy or radiation therapy, can also be monitored, the presence in samples from such subjects of elevated levels of CA protein being indicative of the need for continued treatment. Staging of the disease (for example, for purposes of optimizing treatment regimens) can also be effected, for example, by biopsy e.g., with antibody specific for a CA protein.

(g) Animal Models and Transgenics

[0306] In another preferred embodiment CA genes find use in generating animal models of cancers, particularly lymphomas and carcinomas. As is appreciated by one of ordinary skill in the art, when the CA gene identified is repressed or diminished in CA tissue, gene therapy technology wherein antisense RNA directed to the CA gene will also diminish or repress expression of the gene. An animal generated as such serves as an animal model of CA that finds use in screening bioactive drug candidates. Similarly, gene knockout technology, for example as a result of homologous recombination with an appropriate gene targeting vector, will result in the absence of the CA protein. When desired, tissue-specific expression or knockout of the CA protein may be necessary.

[0307] It is also possible that the CA protein is overexpressed in cancer. As such, transgenic animals can be generated that overexpress the CA protein. Depending on the desired expression level, promoters of various strengths can be employed to express the transgene. Also, the number of copies of the integrated transgene can be determined and compared for a determination of the expression level of the transgene. Animals generated by such methods find use as animal models of CA and are additionally useful in screening for bioactive molecules to treat cancer.

Characterization of CA Sequences

[0308] The CA nucleic acid sequences of the invention are depicted in Tables 1-49. The sequences in each Table include genomic DNA sequence (mouse genomic sequences mDxx-yyy; human genomic sequences hDxx-yyy), sequence corresponding to the mRNA(s) generated therefrom (mRxx-yyy; hRxx-yyy) and amino acid sequences of the proteins (mPxx-yyy; hPxx-yyy) encoded by the mRNA for both mouse and human genes. N/A indicates a gene that has been identified, but for which there has not been a name ascribed.

[0309] The mouse and human genomic DNA sequence, sequence corresponding to the mRNA(s) generated therefrom and amino acid sequences of the proteins as shown in Tables 1-49 are described according to SEQ ID NOS as follows in Table 50.

TABLE 50

| DESIGNATION | SEQ ID NO | TYPE OF SEQUENCE |
|---|---|---|
| mD18-040 | SEQ ID NO: 1 | MOUSE GENOMIC SEQUENCE |
| mR18-040.1 | SEQ ID NO: 2 | MOUSE mRNA SEQUENCE |
| mP18-040.1 | SEQ ID NO: 3 | MOUSE PROTEIN SEQUENCE |
| hD18-040 | SEQ ID NO: 4 | HUMAN GENOMIC SEQUENCE |
| hR18-040.1 | SEQ ID NO: 5 | HUMAN mRNA SEQUENCE |
| hP18-040.1 | SEQ ID NO: 6 | HUMAN PROTEIN SEQUENCE |
| hR18-040.2 | SEQ ID NO: 7 | HUMAN mRNA SEQUENCE |
| hP18-040.2 | SEQ ID NO: 8 | HUMAN PROTEIN SEQUENCE |
| hR18-040.3 | SEQ ID NO: 9 | HUMAN mRNA SEQUENCE |
| hP18-040.3 | SEQ ID NO: 10 | HUMAN PROTEIN SEQUENCE |
| hR18-040.4 | SEQ ID NO: 11 | HUMAN mRNA SEQUENCE |
| hP18-040.4 | SEQ ID NO: 12 | HUMAN PROTEIN SEQUENCE |
| hR18-040.5 | SEQ ID NO: 13 | HUMAN mRNA SEQUENCE |
| hP18-040.5 | SEQ ID NO: 14 | HUMAN PROTEIN SEQUENCE |
| mD18-044 | SEQ ID NO: 15 | MOUSE GENOMIC SEQUENCE |
| mR18-044.1 | SEQ ID NO: 16 | MOUSE mRNA SEQUENCE |
| mP18-044.1 | SEQ ID NO: 17 | MOUSE PROTEIN SEQUENCE |
| mR18-044.2 | SEQ ID NO: 18 | MOUSE mRNA SEQUENCE |
| mP18-044.2 | SEQ ID NO: 19 | MOUSE PROTEIN SEQUENCE |
| hD18-044 | SEQ ID NO: 20 | HUMAN GENOMIC SEQUENCE |
| hR18-044.1 | SEQ ID NO: 21 | HUMAN mRNA SEQUENCE |
| hP18-044.1 | SEQ ID NO: 22 | HUMAN PROTEIN SEQUENCE |
| mD19-001 | SEQ ID NO: 23 | MOUSE GENOMIC SEQUENCE |
| mR19-001.1 | SEQ ID NO: 24 | MOUSE mRNA SEQUENCE |
| mP19-001.1 | SEQ ID NO: 25 | MOUSE PROTEIN SEQUENCE |
| hD19-001 | SEQ ID NO: 26 | HUMAN GENOMIC SEQUENCE |
| hR19-001.1 | SEQ ID NO: 27 | HUMAN mRNA SEQUENCE |
| hP19-001.1 | SEQ ID NO: 28 | HUMAN PROTEIN SEQUENCE |
| hR19-001.2 | SEQ ID NO: 29 | HUMAN mRNA SEQUENCE |
| hP19-001.2 | SEQ ID NO: 30 | HUMAN PROTEIN SEQUENCE |
| mD19-004 | SEQ ID NO: 31 | MOUSE GENOMIC SEQUENCE |
| mR19-004.1 | SEQ ID NO: 32 | MOUSE mRNA SEQUENCE |
| mP19-004.1 | SEQ ID NO: 33 | MOUSE PROTEIN SEQUENCE |
| mR19-004.2 | SEQ ID NO: 34 | MOUSE mRNA SEQUENCE |
| mP19-004.2 | SEQ ID NO: 35 | MOUSE PROTEIN SEQUENCE |
| hD19-004 | SEQ ID NO: 36 | HUMAN GENOMIC SEQUENCE |
| hR19-004.1 | SEQ ID NO: 37 | HUMAN mRNA SEQUENCE |
| hP19-004.1 | SEQ ID NO: 38 | HUMAN PROTEIN SEQUENCE |
| hR19-004.2 | SEQ ID NO: 39 | HUMAN mRNA SEQUENCE |
| hP19-004.2 | SEQ ID NO: 40 | HUMAN PROTEIN SEQUENCE |
| mD19-005 | SEQ ID NO: 41 | MOUSE GENOMIC SEQUENCE |
| mR19-005.1 | SEQ ID NO: 42 | MOUSE mRNA SEQUENCE |
| mP19-005.1 | SEQ ID NO: 43 | MOUSE PROTEIN SEQUENCE |
| hD19-005 | SEQ ID NO: 44 | HUMAN GENOMIC SEQUENCE |
| hR19-005.1 | SEQ ID NO: 45 | HUMAN mRNA SEQUENCE |
| hP19-005.1 | SEQ ID NO: 46 | HUMAN PROTEIN SEQUENCE |
| hR19-005.2 | SEQ ID NO: 47 | HUMAN mRNA SEQUENCE |
| hP19-005.2 | SEQ ID NO: 48 | HUMAN PROTEIN SEQUENCE |
| hR19-005.3 | SEQ ID NO: 49 | HUMAN mRNA SEQUENCE |
| hP19-005.3 | SEQ ID NO: 50 | HUMAN PROTEIN SEQUENCE |
| mD20-003 | SEQ ID NO: 51 | MOUSE GENOMIC SEQUENCE |
| mR20-003.1 | SEQ ID NO: 52 | MOUSE mRNA SEQUENCE |
| mP20-003.1 | SEQ ID NO: 53 | MOUSE PROTEIN SEQUENCE |
| hD20-003 | SEQ ID NO: 54 | HUMAN GENOMIC SEQUENCE |
| hR20-003.1 | SEQ ID NO: 55 | HUMAN mRNA SEQUENCE |
| hP20-003.1 | SEQ ID NO: 56 | HUMAN PROTEIN SEQUENCE |
| hR20-003.2 | SEQ ID NO: 57 | HUMAN mRNA SEQUENCE |
| hP20-003.2 | SEQ ID NO: 58 | HUMAN PROTEIN SEQUENCE |
| hR20-003.3 | SEQ ID NO: 59 | HUMAN mRNA SEQUENCE |
| hP20-003.3 | SEQ ID NO: 60 | HUMAN PROTEIN SEQUENCE |
| hR20-003.4 | SEQ ID NO: 61 | HUMAN mRNA SEQUENCE |
| hP20-003.4 | SEQ ID NO: 62 | HUMAN PROTEIN SEQUENCE |
| hR20-003.5 | SEQ ID NO: 63 | HUMAN mRNA SEQUENCE |
| hP20-003.5 | SEQ ID NO: 64 | HUMAN PROTEIN SEQUENCE |
| mD20-005 | SEQ ID NO: 65 | MOUSE GENOMIC SEQUENCE |
| mR20-005.1 | SEQ ID NO: 66 | MOUSE mRNA SEQUENCE |
| mP20-005.1 | SEQ ID NO: 67 | MOUSE PROTEIN SEQUENCE |
| hD20-005 | SEQ ID NO: 68 | HUMAN GENOMIC SEQUENCE |
| hR20-005.1 | SEQ ID NO: 69 | HUMAN mRNA SEQUENCE |
| hP20-005.1 | SEQ ID NO: 70 | HUMAN PROTEIN SEQUENCE |
| mD20-012 | SEQ ID NO: 71 | MOUSE GENOMIC SEQUENCE |
| mR20-012.1 | SEQ ID NO: 72 | MOUSE mRNA SEQUENCE |
| mP20-012.1 | SEQ ID NO: 73 | MOUSE PROTEIN SEQUENCE |
| hD20-012 | SEQ ID NO: 74 | HUMAN GENOMIC SEQUENCE |
| hR20-012.1 | SEQ ID NO: 75 | HUMAN mRNA SEQUENCE |
| hP20-012.1 | SEQ ID NO: 76 | HUMAN PROTEIN SEQUENCE |
| hR20-012.2 | SEQ ID NO: 77 | HUMAN mRNA SEQUENCE |
| hP20-012.2 | SEQ ID NO: 78 | HUMAN PROTEIN SEQUENCE |
| hR20-012.3 | SEQ ID NO: 79 | HUMAN mRNA SEQUENCE |
| hP20-012.3 | SEQ ID NO: 80 | HUMAN PROTEIN SEQUENCE |
| hR20-012.4 | SEQ ID NO: 81 | HUMAN mRNA SEQUENCE |
| hP20-012.4 | SEQ ID NO: 82 | HUMAN PROTEIN SEQUENCE |
| mD20-013 | SEQ ID NO: 83 | MOUSE GENOMIC SEQUENCE |
| mR20-013.1 | SEQ ID NO: 84 | MOUSE mRNA SEQUENCE |
| mP20-013.1 | SEQ ID NO: 85 | MOUSE PROTEIN SEQUENCE |
| mR20-013.2 | SEQ ID NO: 86 | MOUSE mRNA SEQUENCE |
| mP20-013.2 | SEQ ID NO: 87 | MOUSE PROTEIN SEQUENCE |
| mD20-014 | SEQ ID NO: 88 | MOUSE GENOMIC SEQUENCE |
| mR20-014.1 | SEQ ID NO: 89 | MOUSE mRNA SEQUENCE |
| mP20-014.1 | SEQ ID NO: 90 | MOUSE PROTEIN SEQUENCE |
| hD20-014 | SEQ ID NO: 91 | HUMAN GENOMIC SEQUENCE |
| hR20-014.1 | SEQ ID NO: 92 | HUMAN mRNA SEQUENCE |
| hP20-014.1 | SEQ ID NO: 93 | HUMAN PROTEIN SEQUENCE |
| hR20-014.2 | SEQ ID NO: 94 | HUMAN mRNA SEQUENCE |
| hP20-014.2 | SEQ ID NO: 95 | HUMAN PROTEIN SEQUENCE |
| hR20-014.3 | SEQ ID NO: 96 | HUMAN mRNA SEQUENCE |
| hP20-014.3 | SEQ ID NO: 97 | HUMAN PROTEIN SEQUENCE |
| hR20-014.4 | SEQ ID NO: 98 | HUMAN mRNA SEQUENCE |
| hP20-014.4 | SEQ ID NO: 99 | HUMAN PROTEIN SEQUENCE |
| hR20-014.5 | SEQ ID NO: 100 | HUMAN mRNA SEQUENCE |
| hP20-014.5 | SEQ ID NO: 101 | HUMAN PROTEIN SEQUENCE |
| mD20-015 | SEQ ID NO: 102 | MOUSE GENOMIC SEQUENCE |
| mR20-015.1 | SEQ ID NO: 103 | MOUSE mRNA SEQUENCE |
| mP20-015.1 | SEQ ID NO: 104 | MOUSE PROTEIN SEQUENCE |
| hD20-015 | SEQ ID NO: 105 | HUMAN GENOMIC SEQUENCE |
| hR20-015.1 | SEQ ID NO: 106 | HUMAN mRNA SEQUENCE |
| hP20-015.1 | SEQ ID NO: 107 | HUMAN PROTEIN SEQUENCE |
| hR20-015.2 | SEQ ID NO: 108 | HUMAN mRNA SEQUENCE |
| hP20-015.2 | SEQ ID NO: 109 | HUMAN PROTEIN SEQUENCE |
| hR20-015.3 | SEQ ID NO: 110 | HUMAN mRNA SEQUENCE |
| hP20-015.3 | SEQ ID NO: 111 | HUMAN PROTEIN SEQUENCE |
| mD20-016 | SEQ ID NO: 112 | MOUSE GENOMIC SEQUENCE |
| mR20-016.1 | SEQ ID NO: 113 | MOUSE mRNA SEQUENCE |
| mP20-016.1 | SEQ ID NO: 114 | MOUSE PROTEIN SEQUENCE |
| hD20-016 | SEQ ID NO: 115 | HUMAN GENOMIC SEQUENCE |
| hR20-016.1 | SEQ ID NO: 116 | HUMAN mRNA SEQUENCE |
| hP20-016.1 | SEQ ID NO: 117 | HUMAN PROTEIN SEQUENCE |
| hR20-016.2 | SEQ ID NO: 118 | HUMAN mRNA SEQUENCE |
| hP20-016.2 | SEQ ID NO: 119 | HUMAN PROTEIN SEQUENCE |
| hR20-016.3 | SEQ ID NO: 120 | HUMAN mRNA SEQUENCE |
| hP20-016.3 | SEQ ID NO: 121 | HUMAN PROTEIN SEQUENCE |
| hR20-016.4 | SEQ ID NO: 122 | HUMAN mRNA SEQUENCE |
| hP20-016.4 | SEQ ID NO: 123 | HUMAN PROTEIN SEQUENCE |
| hR20-016.5 | SEQ ID NO: 124 | HUMAN mRNA SEQUENCE |
| hP20-016.5 | SEQ ID NO: 125 | HUMAN PROTEIN SEQUENCE |
| hR20-016.6 | SEQ ID NO: 126 | HUMAN mRNA SEQUENCE |
| hP20-016.6 | SEQ ID NO: 127 | HUMAN PROTEIN SEQUENCE |
| hR20-016.7 | SEQ ID NO: 128 | HUMAN mRNA SEQUENCE |
| hP20-016.7 | SEQ ID NO: 129 | HUMAN PROTEIN SEQUENCE |
| hR20-016.8 | SEQ ID NO: 130 | HUMAN mRNA SEQUENCE |
| hP20-016.8 | SEQ ID NO: 131 | HUMAN PROTEIN SEQUENCE |
| hR20-016.9 | SEQ ID NO: 132 | HUMAN mRNA SEQUENCE |
| hP20-016.9 | SEQ ID NO: 133 | HUMAN PROTEIN SEQUENCE |
| hR20-016.10 | SEQ ID NO: 134 | HUMAN mRNA SEQUENCE |
| hP20-016.10 | SEQ ID NO: 135 | HUMAN PROTEIN SEQUENCE |
| hR20-016.11 | SEQ ID NO: 136 | HUMAN mRNA SEQUENCE |
| hP20-016.11 | SEQ ID NO: 137 | HUMAN PROTEIN SEQUENCE |
| hR20-016.12 | SEQ ID NO: 138 | HUMAN mRNA SEQUENCE |
| hP20-016.12 | SEQ ID NO: 139 | HUMAN PROTEIN SEQUENCE |
| hR20-016.13 | SEQ ID NO: 140 | HUMAN mRNA SEQUENCE |
| hP20-016.13 | SEQ ID NO: 141 | HUMAN PROTEIN SEQUENCE |
| mD20-017 | SEQ ID NO: 142 | MOUSE GENOMIC SEQUENCE |
| mR20-017.1 | SEQ ID NO: 143 | MOUSE mRNA SEQUENCE |
| mP20-017.1 | SEQ ID NO: 144 | MOUSE PROTEIN SEQUENCE |
| mR20-017.2 | SEQ ID NO: 145 | MOUSE mRNA SEQUENCE |
| mP20-017.2 | SEQ ID NO: 146 | MOUSE PROTEIN SEQUENCE |
| mR20-017.3 | SEQ ID NO: 147 | MOUSE mRNA SEQUENCE |
| mP20-017.3 | SEQ ID NO: 148 | MOUSE PROTEIN SEQUENCE |
| hD20-017 | SEQ ID NO: 149 | HUMAN GENOMIC SEQUENCE |
| hR20-017.1 | SEQ ID NO: 150 | HUMAN mRNA SEQUENCE |
| hP20-017.1 | SEQ ID NO: 151 | HUMAN PROTEIN SEQUENCE |
| hR20-017.2 | SEQ ID NO: 152 | HUMAN mRNA SEQUENCE |
| hP20-017.2 | SEQ ID NO: 153 | HUMAN PROTEIN SEQUENCE |
| mD20-019 | SEQ ID NO: 154 | MOUSE GENOMIC SEQUENCE |
| mR20-019.1 | SEQ ID NO: 155 | MOUSE mRNA SEQUENCE |
| mP20-019.1 | SEQ ID NO: 156 | MOUSE PROTEIN SEQUENCE |
| mR20-019.2 | SEQ ID NO: 157 | MOUSE mRNA SEQUENCE |
| mP20-019.2 | SEQ ID NO: 158 | MOUSE PROTEIN SEQUENCE |
| hD20-019 | SEQ ID NO: 159 | HUMAN GENOMIC SEQUENCE |
| hR20-019.1 | SEQ ID NO: 160 | HUMAN mRNA SEQUENCE |
| hP20-019.1 | SEQ ID NO: 161 | HUMAN PROTEIN SEQUENCE |
| mD20-020 | SEQ ID NO: 162 | MOUSE GENOMIC SEQUENCE |
| mR20-020.1 | SEQ ID NO: 163 | MOUSE mRNA SEQUENCE |
| mP20-020.1 | SEQ ID NO: 164 | MOUSE PROTEIN SEQUENCE |
| hD20-020 | SEQ ID NO: 165 | HUMAN GENOMIC SEQUENCE |
| hR20-020.1 | SEQ ID NO: 166 | HUMAN mRNA SEQUENCE |
| hP20-020.1 | SEQ ID NO: 167 | HUMAN PROTEIN SEQUENCE |
| hR20-020.2 | SEQ ID NO: 168 | HUMAN mRNA SEQUENCE |
| hP20-020.2 | SEQ ID NO: 169 | HUMAN PROTEIN SEQUENCE |
| hR20-020.3 | SEQ ID NO: 170 | HUMAN mRNA SEQUENCE |
| hP20-020.3 | SEQ ID NO: 171 | HUMAN PROTEIN SEQUENCE |
| hR20-020.4 | SEQ ID NO: 172 | HUMAN mRNA SEQUENCE |
| hP20-020.4 | SEQ ID NO: 173 | HUMAN PROTEIN SEQUENCE |
| hR20-020.5 | SEQ ID NO: 174 | HUMAN mRNA SEQUENCE |
| hP20-020.5 | SEQ ID NO: 175 | HUMAN PROTEIN SEQUENCE |
| hR20-020.6 | SEQ ID NO: 176 | HUMAN mRNA SEQUENCE |
| hP20-020.6 | SEQ ID NO: 177 | HUMAN PROTEIN SEQUENCE |
| hR20-020.7 | SEQ ID NO: 178 | HUMAN mRNA SEQUENCE |
| hP20-020.7 | SEQ ID NO: 179 | HUMAN PROTEIN SEQUENCE |
| hR20-020.8 | SEQ ID NO: 180 | HUMAN mRNA SEQUENCE |
| hP20-020.8 | SEQ ID NO: 181 | HUMAN PROTEIN SEQUENCE |
| mD20-022 | SEQ ID NO: 182 | MOUSE GENOMIC SEQUENCE |
| mR20-022.1 | SEQ ID NO: 183 | MOUSE mRNA SEQUENCE |
| mP20-022.1 | SEQ ID NO: 184 | MOUSE PROTEIN SEQUENCE |
| mR20-022.2 | SEQ ID NO: 185 | MOUSE mRNA SEQUENCE |
| mP20-022.2 | SEQ ID NO: 186 | MOUSE PROTEIN SEQUENCE |
| mR20-022.3 | SEQ ID NO: 187 | MOUSE mRNA SEQUENCE |
| mP20-022.3 | SEQ ID NO: 188 | MOUSE PROTEIN SEQUENCE |
| hD20-022 | SEQ ID NO: 189 | HUMAN GENOMIC SEQUENCE |
| hR20-022.1 | SEQ ID NO: 190 | HUMAN mRNA SEQUENCE |
| hP20-022.1 | SEQ ID NO: 191 | HUMAN PROTEIN SEQUENCE |
| hR20-022.2 | SEQ ID NO: 192 | HUMAN mRNA SEQUENCE |
| hP20-022.2 | SEQ ID NO: 193 | HUMAN PROTEIN SEQUENCE |
| hR20-022.3 | SEQ ID NO: 194 | HUMAN mRNA SEQUENCE |
| hP20-022.3 | SEQ ID NO: 195 | HUMAN PROTEIN SEQUENCE |
| mD20-023 | SEQ ID NO: 196 | MOUSE GENOMIC SEQUENCE |
| mR20-023.1 | SEQ ID NO: 197 | MOUSE mRNA SEQUENCE |
| mP20-023.1 | SEQ ID NO: 198 | MOUSE PROTEIN SEQUENCE |
| mR20-023.2 | SEQ ID NO: 199 | MOUSE mRNA SEQUENCE |
| mP20-023.2 | SEQ ID NO: 200 | MOUSE PROTEIN SEQUENCE |
| mR20-023.3 | SEQ ID NO: 201 | MOUSE mRNA SEQUENCE |
| mP20-023.3 | SEQ ID NO: 202 | MOUSE PROTEIN SEQUENCE |
| hD20-023 | SEQ ID NO: 203 | HUMAN GENOMIC SEQUENCE |
| hR20-023.1 | SEQ ID NO: 204 | HUMAN mRNA SEQUENCE |
| hP20-023.1 | SEQ ID NO: 205 | HUMAN PROTEIN SEQUENCE |
| hR20-023.2 | SEQ ID NO: 206 | HUMAN mRNA SEQUENCE |
| hP20-023.2 | SEQ ID NO: 207 | HUMAN PROTEIN SEQUENCE |
| hR20-023.3 | SEQ ID NO: 208 | HUMAN mRNA SEQUENCE |
| hP20-023.3 | SEQ ID NO: 209 | HUMAN PROTEIN SEQUENCE |
| hR20-023.4 | SEQ ID NO: 210 | HUMAN mRNA SEQUENCE |
| hP20-023.4 | SEQ ID NO: 211 | HUMAN PROTEIN SEQUENCE |
| hR20-023.5 | SEQ ID NO: 212 | HUMAN mRNA SEQUENCE |
| hP20-023.5 | SEQ ID NO: 213 | HUMAN PROTEIN SEQUENCE |
| mD20-025 | SEQ ID NO: 214 | MOUSE GENOMIC SEQUENCE |
| mR20-025.1 | SEQ ID NO: 215 | MOUSE mRNA SEQUENCE |
| mP20-025.1 | SEQ ID NO: 216 | MOUSE PROTEIN SEQUENCE |
| hD20-025 | SEQ ID NO: 217 | HUMAN GENOMIC SEQUENCE |
| hR20-025.1 | SEQ ID NO: 218 | HUMAN mRNA SEQUENCE |
| hP20-025.1 | SEQ ID NO: 219 | HUMAN PROTEIN SEQUENCE |
| hR20-025.2 | SEQ ID NO: 220 | HUMAN mRNA SEQUENCE |
| hP20-025.2 | SEQ ID NO: 221 | HUMAN PROTEIN SEQUENCE |
| hR20-025.3 | SEQ ID NO: 222 | HUMAN mRNA SEQUENCE |
| hP20-025.3 | SEQ ID NO: 223 | HUMAN PROTEIN SEQUENCE |
| hR20-025.4 | SEQ ID NO: 224 | HUMAN mRNA SEQUENCE |
| hP20-025.4 | SEQ ID NO: 225 | HUMAN PROTEIN SEQUENCE |
| mD20-026 | SEQ ID NO: 226 | MOUSE GENOMIC SEQUENCE |
| mR20-026.1 | SEQ ID NO: 227 | MOUSE mRNA SEQUENCE |
| mP20-026.1 | SEQ ID NO: 228 | MOUSE PROTEIN SEQUENCE |
| hD20-026 | SEQ ID NO: 229 | HUMAN GENOMIC SEQUENCE |
| hR20-026.1 | SEQ ID NO: 230 | HUMAN mRNA SEQUENCE |
| hP20-026.1 | SEQ ID NO: 231 | HUMAN PROTEIN SEQUENCE |
| hR20-026.2 | SEQ ID NO: 232 | HUMAN mRNA SEQUENCE |
| hP20-026.2 | SEQ ID NO: 233 | HUMAN PROTEIN SEQUENCE |
| hR20-026.3 | SEQ ID NO: 234 | HUMAN mRNA SEQUENCE |
| hP20-026.3 | SEQ ID NO: 235 | HUMAN PROTEIN SEQUENCE |
| mD20-028 | SEQ ID NO: 236 | MOUSE GENOMIC SEQUENCE |
| mR20-028.1 | SEQ ID NO: 237 | MOUSE mRNA SEQUENCE |
| mP20-028.1 | SEQ ID NO: 238 | MOUSE PROTEIN SEQUENCE |
| hD20-028 | SEQ ID NO: 239 | HUMAN GENOMIC SEQUENCE |
| hR20-028.1 | SEQ ID NO: 240 | HUMAN mRNA SEQUENCE |
| hP20-028.1 | SEQ ID NO: 241 | HUMAN PROTEIN SEQUENCE |
| hR20-028.2 | SEQ ID NO: 242 | HUMAN mRNA SEQUENCE |
| hP20-028.2 | SEQ ID NO: 243 | HUMAN PROTEIN SEQUENCE |
| hR20-028.3 | SEQ ID NO: 244 | HUMAN mRNA SEQUENCE |
| hP20-028.3 | SEQ ID NO: 245 | HUMAN PROTEIN SEQUENCE |
| mD20-031 | SEQ ID NO: 246 | MOUSE GENOMIC SEQUENCE |
| mR20-031.1 | SEQ ID NO: 247 | MOUSE mRNA SEQUENCE |
| mP20-031.1 | SEQ ID NO: 248 | MOUSE PROTEIN SEQUENCE |
| hD20-031 | SEQ ID NO: 249 | HUMAN GENOMIC SEQUENCE |
| hR20-031.1 | SEQ ID NO: 250 | HUMAN mRNA SEQUENCE |
| hP20-031.1 | SEQ ID NO: 251 | HUMAN PROTEIN SEQUENCE |
| mD20-032 | SEQ ID NO: 252 | MOUSE GENOMIC SEQUENCE |
| mR20-032.1 | SEQ ID NO: 253 | MOUSE mRNA SEQUENCE |
| mP20-032.1 | SEQ ID NO: 254 | MOUSE PROTEIN SEQUENCE |
| mR20-032.2 | SEQ ID NO: 255 | MOUSE mRNA SEQUENCE |
| mP20-032.2 | SEQ ID NO: 256 | MOUSE PROTEIN SEQUENCE |
| hD20-032 | SEQ ID NO: 257 | HUMAN GENOMIC SEQUENCE |
| hR20-032.1 | SEQ ID NO: 258 | HUMAN mRNA SEQUENCE |
| hP20-032.1 | SEQ ID NO: 259 | HUMAN PROTEIN SEQUENCE |
| hR20-032.2 | SEQ ID NO: 260 | HUMAN mRNA SEQUENCE |
| hP20-032.2 | SEQ ID NO: 261 | HUMAN PROTEIN SEQUENCE |
| mD20-034 | SEQ ID NO: 262 | MOUSE GENOMIC SEQUENCE |
| mR20-034.1 | SEQ ID NO: 263 | MOUSE mRNA SEQUENCE |
| mP20-034.1 | SEQ ID NO: 264 | MOUSE PROTEIN SEQUENCE |
| mR20-034.2 | SEQ ID NO: 265 | MOUSE mRNA SEQUENCE |
| mP20-034.2 | SEQ ID NO: 266 | MOUSE PROTEIN SEQUENCE |
| hD20-034 | SEQ ID NO: 267 | HUMAN GENOMIC SEQUENCE |
| hR20-034.1 | SEQ ID NO: 268 | HUMAN mRNA SEQUENCE |
| hP20-034.1 | SEQ ID NO: 269 | HUMAN PROTEIN SEQUENCE |
| mD20-035 | SEQ ID NO: 270 | MOUSE GENOMIC SEQUENCE |
| mR20-035.1 | SEQ ID NO: 271 | MOUSE mRNA SEQUENCE |
| mP20-035.1 | SEQ ID NO: 272 | MOUSE PROTEIN SEQUENCE |
| hD20-035 | SEQ ID NO: 273 | HUMAN GENOMIC SEQUENCE |
| hR20-035.1 | SEQ ID NO: 274 | HUMAN mRNA SEQUENCE |
| hP20-035.1 | SEQ ID NO: 275 | HUMAN PROTEIN SEQUENCE |
| mD20-036 | SEQ ID NO: 276 | MOUSE GENOMIC SEQUENCE |
| mR20-036.1 | SEQ ID NO: 277 | MOUSE mRNA SEQUENCE |
| mP20-036.1 | SEQ ID NO: 278 | MOUSE PROTEIN SEQUENCE |
| mR20-036.2 | SEQ ID NO: 279 | MOUSE mRNA SEQUENCE |
| mP20-036.2 | SEQ ID NO: 280 | MOUSE PROTEIN SEQUENCE |
| hD20-036 | SEQ ID NO: 281 | HUMAN GENOMIC SEQUENCE |
| hR20-036.1 | SEQ ID NO: 282 | HUMAN mRNA SEQUENCE |
| hP20-036.1 | SEQ ID NO: 283 | HUMAN PROTEIN SEQUENCE |
| hR20-036.2 | SEQ ID NO: 284 | HUMAN mRNA SEQUENCE |
| hP20-036.2 | SEQ ID NO: 285 | HUMAN PROTEIN SEQUENCE |
| hR20-036.3 | SEQ ID NO: 286 | HUMAN mRNA SEQUENCE |
| hP20-036.3 | SEQ ID NO: 287 | HUMAN PROTEIN SEQUENCE |
| hD21-001 | SEQ ID NO: 288 | HUMAN GENOMIC SEQUENCE |
| hR21-001.1 | SEQ ID NO: 289 | HUMAN mRNA SEQUENCE |
| hP21-001.1 | SEQ ID NO: 290 | HUMAN PROTEIN SEQUENCE |
| mD21-003 | SEQ ID NO: 291 | MOUSE GENOMIC SEQUENCE |
| mR21-003.1 | SEQ ID NO: 292 | MOUSE mRNA SEQUENCE |
| mP21-003.1 | SEQ ID NO: 293 | MOUSE PROTEIN SEQUENCE |
| mR21-003.2 | SEQ ID NO: 294 | MOUSE mRNA SEQUENCE |
| mP21-003.2 | SEQ ID NO: 295 | MOUSE PROTEIN SEQUENCE |
| hD21-003 | SEQ ID NO: 296 | HUMAN GENOMIC SEQUENCE |
| hR21-003.1 | SEQ ID NO: 297 | HUMAN mRNA SEQUENCE |
| hP21-003.1 | SEQ ID NO: 298 | HUMAN PROTEIN SEQUENCE |
| mD21-004 | SEQ ID NO: 299 | MOUSE GENOMIC SEQUENCE |
| mR21-004.1 | SEQ ID NO: 300 | MOUSE mRNA SEQUENCE |
| mP21-004.1 | SEQ ID NO: 301 | MOUSE PROTEIN SEQUENCE |
| mR21-004.2 | SEQ ID NO: 302 | MOUSE mRNA SEQUENCE |
| mP21-004.2 | SEQ ID NO: 303 | MOUSE PROTEIN SEQUENCE |
| mR21-004.3 | SEQ ID NO: 304 | MOUSE mRNA SEQUENCE |
| mP21-004.3 | SEQ ID NO: 305 | MOUSE PROTEIN SEQUENCE |
| hD21-004 | SEQ ID NO: 306 | HUMAN GENOMIC SEQUENCE |
| hR21-004.1 | SEQ ID NO: 307 | HUMAN mRNA SEQUENCE |
| hP21-004.1 | SEQ ID NO: 308 | HUMAN PROTEIN SEQUENCE |
| mD21-005 | SEQ ID NO: 309 | MOUSE GENOMIC SEQUENCE |
| mR21-005.1 | SEQ ID NO: 310 | MOUSE mRNA SEQUENCE |
| mP21-005.1 | SEQ ID NO: 311 | MOUSE PROTEIN SEQUENCE |
| mR21-005.2 | SEQ ID NO: 312 | MOUSE mRNA SEQUENCE |
| mP21-005.2 | SEQ ID NO: 313 | MOUSE PROTEIN SEQUENCE |
| hD21-005 | SEQ ID NO: 314 | HUMAN GENOMIC SEQUENCE |
| hR21-005.1 | SEQ ID NO: 315 | HUMAN mRNA SEQUENCE |
| hP21-005.1 | SEQ ID NO: 316 | HUMAN PROTEIN SEQUENCE |
| hR21-005.2 | SEQ ID NO: 317 | HUMAN mRNA SEQUENCE |
| hP21-005.2 | SEQ ID NO: 318 | HUMAN PROTEIN SEQUENCE |
| hR21-005.3 | SEQ ID NO: 319 | HUMAN mRNA SEQUENCE |
| hP21-005.3 | SEQ ID NO: 320 | HUMAN PROTEIN SEQUENCE |
| hR21-005.4 | SEQ ID NO: 321 | HUMAN mRNA SEQUENCE |
| hP21-005.4 | SEQ ID NO: 322 | HUMAN PROTEIN SEQUENCE |
| mD21-006 | SEQ ID NO: 323 | MOUSE GENOMIC SEQUENCE |
| mR21-006.1 | SEQ ID NO: 324 | MOUSE mRNA SEQUENCE |
| mP21-006.1 | SEQ ID NO: 325 | MOUSE PROTEIN SEQUENCE |
| hD21-006 | SEQ ID NO: 326 | HUMAN GENOMIC SEQUENCE |
| hR21-006.1 | SEQ ID NO: 327 | HUMAN mRNA SEQUENCE |
| hP21-006.1 | SEQ ID NO: 328 | HUMAN PROTEIN SEQUENCE |
| hR21-006.2 | SEQ ID NO: 329 | HUMAN mRNA SEQUENCE |
| hP21-006.2 | SEQ ID NO: 330 | HUMAN PROTEIN SEQUENCE |
| mD21-007 | SEQ ID NO: 331 | MOUSE GENOMIC SEQUENCE |
| mR21-007.1 | SEQ ID NO: 332 | MOUSE mRNA SEQUENCE |
| mP21-007.1 | SEQ ID NO: 333 | MOUSE PROTEIN SEQUENCE |
| mR21-007.2 | SEQ ID NO: 334 | MOUSE mRNA SEQUENCE |
| mP21-007.2 | SEQ ID NO: 335 | MOUSE PROTEIN SEQUENCE |
| hD21-007 | SEQ ID NO: 336 | HUMAN GENOMIC SEQUENCE |
| hR21-007.1 | SEQ ID NO: 337 | HUMAN mRNA SEQUENCE |
| hP21-007.1 | SEQ ID NO: 338 | HUMAN PROTEIN SEQUENCE |
| hR21-007.2 | SEQ ID NO: 339 | HUMAN mRNA SEQUENCE |
| hP21-007.2 | SEQ ID NO: 340 | HUMAN PROTEIN SEQUENCE |
| mD21-010 | SEQ ID NO: 341 | MOUSE GENOMIC SEQUENCE |
| mR21-010.1 | SEQ ID NO: 342 | MOUSE mRNA SEQUENCE |
| mP21-010.1 | SEQ ID NO: 343 | MOUSE PROTEIN SEQUENCE |
| mR21-010.2 | SEQ ID NO: 344 | MOUSE mRNA SEQUENCE |
| mP21-010.2 | SEQ ID NO: 345 | MOUSE PROTEIN SEQUENCE |
| mR21-010.3 | SEQ ID NO: 346 | MOUSE mRNA SEQUENCE |
| mP21-010.3 | SEQ ID NO: 347 | MOUSE PROTEIN SEQUENCE |
| hD21-010 | SEQ ID NO: 348 | HUMAN GENOMIC SEQUENCE |
| hR21-010.1 | SEQ ID NO: 349 | HUMAN mRNA SEQUENCE |
| hP21-010.1 | SEQ ID NO: 350 | HUMAN PROTEIN SEQUENCE |
| hR21-010.2 | SEQ ID NO: 351 | HUMAN mRNA SEQUENCE |
| hP21-010.2 | SEQ ID NO: 352 | HUMAN PROTEIN SEQUENCE |
| mD21-011 | SEQ ID NO: 353 | MOUSE GENOMIC SEQUENCE |
| mR21-011.1 | SEQ ID NO: 354 | MOUSE mRNA SEQUENCE |
| mP21-011.1 | SEQ ID NO: 355 | MOUSE PROTEIN SEQUENCE |
| mR21-011.2 | SEQ ID NO: 356 | MOUSE mRNA SEQUENCE |
| mP21-011.2 | SEQ ID NO: 357 | MOUSE PROTEIN SEQUENCE |
| mD21-013 | SEQ ID NO: 358 | MOUSE GENOMIC SEQUENCE |
| mR21-013.1 | SEQ ID NO: 359 | MOUSE mRNA SEQUENCE |
| mP21-013.1 | SEQ ID NO: 360 | MOUSE PROTEIN SEQUENCE |
| mD21-016 | SEQ ID NO: 361 | MOUSE GENOMIC SEQUENCE |
| mR21-016.1 | SEQ ID NO: 362 | MOUSE mRNA SEQUENCE |
| mP21-016.1 | SEQ ID NO: 363 | MOUSE PROTEIN SEQUENCE |
| mR21-016.2 | SEQ ID NO: 364 | MOUSE mRNA SEQUENCE |
| mP21-016.2 | SEQ ID NO: 365 | MOUSE PROTEIN SEQUENCE |
| hD21-016 | SEQ ID NO: 366 | HUMAN GENOMIC SEQUENCE |
| hR21-016.1 | SEQ ID NO: 367 | HUMAN mRNA SEQUENCE |
| hP21-016.1 | SEQ ID NO: 368 | HUMAN PROTEIN SEQUENCE |
| hR21-016.2 | SEQ ID NO: 369 | HUMAN mRNA SEQUENCE |
| hP21-016.2 | SEQ ID NO: 370 | HUMAN PROTEIN SEQUENCE |
| mD21-018 | SEQ ID NO: 371 | MOUSE GENOMIC SEQUENCE |
| mR21-018.1 | SEQ ID NO: 372 | MOUSE mRNA SEQUENCE |
| mP21-018.1 | SEQ ID NO: 373 | MOUSE PROTEIN SEQUENCE |
| mD21-019 | SEQ ID NO: 374 | MOUSE GENOMIC SEQUENCE |
| mR21-019.1 | SEQ ID NO: 375 | MOUSE mRNA SEQUENCE |
| mP21-019.1 | SEQ ID NO: 376 | MOUSE PROTEIN SEQUENCE |
| hD21-019 | SEQ ID NO: 377 | HUMAN GENOMIC SEQUENCE |
| hR21-019.1 | SEQ ID NO: 378 | HUMAN mRNA SEQUENCE |
| hP21-019.1 | SEQ ID NO: 379 | HUMAN PROTEIN SEQUENCE |
| mD21-022 | SEQ ID NO: 380 | MOUSE GENOMIC SEQUENCE |
| mR21-022.1 | SEQ ID NO: 381 | MOUSE mRNA SEQUENCE |
| mP21-022.1 | SEQ ID NO: 382 | MOUSE PROTEIN SEQUENCE |
| hD21-022 | SEQ ID NO: 383 | HUMAN GENOMIC SEQUENCE |
| hR21-022.1 | SEQ ID NO: 384 | HUMAN mRNA SEQUENCE |
| hP21-022.1 | SEQ ID NO: 385 | HUMAN PROTEIN SEQUENCE |
| hD21-023 | SEQ ID NO: 386 | HUMAN GENOMIC SEQUENCE |
| hR21-023.1 | SEQ ID NO: 387 | HUMAN mRNA SEQUENCE |
| hP21-023.1 | SEQ ID NO: 388 | HUMAN PROTEIN SEQUENCE |
| hD21-023 | SEQ ID NO: 389 | HUMAN GENOMIC SEQUENCE |
| hR21-023.1 | SEQ ID NO: 390 | HUMAN mRNA SEQUENCE |
| hP21-023.1 | SEQ ID NO: 391 | HUMAN PROTEIN SEQUENCE |
| hR21-023.2 | SEQ ID NO: 392 | HUMAN mRNA SEQUENCE |
| hP21-023.2 | SEQ ID NO: 393 | HUMAN PROTEIN SEQUENCE |
| hR21-023.3 | SEQ ID NO: 394 | HUMAN mRNA SEQUENCE |
| hP21-023.3 | SEQ ID NO: 395 | HUMAN PROTEIN SEQUENCE |
| mD21-027 | SEQ ID NO: 396 | MOUSE GENOMIC SEQUENCE |
| mR21-027.1 | SEQ ID NO: 397 | MOUSE mRNA SEQUENCE |
| mP21-027.1 | SEQ ID NO: 398 | MOUSE PROTEIN SEQUENCE |
| hD21-027 | SEQ ID NO: 399 | HUMAN GENOMIC SEQUENCE |
| hR21-027.1 | SEQ ID NO: 400 | HUMAN mRNA SEQUENCE |
| hP21-027.1 | SEQ ID NO: 401 | HUMAN PROTEIN SEQUENCE |
| hR21-027.2 | SEQ ID NO: 402 | HUMAN mRNA SEQUENCE |
| hP21-027.2 | SEQ ID NO: 403 | HUMAN PROTEIN SEQUENCE |
| hR21-027.3 | SEQ ID NO: 404 | HUMAN mRNA SEQUENCE |
| hP21-027.3 | SEQ ID NO: 405 | HUMAN PROTEIN SEQUENCE |
| mD21-030 | SEQ ID NO: 406 | MOUSE GENOMIC SEQUENCE |
| mR21-030.1 | SEQ ID NO: 407 | MOUSE mRNA SEQUENCE |
| mP21-030.1 | SEQ ID NO: 408 | MOUSE PROTEIN SEQUENCE |
| hD21-030 | SEQ ID NO: 409 | HUMAN GENOMIC SEQUENCE |
| hR21-030.1 | SEQ ID NO: 410 | HUMAN mRNA SEQUENCE |
| hP21-030.1 | SEQ ID NO: 411 | HUMAN PROTEIN SEQUENCE |
| hR21-030.2 | SEQ ID NO: 412 | HUMAN mRNA SEQUENCE |
| hP21-030.2 | SEQ ID NO: 413 | HUMAN PROTEIN SEQUENCE |
| mD21-031 | SEQ ID NO: 414 | MOUSE GENOMIC SEQUENCE |
| mR21-031.1 | SEQ ID NO: 415 | MOUSE mRNA SEQUENCE |
| mP21-031.1 | SEQ ID NO: 416 | MOUSE PROTEIN SEQUENCE |
| hD21-031 | SEQ ID NO: 417 | HUMAN GENOMIC SEQUENCE |
| hR21-031.1 | SEQ ID NO: 418 | HUMAN mRNA SEQUENCE |
| hP21-031.1 | SEQ ID NO: 419 | HUMAN PROTEIN SEQUENCE |
| hR21-031.2 | SEQ ID NO: 420 | HUMAN mRNA SEQUENCE |
| hP21-031.2 | SEQ ID NO: 421 | HUMAN PROTEIN SEQUENCE |
| hR21-031.3 | SEQ ID NO: 422 | HUMAN mRNA SEQUENCE |
| hP21-031.3 | SEQ ID NO: 423 | HUMAN PROTEIN SEQUENCE |
| hR21-031.4 | SEQ ID NO: 424 | HUMAN mRNA SEQUENCE |
| hP21-031.4 | SEQ ID NO: 425 | HUMAN PROTEIN SEQUENCE |
| hR21-031.5 | SEQ ID NO: 426 | HUMAN mRNA SEQUENCE |
| hP21-031.5 | SEQ ID NO: 427 | HUMAN PROTEIN SEQUENCE |
| mD21-033 | SEQ ID NO: 428 | MOUSE GENOMIC SEQUENCE |
| mR21-033.1 | SEQ ID NO: 429 | MOUSE mRNA SEQUENCE |
| mP21-033.1 | SEQ ID NO: 430 | MOUSE PROTEIN SEQUENCE |
| hD21-033 | SEQ ID NO: 431 | HUMAN GENOMIC SEQUENCE |
| hR21-033.1 | SEQ ID NO: 432 | HUMAN mRNA SEQUENCE |
| hP21-033.1 | SEQ ID NO: 433 | HUMAN PROTEIN SEQUENCE |
| hR21-033.2 | SEQ ID NO: 434 | HUMAN mRNA SEQUENCE |
| hP21-033.2 | SEQ ID NO: 435 | HUMAN PROTEIN SEQUENCE |
| hR21-033.3 | SEQ ID NO: 436 | HUMAN mRNA SEQUENCE |
| hP21-033.3 | SEQ ID NO: 437 | HUMAN PROTEIN SEQUENCE |
| hR21-033.4 | SEQ ID NO: 438 | HUMAN mRNA SEQUENCE |
| hP21-033.4 | SEQ ID NO: 439 | HUMAN PROTEIN SEQUENCE |
| mD21-034 | SEQ ID NO: 440 | MOUSE GENOMIC SEQUENCE |
| mR21-034.1 | SEQ ID NO: 441 | MOUSE mRNA SEQUENCE |
| mP21-034.1 | SEQ ID NO: 442 | MOUSE PROTEIN SEQUENCE |
| mR21-034.2 | SEQ ID NO: 443 | MOUSE mRNA SEQUENCE |
| mP21-034.2 | SEQ ID NO: 444 | MOUSE PROTEIN SEQUENCE |
| hD21-034 | SEQ ID NO: 445 | HUMAN GENOMIC SEQUENCE |
| hR21-034.1 | SEQ ID NO: 446 | HUMAN mRNA SEQUENCE |
| hP21-034.1 | SEQ ID NO: 447 | HUMAN PROTEIN SEQUENCE |
| hR21-034.2 | SEQ ID NO: 448 | HUMAN mRNA SEQUENCE |
| hP21-034.2 | SEQ ID NO: 449 | HUMAN PROTEIN SEQUENCE |
| hR21-034.3 | SEQ ID NO: 450 | HUMAN mRNA SEQUENCE |
| hP21-034.3 | SEQ ID NO: 451 | HUMAN PROTEIN SEQUENCE |
| hR21-034.4 | SEQ ID NO: 452 | HUMAN mRNA SEQUENCE |
| hP21-034.4 | SEQ ID NO: 453 | HUMAN PROTEIN SEQUENCE |
| hR21-034.5 | SEQ ID NO: 454 | HUMAN mRNA SEQUENCE |
| hP21-034.5 | SEQ ID NO: 455 | HUMAN PROTEIN SEQUENCE |
| mD21-035 | SEQ ID NO: 456 | MOUSE GENOMIC SEQUENCE |
| mR21-035.1 | SEQ ID NO: 457 | MOUSE mRNA SEQUENCE |
| mP21-035.1 | SEQ ID NO: 458 | MOUSE PROTEIN SEQUENCE |
| hD21-035 | SEQ ID NO: 459 | HUMAN GENOMIC SEQUENCE |
| hR21-035.1 | SEQ ID NO: 460 | HUMAN mRNA SEQUENCE |
| hP21-035.1 | SEQ ID NO: 461 | HUMAN PROTEIN SEQUENCE |
| hR21-035.2 | SEQ ID NO: 462 | HUMAN mRNA SEQUENCE |
| hP21-035.2 | SEQ ID NO: 463 | HUMAN PROTEIN SEQUENCE |
| hR21-035.3 | SEQ ID NO: 464 | HUMAN mRNA SEQUENCE |
| hP21-035.3 | SEQ ID NO: 465 | HUMAN PROTEIN SEQUENCE |
| mD21-038 | SEQ ID NO: 466 | MOUSE GENOMIC SEQUENCE |
| mR21-038.1 | SEQ ID NO: 467 | MOUSE mRNA SEQUENCE |
| mP21-038.1 | SEQ ID NO: 468 | MOUSE PROTEIN SEQUENCE |
| mD21-039 | SEQ ID NO: 469 | MOUSE GENOMIC SEQUENCE |
| mR21-039.1 | SEQ ID NO: 470 | MOUSE mRNA SEQUENCE |
| mP21-039.1 | SEQ ID NO: 471 | MOUSE PROTEIN SEQUENCE |
| hD21-039 | SEQ ID NO: 472 | HUMAN GENOMIC SEQUENCE |
| hR21-039.1 | SEQ ID NO: 473 | HUMAN mRNA SEQUENCE |
| hP21-039.1 | SEQ ID NO: 474 | HUMAN PROTEIN SEQUENCE |
| hR21-039.2 | SEQ ID NO: 475 | HUMAN mRNA SEQUENCE |
| hP21-039.2 | SEQ ID NO: 476 | HUMAN PROTEIN SEQUENCE |
| hR21-039.3 | SEQ ID NO: 477 | HUMAN mRNA SEQUENCE |
| hP21-039.3 | SEQ ID NO: 478 | HUMAN PROTEIN SEQUENCE |
| mD21-040 | SEQ ID NO: 479 | MOUSE GENOMIC SEQUENCE |
| mR21-040.1 | SEQ ID NO: 480 | MOUSE mRNA SEQUENCE |
| mP21-040.1 | SEQ ID NO: 481 | MOUSE PROTEIN SEQUENCE |
| hD21-040 | SEQ ID NO: 482 | HUMAN GENOMIC SEQUENCE |
| hR21-040.1 | SEQ ID NO: 483 | HUMAN mRNA SEQUENCE |
| hP21-040.1 | SEQ ID NO: 484 | HUMAN PROTEIN SEQUENCE |
| hR21-040.2 | SEQ ID NO: 485 | HUMAN mRNA SEQUENCE |
| hP21-040.2 | SEQ ID NO: 486 | HUMAN PROTEIN SEQUENCE |
| hR21-040.3 | SEQ ID NO: 487 | HUMAN mRNA SEQUENCE |
| hP21-040.3 | SEQ ID NO: 488 | HUMAN PROTEIN SEQUENCE |
| hR21-040.4 | SEQ ID NO: 489 | HUMAN mRNA SEQUENCE |
| hP21-040.4 | SEQ ID NO: 490 | HUMAN PROTEIN SEQUENCE |
| hR21-040.5 | SEQ ID NO: 491 | HUMAN mRNA SEQUENCE |
| hP21-040.5 | SEQ ID NO: 492 | HUMAN PROTEIN SEQUENCE |
| mD21-041 | SEQ ID NO: 493 | MOUSE GENOMIC SEQUENCE |
| mR21-041.1 | SEQ ID NO: 494 | MOUSE mRNA SEQUENCE |
| mP21-041.1 | SEQ ID NO: 495 | MOUSE PROTEIN SEQUENCE |
| mR21-041.2 | SEQ ID NO: 496 | MOUSE mRNA SEQUENCE |
| mP21-041.2 | SEQ ID NO: 497 | MOUSE PROTEIN SEQUENCE |
| hD21-041 | SEQ ID NO: 498 | HUMAN GENOMIC SEQUENCE |
| hR21-041.1 | SEQ ID NO: 499 | HUMAN mRNA SEQUENCE |
| hP21-041.1 | SEQ ID NO: 500 | HUMAN PROTEIN SEQUENCE |
| hR21-041.2 | SEQ ID NO: 501 | HUMAN mRNA SEQUENCE |
| hP21-041.2 | SEQ ID NO: 502 | HUMAN PROTEIN SEQUENCE |
| hR21-041.3 | SEQ ID NO: 503 | HUMAN mRNA SEQUENCE |
| hP21-041.3 | SEQ ID NO: 504 | HUMAN PROTEIN SEQUENCE |
| hR21-041.4 | SEQ ID NO: 505 | HUMAN mRNA SEQUENCE |
| hP21-041.4 | SEQ ID NO: 506 | HUMAN PROTEIN SEQUENCE |

[0310] The CA sequences were analyzed by Panther™ (Molecular Diagnostics, Palo Alto, Calif.) software designed to detect homologs and enable prediction of molecular function through a system for protein functional classification. Human Gene Ontlogy annotations were prepared in accordance with the Gene Ontology Consortium (Gene Ontology: tool for the unification of biology. The Gene Ontology Consortium Nature Genet. 25: 25-29 (2000)). Similar analysis was carried out by determining IPR information regarding the CA polypeptides from InterPro, which is an integrated documentation resource for protein families, domains and functional sites (Apweiler at al. Bioinformatics 16(12):1145-1150 (2000)).

[0311] The CA sequences may be classified according to the predicted general classifications of function by Panther™ analysis, human gene ontology and IPR domain information shown in Tables 1-49 for polypeptides having SEQ ID NOS: 6, 8, 10, 12, 14, 22, 28, 30, 38, 40, 46, 48, 50, 56, 58, 60, 62, 64, 70, 76, 78, 80, 82, 93, 95, 97, 99, 101, 107, 109, 111, 117, 119, 121, 123, 125, 127, 129, 131, 133, 135, 137, 139, 141, 151, 153, 161, 167, 169, 171, 173, 175, 177, 179, 181, 191, 193, 195, 205, 207, 209, 211, 213, 219, 221, 223, 225, 231, 233, 235, 241, 243, 245, 251, 259, 261, 269, 275, 283, 285, 287, 290, 298, 308, 316, 318, 320, 322, 328, 330, 338, 340, 350, 352, 368, 370, 379, 385, 388, 391, 393, 395, 401, 403, 405, 411, 413, 419, 421, 423, 425, 427, 433, 435, 437, 439, 447, 449, 451, 453, 455, 461, 463, 465, 474, 476, 478, 484, 486, 488, 490, 492, 500, 502, 504, and 506.

[0312] A CA protein (CAP) is a G-protein coupled receptor protein wherein the CAP sequence is selected from the group consisting of SEQ ID NOS: 6, 8, 10, 19, 21, 23, and 25.

[0313] Certain aspects of the present invention are described in greater detail in the non-limiting examples that follow.

### EXAMPLES

[0314] The following examples are put forth so as to provide those of ordinary skill in the art with a complete disclosure and description of how to make and use the present invention, and are not intended to limit the scope of what the inventors regard as their invention nor are they intended to represent that the experiments below are all and only experiments performed. Efforts have been made to ensure accuracy with respect to numbers used (e.g. amounts, temperature, etc.) but some experimental errors and deviations should be accounted for. Unless indicated otherwise, parts are parts by weight, molecular weight is weight average molecular weight, temperature is in degrees Celsius, and pressure is at or near atmospheric.

### Example 1

### Insertion Site Analysis Following Tumor Induction in Mice

[0315] Tumors are induced in mice using either mouse mammary tumor virus (MMTV) or murine leukemia virus (MLV). MMTV causes mammary adenocarcinomas and MLV causes a variety of different hematopoetic malignancies (primarily T- or B-cell lymphomas). Three routes of infection are used: (1) injection of neonates with purified virus preparations, (2) infection by milk-borne virus during nursing, and (3) genetic transmission of pathogenic proviruses via the germ-line (Akvr1 and/or Mtv2). The type of malignancy present in each affected mouse is determined by histological analysis of H&E-stained thin sections of formalin-fixed, paraffin-embedded biopsy samples. Host DNA sequences flanking all clonally-integrated proviruses in each tumor are recovered by nested anchored-PCR using two virus-specific primers and two primers specific for a 40 bp double stranded DNA anchor ligated to restriction enzyme digested tumor DNA. Amplified bands representing host/virus junction fragments are cloned and sequenced. Then the host sequences (called “tags”) are used to BLAST analyze the Celera mouse genomic sequence. For each individual tag, three parameters are recorded: (1) the mouse chromosome assignment, (2) base pair coordinates at which the integration occurred, and (3) provirus orientation. Using this information, all available tags from all analyzed tumors are mapped to the mouse genome. To identify the protooncogene targets of provirus insertion mutation, the provirus integration pattern at each cluster of integrants is analyzed relative to the locations of all known genes in the transcriptome. The presence of provirus at the same locus in two or more independent tumors is prima facie evidence that a protooncogene is present at or very near the proviral integration sites. This is because the genome is too large for random integrations to result in observable clustering. Any clustering that is detected is unequivocal evidence for biological selection during tumorigenesis. In order to identify the human orthologs of the protooncogene targets of provirus insertion mutation, a comparative analysis of syntenic regions of the mouse and human genomes is performed.

[0316] An example of PCR amplification of host/virus junction fragments is presented in FIG. 1. Lane 1 contains the amplification products from normal control DNA and lane 2 contains the amplification products from tumor DNA. The bands result from 5′ host/virus junction fragments present in the DNA samples. Lane 1 has bands from the env/3′ LTR junctions from all proviruses (upper) and the host/5′ LTR from the pathogenic endogenous Mtv2 provirus present in this particular mouse strain. This endogenous provirus is detected because its sequence is identical to the new clonally integrated proviruses in the tumor. All four new clonally integrated proviruses known to be in this tumor are readily detected.

### Example 2

### Analysis of Quantitative RT-PCR: Comparative C_{T} Method

[0317] The expression level of target genes is quantified using the ABI PRISM 7900HT Sequence Detection System (Applied Biosystems, California). The method is based on the quantitation of the initial copy number of target template in comparison to that of a reference (normalizer) housekeeper gene (Pre-Developed TaqMan® Assay Reagents Gene Expression Quantification Protocol, Applied Biosystems, 2001). Accumulation of DNA product with each PCR cycle is related to amplicon efficiency and the initial template concentration. Therefore the amplification efficiency of both the target and the normalizer must be approximately equal. The threshold cycle (C_{T}), which is dependent on the starting template copy number and the DNA amplification efficiency, is a PCR cycle during which PCR product growth is exponential. With a similar dynamic range for the target and normalizer, the comparative C_{T} method is applicable.

[0318] An example of the comparative C_{T} method of gene expression for quantitative RT-PCR is shown in FIG. 2. In the first step, assays are performed in quadruplicate on a normal tissue and several sample tissues. In these tissues, the means and standard deviations of C_{T} values are determined for housekeeper genes (chosen as controls if shown to be biologically stable among various samples, irrespective of disease state) and for the target gene. FIG. 2 shows an example of average C_{T} values for a housekeeper gene and target gene. These values can fall within a range from upper teens to 40 depending on the intrinsic expression level of the gene in the particular tissue. The coefficient of variance of all replicate sets cannot exceed 1.5%.

[0319] An assessment of how the ΔC_{T} changes with template dilution verifies that the efficiencies of the target and housekeeper amplicons are approximately equal if the log input amount of template RNA versus ΔC_{T} plot has a slope <0.10. With the relative efficiencies verified for target and housekeeper, the ΔΔC_{T} comparative calculation becomes valid, as mentioned above. An example of the calculated difference between the C_{T} values of target and housekeeper genes (ΔC_{T}) for various samples is shown in FIG. 3. The ΔΔC_{T} is calculated for each sample by subtracting its ΔC_{T} value from the ΔC_{T} value of the baseline (calibrator) sample. If the expression is increased in some samples and decreased in others, ΔΔC_{T} will be a mixture of negative and positive values. The final step in the calculation is to transform these values to absolute values. The formula for this is:
Comparative expression level=2^{-ΔΔCT}

[0320] The final value for the calibrator should always be one. FIG. 4 shows the ΔΔC_{T} and comparative expression level for each sample from FIG. 3.

### Example 3

### Detection of Elevated Levels of cDNA Associated with Cancer Using Arrays

[0321] cDNA sequences representing a variety of candidate CA genes to be screened for differential expression in cancer are assayed by hybridization on polynucleotide arrays. The cDNA sequences include cDNA clones isolated from cell lines or tissues of interest. The cDNA sequences analyzed also include polynucleotides comprising sequence overlap with sequences in the Unigene database, and which encode a variety of gene products of various origins, functionality, and levels of characterization. cDNAs are spotted onto reflective slides (Amersham) according to methods well known in the art at a density of 9,216 spots per slide representing 4,068 sequences (including controls) spotted in duplicate, with approximately 0.8 μl of an approximately 200 ng/μl solution of cDNA.

[0322] PCR products of selected cDNA clones corresponding to the gene products of interest are prepared in a 50% DMSO solution. These PCR products are spotted onto Amersham aluminum microarray slides at a density of 9216 clones per array using a Molecular Dynamics Generation III spotting robot. Clones are spotted in duplicate, for a total of 4608 different sequences per chip.

[0323] cDNA probes are prepared from total RNA obtained by laser capture microdissection (LCM, Arcturus Enginering Inc., Mountain View, Calif.) of tumor tissue samples and normal tissue samples isolated from patients.

[0324] Total RNA is first reverse transcribed into cDNA using a primer containing a T7 RNA polymerase promoter, followed by second strand DNA synthesis. cDNA is then transcribed in vitro to produce antisense RNA using the T7 promoter-mediated expression (see, e.g., Luo et al. (1999) Nature Med 5:117-122), and the antisense RNA is then converted into cDNA. The second set of cDNAs are again transcribed in vitro, using the T7 promoter, to provide antisense RNA. This antisense RNA is then fluorescently labeled, or the RNA is again converted into cDNA, allowing for a third round of T7-mediated amplification to produce more antisense RNA. Thus the procedure provides for two or three rounds of in vitro transcription to produce the final RNA used for fluorescent labeling. Probes are labeled by making fluorescently labeled cDNA from the RNA starting material. Fluorescently labeled cDNAs prepared from the tumor RNA sample are compared to fluorescently labeled cDNAs prepared from normal cell RNA sample. For example, the cDNA probes from the normal cells are labeled with Cy3 fluorescent dye (green) and the cDNA probes prepared from suspected cancer cells are labeled with Cy5 fluorescent dye (red).

[0325] The differential expression assay is performed by mixing equal amounts of probes from tumor cells and normal cells of the same patient. The arrays are prehybridized by incubation for about 2 hrs at 60° C. in 5×SSC, 0.2% SDS, 1 mM EDTA, and then washing three times in water and twice in isopropanol. Following prehybridization of the array, the probe mixture is then hybridized to the array under conditions of high stringency (overnight at 42° C. in 50% formamide, 5×SSC, and 0.2% SDS. After hybridization, the array is washed at 55° C. three times as follows: 1) first wash in 1×SSC/0.2% SDS; 2) second wash in 0.1×SSC/0.2% SDS; and 3) third wash in 0.1×SSC.

[0326] The arrays are then scanned for green and red fluorescence using a Molecular Dynamics Generation III dual color laser-scanner/detector. The images are processed using BioDiscovery Autogene software, and the data from each scan set normalized. The experiment is repeated, this time labeling the two probes with the opposite color in order to perform the assay in both “color directions.” Each experiment is sometimes repeated with two more slides (one in each color direction). The data from each scan is normalized, and the level of fluorescence for each sequence on the array expressed as a ratio of the geometric mean of 8 replicate spots/genes from the four arrays or 4 replicate spots/gene from 2 arrays or some other permutation.

[0327] Normalization: The objective of normalization is to generate a cDNA library in which all transcripts expressed in a particular cell type or tissue are equally represented (S. M. Weissman, Mol Biol. Med. 4(3):133-143 (1987); Patanjali, et al., Proc. Natl. Acad. Sci. USA 88(5):1943-1947 (1991)), and therefore isolation of as few as 30,000 recombinant clones in an optimally normalized library may represent the entire gene expression repertoire of a cell, estimated to number 10,000 per cell.

[0328] Total RNA is extracted from harvested cells using RNeasy™ Protect Kit (Qiagen, Valencia, Calif.), following manufacturer's recommended procedures. RNA is quantified using RiboGreen™ RNA quantification kit (Molecular Probes, Inc. Eugene, Oreg.). One μg of total RNA is reverse transcribed and PCR amplified using SMART™ PCR cDNA synthesis kit (ClonTech, Palo Alto, Calif.). The cDNA products are size-selected by agarose gel electrophoresis using standard procedures (Sambrook, J. T., et al. Molecular Cloning: A Laboratory Manual, 2d ed., Cold Spring Harbor Laboratory Press, NY). The cDNA is extracted using Bio 101 Geneclean® II kit (Qbiogene, Carlsbad, Calif.). Normalization of the cDNA is carried out using kinetics of hybridization principles: 1.0 μg of cDNA is denatured by heat at 100° C. for 10 minutes, then incubated at 42° C. for 42 hours in the presence of 120 mM NaCl, 10 mM Tris.HCl (pH=8.0), 5 mM EDTA.Na+ and 50% formamide. Single-stranded cDNA (“normalized”) is purified by hydroxyapatite chromatography (#130-0520, BioRad, Hercules, Calif.) following the manufacturer's recommended procedures, amplified and converted to double-stranded cDNA by three cycles of PCR amplification, and cloned into plasmid vectors using standard procedures (Sambrook, J. T., et al. Molecular Cloning: A Laboratory Manual, 2d ed., Cold Spring Harbor Laboratory Press, NY). All primers/adaptors used in the normalization and cloning process are provided by the manufacturer in the SMART™ PCR cDNA synthesis kit (ClonTech, Palo Alto, Calif.). Supercompetent cells (XL-2 Blue Ultracompetent Cells, Stratagene, California) are transfected with the normalized cDNA libraries, plated on solid media and grown overnight at 36° C.

[0329] The sequences of 10,000 recombinants per normalized library are analyzed by capillary sequencing using the ABI PRISM 3700 DNA Analyzer (Applied Biosystems, California). To determine the representation of transcripts in a library, BLAST analysis is performed on the clone sequences to assign transcript identity to each isolated clone, i.e., the sequences of the isolated polynucleotides are first masked to eliminate low complexity sequences using the XBLAST masking program (Claverie “Effective Large-Scale Sequence Similarity Searches,” Computer Methods for Macromolecular Sequence Analysis, Doolittle, ed., Meth. Enzymol. 266:212-227 Academic Press, NY, N.Y. (1996); see particularly Claverie, in “Automated DNA Sequencing and Analysis Techniques” Adams et al., eds., Chap. 36, p. 267 Academic Press, San Diego, 1994 and Claverie et al. Comput. Chem. (1993) 17:191). Generally, masking does not influence the final search results, except to eliminate sequences of relative little interest due to their low complexity, and to eliminate multiple “hits” based on similarity to repetitive regions common to multiple sequences, e.g., Alu repeats. The remaining sequences are then used in a BLASTN vs. GenBank search. The sequences are also used as query sequence in a BLASTX vs. NRP (non-redundant proteins) database search.

[0330] Automated sequencing reactions are performed using a Perkin-Elmer PRISM Dye Terminator Cycle Sequencing Ready Reaction Kit containing AmpliTaq DNA Polymerase, FS, according to the manufacturer's directions. The reactions are cycled on a GeneAmp PCR System 9600 as per manufacturer's instructions, except that they are annealed at 20° C. or 30° C. for one minute. Sequencing reactions are ethanol precipitated, pellets are resuspended in 8 microliters of loading buffer, 1.5 microliters is loaded on a sequencing gel, and the data is collected by an ABI PRISM 3700 DNA Sequencer. (Applied Biosystems, Foster City, Calif.).

[0331] The number of times a sequence is represented in a library is determined by performing sequence identity analysis on the cloned cDNA sequences and assigning transcript identity to each isolated clone. First, each sequence is checked to determine if it is a bacterial, ribosomal, or mitochondrial contaminant. Such sequences are excluded from the subsequent analysis. Second, sequence artifacts, such as vector and repetitive elements, are masked and/or removed from each sequence.

[0332] The remaining sequences are compared via BLAST (Altschul et. al, J. Mol. Biol., 215:40, 1990) to GenBank and EST databases for gene identification and are compared with each other via FastA (Pearson & Lipman, PNAS, 85:2444, 1988) to calculate the frequency of cDNA appearance in the normalized cDNA library. The sequences are also searched against the GenBank and GeneSeq nucleotide databases using the BLASTN program (BLASTN 1.3MP: Altschul et al., J. Mol. Bio. 215:403, 1990). Fourth, the sequences are analyzed against a non-redundant protein (NRP) database with the BLASTX program (BLASTX 1.3MP: Altschul et al., supra). This protein database is a combination of the Swiss-Prot, PIR, and NCBI GenPept protein databases. The BLASTX program is run using the default BLOSUM-62 substitution matrix with the filter parameter: “xnu+seg”. The score cutoff utilized is 75. Assembly of overlapping clones into contigs is done using the program Sequencher (Gene Codes Corp.; Ann Arbor, Mich.). The assembled contigs are analyzed using the programs in the GCG package (Genetic Computer Group, University Research Park, 575 Science Drive, Madison, Wis. 53711) Suite Version 10.1.

### Example 4

### Detection of CA-Sequences in Human Cancer Cells and Tissues

[0333] DNA from prostate and breast cancer tissues and other human cancer tissues, human colon, normal human tissues including non-cancerous prostate, and from other human cell lines are extracted following the procedure of Delli Bovi et al. (1986, Cancer Res. 46:6333-6338). The DNA is resuspended in a solution containing 0.05 M Tris HCl buffer, pH 7.8, and 0.1 mM EDTA, and the amount of DNA recovered is determined by microfluorometry using Hoechst 33258 dye. Cesarone, C. et al., Anal Biochem 100:188-197 (1979).

[0334] Polymerase chain reaction (PCR) is performed using Taq polymerase following the conditions recommended by the manufacturer (Perkin Elmer Cetus) with regard to buffer, Mg²⁺, and nucleotide concentrations. Thermocycling is performed in a DNA cycler by denaturation at 94° C. for 3 min. followed by either 35 or 50 cycles of 94° C. for 1.5 min., 50° C. for 2 min. and 72° C. for 3 min. The ability of the PCR to amplify the selected regions of the CA gene is tested by using a cloned CA polynucleotide(s) as a positive template(s). Optimal Mg²⁺, primer concentrations and requirements for the different cycling temperatures are determined with these templates. The master mix recommended by the manufacturer is used. To detect possible contamination of the master mix components, reactions without template are routinely tested.

[0335] Southern blotting and hybridization are performed as described by Southern, E. M., (J. Mol. Biol. 98:503-517, 1975), using the cloned sequences labeled by the random primer procedure (Feinberg, A. P., et al., 1983, Anal. Biochem. 132:6-13). Prehybridization and hybridization are performed in a solution containing 6×SSPE, 5% Denhardt's, 0.5% SDS, 50% formamide, 100 μg/ml denaturated salmon testis DNA, incubated for 18 hrs at 42° C., followed by washings with 2×SSC and 0.5% SDS at room temperature and at 37° C. and finally in 0.1×SSC with 0.5% SDS at 68° C. for 30 min (Sambrook et al., 1989, in “Molecular Cloning: A Laboratory Manual”, Cold Spring Harbor Lab. Press). For paraffin-embedded tissue sections the conditions described by Wright and Manos (1990, in “PCR Protocols”, Innis et al., eds., Academic Press, pp. 153-158) are followed using primers designed to detect a 250 bp sequence.

### Example 5

### Expression of Cloned Polynucleotides in Host Cells

[0336] To study the protein products of CA genes, restriction fragments from CA DNA are cloned into the expression vector pMT2 (Sambrook, et al., Molecular Cloning: A Laboratory Manual, Cold Spring Harbor Laboratory Press pp 16.17-16.22 (1989)) and transfected into COS cells grown in DMEM supplemented with 10% FCS. Transfections are performed employing calcium phosphate techniques (Sambrook, et al (1989) pp. 16.32-16.40, supra) and cell lysates are prepared forty-eight hours after transfection from both transfected and untransfected COS cells. Lysates are subjected to analysis by immunoblotting using anti-peptide antibody.

[0337] In immunoblotting experiments, preparation of cell lysates and electrophoresis are performed according to standard procedures. Protein concentration is determined using BioRad protein assay solutions. After semi-dry electrophoretic transfer to nitrocellulose, the membranes are blocked in 500 mM NaCl, 20 mM Tris, pH 7.5, 0.05% Tween-20 (TTBS) with 5% dry milk. After washing in TTBS and incubation with secondary antibodies (Amersham), enhanced chemiluminescence (ECL) protocols (Amersham) are performed as described by the manufacturer to facilitate detection.

### Example 6

### Generation of Antibodies Against Polypeptides

[0338] Polypeptides, unique to CA genes are synthesized or isolated from bacterial or other (e.g., yeast, baculovirus) expression systems and conjugated to rabbit serum albumin (RSA) with m-maleimido benzoic acid N-hydroxysuccinimide ester (MBS) (Pierce, Rockford, Ill.). Immunization protocols with these peptides are performed according to standard methods. Initially, a pre-bleed of the rabbits is performed prior to immunization. The first immunization includes Freund's complete adjuvant and 500 μg conjugated peptide or 100 μg purified peptide. All subsequent immunizations, performed four weeks after the previous injection, include Freund's incomplete adjuvant with the same amount of protein. Bleeds are conducted seven to ten days after the immunizations.

[0339] For affinity purification of the antibodies, the corresponding CA polypeptide is conjugated to RSA with MBS, and coupled to CNBr-activated Sepharose (Pharmacia, Uppsala, Sweden). Antiserum is diluted 10-fold in 10 mM Tris-HCl, pH 7.5, and incubated overnight with the affinity matrix. After washing, bound antibodies are eluted from the resin with 100 mM glycine, pH 2.5.

### Example 7

### Generation of Monoclonal Antibodies Against a CA Polypeptide

[0340] A non-denaturing adjuvant (Ribi, R730, Corixa, Hamilton Mont.) is rehydrated to 4 ml in phosphate buffered saline. 100 μl of this rehydrated adjuvant is then diluted with 400 μl of Hank's Balanced Salt Solution and this is then gently mixed with the cell pellet used for immunization. Approximately 500 μg conjugated peptide or 100 μg purified peptide and Freund's complete are injected into Balb/c mice via foot-pad, once a week. After 6 weeks of weekly injection, a drop of blood is drawn from the tail of each immunized animal to test the titer of antibodies against CA polypeptides using FACS analysis. When the titer reaches at least 1:2000, the mice are sacrificed in a CO₂ chamber followed by cervical dislocation. Lymph nodes are harvested for hybridoma preparation. Lymphocytes from mice with the highest titer are fused with the mouse myeloma line X63-Ag8.653 using 35% polyethylene glycol 4000. On day 10 following the fusion, the hybridoma supernatants are screened for the presence of CAP-specific monoclonal antibodies by fluorescence activated cell sorting (FACS). Conditioned medium from each hybridoma is incubated for 30 minutes with a combined aliquot of PC3, Colo-205, LnCap, or Panc-1 cells. After incubation, the cell samples are washed, resuspended in 0.1 ml diluent and incubated with 1 μg/ml of FITC conjugated F(ab′)2 fragment of goat anti-mouse IgG for 30 min at 4° C. The cells are washed, resuspended in 0.5 ml FACS diluent and analyzed using a FACScan cell analyzer (Becton Dickinson; San Jose, Calif.). Hybridoma clones are selected for further expansion, cloning, and characterization based on their binding to the surface of one or more of cell lines which express the CA polypeptide as assessed by FACS. A hybridoma making a monoclonal antibody designated mAbCA which binds an antigen designated Ag-CA.x and an epitope on that antigen designated Ag-CA.x.1 is selected.

### Example 8

### ELISA Assay for Detecting CA Related Antigens

[0341] To test blood samples for antibodies that bind specifically to recombinantly produced CA antigens, the following procedure is employed. After a recombinant CA related protein is purified, the recombinant protein is diluted in PBS to a concentration of 5 μg/ml (500 ng/100 μl). 100 microliters of the diluted antigen solution is added to each well of a 96-well Immulon 1 plate (Dynatech Laboratories, Chantilly, Va.), and the plate is then incubated for 1 hour at room temperature, or overnight at 4° C., and washed 3 times with 0.05% Tween 20 in PBS. Blocking to reduce nonspecific binding of antibodies is accomplished by adding to each well 200 μl of a 1% solution of bovine serum albumin in PBS/Tween 20 and incubation for 1 hour. After aspiration of the blocking solution, 100 μl of the primary antibody solution (anticoagulated whole blood, plasma, or serum), diluted in the range of 1/16 to 1/2048 in blocking solution, is added and incubated for 1 hour at room temperature or overnight at 4° C. The wells are then washed 3 times, and 100 μl of goat anti-human IgG antibody conjugated to horseradish peroxidase (Organon Teknika, Durham, N.C.), diluted 1/500 or 1/1000 in PBS/Tween 20, 100 μl of o-phenylenediamine dihydrochloride (OPD, Sigma) solution is added to each well and incubated for 5-15 minutes. The OPD solution is prepared by dissolving a 5 mg OPD tablet in 50 ml 1% methanol in H₂O and adding 50 μl 30% H₂O₂ immediately before use. The reaction is stopped by adding 25 l of 4M H₂SO₄. Absorbances are read at 490 nm in a microplate reader (Bio-Rad).

### Example 9

### Identification and Characterization of CA Antigen on Cancer Cell Surface

[0342] A cell pellet of proximately 25 ul packed cell volume of a cancer cell preparation is lysed by first diluting the cells to 0.5 ml in water followed by freezing and thawing three times. The solution is centrifuged at 14,000 rpm. The resulting pellet, containing the cell membrane fragments, is resuspended in 50 μl of SDS sample buffer (Invitrogen, Carlsbad, Calif.). The sample is heated at 80° C. for 5 minutes and then centrifuged for 2 minutes at 14,000 rpm to remove any insoluble materials.

[0343] The samples are analyzed by Western blot using a 4 to 20% polyacrylamide gradient gel in Tris-Glycine SDS (Invitrogen; Carlsbad Calif.) following the manufacturer's directions. Ten microliters of membrane sample are applied to one lane on the polyacrylamide gel. A separate 10 μL sample is reduced first by the addition of 2 μL of dithiothreitol (100 mM) with heating at 80° C. for 2 minutes and then loaded into another lane. Pre-stained molecular weight markers SeeBlue Plus2 (Invitrogen; Carlsbad, Calif.) are used to assess molecular weight on the gel. The gel proteins are transferred to a nitrocellulose membrane using a transfer buffer of 14.4 g/l glycine, 3 g/l of Tris Base, 10% methanol, and 0.05% SDS. The membranes are blocked, probed with a CAP-specific monoclonal antibody (at a concentration of 0.5 ug/ml), and developed using the Invitrogen WesternBreeze Chromogenic Kit-AntiMouse according to the manufacturer's directions. In the reduced sample of the tumor cell membrane samples, a prominent band is observed migrating at a molecular weight within about 10% of the predicted molecular weight of the corresponding CA protein.

### Example 10

### Preparation of Vaccines

[0344] The present invention also relates to a method of stimulating an immune response against cells that express CA polypeptides in a patient using CA polypeptides of the invention that act as an antigen produced by or associated with a malignant cell. This aspect of the invention provides a method of stimulating an immune response in a human against cancer cells or cells that express CA polynucleotides and polypeptides. The method comprises the step of administering to a human an immunogenic amount of a polypeptide comprising: (a) the amino acid sequence of a huma CA protein or (b) a mutein or variant of a polypeptide comprising the amino acid sequence of a human endogenous retrovirus CA protein.

### Example 11

### Generation of Transgenic Animals Expressing Polypeptides as a Means for Testing Therapeutics

[0345] CA nucleic acids are used to generate genetically modified non-human animals, or site specific gene modifications thereof, in cell lines, for the study of function or regulation of prostate tumor-related genes, or to create animal models of diseases, including prostate cancer. The term “transgenic” is intended to encompass genetically modified animals having an exogenous CA gene(s) that is stably transmitted in the host cells where the gene(s) may be altered in sequence to produce a modified protein, or having an exogenous CA LTR promoter operably linked to a reporter gene. Transgenic animals may be made through a nucleic acid construct randomly integrated into the genome. Vectors for stable integration include plasmids, retroviruses and other animal viruses, YACs, and the like. Of interest are transgenic mammals, e.g. cows, pigs, goats, horses, etc., and particularly rodents, e.g. rats, mice, etc.

[0346] The modified cells or animals are useful in the study of CA gene function and regulation. For example, a series of small deletions and/or substitutions may be made in the CA genes to determine the role of different genes in tumorigenesis. Specific constructs of interest include, but are not limited to, antisense constructs to block CA gene expression, expression of dominant negative CA gene mutations, and overexpression of a CA gene. Expression of a CA gene or variants thereof in cells or tissues where it is not normally expressed or at abnormal times of development is provided. In addition, by providing expression of proteins derived from CA in cells in which it is otherwise not normally produced, changes in cellular behavior can be induced.

[0347] DNA constructs for random integration need not include regions of homology to mediate recombination. Conveniently, markers for positive and negative selection are included. For various techniques for transfecting mammalian cells, see Keown et al., Methods in Enzymology 185:527-537 (1990).

[0348] For embryonic stem (ES) cells, an ES cell line is employed, or embryonic cells are obtained freshly from a host, e.g. mouse, rat, guinea pig, etc. Such cells are grown on an appropriate fibroblast-feeder layer or grown in the presence of appropriate growth factors, such as leukemia inhibiting factor (LIF). When ES cells are transformed, they may be used to produce transgenic animals. After transformation, the cells are plated onto a feeder layer in an appropriate medium. Cells containing the construct may be detected by employing a selective medium. After sufficient time for colonies to grow, they are picked and analyzed for the occurrence of integration of the construct. Those colonies that are positive may then be used for embryo manipulation and blastocyst injection. Blastocysts are obtained from 4 to 6 week old superovulated females. The ES cells are trypsinized, and the modified cells are injected into the blastocoel of the blastocyst. After injection, the blastocysts are returned to each uterine horn of pseudopregnant females. Females are then allowed to go to term and the resulting chimeric animals screened for cells bearing the construct. By providing for a different phenotype of the blastocyst and the ES cells, chimeric progeny can be readily detected.

[0349] The chimeric animals are screened for the presence of the modified gene and males and females having the modification are mated to produce homozygous progeny. If the gene alterations cause lethality at some point in development, tissues or organs are maintained as allogeneic or congenic grafts or transplants, or in in vitro culture. The transgenic animals may be any non-human mammal, such as laboratory animals, domestic animals, etc. The transgenic animals are used in functional studies, drug screening, etc., e.g. to determine the effect of a candidate drug on prostate cancer, to test potential therapeutics or treatment regimens, etc.

### Example 12

### Diagnostic Imaging Using CA Specific Antibodies

[0350] The present invention encompasses the use of antibodies to CA polypeptides to accurately stage cancer patients at initial presentation and for early detection of metastatic spread of cancer. Radioimmunoscintigraphy using monoclonal antibodies specific for CA polypeptides can provide an additional cancer-specific diagnostic test. The monoclonal antibodies of the instant invention are used for histopathological diagnosis of carcinomas.

[0351] Subcutaneous human xenografts of cancer cells in nude mice is used to test whether a technetium-99m (^{99m}Tc)-labeled monoclonal antibody of the invention can successfully image the xenografted cancer by external gamma scintography as described for seminoma cells by Marks, et al., Brit. J. Urol. 75:225 (1995). Each monoclonal antibody specific for a CA polypeptide is purified from ascitic fluid of BALB/c mice bearing hybridoma tumors by affinity chromatography on protein A-Sepharose. Purified antibodies, including control monoclonal antibodies such as an avidin-specific monoclonal antibody (Skea, et al., J. Immunol. 151:3557 (1993)) are labeled with ^{99m}Tc following reduction, using the methods of Mather, et al., J. Nucl. Med. 31:692 (1990) and Zhang et al., Nucl. Med. Biol. 19:607 (1992). Nude mice bearing human cancer cells are injected intraperitoneally with 200-500 μCi of ^{99m}Tc-labeled antibody. Twenty-four hours after injection, images of the mice are obtained using a Siemens ZLC3700 gamma camera equipped with a 6 mm pinhole collimator set approximately 8 cm from the animal. To determine monoclonal antibody biodistribution following imaging, the normal organs and tumors are removed, weighed, and the radioactivity of the tissues and a sample of the injectate are measured. Additionally, CA-specific antibodies conjugated to antitumor compounds are used for cancer-specific chemotherapy.

### Example 13

### Immunohistochemical Methods

[0352] Frozen tissue samples from cancer patients are embedded in an optimum cutting temperature (OCT) compound and quick-frozen in isopentane with dry ice. Cryosections are cut with a Leica 3050 CM mictrotome at thickness of 5 μm and thaw-mounted on vectabound-coated slides. The sections are fixed with ethanol at −20° C. and allowed to air dry overnight at room temperature. The fixed sections are stored at −80° C. until use. For immunohistochemistry, the tissue sections are retrieved and first incubated in blocking buffer (PBS, 5% normal goat serum, 0.1% Tween 20) for 30 minutes at room temperature, and then incubated with the CA protein-specific monoclonal antibody and control monoclonal antibodies diluted in blocking buffer (1 μg/ml) for 120 minutes. The sections are then washed three times with the blocking buffer. The bound monoclonal antibodies are detected with a goat anti-mouse IgG+IgM (H+L) F(ab′)²-peroxidase conjugates and the peroxidase substrate diaminobenzidine (1 mg/ml, Sigma Catalog No. D 5637) in 0.1 M sodium acetate buffer pH 5.05 and 0.003% hydrogen peroxide (Sigma cat. No. H1009). The stained slides are counter-stained with hematoxylin and examined under Nikon microscope.

[0353] Monoclonal antibody against a CA protein (antigen) is used to test reactivity with various cell lines from different types of tissues. Cells from different established cell lines are removed from the growth surface without using proteases, packed and embedded in OCT compound. The cells are frozen and sectioned, then stained using a standard IHC protocol. The CellArray™ technology is described in WO 01/43869. Normal tissue (human) obtained by surgical resection are frozen and mounted. Cryosections are cut with a Leica 3050 CM mictrotome at thickness of 5 μm and thaw-mounted on vectabound-coated slides. The sections are fixed with ethanol at −20° C. and allowed to air dry overnight at room temperature. PolyMICA™ Detection kit is used to determine binding of a CA-specific monoclonal antibody to normal tissue. Primary monoclonal antibody is used at a final concentration of 1 μg/ml.

[0354] All publications and patent applications cited in this specification are herein incorporated by reference as if each individual publication or patent application were specifically and individually indicated to be incorporated by reference.

[0355] Although the foregoing invention has been described in some detail by way of illustration and example for purposes of clarity of understanding, it will be readily apparent to those of ordinary skill in the art in light of the teachings of this invention that certain changes and modifications may be made thereto without departing from the spirit or scope of the appended claims.

The application's sequence listing, which the Patent Office published only in electronic form, follows.

SEQUENCE LISTING (506 sequences)

SEQ ID NO: 1 - DNA, 454797 bp, Mus musculus
  misc_feature (1)...(454797): n = A,T,C or G
agcggctgcagatggcatccggctgcgggctccgggctcgcaattgattctcgcccttgcccacctcgggtgcacacacgcacctctcccttctcctcctcccctcgcgctcctgggtctgcgctcagctcgcgctcgccgggcggaggaagcagtcgcggcggccgaagctgagcagcagcgctcgctctccctgacctaggaagaagcgcctacccggacagccgacccttggctgcctccagcgccccccaccttttgcaccccaaggcgggggctccggggacccccctctcccaggcgctaccatgctggacccttcgtccagcgaagaggagtcagatgagatcctggaagaggagaggggcaaggatgtgctgggctcggccgcgtctggagcgcgcctgtctcccagccgcaccagcgagggctcggcaggcagcgccgggatggggggcagtggcgccggggccggggtgggcgccggcggcggtgggggtagnnnnnnnnnnnnnnnnnnnnnnnnnnnnnnnnnnnnnnnnnnnnnnnnnnnnnnnnnnnnnnnnnnnnnnnnnnnnnnnnnnnnnnnnnnnnnnnnnnnnnnnnnnnnnnnnnnnnnnnnnnnnnnnngggctgcagcccagcagccgcgccggcggcggccggccttccagccctagcccgtcggtggtgagcgagaaggagaaggaagagttggagaggctgcagaaggaggaggaagagaggaagaagaggctgcagctgtacgtgttcgtgatgcgctgcatcgcctaccccttcaacgccaagcagcccaccgacatggctcggcggcagcagaaggtaggtgcgccgcgaggccggggagcggcgccttattgtcgcccggcaagcgggcggggcgaacaataggaacccgcggcgcagctggctaggaggagctggggaaggtgaagaccgcgccctgggattaggggccccgtcttgccaccgcccagcttgactcgggagatgtccctgggatgtgacaggggcctacggcacagggctgcgcgcacgggcctccctgtggggggagccaggcgggaaagtcccgctcgctctgtgacctaagtggcgcgggaagtgacttgcagctggcagctctcacagaggccttgtctctttcggagctccctgcgctcccgagtggcggcggctgcgttgcgctctggcccgccctccggggcgtgcactaggcgggcgcaggctcctggcaggtcagggcgcgggtgtggagctctagcatcgctggactcttggggcagcgggcagccgcaggggcacgcaggggagaaaaaaaaaaaagccagcccaggaagcgagttttccagtgacttagccaagggcgccccctcccaacctggtcagctgatcgccacctagggtaacctaggggtcgtcctgcagcagcgttttcctcttgccagtagtccctccaatccttttccccttcttcatggatcccagagcaggggcgcgcctagtgggtccctgtgcctggggtcagcacttctctcataccctcctttgaccatcttctcctcccaaggtgacttcgccgccaccttctggcttcgctgaggctctccaagtcctcttgttactggattgataaaagtgcagctgcaaacagcttctcagttatagtcataaaaagctttttgtgtctgaggcagaggcaaggccatgctggctttgagctacttttgatgggggggtggggggtggggcattactatctccaacccgagaaaggacaaaagggaggtgaggtcaccaggggctgagggccagtgaggaggatcagccagaaaggggtcaggagctcagtgggagtgagtgcactcggtttagtctctgggaacaaatgaagcatttaagcttgcatgaggtcagttgaacccgggagtcatgggaggttctagctgtagcccatcaaggttgtgagactatttcttaaaatagtagtttaagaatcgttgctgccatttaaatctaaattttatgttgctcaagtaagatgttggatctttccatatttaccttgcatccttatatcgaggtagaacagattgctctgtttgttttgcttatatgtgtatacacaccacccaaccctgtcagtttattttacctactactgcatggatgccagttttattaagtcaaaaagactcatttcctgagtgagagataaaaggtgggccatactcaccaccctccacccccatccctgcaatacccctttacttttgctttccaactgtggtagggcagaaatattagagattgtcaaattttgataaaaaattttaggttaattgtggctctacatagtcagctgatctaaatttcagcttggaattgtattacttgtctttatactatggtaaattttaccttcaaaatctcatcaaggattaaattagtcaaagatgtcctagacttttgctatgaaaactgactttaatcagaatgaagcaaggctttccattagtcagtcaaaggctttgtagctttgtcctttaaatagatgagtaggtccagtggtgggagaaagaaacaagaaaatactgtaagaatccagttctgttaagttgaaagaccactgtgagaccatgtccctccgatctgactgcatatagtacctcaccccatccagaactcttatttgaagagaaagcctgtttttacatgtgacctttcaacaccagagagactccagcacagactgataactggctttctgtcaatctatttttagacactgtaaaaactattgctaaatatacatcccagcaaaacaaccccaggcctagtggctacagtgagaagaatatatatatatatatatatatatatatatatatatatatatatatatatattgaaaataaagtttccttgttgctctgacttttactgtttggcgcattctggaggaaataacattgttcctcttaaaattcaaacttttgaaactctgaaagtaatggaaaggtttgcatactcattatggtaagatttaaagccaataaataaaattggtaagctaatatcagtctggagcactatatgctccttgtgacctaagagtgagctttggacagactggaaacaagtgtattaaaaaaagacagatgaaaattcatgtagagaaaaggttagaaggatgcagaaggcaaagagagagagagagagagacctgcctatgcaaacaaaccatgagacagcgaaggggtgtactccagagtacagtgcaccttatgaagccagttttctacttcaggtatgtacaatgtgcaaagcactccatttggaccattttatcaaagtccttgctttattatttggacaggttaactaaaacaaacaaacaaacaaacaaaacaacaacaacaaaaccccaggaactataatacacagttcccacatgcagaagtaaatttcctatgatgttaattactcagcagaattatacaagtcaggaatagctgaagtaatacattgccagtaaagtctctagtttttgtctgaattcgttttctgttcttacatcatatctgctttcgttttggtggtaccaggactcaaacccagagtcttagatatgaaaagcaagtggatccagtgcttgaccgggcatcctcagcccctaagatcattttgaattcttctaagaaccctgacataattgccaagatcactctgaaactcaaagaggttgtaatagtttgcctgaagtaaaatgaaggcagacaaaagagtaggcattgagccaacgggtggtctgatactaagtcctgaattctgaataggagacactggccataaatagtctagagtatacaaacagtaggctagcacactgataacatgtcatgcatccttctgtacaaagtgatagttatcctttcctcaagaaagaggcctattccttttcacctgggcacccatcagatagtcaacatggacataaagaacacaaagtaaaagccaggcacaatagctggtgaatctgctgggcacccttctctttctgttccccccaccccactcccttttttaaacattgttcaaactgaaaggaaaaatacatttgttcaggagaacagtgaggggaggcggaggaagaagatgatgtttttttggataatgctgatagttaacactattttattggaaagaaaaaaattcttggcatacagccaatctcttcaatgtaaagaaaagactgtaacagacattttacaaaatatgttttaccatttataaatattttttgtcttctctactgagtctaaatgagacatggtggtactgggtcatttatgacccaaacaaaatctctcccaatgagactcttccaataccagttcagcaactcacatggcaatagctttctgctttttctgtttcctccccagaatgctaaagcaaatacctagagttggcatggcagagctacaccatctgtttctaagttacataggaatggtgatgggtggctacctcatgtgaaccagctacttatagacgcttccacagggaatgtgaaactaggctgtaaacaatcatgtgtaatatttagattgacaggaggacttttagttaggtagccattaatcataattcctggatcatagattctctcatgtagatatttgtgtgcttcctaaatgtatgtatgtgttcttgtgtgaatgctcacataatgatggaaaagaactggcccaaaactatgtctacttcagcacaactatttcattcaagagaactttattcctggatgaaatgtaacttaaattcaaactattcttttctatatgattcagcttgtatctttccatgaaactatggctaccattgaggcactgtttgctacagattccacctttaccatttacttgttttccttgattgatcatattttagaagctatagctttatgaaactcaagatcaagtccctgttaactcttatgctcatcagtcatatgggtgctccattcctagcgttaggcacctaggctgctctactattcaaaaatcttaatctttgctctgccaatgcatattatctgcattttaaaatataaactattctaatgcatcaagacaataagtgactgctgcctgatttccttccaacagaattatgtctttctttatcaagagaataatctgccttttgccccctgctcccaagtctgtctgctgtagtgataaggaacaatttattatacagtgtcctggcataaactacattctgaagatgcagaatagaaaaataatgggaccatcttgcctcattacacatctggaatagccttctgctttcctgcagctggactcaagaatgaaggaaattaaatctttcattcctgaagaatcatattctataaagtaatgaaagtcaaacgactcagagatcttttctctgaaaaagcaaataagtgcagaaccataggctatcacattgacacatgagagtaattgacttggggccaagaagctataaaactgaaggggagttatgaggagagttctcccttagaactaactccaaacaagcaaacagatgctcactacagtaagcaccgagtcaggctgggtggccaaaccaaaagacacaggtaccatcctgttcttgaactggaagaatttatgatttggtttggaagatagcagtcacagaaatcaaataattgagagtaggaaagagattactagagaagatgttggttacgaatgctaaagaggaaaggggtggtgtaatcatatgtgcccagactgaatttatgccgggattgttcattaccaacacataaaatcctttaagcttggaggtggaatgtttccacagtataaaataaggcactttccaaacaatgcacaatgactggagatgaatcaatttatccaactatacctattttcagatgatgtttgaagaagacagactacacaggagattgtaagctttaacttgtaacttggagccaaactacaaagttattttgtctatgaagcatgtgccctgtttttaaattagttctctgctcaagcttttttatgatcaaaaatttcaatttctaacttttcatctggttaatttcatggaaatattaggacagagtttttgcgtatttgtaaaaatcaataaaaagaagactcaactgccattgcttaaacaatagaatgcacatcacttttaacctaattgtatttgttccaagaaggaaatgatatatgtctaaatggtataatagcagcactgtgggccttgccaaatccttttcttctttatgttccttaccagatcctgactgtctgaccctagcccctgggaagcattcctgggagagaatctgacatttggaacactgtgttccctgtttctggctacagttcttgttttcttgttagaatgagattcatcatttctgcagaattagaggcttgatggtcagcactacctcattaaatttttattggtcaatccaagcctataatagaattacttttctgttcttatcagataacaaaggagggagacagttggtgattagagtctggtcattactatttgagtcttgatgaacagtaaagacagcagctaagagcttagactttgatgtttgggattatttcctgcttgtttcagctagttatagactctgtgatcttgtgcaatttatttactctatcagagattcagtgtatatatcagcaaaatagagggcagcagttgtcctgtcatcttcgggttattatgaaaagtaagaaaagtagtgaaaaagtagtgaagctcttagaacagccatctgacagttggtaagtgtaaaataagcattggttcttgcattggcaatgtttatacatacacacaaacatgtattcatacatgtgttcatatacatacatatatacatacatatatgacattatgttatttttatctgaaaggctggtgagaactaatatatgtgaagtactgtcatattagtggaatgtatttctagtttctagcatcagcaacataagcagatctagaaaatcaggtggttgtcattacagcatcttctacagactagatggagccaagcaagcaatagatctctgtcttcctttttgctcagatgcttcaataattttattcaacaaaggatcagtttatccagcttttaaaaatgtctttgaacatgcaattttttcatgactaacaccacacacacattaatggaaagacttgctaaatgcttaacagaggactctgatagagccttgagctacccaggtggtttatggtgggactcttaagagtttcttcttcttcttcttcttcttcttcttcttcttcttcttcttcttcttcttcttcttcttcttcttcttcttcttcttcttcttcttcttcttcttcttcttcttttcttcctcttcctcttcttcttcttgtcatctttcttctcccaccttctgctctccgtcacagaacaggatactttgtttcttcgaacctggatattttcaccttgatacaatagctcttttacaaatgttggtttaactttgtaggatgaaagtgttgccagtactaatgagaagtgcattaggtttgtataaagtatagattctcatccttgtatgacttatagttttacacacacacacacacacacacacacacacacacacgacttacaagaacagtcagcatacaacagacccaatagtgaagtacctcacctccacatacttttatttcactgtttaaatttctgctcagccttgtgagctggtagctatatgacctaagttacttttcatgacactgtgaccaaataaatatcttctatttgattgaggaatgatagagaaggtacacttcaagcttgtgtgctgttcagtggtacaggatagtcatagtagagtccgtggtggcttgagtctttggcagtgggagcatgagactgcttgctggcatcttggccagtcaagagccaagacttggccaaaaccaggccaggattatgacccataaggctccctatagcccaacatcatcctaaaggatccagagcccactgaaatagcatcatcattcaggaaactacatttccaacatatgaacctgagaaagatccttcacattcaaattctaacaggtagattccccatccccttcttgttttgtgaaatggagaaacatcatcaagaactgtaaaagagaagcatgttaaatgcttaacaagttttttgtgtgtgtttttttttcaattttttattagatattttctttatttacatttcaaatgttatcccaaaagtcccctataccctccccccccccccaccgccctgctcccttacccaccaactcccacttcttggccctggcattcccctgtactggggcatataaagtttgctagaccaaggggcctctcttcccattgatggccgactaggccatcttctgctacatatgcagctagagacacgagctctgggggtactgattagttcatattgcttaacaagttttttttttttttacagagggtccatattggagaacttttcacagtagcagtcataatagcattcatgcatatatgttcccccaaggtcaccaccctgtttcttactgttgtaacctttgctggaactgctgcttactatagattgtctcttccctctttcttctctgattcactcttatctctcttttaatttactctagtgtcagctcctttaggaaaccttcccaagcccttacactgggccagttcgcacacagctctgcgatctgagtccattctacctcctgtgcacagtacttacatcagtttttgtatgccactctccttcccaggcaaagccatttcactttttctcagtccttcacccaccaaacaatagaacagagtaggttcttagaaaatgttgaaagtccacagtgacagtccgcagttaaggattctggattgtagcctgggacacacaatttctttacttttatgaaagggttaaccagttactaaaggatttcaagataattatcagagaaacacactatcagttacctccacacttgctttgtttatactgagagctgacaactatgtgggtcctttgtgaagaaaagtcttttaaaaccatatgacaattatgaatttcttacaacagctgaatctagttgaacatgaatcatcattatgtatgtttaaatggccagacaggaagcttgcaagcgagtgtgtctggataggatatagattctgtgatgggatgtgtccaacttgccacctctggaaacaggaagaggaaacaacactataggactgtatagaggttgccaaagttttgggatctgtaaattctgcatgttttagcatatatgctgctaaagcaagcacaattctgtatgttttgcataggtaaatatacctcttttctctacatttagaagacttcagcattattttctctgttcttttaacataagtaagttgtctctcccagatttggttgaatttgaataagtaataactataggactcttgcacattagtatagtaataagaatgttattggtatgaaatatctataaagtgatttaattatttctgggtatggccttttctaatatctctcttgatcaaaggaaaaaatagtgttttcagttttatcattttctttttaacagctgtaagaaaggtctgaaaatttattttaatgataaagtccacagatatatgaatctgccaactgtaatcctgaaattgagagatggctgtatactggttagctttcattgtctagagtcaaatgggaaggggggacttccgttgttctctttgtgcatctctgtgtgacattatcttgactgccaattgatacaggagagcccaacccactatggttctgactgtataggaaaagtagctgagcataagctagggagcaagccttagtaagatcactgctctgttgtctgttccagtttccacctccgggttcctgccttgtcttcccttggttgtgagctataagctaatgttagccttttcctcccatggttgcttttgaggagactgtttcatcatggcaacagaaagcaaactagaacagggagtaaaatgattgtgtgtgtgtgtgtgtgtgtgtgtgtgtgtgtgtgtgttgtgcgcgctcggcgctcgtgcacatgtgcacctgcagtgcttctagtgtggaatacacataagtttgtgggtatttatacccagaagcctagatatgcacattcagaggctgtagaaggacattatttctacctcatgtccttgagatagtgtctctcactaaagtggatgcccactgcttcaactaggatggctactgggggttgtggggtagagatttatctgtctccactccccaccatgctgctggcaccaataattcccctggctttttacatgggttctcatgtttacagagtaaacactcatacccactgagccatcgtccagcagcctatgaaaaggatgcactttttaaagatgtcccaggagcacatgctaagttgcaaacccacccagggggtgtaacacttccaaaaagacaatggggttttggcaaaagcagagagtggctcaggcaattgactgtgccacttcagaaggcaaaaggaaaacagtgaaaattctcgcaaataatcatgccttctgttgcccatatagagaaacagcttttgggtgtggatggtaggcatggcgttgtttaagcaaatttgaagtgtaacttgaacatctactttggcgatctttctgacaagtgtagcaactgttgtctataaggcagtgtgtcataacatactgtgtttagaacatttcctgggggctcttccatattcaatttttgtttgttagacatcatcagacaatgttatacattgttttgagccacttctaaaaataagaaactcactgggttctgtaggcaaaacacccaaagccattttagacagcccctcacctcctgtatctactgatctgcctaagaaatttaggtgtacccatatagtaaaactagtgtaggcaagatgaggtgagtttattttattagtgtgtgtgtgtgtgtgtgcttgtgtgtatgtgtgtgcccgtgtacacatataaagactactgtggcacacgtgatgaagttagaaggtagcaatcaggggttcatactttccttccacagtgggttcctgggattgaacccctgttaacgtgcttgagtgccgagcacttttatccacaaccattccatcagccatgattttaaatgttggtcttttctccaggtccccgttcttggcctttcttgggggtgattatgtcccttacaaaatttatatagaagagcactaatctcagaacctcataatgagactttaatgaaaataacacatttgaagatgagtctctcctaattcattataactgacatccttatagagcaggatcatttggactctgagacatgcacactgagaaaatactcatagaagtggaaggcagagactagaacgatgcttctacaagcaatgaccaggacagattgtcctagaaatccagaagctagagagaggctcagaacagattccttctcccatttctgatgagccacctctactaccaccatggcccctgttctgaagacaggtttatgcttcattaaagtcctaattaatacaatcctctcctgagctatgtctcatctatagcagcatcagtactaacagtagccacccacatcacaacatttccagttctcatacctttgtctccagaacaaagcttttcccattctgacagtactgggtgtccagatgtttgcatcaacactgctcaaggtgtggctgcacactgtcgggagccagtgattggcttcttgtgacttatagtgaggctaggaacttggatcagaatgcaaattatcctacactctttcttttggtagaaggaggattgtcagtcaatttgagcaatgtattcagtcatgaggctaatgtatttggagtataaaacctttatcttgaccacagcccactgaagtcacaggtctacaaactatgtatagtcattacccttagatgtccttaaaccactcaacagtaactgtattttctcacccagatcctttgcttctgcgttttctgctcaatgagacccagctgtacattcatatatctaagctgtccaaggcagaaatgtgcatcccagctttacatctttaccagtgttcatcctcaccaccatgcacagtctattgattctgccttattaaattactcattgccttatcctctctcggactttcatagctcatggacctgctttggaccctcaagcttgaatgcatgcatggttgcatgaatcttctgccttctttttgctctgatgaaataaatctgaaaaaaaaaaagcaacttaaaggagaaagaatctattttgactcacgatttgaggtcacaaccatgatttccatgaggccataatggcaggggcctggggaagctggtcacatttcagtcaatgtcaagaggcagagaactggagaatgatgaatgccagttgtcttaggatttcattgctatgaagacacaccatggccatggcaactcttataaagtaaaacatttaattgggatgtttgcatacagttcagaggtttagttcattattaccatggtgggaggcatggcagcatccaagtagacatgatgctatagaagaagcatagagttctacatctggatcagccagcagcaggaagagaaaaatgacactggacctggcttgagcctctgaaacctcaaaatctgccgcagtgacacacttcctccaaaaagaccacacctattccaacaaagggacatgtaataatgctactccctttgagctatagaggccattttcattcaaaccaccacactggtgctcagctaggtatctccctttgctgcatcccaagatccaagcccagagtactgccttactccttcagggtaggtctttgtactttaattaatctaagcaacataaccactcacaagcatttgaaggccaatccaatctaaacagtccctcactgctgtgctccaaggcttgccttctaagtgattctagatactgactgtgaaactgacagttaattttagcatcacaccttctgacagtcctctggcctcctttcttgtctataaccctcccagcaaccagagagatctttctgaagcaaattcagacttagctagaatttttctgtagcttgctattgtatataaagactaaagcccgaagttacatacatgacgtcactccattcccatcaatcctcagctcttacagtttctgtgcatgtcagttcggcattggcccattagtctctggccatccctgaaccatccatatgttcttagccctcaaggttcttggtactcctgagtgaaaccccaccagcactatcactcctctcaggagatgatgacattcagttactacaaagaacagaagggaatctggtgtgaaggtctctggtgtgtagcctgtatagtccttgttctgtatatttgcaagccttttataattttaactgcacaaggtagtgatcagttatcttaaccttgcagagatgaggaaccaaagtagttaataaacccacctgggtcacacatttggtagacagaagagctgtgttgtaacgaaagcactataactccagtctctacatgtcactctgtttctattaacaatattagatcattgggtccatcacagctcagttttccatctttataaaatacatatatttgcagaaatcactgatttactgtgtttcagtagtaactgacagtccctacacagaacgagtgttaaacaaacaggcaatgcatgtgttcatgattgtttatggggtggccatatttatagtctatctactcatatctcattcactaaaacaaccccttgagtagacaggccatgtattagaaatccctgtttagtcaggaataaaagcatgacccagggagtccctcctggttggaaagaacttcagaggactgaagtaaacttcctgcatgaatctaggtcttcctcctctgagctgttggtcccagactcatactgatagtgccctggtcactgtagccttggaaggtcacctacttcataacagatacattaaactgtaccttagattccatgtctaactcttttgttttaaaaacttgtaatgtattgttcctcaaactagctgtataaaatggttaatgagtcatttcccaggaattaggttttgttttgtttgtttttgttttacaggaaccttgtaaatggaaacaatgtctccaatgatttggaattatgaaaatattttatgaggactaaattttaaaatgaagatgacatgtttttaggatgcagttgggggcttattgcaattgtattgtattaaataaatgtgttttatttgtgttcccagactttgtcctaattcagtatctaaaaatttcctctagccaccatataaatagtcttttgcaagattttgtgaagagagtactatgtgtttatttttattgtttttattttattttatgtatatgggttttggtctttcattgtagttagttaattagttacttagttaggtgtttttgtttgttttttgtttgtttgtttgtttttgtctgcatgcatgtatgtgtaccacatacatgcctagtgcttgagaaggtcagaaaaaggagtcagattttctggaagtatagttacagacacctgtgaactgccatgtaggatctgggaatcgaacctgggtcctctgaaagagatacagtgctcataaccgttcaaccatctctccagccccaaaggtactatccagattaatgctgactaataatgtccaaaggtcagaccatagtagtaggctctatttgaagggataaaagaggctttcagctgttcagggcctaaaacctacacagaaattctgaagacccctgagacgacagacattgtatacaatcctaacattagaaaggaaaagatgtttgcagataggggttcctcaatgtcagtccatggaggggtgggcattcacctgaagactagggaagccttaggacattgagctgagcagtagtctgaccagtagaatgttttaatcagatcaacctcttttgttaacataggttcagatgttatatatatgcatacagatgtgcatccatatgtgtgcatgtatacagaaaggtcaaaggtcaacatgggcatcttccttgagtactttccacctgattcattgtgacaggcttgctcagtacacctggggttcatagactccataggcagctggacaataagctgtaagaatccctctgtctctgaccccagtactagggtcagagatgcagtgcctggttttgaggtaggcactggggacttaaattcaagtcctcttgtttatgcagcaggcactttaggacttgtatatgactggcacaccttcccaaaccgagcagactgtgtagagaaaagacaaaagaggaatacaaatggcttcacatggaaagaaaaggtcctaagttaggtttgagtatgatgctcagcactttattgttttgtgggaaggtctgtaggaagcctcatgacattctcccctgtgtgtagaaacggtagttctagagcactttctcagagctgtggctgctccttggctttactttaccatattagcttttctttgttggtcatcctgtgtgggatgtgaatgatgcttttctgcaaagctgactaatgactaattctgcaatggaattcacaggcactttggggacaggatacattcacttccacatttgtcactgctccccaagtagaaggagccaggtgttagtaggaagattccaggaaagctctttgggcacttgctgacattaagaactaagcatccacgtctgtgtttgccaggccccagcatagcctcacaagagacagctatctcagggtcctttcagcaaactcttgctggtgtatgcaatggtgtcagcctttggaggctgattatgggatggatccccaggtatggcagtctctagctcacagtcagctattggatgggtcacatggcccccaatggaggagctagagaaagtacccaaggagctaaaggggtctgcaaccctataggtggaacaacaatatgaactaaccagtacccccagagctcgtgtctctagctgcatatgtatcagaagatggcctagtcggccatcattgggaagagaggccccttggtcttgcaaactttatatgccccagtacaggggaatgccagggccaagaagtgggagtgggtgggtaggggaatgtgtgtggggggggagggtctgggggacttttgggatagcatttgaaatgtaaatgaagaaaatacctaattaaaaaataaattaaaaaaaaaagaaataagcatcatatttccactcatctgtctcttttcccacatcctttgtaccgtcacctttcttatctcttatgttcttggtggctataacgtgtgcacctaagtagaagggttaagaaaggaatgacccagtaccagcccaggcttccaaagttccaacataatacttttgttttccattattagacatggttaagcttgacactcgttttaactaatcagaggcatgtcttcctgtccccagcagcannnnnnnnnnnnnnnnnnnnagcttttcactcagtcaatatttgattaggatttgagtccgaagcctttgttgggctttagagaaagcatcacttggattttacacatactttcagctgttagagtaaggaaactaatctatcattttcccccaaagaaacacatggctgatgcagcctaatctaaatattatgtgaagtgtttctttccttatgaattgacaagaaataaacagaaagggatcagggtcactgaaaaggaaaccaaagtggccttcaaatacactgtggggagttctgaggctctttgctaccacaaggaagagctctgtgtatttctactttgtgttttcatctgcagacttctagggaaggcttcctaattactatccattttctaatcggtaacttttggtttcctgcagttattattcaacgttatatttgttattgagtatggttttatgacctatacttttacaacagcaacaacaacaaaaacataacaccaacaacaattttttacaatatagcaacatagatatctagagaatttgacaattttgcttgacttgattcttgacaaattaacttgcttctctgaaaatcatattcctcctggcaacagtgatgtgaggagacatttgcattaatgtgaattagagtttacaattgttctgtaaccccaaacctacatcagcaggacataccataatacagtgaataaatcatatgaagcaatgtggataatttaaaattttagttaacacagtcagtcagcatagacagccctttaaaatgatgcaatgaacacactagttgtactttgaagtagtattatatccaatttattctaaagtaatattatatgttataagcattttgcttattaaaagaagaaaaatcttatcaaaccattgaatagaaaatgaaagttgattttccttctaattaacttcatagcaaatcatgttataagtgtatcataatagaaacaaaatacatgctttgcttcccgtccccagtgctgagatcatgagcacacatgagttatgtggtgacaggggtgaaccaaggcttctgtgactgatgaaccaacacactatcaactctacatctccagcaccagaaagggtgttttattggtggaaactctactttccttctgtaattgtttgagattttatataatgaaaaaacttctcaacctaaagactataaaactacacaagatttttctattttattgttaatttttcatctttgcattggagacttatctgacatttgcattgtaactgataggaacttcactactaacagatgtccacacctgctgtatagggacagcagtgaaatctttgtgactgtgtccaataatgattagctttcatttcagataggtggcagggagaggtgagatgttctggggagcaacttggttttaaaaggtttgaagaaggcatgagagagatgattaaaagtttgaggccagcctgggctgtctagggaaagtctgtctataaataaataaataaataaataaataaataaataaaactaaaatgtaaaaaaaaaacctcaacctagtcagaattattttgttttatgaagagtcaaattgtctctggttgagtactccatgctggctggtctgagtgcttctgggggattctcttgttctcctcctccaccatgctggtgtgcatgtgggtaccacctcgtcttgatttttaagtagcttctgggaatagagcccttggatttaaggctagtgcagtaagacgttttgctcactggtccttgtcctcctcactcaaccttctctcctttttttttttttttttttttttttttttgagacagggtttctctgtatagccctggctgtcctggaactcactttgtagactaggctggcctcgaactcagaaatccacctgcctttgtctcccaagtgctggaattaaaggtgtgtgccaccaccacctggcaaccctctcattttaattaagactgatgtccttatgacatcatgtccctctatccagaaatctttgtgttattctaagttgttgatgtaccttattttgcttttgcaattttaaaatctttaatgttactattaagtgtgctctcaagtgaaatgcaatatttgttagactattccctcttaaaaaactgactggcttaattaaaactctctgttccttcctcaaaacatggaatttgaggattgatggctgccccaatccatctggacacttgcacctccttcagctagatatatgcttagaataattggacttcccaggcctgtttaagctagcttttgttattgtaatgtaacacactaattacaattctataattcaatcaaatatggtataatctaatgacatgattgagaaaacaaagtctttctttgcattaacctactcaactaatttgatcacattgagaatgctattaaattgtagctgacaaaaccacagtggaattagggcacaaatagtcagattgtttggccatgtcaacattggaggggcagagataggaagtacagatttccacagttaccccagtggactggggaattctccaagacttagaaagctctactctggccacattgggatttgtggctttggtactgtaaagaatttcagagcagctaacataaccagagttggtatttaatgaagatgtttcaatatagttttaagcacaggagtaagagaaagaggggcgatcaaagtggaaacgtaagggttctttggaaagtcagttggggcaaatacatgaaggaatgtttccctgaagcagtcacaagagagaggatgttctgctaaagcaagcgtgtgaaaggacatatggtgaagaattatttgctaagaaaatgcatgtattggtctgccttacattgcacagttgaactgcatttgtgaggattctatagagagaaatgaccaaaaatgtctggtgtgctgcagtttcttgccacttctgtggacttgggctgattgatggagctatgtcagctgagacaaacacacatgctgtggtaaggcatgtgctgagtcaagacaggagctgagcaagaccagtggaaggcacgtgatgtttggagggtataaatagaacatgacagtgaaagaggctgagctaggcttgctcatagaactagctgtgcaatgcttgtgagtcttacatcttcactgattttcacttctctgagagagcacagcctagaacttttcatggggctcctcctggtccctcctgctgactgagcatgctgaggttgaggcctgactgtctgctaagtagtgccaccactgctgagtcacgtttgctatcctgactttaccaaactggactgctggtctatctgtgaagtgtttgcaagtggattgagttgcccttgtagacctatgaactgaactgctgatttccatacaacacagaatagacttgctccaaagaacctttctaaacaggttcacttcccccgtatcctttctccccactacctctggtaggtggtgggcttaaaggggggttaaagtgcttaagagccaacattaaaaataaggattggaaaattaaagttatgggtgactagaagaaaaaaccaaggtaggaacataagaatgggcttctctctgaagcatcctggaagtgagaaatatccaagtgagggaccaggctcatttaaaaacaaacaaaacaaaacaaaacaaaacaaaacaaaacaaaaacccagccaagtaaaaaacacagtagtcttagagaagattttgactaggtttgaagtttttatcatcaaaatgagggaactggagaggtggttcagtggtaaagaacactgattgttcttgcagagaggatcagttttcagaacccacgtggcagtttttaactatcaggcaaaacacacacaccacaccacacacacacacacacacacacacacacacacacacacacacacacacacacacttcttaaatttaaattcaatgctcttatttgagattctcagacttatttgaggaaaagaatgagcccaacacagggtcattccttaagctggggtcattgttacatcccacagaatctctccctacaaaggttccgttaaccctctgtcagcctctacataggcttgtgcaacaaatgttaattatgccagagttcttgctctcagctggtaaaaggctctggtctaaacaggttaggggtcccattgccgtcccttgtctctataacttccctgtcttttaaccctgttcctggacatattagctctttaaaggcttaggttttctcttctgctttaggagtgataactggaaattgttgaccatctaccaaagttatgttttaaaaggatgtgtgtgagcgagaaagcccatccataatagcaaacctgacaacagaagctgaaaagggaataatcgtaaattgtgaatgaaattaggtgcttgtcacttttgtgatatacatgtgtaactaaattttacaaagctaactttaaaaatgtcccacgattgctctagacaagaagaatgtcaccatatgtttatgcttctgttagtacagacaaaacagaaattaaatatacatatatatatatatatatatatatatatatatatatatatatatacaactctaagaagttttaatcaatacttagtgttttgggaaaaatcacttacagcaaattaaataataaattgcttatgtttactgttttaccccgattttgttggttagcaactctctttagaattaattatggcagggagcacagtgaataaatgtataaaaaattaaatcaggacaattttacatagttatagcttagaagttgttaaaaactaattggaaaatatgtctagtaaaaattgaggatcctccaagaaaggagaattggatttctgttctgacatctaaataactcctcctggctggccagatggctccacagtaaccgcactggctgccaagcatgctgacctgagtttgcttcccagaacttacatgggaggggagaaccgactctcaaaagcccttccctaacttccacatacatgcaacagaaagcagcacccatcctccacaaaaatcaataaatttcaaaaaaaaaagaaagtatattggataaacatttctctatttgcatttttgaaatgaaaataataatatgagacatccaatttctgaaaaaaatccaacacctaatatccttaactccacttaaattgcattatttgcctcttcaaggaagactttgtgcacaaaggggatgcttcagaccctgtacaaaagctacgtatctcaatagagaaggaaacaaggaaatcagaattctatatttttataactatgtaatcccagccaacaagatatgtaatcctttgtaatttgggcttttctcaatatttggtggtatttttcatctatactcacatccacacaggaaaggaacatataaacccccatatgctactaatattcttctctttggtctccatactccttggcagtggaggatatccaactcagcaggcattttccatcatcttctttatcattaataagagtgctctctcaagtcagtcattggaggatcatgcctttaatcccagcatttgggaggcagatctctgagttcaaggctagtctggtctagtaagttccagtaagtaagtatagtcaaggctatacagagaaacccaatcttgacaaaaaaaaccccacagttttctctgtctcaggtatggtgtagatcttaaaattatactctagtattagaaactcatagtaaaactcaccacactgaaagtgctggatgtccctgtcatcacatatattggatgctgactgtgacctttgtaagacaaacctggaaagcaaagtacttttataagcctgtggtttgaacagggacttcagtaattttgttctattcatttctatcaaacagattcattatcacctaacttgggatgggttaaacttgtgggttggaattgttgacattcaaatagttttacaactttccaattagacagctcaatgttatcattcatgatgcattaacattcaaatgaccttaaaaatggttagctgcatcctgagagggtcatcagcatcatgtagagtacaaactaacaccaagaggcaacaactcaacctttgtttttaattgtattatctggcatatgtagattacagcatacgtatctataatctacctatatttacaaatgtccttaaacaacaacaacgaaaatggagtctccctgcaactcatgccaaattagcccaggctggctcaaagtcatgatgctcctggctctgcctctgtagtgtgtgctaagcccaactgacctgaacatccttattctagaggagggagtctaagtactaagagcagtgcactttgggcatattcttcagtaaacctcatagagttatattctgttattaggcagtcagttctcttaaaaaacaagttgcagacagagataacagaagtagccatcataccaatgatctttctgtgtttgggctcttctctcaggaatctatccttgaagcaaagttgagcagatgggattttgtaactgcaagtaaagagacaggaacacagagtggaaaaaaagtcactggagtcagagcaagagggttggaatgccagaaggagccgtgttcacccaagagggagcagcatgaacatggtaaagagagtgacagaaaggacttgaaagtcatcaaatgtattaacactggtaaatgtataatattgaagaaaagtccccatgccacaaggacatttggtaagatgactgaaaagcttccttaccaaaatcagaggagacatctctgcttgcttatttatttatttatttatttatttatttatttatttatttgactttccttatgctatacttcatagggcatatgacatgacttagaagaagcattgacacaatttggatatctcccctttggaccttctaacaaatcagtgatgctaggcaacagagatacataccagcatcccatccagataaaatccccatactctgtgtcttctggtagtgatgctaggcaacagagatgtacattagcatcccatcaagataaaatccccacactctgtttcttctggtggagtgtaacacatggcttacttagtggacttgccaagaattggatctgactctagacactcatccagacatactcaagtatggaaaataaagtgggggggggatgagcacaccaaataccaaatgaagatagagttaggaaaagttcaaccatgggactttctttaaaatgcctggtctctttaacaatggcaacaaaaggagagactaatacatgacatagtgcccagttacatttttaaacagatttactttatttttaatcatgcagatatgtatttatatgaaggtacatgcccatgtgtgcaggtgcctgcagaggtcagaagagggcgttgtatcctctgaacacaagtgctggaaaccatttaattgtggaattgtttttattgtttgtttgccatcaataaagtctaagactgagtggggaagtggggtgaatctctaaaacaggaagatcacataaagggctgggagattaaagtgcttgctgcacaagcgtgaaaacctgagttcaagccccagcatccatataaaatctgtattgtagtgaggatctgtaatcctggcactggggagacagagacaagaaagatgaagctctgtgtgggttactggccagctggtctaaccaactcagagaagagctccaggttcagggagagatccagtatcaaaacataaggcagaaagtgatgattaacccctggttttcatacgcatgtgcacccatatggatttggacccccccccccaacacatgtacatacatataacatgtattggctagttttatgtcaacttaacataataagctaatgtcattggagaggagggagcctcaggaatatgactccataagatcagtttgtcatggcattttcttaatttatgattgatatgggagggcctagcccattgtgggtggagccatccctaggctagtggttctgagttctataagaatgcagactgaagaccgggcagtggtggtgcatgcctgtaatcccagcacttgggaggcagaggcaggtggatttctgagttcaaggccagcctggtctacagagtgaggtccaggacagccagaatggcacagagaaaccctgtcaaaaaaaaaaatgcagactgagcagaccatgagcaagccagtaagtaccagtcctctatagcctctgcatcagctcctgtctctaagtttgctgagaactcctgccctgcttgagttcctgtccagacttccttcaagattaacagtaatatggaagtgtcagtcaaataaatacattcctccccaaattactttggtcatgattttcatcatagcaacaacaacaaaaaaatcctaactaagatacaacacatagcctccaacactcaaaaagaacaggcaagacctattcctaatatttctgtgttactaccatcagagaattcagggaagagatgaaattaaaacttgggcagtcaattataaggcaaacaagcataatcaagagttacaagcagcttatcaaggaaaagttagtatttttggaatgctggaaagagtttcacttgcagacattaatcaaagagaggatgattaatgagttatgctggagagccccacatgagttaggacttttccgaaatagggcacactcaccttttgttcctttacggggttttccaggtgtgtaatggtgtcagatgtatgatgagagcaagcacttttacaaggctaatgtttagatgccattatactgcagcagcagacagtgagcagtcagtatagttggccatcgaggtacctgactttgggtggtctcatgtccttctgttgagtgatctcatgttgtcctgttcaaagctcacctccacacatcagccttttgccattgtacaactggttttcttctccctgtgcctgtaaccttctctccacaaaataaaaaatgcagagtgctgagaatcctctgtaaagacataaatgctttacactactgaggcgtctcttcacactactattagtattacttttgaatttattatgaaccagttatatttctggagatgcaaatatgaggcactagaaggaggatgtagcccagtatgtgtgtgcaaacacctgggtttgggcccagcattgtaacaagaacaagacaaaaaaaaaaaaaaagtgaggtagtatcttagttacttttaaattgcagttataaaacagtatggccaagcatacttacaaaagcatttaatgtaggggttacacatccagaggactaatattcatgactatcatggcagacacatagaggcaggcaggcaggcaggcaggcaggcagacacatgcaggcaggcaggcaggcaggcatggcacagcactagagcagtcatggagagtttctactcttatctgtaagcacaaggcagagagagctacatcggaatgggttgggctctagaacctctaaagcccactcacagtgacatacctctgtccaataaggcataccttgtccagcaagaccacagctcacaattgcagtaaaaactattacaaatcccagcctcgagcttcttccccaccttagaccatttatattcccagatgaaaaacacacagcctttatatttttaaatatgtcttaggcagcataatagctgggcagctgcgtaccctccatggttttagcatctacttcctaccagtaacccaagttatcacttattatttactatgtcctatctggactgctcttaacccaattgggcagccctctatgccatgttctcttggcccttagcccatgacagctctccttctccgtcctgtgtgttcttcttccattatggcttctttcttcttcatccctcctgctggtcccctctctcccaagtgcacgactatgtctttttctgcccagatactggccattggcatctttatttacctctcagaattaacttggcaagcttccaggatctatgtgcagattctaggtcttgagggcccacacttagcatcacaatagacagtaaaagacaaaacttcaacaccaatccttcccaagcaattgccacagctagtgaccaagtattaaatatatgagtatatgaaggtcgttttcattcaaaccatcacagatagtcaatatagaaatcagagctatttttttcttcatggccatgagtccttagtaactttgcttctgtgttcttagtcataaataaagggtaaggaatatcattttaggtttaatattgattgctaacactagttatttgaaattgctggaatgattatagcatttaggtaattaattccttttagttcacaaggactcaattgtcttctaaggaagattattcttaacagaaatacctgttaatgtcttcccagcacaggaaaacattgggcgataattttccagtagaatatagatgaaaaagtcttttcatttaccgtagcttgatactgtcactaaacctgatgatgagctgtcatttttatttcaagcatatttgtcatgggctttaaaagtagcatgttcgctactctacaggaagaagcgccctctccgtcagcagtctgggcttgggcttcagaaccttggttcatcagcacagacacgagtgtgaggaaagtggcaaagttgctgagttgtcctagcactggctgtgtgtctagagtatggtgggggttgtatcctagtcagagagtgagggccctggtgtccaactcctgaatctattccttgtgattgaccttgacaaagacaagttcagtttcctcccttagaaaataaggcaaacatctgccttgacagatttcttttgagaaatgtgttaaattagaaaacctaagcatttcactatcatattactagacctatcactgacgtgtaatggaaaccacataattattattgctaatatgattaaatgaataattgaagtgatcatgtgggaaaccaagcacacagtcttgctgaaaaattaaaaacaggaatatcttgacaagcttcacaatagactaagagaagaaaatcttcactccaaaatgattagggcagactttgaaaaagagcccttcaggtttttgcttgtttgttttcgagacagggtttctctctgtagccctgtctgtcctggaactcactctgtagaccaggctggcctcgaactcagaaatctgcctgcctctgcctcccgagtgctgggattaacggcgtgcgccacctgcccggctgccctccagattttgatcacttactacctgcatgattttgagaaactacctaccttcttagtatatcagttacctcatctggaaaaacagatgatggttcttacaagatcccagtaagaacatcttctcacactctttgactaatgtgctagtccttcatgtttttgcccaggatgcatgtaagcgaggtatgctgtggcccatgatgaatgagaggtcagatagactcttttctctataagctatcgcaaacatcaaagtttatttcaaataggagcatttacttctttgaaatagcttacgtattttctaatgtttggctttaatctgaggccatataatctgtttttggactgacgtctaaaagtgaaagttcaaggacaacactctcagtaaggtaatgattgtttcggttaacggaaatgatctctttgtttctcaaccctcatttgtaagagaggagaaccatggggataaaatgcatcagtatatttgggaaaggaaattgtagtcagcagacaggattccaaagcaccttctccctgaagtccctatgggacaaaaggaacttagccactgcacagggcttgcccttgcctgtccttgggaggacctgttctgtacctggccccatgtcacagaggagtactgggagagtgcctcaagatgatgcttgtgcaaaacactcaaacagcatgcgaatgtgccttgtgccatgccctccatgccacctggaggagaagacagtgagaaccatgtctgctgagtcccctttcatttgtgctcgtttttctcctaagacttttcatgcctaatggatttagaggatactcagaggatgtgcatgctggtggtaagaactgagaaagaggagacatgaatttgaaaatcttctttgcttcctggagattgagaacggactaaatgctctaaagtgagtgtgttttgaggtaaatgtgtataaggcactgagatgccgggcaggatacacatggagctcaagggactgactctattctgactccccacctgggtaaatgtaacagaaaggttgagctgtaatcaagataactagatacacacttagaaatcaacatagaatctaaagggatttctctcagtaccttaaataattgtcagcttttaatttaaaattagtatttcctatgagccagtcatgctgttcaggatattaagtattgatactatagtatgaaattattttcataaaaagccttagttttggtttaccaaccaacaccagcaagcttggatatttaactacattatatatttgccatttgtgttatgaaagggtgcactcttccatatgcaaagcatacagaagtgcatgcacacacacacacacacacacacacacacacactcatacactgtaaatacactctgaggggaaaagattactctgtcttccaggaaagtcctaaaaatagacatttttagaagatttagaaaaggctgattttcatttgtgtgattttgagtcaggacatgacttgcatgttaggttgtgcattgcaaagttgaattgtcttcttgttattaaatattgaggaaatgactttttaaagctgttttgactcattggccttaacagcatgtaacaatattacattgaatgtgtgtgtcctacccacaaagaactaatgtttcatagacaatttcattttctacccccaaatccatatgaatttgaaataaggggtagctgttatccccgtggaagtgaacaggaaactcgagactctgagaggttaactaagaactccgaggcctgtgctctacactaatcgcaattgtgcgagagtaattagttttctgtagcttgtgaaggttccatgtgagttatctaatttaatctttattagaagcctattctggattcactcaccgtgtcatactcaataatccaatatagtgtggcccacagtgagctcatcagccccgcttgtccctctaaactcatgctctgctcctcctactcatctcagttgatgccatcacaggcatgtcatcacccaggctggaaaccttggtggctatggttaaccatgtttccctctcgatcactagtctccacgacttcatgaatatttgtcatctgtctctataatcctttaaatatagtcatgccattgaaaagagccagttaaatataataatctccttatgtgtgttttacctatctttgcctgccccctatgcataccttatcctcctttctatcagagggtctggagcaaagaaggtattaaagatagttgatcatgaaggcaatcctctgcgacactgaatatttaagcatcagcttctattttaggatgaggtcagcccaaggcctagaaatctagtattcaagaagctccttgtacccccaaaatgacatccttgactgctatgtcccacgtatcttcctaagggctttataagcactaactcacttaattatgcagtgattttgttttcctttcaaagagattatgcaatgttctggataatcacagttagaaaaatctttacaatcatacggtgaaaagatagcacagccagaatttcaacctacaatcagtgttcttcgtctgtggactgcgttgcgtgctcagagagttcatacatttaaacaattctgcacacagcttcacagattcccaatggacatggagggatcccttgccagggagagatccctgcaaggtgattggtctgcatcccaggattcccaatgctctctggtttttgtagtgttacttggtttacactgagtccatcctgattcctgcttttgactttttcatttaccttctaaaaatccagtatcaccttttctgaacagatcacgttgttctgccagcctcagtctcacattttcaaactgccttgtcttcttatacattttttagtggggtcagaaatgtactgagtgaacaaaagcagcctcaaggctgagcctaggggagcttgtcatgtctcccctaacatgtgcagaggctgatctcctatgaagtaactaagttgttggggatttattgcttgtctcaaaaaatgacattggtttccaaaaggatgtccatttatgtagccaacccgtgtggtagcttgaacatgtctagtttggaagccgttttactaatgctttgttttatctttccttaagttggaaaaaggaaatttagcatggaccaaagctcagtgagtgacaggactgtgtgaagggatcacaggcttgtgttacactgatgaaaagctgagaagacctcaaagggataaatctttcacccaacccagctcaactaagaaatggagatacagagacccaagcttatattttattttaagtctccattctttgctctgtggtccttaaatataaacacagtttgtcccttggcaatgtccttatactctagcatgcatttattagataactcattgggaaacatgctacagggaaatccacaaggtcaaataacaacagcaaaacaaaccaacaaaacaaaacaagcactgtcaagaagtaggagcactaagtcacccaagccaagagtcagggaccatttcctaaggtttctggaagatgtagccagtatgccaaataacccagaaaataaagtctgctgagtggacttgccagctccctaaagagtagtcaaaagctgcatggtacaactggaagagactggctatatgttctcttactttttaggctatcttttgtagggctgatgcagtgcccagcaaattagaaacacttttttcccttgttttgtcctctgctgatggaccatagggactgggaagtattgaacaactgagaagcataagataaaaaagccctaccttgagaactaggtgtttatctcagatgaatcacatgcaagctgggtgagcctagggaagttgcttaacttcactgaacttcagtaaaggggtagaatggtgtcaccataacaaaggtttctataacagttaagtctctagtgctgagcacagcagaacatacctgtaagtccctgaaactcaggaaattgaggcaagagagtcatttgaaccatggactttgagactagctgggaatgtataatgagaactgtctcatataaagaattacaaattaaatatgtatcaatacctatcacaaaaataggaaaaatgtgcatatcaattattagcattactgttctcttacttgaaagagtagcttcaagtcatttggagagtaaggaatggtgtaagatttcttccttcactgtgaagtcttagctgtgacagtatttcagaaattggcactgagcatccagctccgtgttgcatgaggatgggctgaagcactagcatctggggaaatgatcaccatgacactattgaatggaaaaatgtgcagcttctttcttcctttttcaaaagaaatttctagggtttgtcacttttatgacttttcagaatcttccccacagcctttggggtgaaagtccatgccaccaaccccacccatcaactcccaaaaaagtaacctaatctgttcagacttagtcttcactcagttgattaaattttggcttcagaaatagacaactcttgctctcctttacgctcctctgagactagagtgtacttgatgctaaaagtccacatttgcatatgtgtggatgagttaactcaaccttgaaagtgccaggtcttctggatatatgcccaggagaggtattgcaggatcctccagcagtactatgtccaattttctgaggaactgccagactgatttccagagtggttgtacaagcttgcaattccaccaataatggaggagtgttcctctttctccacatcctcgccagcatctgctgtcacctgaatttttgatcttagccattctgactggtgtgaggtggaatctcagggttgttttgatttgcatttccctgatgattaaggatgctgaacatttcttcaggtgcttctcagccattcggtattcctcaggtgagaattctttgtttagctctgagccccattttttaaaggggttatttgattttctggagtccaccttcttgagttctttatatatattggatattactcccatatcgaatttaggataggtaaagatgcttttccagactgttggtggcctttttgttttattgatggtgtcttttgccttacagaagctttgcaattttatgaggtcccatttgttgattctcggtcttacagcacaagccattgctgttctattcaggaatttttcccctggtcccatatccagtaagaaggacacatgctccactatgttcatagcagacttatttataatagccagaagccagaaagaacccaggtgtccctcaacagaggaatggatacagaaaatgtggtacatttacacaatggagtactactcagctattaaaaaatgaatttatgaaattcctaggcaaacggatggacctggaggacatcatcctgggtgaaataacccaatcacaaaagaactcacatgatatgtactcactgataagtggatattagcccagaaacttagaatacccaagatataagatacaatttgcaagacacatgaaactcaagaagaacgaagaccaaattgtggacactttgccccttcttagtattgggaacaaaatacccatggaagaagttacagatacaaagtttggagctgagacgaaaggatggaccatctagagactgccacacccagggatccatcccataatcagtctccaaacgctgacccattgcatacactagcaagattttgctgaaaggaccctgatatagctgtctcttgtgaggctatgccggagcctaacaaacacagaagtggatgctcactgtcagctattggatagatcacagggccccaatggaggagctagaaaaagtacccaaggagctaaaagggtctgcaaccctataggtggagcaacaatatgaactaaccagtaccccccagagctcgtgtctctggctgcatatgtatcagaagatggcctagttggccatcagtggaaagagaggcccattggtcctgcaaactttatatgcctcagtacaggggaatgccagggccaaaaagtgggagtgggtgggtaggggaacgtgtgggggagggtatggaggaattttgggatagcattggaaatgtaaatgaagaaaatacctaattaaaataaaataataaaaaaaaaagaaagtgccaggtctgtgccacttcaacaaagggacttttcccttagctagcatcctaggggcatactggtggggtccttggaaaatcagtgcttacttttctccccatcttatcccaataatggtgttctccaccagaccttgaacttgcacagggaaccagtgcttgctgccttggcctctggtcgatatccaaaaagaaagtaaggaaaggtttcagatatatttatgattggcatagtgattatgtgccaatcagaggacaacacgtgggaatcagttccctccttccactgtaagggtcctggggatacaactcagggggtagggcttgcctttccttgctgagccatcttgaaggatgcaacaatatttcaatgtttgtttttctagttctctgttgggtctgaattagcttgatcctttcttgaggacagtagaaaagtctggctcatcacccagaccggtgattacagcagtaatttctttcatctgtggttgcacagtggatctgtccagaagcagctgaggacctggaggcataagcagcagtgcagctaaagatccccacaggcagttacatggcctgtaaggttaagacaggctagattaaccaggacttgctcaacaagcatgttgtcccagaagcaattagcaaatcttttttttttttttcttcctgagacagggtttctctgtgtagccctggctatcctggaactcattctgtagaccaggctggcctcgaactcagaaatctgcctgcctctgcctcccaagtgctgagattaacgacgtgtaccaccacgcccggctcaattagtaaatcttaaccaggcatggtgcctaagtggatgccattgtatataaataagaaaaggagagaataaagaagaaagacactattatcatttgagttttgctcccctggtaatgcaaaatgtcttgcaaaaataattgcatataaagtcatgctttctattttgtttttaactttttacaaacattgtcaagtctagattcacactaggaaacactggttcactgaaatgctgagtgtccttccactccaggagcttacaggaggatgtctaacactccctcctgctaacatgacccagctcacctttgcctcactgtgactctcctgtaccctttgtgaagctcaagcatctacgccctttcttcataagacagtcattactggcttgcataattcatgtttaccaagcatgcatgcatcaggataaagtgttgtatgctttattacatattccatataaaaagccagggatcccaattacatggtcaataatttttaaaagtacctataagaatgtgtttgaatgtcatttgaccaaaattttaccattaagaattgaatttgaaaattttaccattaagtagataaaaacaaggtcttgaaacctaaaataaattttgtcatttgcctttaattttctagatttgaaataccagtctttttttttttttcatttcttaactatcttaagttcatacaaggaacctgctatatccaccttttctgtctttatctggaggtagtagttactgggataaagtgggttgcctatctttgtttttatgcaactaaatgcatgcattaatgcatgatttacacaaaattttcaaaatttttagagaaattccaagttaaacaatgtgatgtctctgtgtcttcacactttgtagtttatgttccaagcactgtattatttctccccatcttccaagcaaataggagattgaagtccaattccacatttgagccctgatgggcgatcatgatatgacaacctcacaagagtctccgtatattgaaattagagctttatccttgagaatatggccttctcttctgaggttctcccaaaggcaaggaattaaatacatattagatgttgtcaggaagaccacataagtaggtgatgtaaagtaaatttgatcaccatgccattttctcctgtgaatacttggcaattacagactacgtccaatattacataatgtgacaaactgacgtcattgcacataagcttcatctcactctctgcaacgaatcatgactttagtgtttcagacagggaagggttggtgttgagggactttgggtggttgtaaagtagaaagggcagaggtcaaggctttggcaggtatctgactctaaagttggtaactttaaccactgtacccttgcctttgttgtagaagccagcatcgagctggcttaggaaactcagaagacctgagatctagtcctggttttctataaccagtatgtggtgggtagcagcaatcaagtctcatttctgaggctcctaatccatcagccaactacacttcaagtctgcctgtcaatagatagcccattattaatatccacttggtaagtgggcaggtagaaaccaccagtctgtcccatttatgaatatgtaagctctaagatgtcccaaagctcttgttctacaccagagggaggaccttgcccttaactcatatatctttaaagatatcctctccatgttatcggtgcctacctccatattgcccaatctcagaagtacagattttagttatatagttacttatttttgatggtactaggagtcaagcccagggtctcatgctgactatgcagtcacactactaactgagctatatcttcaatcttttgaagttctgatttctttttcaaaaaattcgtttttttaaatttacacttacaacttcttaccaatacttaagacaaagatcttagaaaataacaataataatcactagaaaaattagtaagagataatgtggacctttctacatttcttttctccatgaattgaaattcataattcatgtatttttaaaaccatattatgctatacccatgcttagatgggtaaaggctcttagttccacccaagagatgcatctgtttccctatttcctgttttctccccaccccttggaaaataatattttaacagttaaaatagtttctgcaaaagcaacctgacaccaaatttctgttgataaataaatatgttctttttacaaggtcatggcggaagaggagtaagccaggactcagccccagtttctctctgttgttgttgttgtagttgttgttgttgtttggttggtttttatgtttttgctttttgtctttgtttgtttttggtgtgtgtgtgtgtgtgtgtgtgtgtgtgcccctgtgggaatctagtagcactacagattctgctgaataacccacatggaaaaaccttgttctttcatgccatcaagaatctcatttattatataccagtgcaaatcctagatctttcatagcttttccaagataaatgcagtattaaaagtactggtagtcacagtaactgaactctcatttgttacaagtttaagaatagtagaaaattctatgctgtctgctccatgtctagacaatgtcctaagaccagacattaaaagggaattggaggaggcctggagcatagctcacgtggtaaagtaagtgtcacgcaagcatgaggacctgcctttgatttcagcagctatgtaaaaagtctggcataatgacatatgcttgtaatctcagcacaggggttcatggggctcactggacaggcaacctagcctaattggcgaatctcaggactgagtgagcaaccctgtctcaaaaaaaggaaaaagatggatagtatccgaaaaatgagacctgaggttggtctctaaccctctaacctacacacacacacacacacacacacacacacacacacacacacacacacacacactacactcagaaatacacatataggcacacctaaacacacatttacacacatatacacaatacactcataaatacacaaacacacatacacacacacacacatacacacacacaccccacaggtgaatggagtgaaaaataagacaccttgtttcttccctaattataaaaatacaaatatgttccaaatgtcccctaactacaggaagcaatactcccaaagatgaacaggaagctgttggttgttgttgttgtttagaagagtgaagggctctttattccacccaagcagagatgcatctgtagccaacatgaagcagatggcccttttctcctctgccttttagtttcggggctctgagactggtagagtttttagcactcacagtagttggcttcatccatcatgcatggcaatgcctctgcagtggcagcttgtttccttccattgcaatccatagatatgaactaagcaaagatacatgtttttacatcagaagctgatgatgagcatgtgtggagacagcattgaatagattcttcaccactttccaatctttagtcctactaggaacaagtgtacttcaagagtgaatttatgactgcaggtgagcactctactccagaggtgaaatttattttctgctatgtcctctagtgcgatgaaaccacattttatgctgtctgaggtagtggtactgtcttgtcacacaaatgttcctaagatataggtataggaaatctagactctgagctttgacattactatattacatagccttcactagtttctctgtgaggattataccagttaccgtaagggtgcttagcacaaaccagttctttaagaagcctgaatggcttgttaattcatagccttagccgcccaataggatcacttggtatagactttgaaacttatgggctgggaagatggtttagactctatggcttttttcctctcagcctcagcgggaaaaacattcatcatgaaagtatggagatgtgagtttatattccctaagcctacacaaaaagccaggcatgtataccacacttctgtaatctcaacactccaaagacatacacctaggattccaaaggaagctgaccagccaaactagccaaatgagctggctctgtattcagtgagaaagcctgtcataataaatgaaatagagagtggataaggaagatgcctgataagaactttgagtgtcctccccaaaatatagatgcacacatacatacatgcacacatgtagacagtgttgttaaaatgtgcaatttgcatacatttgtaaagatgctaaagaaagactagataatagaaatgcattatagtgtctatggtccagacttgcatgagatattcagctatgtgaacaaatgcatgtaaatttttctaaaataatgatctaattatgtctccacagaacatgtttaatctgatcttatgtctgggctaagtactgccaatcactcagtgtgataagtgcatcataggaaaggccatgagctgaagggcataatcacaagatgctctcagctgtctcccccggttcctggaaggagactgttcctgagtcgatgtctgacgtttctaattaatttacccatctctcttcactctttctcgtcctgtattaactctcctaagaaaacacacagggcaagaacaaaagcaactgctcacacattttcagtattctatctctgggtttctaggtatattcaaggcgagattgttagcagatgattgtggttaaagtggaccagaaggaagcttcgagctctgatgggaggccgggccagggggtggtgatgtgctctttatgttgaagatgattctggcttataaaaatgtcaaaacccagaaacgcaacatgggtaacttgcagcgggcttaaatgatacaaagatagttttcaaagacaagcaagaactgaatagttcagaagatctcaaaaatgaagatccatacaatgtcagatctttatctgagaaacactattgtgtgatgacgcttttgacctcctgaaatggaaactgtaatgccctgagacaggtgcactgagagagccaaacacaggacaacatagaagcagagtaaagaagccatgctcctggcagtggtacacagaagagacggaaaaaaatacttgtagagaaggagcccttgtctgctgagagcaagttgactattaggtggagtactgcaatgatgtgggaccctcctttccctctttcatgcccatccacattcttctctggactattattattattattattgaaaatagctatcagaaagtattcattgaataaaaagatcgtagaactaacagcagtttcatgaagacttgtcctattcattgctcttagccaatcttatagaagatcatctcccaagtgttcaggcccccacacaggcaggctctggacctggggttcccacgaatacccagtcatttccagtcatctgggtttcacaactttaatcatggctgaactgatagtagcaatctcagtgattcttgcagttggcttgttttgtgagtgtgagggatgggttcatatgaggccaggctagctttgatctcatgaaaaccctcatgctccagtctcactaaatctgatattacagatctgagctatgcacctagcattctaatatcatttttatgtcaagaaatgaaggtctaagatagtatcaatctggtgtatatttagatcattaaatcaaacccctaaaattttaataagccattaatttttttattaatcttgaatgcttgtataacaaacgctgtactaaagcacctctccatgagcatctaattcagttgtctatgaagatctaactctagaataaacaatgataaaatactaacatgcattcaatatagctggcaatggcagagactatgagtaaatgaaatctcaagtgagcaaggtgaaatcaaatcaaattcttaaataaaatgcagttaagtcaaagaaaaaatttccatctatcagtagaactggatctatagctgccaattttcaactccgactaaaaaatggggtttgaataagaaataagccctaagcctagtgtgcattatgggtaacttttaagagtctattagcatatagtttgatgttattaaaaacaaatagagacctagtatggctcccaaactgaaaacatatacttggagcactaaaaggttattaatattcaagagtatacaagtatattgtgtatttgtttacattttatacagatcctaataactgaggttttttgaaagaagctaaacactatggcaaagtccattatctcaatgaccaattgagcatttggccagttccttgtcagtccacacacactttacacccagtgaaactaaatgatgactaacagaatatgaaatgttttatggttgctactgtacaagctgaagcatgacactgatagggtatgaagagccaacattgccacctaagattggttctgtgactatcagagagcttagctctccacccagtcaccttctgtacacattagtgaacattcctggaaggcagaatccagttctcagataggagttaacatgttgaatgcattgtcagttaccataatgacaaggcctgtctcagtggggatgcccagttgctgccagttcctgaagcataggctactcctgagttctagctgatttatatactttctgcaaacttcacctcccttcttgcaaaatgtccttctgggtttattggattactgtgaagatcaaataaaatgagataagatgtgcatttagttcgtaagtttatcatatcaattaccctacgtagcaaaaagaagcaagcacctctgtcaccaacaatgagccgcaaagctgccatctctctccccctttaaatatactagagtctggaccatttgtgtcaaggtgttttaatccatttaggatttttgtttagccctactattaggaaacctcttagtgagagatttatatttgacaatgtcaagtaacatggtcatttatcagcatctgatttaattaacaatggcactcaaattaattattttctgattattcatagagttttagaaaaaattggactagagagtcctatagcaaatacaaacatgatagtttagggatgcaagcctaaaggacatcggattggaggccagaccccactagtgatgggaccataggcaaagcaagtcactttcttattctcaattatccataagatgggtgcttagcacatggctatgctgaggagcagatgatagtgcttgcctatgacattgccatagttcccaataaatccacacttgcatattgtccagattcccatgtttgcttaaaagtagcagccctacttggtttacacatgttgttatcagtgtgagacagtttttcatattttcagactttgtggaaagatgtggtaggtacaatattattcaattatgagataaagttgctgttttgttgttgtttttcacacaccaggaagtgtcaaatcaaagaacggactctcctgttctgcagtgtgctgactggttttgtctccatcaaattacttactgagttgtagtgtgccattctaagccttgcatcaaaaccaggcacaagcagctggttgatgtgaaatttttggcacccaacaacagctgaggtgtatttttaagtactccatctggcaactcagcaggaaaannnnnnnnnnnnnnnnnnnngaaaaggaggaaagtctcctccaaagcaaagaggctcttcttggaagtgtcacttgagctatgaacaggagcatctaggttccagtgacttttgtggaaggtttggaaagatgcagatggccgctctgtttctgagttcccttttgacttctcagtacacagaggaaggtctggcatttacagccatgtataccccaggttgtccttctcaaaccactctgcctttcaagacttgctgccccttttagggggcttttacttcgagatcattttaatttggacgagagaccttacataacctttagtcattttcttctaatggactgacttgcagttaccacatctcatcactaccaggaaatagacataaatacaaccaagcaatctgactgaagttgtaccagcttttcctgcactatgccaccacatctgctctcttggtggaataaaaacttcttcagggttctaaacggaatttctctttctagatagctttgagcaattgtatacatgcatatacatgcaggatcaaaattcctcctgtcacagaaatctttctcagtctctctctctctctctctctctctctctctctctctctctctctctctctctctctctctctctctctcttcctccctctccttcaccacttatcctgtcccttgactgtgaatacttgggatgtcacatttcagttactcataattccatgtcctttttctgttggctgctaaagcctaaatcctttgagatcaaggatcttgaaatgccctatgctcctgatgtcttaagtggtactaaagcttccagcttaggggtgtgattgtgtgtctgtcccagtgagggtgggggagtagaagacaagtttggcttgggtctatagacatgacaccccacaagggacagagttgcttggtttctgataaagccaggcagagttgttttccaagttggattttctgtggccagtagaattgctgttacttggcaaatgaagaaggcttcaggcctaaacaatcagagtttaaatctcagccctgtcattaaccagagaagtggcaaatgagctaagctttctaaaccactgtttccttatatctaaaagatcagagaaggagatgagagtctgggcacacatgtaagatacttgagaagtataaatgatagggggaaatgaatctcaaacgagcctacatcagagctccctgaaggatatgaaggaactccaaccaagagtttgggattgggtaggtctggggtgaggtctagtaatgtgtattcctactaaggttacacatgctgcttccgataattagttatggagtcgcacttaggggactctgatggttcctgatactatcacactctagcaaacctcaacatgaggacttaaagtgctggatttgtgaagagaggtaaagccccccccccccagttagtatggattaggaagtccctcacacatatacgcctccaaagcagatgaagtctgtgactttctggtagagagaaaggcacatgtaagtgagaaacatgaaactaaatgctagaacgttatgacacatgttagacatgggcacagagctgatgttattgtctttctgcttaaaagcaatgccatgaagccagagatagttcagttgtctgtctgtgtgctgccacccatgccaggcagctcagaactgctgcctatgcctctagctccaagggatttgattctctctcctggcatccactaacacccttgtccacacacctacacacacacacacacactcacgtgcacacacacactcactcactcacgcgcacacacacttctttgctggacatctgcagatgctcctgtgcacataggcacccaggcctcttaagagccagctttctcccagctcagttttgtccccaggcaggcctctttacacgttgtcttttagcatgtgtatgtgggagagaatgtgggagaaagaagcacaggaaaacaaatgttcttagaagaactgcaaagaacctctcattagagaagcaaattaaaatagttcagtccctaggctattttctttaaatacattgaattacatcagttttttgatagaagactaaactatcttcttttttaaaaaaagaaagaaatgtgttgtatttcacttattctgtgagaattataaagaaaagacactctcaaatattactttctttgccactaagaacgtttttttggattaaaaaatccaatatatacctgagagattattttaaaatcttcagtatactagacttactgaaatcaagtatcaccttaatttcattagttttttctgatctccttctacactctgacttctaccctccttccaccttctgagaaagctcagctggtttcctctaacccaaaatttgttttccacatgtaaggtgccattgagctgagctcctacaaatgggattgttgactccatttttagcagcaaaaacgcatacatatcagacatatcaggtgctttgcttttctatgaaaagcttgctggctttgaactctataggaacatcaggatctgggggatgtatttaatcatttggttttcctcacaggtaccaaatataagctgagccatgtttcagagtaattaactctgaatgacaagggcagtctcagccttaaatggcgattggagtgaggttctttgtcttcataatctgggattatttcagaccacctctctctgtgaattatgtaatgtctgctaaaaagagcagagggatggataatcagagaggaggcagagtagaaaagctctcggtgttacctgaaagtgctgtgtttcttgtaagcaccccacccccagatccaacagatcaggactttcacatttacaaggaggctatttattgatttcacaattcagtcaaggaatagggataggattttaatcttagcaactcaaatatgcctgttgttttaggtcaaagtggttatgttagtaccactgcaaagtgcccatactctcttattaccaatcacccaattgtctgtgccagttaatttcattgtaaaggtatatgtgacagagcaaatggcaggccttttctcatgcaaagagtaaacactcgagagttttgactaccttgactcaaggttctgtgttcactatctcaactgtgacatctggcgacctaatccacacactcagctcctgccagagtttatttctctgtctgaaaacaatggtctgatagggcaagacaatcgccctcagtgtttctgtacctgatttacacactcactcaggctctaggggctactgacattcctcatctcatggctcctgctaccctagaggtgttaatctgcatggaattcatcctaagcttagcatctctctgacatcccctgtctcacaggtggagaaaatgtgtttctttgaaagggttcgtataattagactaggacctctgggacgatgaatgaaaaggtcaaaccaacctgcaatcatgagaaatttgtcatttttacagctgtgtctatctacttactcatttgcatacttattgtcttaaccttgatgtttaagtcttcaactgtgaataagagacatttatcccttacccttatagaaccttaacttgatacagacatgtaatttggtgtttaaagaagcaagtaaaagaacctgatacgaatgatgtgataggcagaattacaagagagacccttaatgacccctttccttacacagctcctctgctctgcttggcagtaaaacttgtaaatataagctattaattgcttgagtatgttcagttttatggcacaagagaaatcgtcccagaggtcctagtctaattatataaaccctttcaaagaaacacattttctccacctgtgagacaggggatgtctgagagatgctaagcttaggatgaattccatgcagattaacacctctagggtagcaggagccacaagatgaggaatgtcagtagcctctagatcctgagtgggtgtgtcctccggttgatagacacttcatagtgtaacaaactgaactcctctcagaactgaatgaacttggaagtgaagtcttccaaagtaagagtcagtccaagttatatccccttgaattcagcattgtcagataattcccagttaaatcctacacacacaaaaggataagctgaattgctaacctctcagtctctatgagcacatatgtcatcataagaagggtctctgcatatttaataaagctgagtcattagaatacagccctcagttctatgagtgatatctttgtgagaagtcagattgtcacacagacatgagcagggttattgaatgaaaacactgagacacagacacaggggcatatgtgaaggtggagactgggattggacctatgctgctataagaccaatgtatgaggctactgaattctgagaaaggcaatggaggttatttttagagactctgtaggtagaatgtgttggtggtataatggtgactttagccaccttcctcgagtacatgcagaagaaattcctgtcaggacctctaatttggacttcaaatctccacaattcaaggagactacatttctgttactaagcaacctagtttgtggttctttgtttcagctatctcagatactaacattgactatcaaatgcatggtcccgtggaattcacccaaacctcttccatcagaactagaaccaagtagatgccgatctaagtcactaatattagggtatttgtcatgtggcaacgcagaacataacatgggagagtttgagaagttgtgagaagggggtgtttgagatgatacagacgaacactagtcacctaacagggaagaagaatgtggagatggttccaaactgaaaattacatttgtaggattcctatggcagcagagagacagccatgttcacaaaattcaactattctggattttacccttcaaatggtactgctttcaaggccagacctacacccggtgccagcaatccacagccatccgctgttcttataaagctcatattttagtaggagacattcaaatacatggatgaagagacaattacattttattagatgggctgtgaagggattcatgtggaactgagacagaaaaccatggaatggatgggatatcgaacacgaagcaaggagagagtaatgagtctgagggaaggcaatgtagctgctatgatcctttccttctagattttgagaaggcttgtctgtcatttttttacaaaaatgcatagtagccacgattttccaataatttcaacacactgtataatagcgctttcttggttgaagccagcacagaaaattctagactaacttaatacaggattatatttctgggatgttaattccagcctgttcactgtaccatccacactacagacagccattctctaactccagtctatgtgtgtgtgcacatgtgtgtgtatgcacatgtaaacttcagggaatcctaagaccacctcttttcagtgattcattgaaagcactcacagcagaaattcacactaaaataagcacaggaaaatcatgaggagtctaggagagtccattgacagctttcttgtattctcccacagaactcacaagacattacttactttcttcagagacagtgtgtgactttcatgtagaatatggctaagcagagatcacaagtgcctttatccacagcagtggtcctcgacctcaagatgtagactatttcctccactctaccaagttgctacccacttcttcacagatggcctctagttatctacccatgccatctcttaaagccaatcaccctgcttacctctttcaccaaggcttcattttagggatggaaaaggtaactcagttggaaacatgcttgacactcaaacatgaagacctaagtttaatcaccaaaacccacatgaaaaagctggtcatggtatcattctttgtgatcttggtgttgaggaaaagaagacagacagccttgtgcttgctggctagccagtgtaattagagaactccagatcagtgagagatacatcttaaaaaacaaattgtatagtgcctgaagaacaacatgcaaagttgacctctgatctccacaaccccacacatgtactcacatgaacatgcgtgcacacacacatgtatttatgtggacacacacaaacacacacacagacaaaacacttgtctaaaatttatgcaaaatgtccatatgctcttgaagtgccagtatgctgtttgtgtcagcaatttgtttcctttcctttggcccttaaatcatataattatttgattgtgactataatacaatttatgtgttctgcttctggtagacatttgaactgtttcaagcttaccttgatgtaataaagttactatgtgtgttcttattcacatttcttgtggacaggtttaaatacaatggatttcactgtgacattcttatatgtgagcataacatgcattggtctggatcatctcctcattatccttccatatcctccctaggtctcccaatgcccttcttttgtaatggctcccattctttttttatggatgtgtgtgtgtgtgtgtgtgtgtgtgtgtgtgtgtgtgtgtgtgtgtctgtgtgtgttgtgtgtgtgtgtgtgtgtgcaagcatatgtatgtgcattttgtgcctgcagaggtcagaggatgatgtcatgtgtccagttcttccattctttacctcattaccttgaaacagcctctcaatgaaggctggtatctagtaccctggtgtactggctagttttgtgtcaacttgacacagctggagttaccacagagaaaggagcttcagttgaggaaatgcctccatgagatccagctgtaaggcattttctcaattagtgatcaagggggaaaggccccttgtgggtgggaccatctctgggctggtagtcttggttcgataagagagcaggctgagcaagccaggagaagcaagccagtaaggaacatccctccatggcttctgcatcagctcctgctccctgccctgtatgagttccagtaatgacttcctttggtgatgaacagcaacatggaagtgtaagccaaataaaccctttcctccccaacttgcttcttggtcatgatgtttgtgcaggaatagaaaccctgactaagacacctggtgaatttctgtctccttcctcaaagagtaccattgctataggcatgtatgaaaacacactagactcaatacatgggtgaaacagttttgaactctgatccccatgtttgtgcagaaattgttaataaccactgagtcatttcctgagcccctcatctatttttttctttatttcatctgtgaggaaaaaagccacataatactttttattttgagtctggctggcttaaaatgatgatttctacttctgtctttttctgggaaatggtatttcctcctcctttatgcctgtatgatttcatctattgtgtatatggatgagattttctttatccacatcactggtgggctcctacaatccttctatgacttgacttttatgaagcaccatgataaatacaagcgtatttctgtggtgtgatgcttttacctcttcttttatcatgaaacaactaaactgtataatattttctatggaatttccatactgatgtccacagtggctacactaatttacaattctaccattgtcgagtatattaaaagttccttccccattctcatctttgccagcatttgatggatatttggtgatagtcatcttaaatagttttgatttcaacccggatctttatcatttatttctaccctctgggtgttgtgctgactggttcttactggttcttttctaagactttgagctctatcatgaaagaaataatcaaaatctctcttatttttcatagcagtcactaatagctctgatcaagttatataaacttggtcttttaattgtgtcagagaggtcttctgaagtttagaagacattctaagaactgccttattgtatcttgctgattctgttgattccatgttcaccttttttcaggaattttaagctccctttatttccttaaatacttccatcattcaatagttcattattaagtcagagatagtattatatgcttcttatcctggcacttgaagggataaataatgaagattaccatgaatttgaggtattccggatctatggagcaagtactgaccagcctaggctatagactgagacattgtcacaaagaaaaaaaaaagaaagataaaaagaaataattattgttagtgctgttaatttgtggtttcatcccattttgatctaataagatacgagaaattactccattcttttgcatttgctaagaactgttttaatgatacacaacatgatgtgttttagacaaaattccataagatactgaaaagaatcatttattctatagtagttgaggtatatattttatgatggtctgaaatccacttgtttatgctatagtttagctctaaattttgttttatgtgtctggtttagattacctctacaccagaaaaaatatggtattgacgttacttgctattgttaaatagggaaataggtattattcggtctttctgtgtccagttgtgcttgttttatatgattgaatgcaccaatatttacctatatatgtatttataatcctatcttttgatttgctatttcatctaccaatatgtaatgaccatttttaaaaggtctattctgatctacatagatggaaatgtactttgtcatatatgagtagacctttcatgtttgattctgaattccatttgcttggaatataatttcccattccattactttcagtctatgtttgtcttttctggtgaggtatgtttcttgcaggcagcaaatagtaaatctcaatttttgattcagtaagcctgcctgtgacaaaatttgaaaattaacatttatattcagggtcataatgggaagctgtacctattactgtcattttcttttctgtatataatgttctgttctttcctaattcattatttgattttctagtgagatttattgtttcctctgctttcctagctgtgaggacttattcttctgtataatcttttatcttctacaataattattaatcactatttgccttagtttttgcttatcttgaaagatttttatctttcttttgactctgaagaacaactttatcaaattacagtaacctaggttgacagttacttcctttcagagataaaaatacatctctccaagatccccaggcctttaaaaattctgagaaatctactggtatcctaatggctttggcattataagtcagttggtccattgtattctttgtattctgacattaagtgtaatatgatgttgagaggttgtggttatgtctgtttgggttctaaagaccttctgtatctaaatggccacgtctttaccagtctttcaggtgctgctgaagaaattttttatgtctttagtctgtacctcagcaccttcttcatggaaagttatataaacttggtcttttaattgtgtcagagaggtcttgcatggtctgttcataagtgtgttcttaagttcttattcttttatctttattataggcttaatgtttcacttcatcagtgttgtcttcagttccttaaaatgatttcttctacctgattcactcaatggaaatagtttaagtctggaactgattggaatggctttcaaataagatactatggaatcagacttcctttgagtaaagtttgtatctaacatataagctcaaagaatccttagaaacatcttgacatgaagctcttacatatttttggatcacaggtcccagtgtgaaactcacgtgaagaatgagcaacaaactcttctagaacatctagaaccagggacatactgttctatgtttttaattgcctataagcatgattttctgacacctagtttctgcatgaaattggaggtgttctaggtcccaaacatctttctctgagattatcagtcttaaaaaaaaaaaaaaaaacaagctgcacccttttctaggtctctgatttaaattttactgcatataatggtcacatagatttcttcactgtggccaccctgaaatacaagataggtgctggcaggaacttgtgacagtacttggctatacattatgagaagggaaaatgtattagtgacttgtatataccaaggaaacacatctgtgtgtaatcctgtcaagatggcatctcaatatagtgttactgttttgatgttgtttgctagagcacttggcaagcaacaacatactcaccaatcaaggttagctgggtgcagactgtatttctgttcctcatctgtttataccacattcttgcccgtgtctcttcctttctgcctcctgttactgcttccttctgtcctgctgcctggccacagtaggctcagcactgaaatactattttattctcttttcagataaccagtgtgagtctttcctagtctctgtccatactccttcagtgcaaccctttagtcatccaccatggggagatactgatttctagctattttgatttccaggtgctgagaagccaaaagaaaaaaaaaatctaatctatcatcttatccgtccactagagctcctccaacctctacatgtgcactgtgacataaatatgcacaagcatgacacatgtttatttatacaaacacacacacacacacacacacacacacacacacacaccatttatttcccattaacaaatagggcagggtaaagtgttatcttttaatataaacagagtgtaatctcccaagccattatgcaaggtggttctacatttgcatgttctagaagtgtttgagagatccggttcagtcacaaactctccagcattggacatttgcctttctcagtttctcctgtgtctgtgcagcaatacctcataatagtttcacattcattttcctaatggccaagatgaacatgcttgttgcccttcatacatctccccagtaaggtgctaagtggtctgcctcaccttgtgctcctatcagaataagctgccacagacccatccagtcatggaaaaaaacaagaaaacaaagaaggcattagtatttctccttataagttgactactccaggtgtttgttacagaaatgcaccctgactccggggaccttatcagcctgtgtgtttacttcctcatcttagattatgtcgtgtaattaccctggagtccatgatgggaaaaatacagctagattctttactgcatccccaacagcagtggaacacttcagtggggaagctataggaacgtttggccactcaccagggctgctggtagatctatattttcttgttgctgtggatggaagagattagcaagctgggatcttaagacaagatgctgacatgagaaaaaagcaggagtcacttttcttggtttactcagagaaactgcagtttttacaactattggctggaaaatgtaaagcttacttcataatatcctacaaagagattggcttccacagagacagtgggtcctccttacccagcactgctcggaagcttgctttgtctagccacttgctttttgccttttaagtttctatcaaagggaaaatgatctcttttctccattctagaacaatacatttgttataaatggtcctaagatgtttgtttgtttgtttgtttacctctttctttcctccttcttttccatttcttttcaattgttattttacattggtgacttggttgcatgtctgtatgggtgtgtcagattccctgagacaggaattacagacagttgtgagctgccatgtgggtgctgggaattgaacctgcctttgcttgcttgctttctttctttctttctttctttctttctttctttctttctttctttctttctttctttctttccttattcactttatatccagctcactgtccccctcccagtcacctgctcccacaatcttttcccctcctccttctaatgaatgagtgggaacccccccccccgaatcccccaacctggtcacttcaagtctctgctaagttaggcactttcccactaagccttacaaggcagcccagctagaagaacatctcccacacacaggcaacagcttttgagatagctcttgctccatttgtttgaaacctccatgaataccaagctgcacatttgaccactgagccatctctccaactccttttgttttcttttaaaatcttctgctatggtgtccataggattctcagcagtggctcactgtaatgtaagtcatataagtgagaagcatatttattttgtaaagaaatttgagggtgatcagcaagtggaagataccctttgtctcccaaatatgataatgtccttgggaactgtatccacagcttgtggctggtgtttccctgtgccaaagaggctctggtataggcacagctaagatgggagaggtttttgttactacctatagattatagtacacatgatacttttaaaagattatagtgcacatgatattttaaaatcagccttctggcactctatgccaagattttaaaaggaaggatagaaggaagggagggacggagggacggagggagggagggaggaaccatatatcttcaggccatttacaaaaggcacatagttccagagtgagaaagaagaaggcatttccctttgatagaaacttataaattataagaattctgagcaggaaagggtcagagtttctatcatgcaattggtaatttggagcttattaaaattgcaggagtggtaggtggctcagcagagaaagtgaattccctgagctcaggaattcaaatcactagaccctacactgtgtgggttagcccatattagcaagttctgaataatgcaagagactttagcaaatataatgaaaagtgatctggtacggtttctgatctcatcctcatgcctccatgtgtgcatccatgtatacatccaccacccaaacacttgcacacatataaacaccacacatacacacacatatgcaaattacacacacacacacacacacacacacacacacacaaattccccataggaactgacctgtctttctgcttcaggtgaaacttgacatgagcaattaacaaactacttttggtcttctgtttcccttaccatcaggaagttaatgcaaggcttttggagaggccccatgtctatggtgactgagcagaacattttcatcattactgatccctcctttgtcttcagtcacctgctcacttgaatgacacaggatttgggcctggggagttaagaggagaaggaagaaggcatgggaggaaatgtgcacacacacaggggagtgaggtggcctttgcattagcatttgtttattctgctttttgaggactgcaatacccttacagtaaaaggaaaggtaaagtgaccagtctctgactaaaacaggaggagggagtaaaggactctagcttctctgtgtatccagttgtgttgatgtgaacagtatcagaggaaactgaactgaagaaaatcacacaaacctccaagtgtggaccaaagtcatctgtacccagatgaaagagggggtgacacctgcactccaggagaccctttgcttttctctgtaatttcaccgtaccacatatcacctttatccaggcttttagcaccatagatacattttgcctgccttgaactctgtacgaatgaactaagagtataaggtctcagtgtctagctgctttttctcactgttttttgggttttgtctgcagtgttgtagagaacagcagttgattgttgttctgtgaaccaagttttctactgactggtgtagccttccattgattctattgctgatagatatttcgattgtttttgtagtagggctgttaacagtcacattgcctggatctagtttatgaataactaatttatgaagtgagtatccatctatatgaattatctctatttacctcacacctgtagccccattacttaggaggctggaataggaggatcctgaggtcaagcccaacatagggaatataggcagataactctgcccccaaaccaaaccgaaacaacatgaagaagcaactgtagtctcacaaaagtcaatgaaacaaaaacacagggtttttaaaagccatgtatttttttaaaagtcagggcagaaacatttcaaaagttcctgctagctgaccagtctaaagtaaggacagagaaggggaaggctgtgaggtttatgtttctatggggtcttagtactgagttatgtctttaaaatgttaaaatttgctgagtgattcactccatccactaattgcttagatctttaaattccacaaatagttgaaagagacagaaagtgggactccttgtgctcagtgacagattctctgtggacacagctgatctggagctccgggctatcaccaggaacaatcctcctgcatttacagaatgtggcaggctagttttgacagaattgtacatttgagagccatagtagttttggttctctgtagcttcctactgtaattttttggaaatttataaacccatgcaaagatgtgatgtataggtaagacaaacaaaaatgcacactcatacaaaagagagacagagacagagtatgctttctaaaacataaaatatctcatcaacaactttttatattgatttttttctttcagtgtatgtgtgtgttgttgacatgcatgcatgcccatatgtttgtgcaggtaatgaatgtgtttgagaaagtgtatggagtctataagacaacctaaaatgtcattctttccttagcatctaccttgcctgaaagagagtctctcattggcctgtatgtcacaaagtaggctaggctcactagctggacagccccagggtgcctcctgtgcctcttagggcctaccactatactcttctttgtattaacctgggttctggagaatcaaacaatgtccacacacttacatgacaaatgctttaccaactcagctatcactccagccctgattttattttgaaatgacagtatcgagtatctattgatttagacatattactagactttatctcacctatttcatttgacataattatggaagttgcacaacatttaagtgacagttatgggctgtattacatttctgttatgtgtctagatctgtgtgtcgtcttgctaatactgttcagcttgggaaacagttgtgcctcacaggattgggggaatactgcacatgtgcttcctttcacacctgcccatgattccaccatacatgtgggctttgtttggttataacttttgactgtttctgtgttgtagtttttagtattgtattaatagacatttgttaactgcaaactgtatacccaggtaaaagatgtgttctatggtatggcttcttgatgaaataaaagcactcacatagtttacatatttgttcatttgattaaggtatacagaagttttttattgttttggtaacagaccatgcactggagatttagtcataagcatgacctttggcaggaagtagcttacaaacaaatagaatgaaaagacaagacaagcaagtgagttcaagaaagtgcaggccctgagggacaggagaggcttaatggagtatgactgtaaacacatttgatagatacccttctactgctcttctggtggactttttttaaattcctgaaataagcccatttaatttctaccaggaaatcagcttcaggaagacactagggagacttagcatgcatatgtaaatttagcgtgtgccatggactggactcagtgggttgctcaacccatggggtaccggggcttcggtgttcaggtgagcaaggagtcagaggggtgacaaacagactccaacacaagagagtgttgatctgattgtaatttctcaaagcaagcatcagccttatattacagaaggagacaaggaagttacgtgatacattaaggtcatacaagatatactgaggttacccaatgcaaaataactctttatacaaaacagaggaatgcatacataaaagctaacaggaaccaggcagtgtttaaaactgggataaaaatcaatgtttacaactgggatcaaaagcagccccacctaaggtgagcttaatcttagaagccaggggcaagggcttcatgtccttgccatagttccaattctagtctattgtataatccaccttctccataggccattgtaaattcctatgtatgggagtgactcagctattgttctaagtatactttgtagactagtcctgagatttctagctctattccagtaaattgtaatgcctgatttctttcactctctctctgtcaacactggaggctttcgtatgaatgagcagcattcttacaaaaatcaaagcccaagtttgactcaatgatttcctaggacattggaacactagtggatgttaatctaacttagctatatgtcaaaaatcatcccttagaggcattttaaataaaacaatattgaaggaaagcacacagatctgttcactgactaatgcaaggacaagattggtgctacaggatgccaagtctccaggagactaagtttccatgaaactttttgcctcagaactgcatccaactttttgggcctgtcacgcagtttctactagagtgggtgtgcaagcatgcacatgtaaatcagttgttaaagaagtatccttttgcttgaggccttggatgctttttaaaatgccaggtggagactccagccacttttacaacttagtaacagttccagggttggtttcttaaaggagtctgtgcccttttctcagcttgttcctgttagtgacttccacaaggcgtgtaggactgtcatgtccttgtatgagtcagtgacttcagtcattaaaaagcatcccaagtaagcaaagggctagagatgcacagacatactaggatgataatctggggtggtaggaacacagcaccatgtattattcagtgtatgtggccgagacagttcacactactcatatgctgacttgaaaatgaggctgcacagaccaaaaacagagacttgatgtatgatgaccccttgacattagatctaaaggagcgaaaaatggatttttgtaaactcattatccatctagaaagaattatctctaccgagtgtcaaaatgcacctagaatgggaatatttaaccctaactgggacatctacaacacaatctctacatttaaagattggagaacatcataagaaggggcagaaaaattttaagtgtcagaggaccaggaaatctactatgtgattatgtctcctagaattgatagggaaattatatccctgataattcaacagtatgtcctaatcaagacccaaggaagacatttatagagatgtaggggaaaatttcacagcctggcctctagacaaagaactacagggaattaatgactcgagagagagggaagaggggtagacttccccagggatttctcttattgactgtgcaatactaaatgatccaccataaaaatatgcaaccaacacttaagataaacaataggctgtatttatatatataaaatatgcaatgaaaataattaaagaaaaagaggtgatgaatttaaaaaggagcatgaaggaggtagcatgagagatgttggagggataaataatgtcatattttaattcaaaagatttgaaagtgaaaaggcatctgtattcctattatatcaccatcatgctaacatatctgtagatcaccatcacttgcttgctttggatgattgtaaacagctgaggtcatcatagtaccagaagaaactgtatgcctctttcattgcaattattgcagtacagatctttggccttgcatgacacattttcttagacacttacttctaattgtatagttaatattgcagaggatcacacatacattagtcaggtgttcagagagcaattggaaataatatagaatttcaaatctgtacagatattagtgtctttaaatttagtgtgaagttcaatatggtgtgaagttcaactttgatttaagaaattacttgaatttttaattttagtcagttcatgtcaattatacacagcagatatttccatcttgatatttatatacacatatacaatgtacttcatcatgcttcctcccattatcttttcctaatcattttttctccatgatgttctccctctctgcacaaagcccccaaaccacaaattgtcaaatgatgggaaaaaatataaacttaaaaagcacatcatttttgtgcttttacatctgatttatttcacataatatgatgatctctagttgtataaaatttctagcaatcaacccaggagttgtatacctggaccacatgctctctctactttcagttttgtgaggaccttctgtacttatttttctgtgctgtattaagttacattccagtccctcatatccagtttcttctccaccatttcatcaccatcatttgctgttccttcttaattatggtgactatagaaacatgagtcttttcccagtggtttaaaaatgttgaactttctttttttttattttcatgtgtttattgccaagttgtacctaattttttttaagtatctactcagttcatttatcaaattattaatcagattactgtggagtcacatttttgaacatttctttttttattttggacattcatctgtcaggtgtatagagaaaagactgtaccgtacaccacgggctgtctcttcagttgattattttctttgccataatgaaacttgaattcccaaaatttcatttgtcagttgctgctattgtttctttactattgggtcctttccagaaagattttgcctatgcctgtatcttcttctaacattttcagagttttaggtctcagtgaaggcctttgtccatattgaactgatttttgtagaaggtgagaaaaaatgatctagtttcattcttctaggtgtgagcatccagttttctgaaagcatagttagttcaaatggagatctctcatctgctatatgctgttgatactttgtcaaagatgaggtggccatagttgtgtgggtttctttctggtttattctattctattctatttctactctgcatgcatggctctttttgtgctgtcatcttgatttaattgctatggttctgtagtatagttggaaatttggtattgtggtaccccactcttgttctttatgctcagtattgctttcactattcaggatcttttatattcccatgtaaattttaggattgctctttctagttttgtgcagaataccatttgaaattttgagagagattaaatggaatttatagattgtgtttagtaaaatgctaatccatgagtaaaggaaggtctttccatttttcttattatagaagtcttactactgtagctacatttattcttaaattttgttttgttttgaaacttttaatgaatgacattttgttcatttttattcagcacaatttttgttattggctattggtatatatgaaatctactgcattttataacttgatgatatcagaacttagaattttctggtagaatctttgggattttgtggcggtttgaatatgcttggcccaaggagtggcactattgggaggtgtggccttgttggagtatatgtagccttgtagaggaggtgtgtcattgtgagtgtgggctttaagaccctccttcttgctgcctgaaaatagtcttctcctagcagccttcagatgaagatatagaactctcagctactcctgcaccatgcctacctggacacttctgtgctcctgcctaaataattgtggactgaagctctgagcctgtaatctaccccaattaaatgttgtccttataagagttgccttggtcttggtgtctgttcacagcagttaaaccctagttaagacaggttttgtgtttatttagatgattggttgactggtttgtcatatatttaaggttgttcaggtggctgtgaacctattatagatggtcttgaatttctgaatcttctgtatagcttcccaagtactcagattataggtatttgccatcatacctagtttatgttatagacctctagaaaaagaactgggatctttttctctttgaggtgataattaatttgatgaaattgtgaccctcaggaacaactcagcactggagagcatttttataaagaggtgagtggacctaagtgaagctttgatgggtaggctatgttccagtaacccttgctaatgactttaaaagtctccgagggaggcctgtgggagctattgcactgtactcttgcaaggaaatacctgtcagaaagctatagtcatgactatacagcgtacatggaagccttggtagaaatgctggcttgttgaattttgcttttatttttattttagaaaatggaattggtttataagagaagcgaatgggatatgtggaggaaaaaaaagagaaaagaaaacaattagctaaaaatattaccagcattgtggtgagtttgagatgattcattcaaatggcctttgtatccaacattttaagccatttgtatgattgagtgttagcttttataggagtcttaacgtcattgaaactttgataaaagctaaaagcttgcccagcaccctaaaaattgatcacatgaattaatttctccattttactattccatgggtcctgagtaagtaaagggctgatttataagcaggcgcacagttccaaactataaactattttccataatactagagttgtgcctcccacctcactccaaacacacatcaactacttgggagtctgtttcaggcctttgatttaaagaaggagcaaacacaaaccctcctctgtgtggctctctcctaggtgcaatacagaggaacagaggctctgaaaacttttagagaatggaagaaaccatagtgccatattcagagtaagacattccaggtcatcaagacccccccaagagttcagcacttgtctcagaatacagctgttcatattctgttccttagcatgcagagacactaagttctactacagaatagtgtttcaggagactcatggaagttttggttttgttatcactttggtaagaaatagtcaacatgaagaagttaataagatatgttctatagcagtcctccctgtgtggtagacgtacttggaaaagctgttgcttattaaccaaatttcaacattaaccaacattaataatatcttaatagcataacccttctgacattttctatgttcattatactcaggtagttatatcaggtgttcatctgaataaaatcattggattatttaattgtagatagtattgtcttgtcttttaagggaaagtgaggtctagagtactcagtaaatttgcctatgttactagtctccaaacctatgattttttcatatatttctccagtgcctattagagcaagaaggaacaatagaggaggccactttatattagaaaaattgaggtccctgaaggtagaggctggctaccaccacatatcaacctagccgcagtagtggatactgctcaggaatgtggctgcagttccatttcagaagttacttgcagcgtaacttgcacacataaacagattatatgcaaatttttttatattacatttttttattagggattttccttgtttacattttcaatgctatcccaaaggtcccccatacccacccacccccaatcccctacccacccactccccctttttggccctggcgttcccctgtactggggcatataaagttacatgcaaaatttttaatgaaataaaattgtttaaaaattatttgtagattgtctggctgtgttgtagcaagtataataaaattaaaaaagcagtgtttcttggtaaggttcagttgtatgtgttgacaatgaagatgctgagaatcaattaaagaaatggcacaatgcatttatattctgatgcttgggtcttacttatatgcagctcgcttcacagtcctcacatcatccaccatgcagtttgctcagcgctaagctgtagaatctcattcctcttctcatggatcatcccagtggcattagagagatgaccacttaattaattaatagcctgtaaagatgagatagtgctatgtccctggtacactggtacaggtagatggtatgatacagagttcctatgtactacattaaattgatggaggtaacatttaagctgaaatgtataagataactgagacagttacatgaaaatgagaaagatgagtgttcaaggtatacactcctacaggcaaactctgagattgcttgcttgagacaaagaagaagacaaagatcacatcataggaaaagtcaggatcttggtactgtgaggtttcctggtgctttgagacagagactcattctgttgccataggccgacctaaaacctgtgggcactcccctgagccagaagcatcagtctggattctcttctaagtgcatggatttggagttggctcatatccttggtttagtgatggtgtggacccaaattgggattttgcacatgctaggcaagtactttagcctaggcacagcaggaagccactgggagctttaggcaaggataccagcaggctttgacttttatggtaagcattgctcacagtcatggtatagaggaaggaagaggtgggctccaagggcagcagcatggttgaggagaaataaatccttggttttattttgtctggttggttggttggttggttgattttgtttgttttgttttgttttttaagcattgtattcagcagaatatgaatatggagtcagtgaggggaaaagaaaatgagaatctaaaaataagggttgcctatttcagtttgcaacagaacacagaatagtattgctgactgagatgagagaagacgcttaggtcgaacatgcatttaactgtttgagttgagatagatttgactacacgagccagccagccactccatcagacactgaatcttgagtctaaacctcagtgggatgacaagcctagagatatggttggaagctaactcacataggaagaggtattggatgtggtcaggatggaggagaacacagaaaaagagaaatggtgttgaccatgggagactcaagacagggcctagaactgcccaacatttgacatcaaactgaagaggaagaataaacagggttgctggagaggtaagccagggcactgaggaaccaccaagagaatgaagtgctttgggggctaaaagaagttgtaccaaagaagtcatggctgctgctctcaagtacacataggggtggtgatgtgcctgcagcagtgctctcagccctgttgtggggcctgtggacttggaagtccccagtggaggcagttgagctattgcttttacctggtcctcactgtttttcatccttagcccctgtattagggttttactgctggtaagagataccacggcaactcttatagggacaacatttaattggggctggccaagaggttcagaggttcggtccaatatcatcaagaagcatgccagtgtctaggcagccatgacacaggaggagctaaatgttctgcatcttcatctgaaggctgctgggagagaagtgtttataggcagctagaaggaaagtctcaaatcccaccccacagtgacatacttcctctatcaaggtcacacctcctaatagtggcactccctgggccacacatattcaaacaactacatcccatctaactcattcctctcaaatgactttcagaaatggacaccccacctttcttgtgatgtgatccatgtctacaatgattcttattctaactggaaacactcaggatgataataaacatactcaaaatctccatataagacattgttgttgtctaaaacactatcaggaataacacatataacaccttctaggcaaaaatctcatgtgaaggcatggactcaagaatatgaaacactttgaaatttatagaggctagtgaaaaaatttattgtagcataagtagtctttaaaatcaccacatataaaatctcattggtaaatcaaatactattgaagtgtttcctttcatttttattcatttgtatttttattgtattatactaggtcaccttgggtagtcttcatgcaagtctgtaatgcatatcaagactgctcccctcactcactcgcccctctgtgttcttgtcattcttctttgttccactatactcttacttctacattcctgacatctgaacatacatgacattatgtctcatatggagtaaggactgaaaatgaaagaaaacctgcaatgttcatccttctgagcctggattaacttactttgtatggtctccagttgcatccattgtcctgcaagtaacatcatcttgtttcttgtttttatacttatgtgtgtatttatctgtacctgctacagtgcatatgtgggggtcagaggaaaacttgggggagtaagttgttctgtccttctaatatgtgggttccagggattcaactctggttgtcaggcctggtgacaagtgactttagataaatgttgagccatctcaatggtccaactgcctaattctttatgtctgaaaacagtactctctctctctctctctctctccatacacacacacacacacacacacacacacacacacacacgcgcgcacgcgcgcgtgtgtgtgtgtgtgtgtgtgtgtgtatgtgtgtgtgtgatttttttccattattttgtagatagacaaaagtttcttttttcttttcaaaaggactgagcctactcctatggggaagaatgataaaataaaaatacagtgattagaaatcacataattgtgctagatagaaattaaatgtaaaaaatataaattgctgaatgacatttacccaatgagggaaaatgtcctgatatagaatctgtactgttggtttaaatctggccaacaattgtattcaagacattggtggcatccaaatgctaagatcaatatctgagattcaaatctcttatttcctttcaaaatatgctaagtgtgccatgtattgtatccagtagagttttctgaacagagatgctctaggagtcagccctcccttccctgcctggcagcttcctgccaagctgacagtaacttcctgcatggtagcctttgctgcctggcaagactgactgtatggaagacatttctattccagaaacatattcaacagagttgtgagtcctgatgtgagcaaagacatccttagaatcagcctcattagcatcagaagcaatgtctttcatgccagaaatggctctttctaatgcagtttcatttgttttcttttattgctgtatttggtcaaaactgcaagcaaatgaaaagtgaggtggataaattgtctttggtgtcatttgaggttaacactagttaagttcaactctatattgatctctaaacccagtaaaaggtacagagagtgactagctgtatggcctcccataggttcccctgtctctccgatagtttctgtgattctgagtggcaccaatgggacacagcccacaggagcattgggaggactgagagaagtgcctccaaccagccatttatatgtttgatacactgccatctttcctatttctgctgtgcttcctgtgtaggcatttgcccacattcattttgcacagtggactttcttgagctatttggtctgcaaggcttgtcctccaataatgtcaagaactgtttaaggtaagggtcatactcgcccttcatcagattccttccctcttttatatctgacacaaagcatccagctcctacctttatgaagggactacttttttaaaaatggggagagaggacagctatcaaggatagtgtggtctcctggggctctgaataacagggaacctgtgaccccttttcttggagagacaaggaacagatggcaagtgagaggctgagaaggggaagaagccacacaggacttggggtgtagacatataaatgtcaggcagccgagcctgggctgaggggaagcagagtccgtcttttcttctcaccttctgaaatcaaggtgcttctcatcggctgagcccagtgtgaaagcagtgatcagggatgtccacatttctgaacactgcagtgaagggagctggaaagcaaacctagaggaggcagcattagaatcctgtaagtaaaagcagttgctagacatggcatgggtgctcatatgcacccgtggaaggagacgggaaaacagactgaatcctcccacaaacggctttagcatgtcgcctaaaaaaggttctgccctgtaccaatgtagtgtgaaggtaaggtttagaaacaaatcagcctcagattgaatcatgcttgctttctgactgtgtggtgaggcagttgctgaatcacccagtctcactttcattcttagggaagaaccctcataggttgcttttgttgaataaatgagttgttccatttagaatgtctggcaccaaagaaaacacctaagaaatgttagcatgatcattctctacaggagtgactctcaacagcggcaattttaatgcccctcctccatatcttcggtgcctgtgataactacagcacagaatgtcctgaagtagagaagaagtcctgccctgatttatatttgtatttcaacccttgggcctctgtgtacttgatattgctttatttttaccagtatgtgtacatgtgctcacttgtatgtattatccacatgtgtgcaggtgtagtgcatgtatgtacacacatatgtggaagctggaggaaatctcctgttatcctcaggaatatcattcatctcttttggaatggatactcccattggccaggaacagatactcccattggccaggaacagatactcccattggcctggagcttatcagttaggccagattggctgaccagccatcactcagaacccttctgtctccatccccccagcactggggttacaacagtgtgacaccaatccaagtttctatatgaattctgggattgaaagcctatccttctgctttcatgacaagtgctctattggctgagctaactctcgagctccttgacacttgactccaagatggctaccttttgctaacttccagtaaatatgaggcctttgtctattccatcttcattaaaatacacacacacaaacacacccaggggaagggatgagattagttctttacactttaactctcctttcactatttagaatacaaacacagcatagacttgtagtcactgtgaaatgctataatctgagataccattgcccaatagtgaagcatttatgtcaaatacacattatagatctgcaaagcgacaatgataccaagctatttctaggggcaccttagagccccagggaacagtgttttgggacacattgttatttctgcaactaaactctcgaggtgctttcagaaactcctcaactaggtcagtggaagtaaacattcctttggataagaactgtctttaaacacagtttcaatgagattttgtccttgtgctactcttctgcaccccaggttcagtcccatgaggccaagtgtccttgctcttggcaagagtgacctttcctatacgagctgaagtagcagaataggttgtctatccaacttcaatgtggctctggctcttggttactcatttcatttcctctaacttcaaagaacattgaccctcccatgcatctgttcactcatgtgctgactcatgagtgtgcttgtgaagtgtttcctgtggcttttgtcttaggcaattgcagtctctagcctcatggaactcttgtataaagtcagttgtcaagtaagcaaattgttaagtcctgatttcagcaggttgcatataaaaccagggagccaagacagaagagaccatcacaatagttctttaaactcagagaagtgaatagcagggagaggggaggcttttcaggaaatgactagagaacggaattctaaggagaagggccagctgggcaaagccctgatgcagagaagagaggaatatgatcaaaggatagaactagcaatagaggcttcactggcaagaggatggggtgcgggtaatgggttggggctgaggggtagaaggtgaaggatgcagggctgaagcactcaaagctcttctaaatgcaactgggcaagcagggacagtatttattcatgcttagtttaacttagtgtgttttctataggctgagaacacacctatgtagtcttataactcacttaacatttatatctacctcatgggctaagagctatttatgcccatgaggaagcagagggcctatgaaattgagaaagccactgttacaccactgaacaacaggcatctcagccttctgtgagctgctctttgaaggaaggatttgtaataacactgacctctatgcactacatgcttgtagcaatctctttgggtcaagctttatatcctgtgtgagagattatcaaaatcatgtctgcctgagaactcctgtaatcattctacttcccatagtcatgagtgaccctacaccagtggttttcaaccttcttaattttctgaacctttaatacaattcctcatgttataatgaaccccagccacaaatatattttcattactacttcttaactgtaattttgctactgttatgaattgtaatgtaaatattagtgttttcctatggtcttagggccacccctgtgagaggatcatttgaccctgaatgcgattgcgacccacaggttgtgaactgctgccctacactaatccactacatgttatttcctaagatctcttgctgttggcttccattcataactattatagttctcatctatcttcaagatgatgtttccttcagtcgccacatggtcttcccaacctcaacatattacttaaccagaggagagacacagctcagtacttttgattgtggaagagtaagcatctatgctaagacgagtcagggtatggcagagggcacaaacccctctccatgcttgaggctctctttttttctctctcacatgaccaagagacaccgggagtctggggaataggatctctggatttcagatacaccactggtaatgatctagttggggatagaaatgaatacttccttcatctggatctataatcataggaaagagaagggtggcttgaccctctttagaaactattgagggcaaacagtatggcatactaaaactaacttcagggtcttgagttttcttttttttttttaagatttatttatttattatatgtaagtacactgtagctgtcctcagatactccagaagagggcatcagatttcgttacggatggttgtaagccaccatgtggttgctgggatttgaactcgggacctttggaagagcagtcagtgctcttaaccactgagccatctcaccagccccttgagttttcaagtatgaaagcacctaacattagaagatctgcttagagagtattctagaaacacatgtctattcattcaatgctattcattcaatacatccagcaccaggacttgagtggtgctgttaagtccctgcatctcaatcatattcccatcagctgaagtctcatccacatgagccaatgaatgactcattcaggggaaatgaaccttcactttgtgtcctacacttctaagatggtggtgccaaaagaacctgatggcttgcagtaagaggagcagaagacagcaaagtagaagtgaaaactaatcagggattggaagagccagtgggagtaactctggtagggacagtgaacatgagtaacagcaggtttgaattgaatgtgcagagccagtaagcaagctgatttcatgaaggcatgatgtgcaggcagtatctcaagaaatgcaagaggggctgtattacaggtgtgtgtgtgtctgtaagtgtttgtgtctatgtgtgtggggggcggggagagtgcatgtgtgtgtttcaatctagcttcactacctgctggaccacacacggtaacaccagtctgcagtatagatgaggcttggccacctgtgccctgtgctctggtcatgctgagtcaccctgacggtcatcgtttgccttaatagaatagactgcttccatgtaagtacacttcgaaagacaaggtagcatgattgcttctgttcaactgtaggaattcctctctctaggcaggacagcatcacctggcagcttgggcatgnnnnnnnnnnnnnnnnnnnncactacatgcttgtagcaatctctttgggtcaagctttatatcctgtgtgagagattatcaaaatcatgtctgcctgagaaactgtaatcattctacttcccatagtcatgagtgaccctacaccagtagttttcaaccttcttaattttctgaacctttaatacaattcctcatgttatggtgaaccccagccataaatatattttcattactactccttaactgtaattttgctactgttatgaattgtaatgtaaatatcagtgttttcctatggtcttgtggccaccgctgtgagaggatcatttgaccctgaatgcaattgcgacccacaggttgtgaactgctgccctacactgatccacatgttctttcctaagatctcttgctgttggcttccattcataactattatagttctcatctaccttcaagatggtgtttccttcagtctccacatggtcttcccaacctgaacatattacttaaccagaggagtgacacagctcagtacttttgactgtggaagagtaagcatctatgctaagacgagtcagggtatggcagagggcacaaacccctctccatgcttgaggctctctttttttctctctcacatgaccaagagacactgggagtctggggaataggatctctggatttcagatacaccgctggtaattatctagttggggatagaaatgaatacttccttcatctggatctataatcataggaaagagaagggtggcttgaccctctttagaaactattgagggcaaacagtatggcatactaaaactaacttcagggtcttgatttttcaagtatgaaagcacctaacattagaagatctgcttagagagtattctagaaacacatgtctattcattcaatgctattcattcaatacagccagcaccaggacttgagtggtgctgttaagtccctgccatctcaatcatattcccatcagccgaagtctcatccacatgagccaatgaatgactcattcaggggaaatgaaccttcactttgtgtcctacacttctaagatggtggtgccaaaagaacctgatggcttgcagtaagaggagcagaaaacagcaaagtggaagtgaaaactaatcagggattggaagagccagtgggagtaagtctggtagggacagtgaacatgagtaacagcaggtttgaattgaatgtgcagagccagtaggcaagctgatttcatgaaggcatgatgtgcaggcagtatctcaagaaatgcaagaggggctgtattacaggtgtgtgtgtgtctgtaaatgtttgtgtctatgtggggggggggcggggagagtgcatgtgtgtgtgtttcaatctagcttcactacctgctggaccacacacagtaacaccagtctgcagtatagatgaggcttggccacctgtgccctgtgctctggtcatgctgagtcaccctgacggtcatcgtttgccttaatagaatagactgcttccatgtaagtacacttcgaaagacaaggtagcatgattgcttctgttcaactgtaggaattcctctctctaggcaggacagcatcacctggcagcttgggcatgataggagtgttttactctgtcaaggtcttcattgaggcattgctgagaaatgtaccactcttatcattagcatagtcagcagggcaccaagaaagcaaatgctattcctctcttcttttaatctttcagagttagccaaaatcctaaacataaaaagcagttgtagggcataaattatctgcagctaagctttaagcttatctaaaactcctagaattaatggtatgtactgtgtggattacctaaactttcagattttatagacagtttaaaatactgctaatagagtgtgtgtttaattaagccttagaccattggaatttgtaataaaatgcccattttatagatgaggaaactgaggctcacagtctagaattattcactatgttagtatctgaaggaaccacagcaacctagttttatttcactttgcctctgccccgtggtctatttcaagcctgcttaacaaatacagctaaaatgtgaattcccctgtcaatgaacaaagaagactttgtattaaatacaaaaacaaaaaacaaaagaaagagagagagagagagagagagagagagagagagagagagagagagagaaggagggaggaaggaaggaaggaaggaaggaaggaaggaaggaaggaaggaaggaaggaaggaaggaagagagaaaggaagagagaaaggaagaaagaaagagagaaggaaaaaagaaaatcaatttgaaggcggtaggtgtaaaagcgtttactactaaagtcattaaggaaaatgttttgtaaatgagtttcctgggagagatgtgttaatctttttgttggtgttctggtttgttccaaaccattcagccatttgctgatgtgatgcagacaaaaaaagatgtgaagaaatatattgcacaaacttccagcagtgcatcagacaccacagccatggctgtgaatgctataccttcaaaaccagcagaaagcagtgaagccactcatcttaataaggacaacacaaagctgaaatttgtaacttaaatgtaattctattattttatcattcaagtcaactcatatcaagtgaagaaaattaaatattgtctcagttattttaatttccagtcttctaaatgattctggatggataatacatcattaatataatatagcactatattatttatataatgtatataaacatttaagtatataatactgtatataaaaatgaaatgacagttctcttcaaagggaaacacacaaggattcttatgataacatgaagctgattatgagacagtgaaggatctaagttgttgctcttatagacacacagaagtttgacagtaatgtctaagtattgacagatggcactggacaacatggcagtgagagggacagtgggtacacacatctactttcttgacttcccatgttattgggtcccatggggcaacatgttggagccagactgcaagagcatgcaatgggtggtgacactgagggaacctaaactcagagagtcccagtgttcttaggctctcctccacacctgcccaagccccaccatcctgagccagaaaccctgcagaaagaacttatctcagctttgcaaaccttgcaaggcagtttttcagagcagtgtctgaaattctaggcaggagtgaatgctacctaaaaaccagcaatgtcaatgccaatggtgatggtgatgacagtgatgatatcgatgacagtggtgatggtgatgacagtggtgatggcagtagtgatggtgatgacagtggtgatggcagtagtgatggtgatgacagtggtgatggcagtagtgatggtgatgacagtggtgatggcagtagtgatggtgatgacagtggtgatggcagtagtgatggtgatgacagtggtgatggcagtagtgatggtgatgacagtggtgatggcagtagtgatggtgatgacagtggtgatggcgatggcagtagtgatggtgatgacagtggtgatggcgatggcagtggtgatggcagtagtgatgatgatgatagtggtgatggcagtagtgatggtgatgacagtggtgatggtgatggcagtggtgatggtgatggcagtggtgatggtgatgacagtggtgatggcagtagtgatggtgatgacagtggtgatggtggtgacagtggtgatggtaatgacagtggtgatggtgatgacaatggtgatggtgatgacagtggtgatggcgatggcagtggtgatggctgctgttttgtaagctactgctcttcagacattattgtaaattctttataatctgttttcttccttattacaacagttatagtagaccctatcacctacattcacacataaccatgcttgcgacccagggaacgtaaacaactccccctggggtaacagacacagaaagcagtcatctgtgtgacattgccactgtcatcatccagcgatttgctgtgatttcagacacatgcctgtgtcctgatattaccacactgttttatttacagctaaatatattctactgaggaaaaatgttttaaataaaactgcaagtgaattttgaatgtatctgtaaaggtataatctcttttaaccaagatgccaaggaaagtgcttaattagtgacatagtatttctaagcattatttatttgtttatttactgtctacttttatgttagcagtgtactccttcattgttttctgtgaaccttctacatgaaaggcattgattagctgtacaaatgccaaggactcaagtccttctcacaaagaaatcaaacaaaatcacagggtgtaaagtgcaggtacatggaatccaaaagaacaaaacacagagaggagcaccatccaccaccactgccactgcctctgcctccacctctgcctccacaacaacaacaataacagcaacaacataaaacaacaacagcatgtgctggcaaaggccaatttcctggctatttcttcagggaaacccaacagtaggaactcttttgtgagaaaagctttggactggatgaagagccactgtgcattggtggtttccatggagtgtttctacttccccctccttactcttttccttcttacagaagacaaaaaaaaaaaaaatcatgcaactggtgaaaatgtaaatgtttggagaaaaagaatgagttaagattagaaaatcctacttaattagcattgatcactacatattaaattaattgtaactactattttcataacaactgtttaaacagattatctgtcacatatttttcaattctagcattttctatatttatttgagatattattcctcagcattaagggacataggcttattaagtagtcttgcttatcaaaactatgctgatgctgaatggctatgaaatattcatgaaaggcatttaagttgaatctgaaattgtttccaatcactgtgaaatcatcacttcagtttaagcaaatgatgtagcattgccattatgcccagggagaaagtctctgtttaaagttatctatatctatatctttttctatatctatatttatatctttgcatgtctttaaaagtcggttaacacactatttgtcttcttatgtcactctttcatggctttcatcattctttgtcttgtcctagtaaagacagctgccctacagaggctgcagagaatatactcaggctgcttcttaaatgagcaaagtactcaacacctactccaaagaatccattctcctgcatattaccatatgtagctcccactgtacacaaggccaagttcaggattgttagcccatgactcaggctgtgatcttcatactgttccttcctcaaactgagctaaaatttaaccatgtaacatatctgcacttgaccttctcccattcttcctcgagaagccagctcttctttcatctcctttctttaccacccggtattgaccaagagtccctccacatcccacaagaccttgtctaattttctattaaaatcattgttccatttctgtcttccccagtacattaaaatttatacaagggcaagaatatgttttattatctttgtgctccaacatttggtgtttcataggcaatgaataaacatttattgagtgaatgaatgataatctatgaagagttgtagggagaatatcttgtgcattgtatgatgcatcatctgtcaattaaaaaacacatggcctataggaaagtgtagatagaatagaaggcgggagaaggaggaacattagcaggcacagagaactgtgggatagcatcaggcatgggaggaaaagaaaaatactcctgacacacattatgagacaacaaacctcaaaagaagccatttagttttctcttggccatctactgatggccatggggcctagcctttttttaaagatattttctttatttatatttcaaatgttatcctctttcctagtttctcctccgaaaatcccctctcccttcccatctccccctgctcgccaacccacccactcccacttcctggccctggcattcccctatattggggcatagaacctttacaggaccaagggcctctcttcccactgatgaccgactaggccatcctctgctacatatgcagctggagccatgagttcctccatgtgtactctttggttggtggtttagaccctgggagctctgggggtactggttagttcatattgctgttcctcctatggggctgctaaccgcttcagctccttgggtcctttctctagctcattcattggggatcctgtgctcaaaccaatggtagtctgcgaggatccatctctgtctttgtcaggcactagtggagcctctctggagacagctatagcaggcttctgtcagcaagcacttgttggcatccacaaaagtgtctgagttatttcttgggtgattgtgaaatgcatgcccaggtacacacacacacacacacacacacacacacacacacacacacacacttaaaaaaaatatttagtgaaaagaatccagctagaaaaataccccaagttctttcacctaccttgcccaatctctaattgtctgtctgtcttctctgggtccatgaagagatctcctgaaaatgtaggctgcccttcagtgagtaccaaaagtaccaccaatcctacgtctccagtgcccagatcatgctaatgatgccaggtcatcaaccatgtttcttcagctgtgccacccaatgctagatctgaagcccccacatgtagctgtttagaccgaagcaaaataacaggaaaagccagttcttcctgctcattaatcacatgctaagtgctcagcagcctcctgtcgtgcttgttcatcatcttggagagtacagttggagagtgtgtttatccctgcagaatgtcccactggaccgtgctgctgtgaaaattcatttagtggaaaagtaggatctgcttatggagctgtgtccccattcagccttacctcaatgacccggaaatgacctctactctaatcatctctcacttgatcctgtgggcacccatctatacagaggatacccagatctttagggagctgccatcttgcacaaagaagacgaatgaatacactttcttttatgttttacttagagggagccaatgtagaaaatataacatgtagtaagtttgtcaggtctatgacaaaacacaataactttattgaaaatgttttaattatgctcaaaaaaatatctgcaaaccttgaactctctagcccctttcatttgtaagtatgttttcccatgtttccatgatcatcttggggtccatgatcaatgacaacagagtggtcatgacatccagtttccagatgcataagagaattcaaactattaacaaaagatgaaaacagaaagaggagatcatctttgtacttggtgcctgagttggagctggtcctccaagcacagtgagtctatgctctgtccccattggactgtccatactgtgtgcaacatacaaatcactggcacgtcggacttctatctctgcaccaggtcagggatatacatgccctcattattctaaaagaagttgacatggatgtttaagactcagagaacattgtctgcatgaaaacaaataggttttcaacactggcagatgcgtttgccattatgtcttactcatcataagttttagaaagtacaaagtaaaggataaagtctcagttacccacagtggattctctgagatactgatgtgtgcttagcaattgtgtggacttctgattttttttttctatgtatgatttacaaaaatctatgactttttttgcaaagtcactaatgttttcctggattctttcataatgttcaaaatcctttctaatggcaaaagtagtattcctttgtatggtgattttaaaatgaagccatttgaatagcatttgttcagcactttattgtaaacaactctgaatattattataggtaggaaaaagtgataagtctttatcataaattcccaaggtggaacactcaaatgttttacaagatttttagccttttgatgcaaatttctgatcttttctgcaaaggccttgtatgctgtatctacaagggaagtttataagaattgatgccctgcaactgtggactctggctgttctatccaaagctctagccacagaagctataccaaaccccaactagggcttccctggaagggaaggtggtaaggagatgctcctaagatatttgtaaaccttcttcgtggtcaaccaatgctaaatctgttcaaaaacatacaacctatgggaggaatatatatattccttaatatatatatgtatatatatatatatatatatatatatatatatatatatatatacacacacacacacacacacacacacacacacacatgtgtatattttatgtggtggtgtaatgtgatagatttagttttctgggtctagaatctttatttttcttttttggcacaacgtgtttgatagtcatctagtttgtcgtccaaatgagtacctgacttttttctttccaccatattccattttccctaattgatttgtccactaccagtgatagatgtggagtggttctactatggagctattaacataagctggtttgaaaagaaactggcttcagattgcaacttcgagatagtcttttggggtatgtgactttgaggataatatcctgtctcccgaagtcttggtgtcttcactcaggacagccatgactgtttctcagggttgtcaagaaaagccttaagataattcgtgtggagctcttggcagcagtcctagctcaatgcccaatgaggctagagctgcagcagcagcagtggttggaagatggatttgtgcacagtttttgatgctttgactttatggactcagctctctgtccaaagccagagagataagtgcatccaatcttgctgggcttgccactcagggaaatctttcagctgactttatggaactcattttccactaagagaaaatgagacccaagttacacagcaaatacatctggcatgtcagaggcccagcaagaatgctgaagctcagcctctagtgttcccatctcaaagggtcaggttgtttcctgaagaccagatggtactgctgctgaccacagctatctccatgatagtcatgatgggagcttgagttacatgagtgcagtttgaggccatcagcatttacatgtgtgatctcattctcatagcaaccatggccacagataccattcttctgagaagataggtttatgttctaagaatcagctgagtgggatctgcaaagatgtgattgagaagcagatgtctctaacatagacctctgcttttctccacctctgtctctcagcggaagccagaagaagatttcctgacaaatctccactatcacagcagccataatcacattagatccaaaactctgcttcctatatatggtcttccttaaggttcctgaagtgtgccctaagccactaggcttttgtatttgaagtttatcagagtttatttttaaagtcctcttcggaaaatacccaaataaagtcctgctttctattcataagcaattatttttgcctgtgctcattagttctctgatccagcatacggtgaactacaaaacaacgggttattcaaagacaccatctcattgaaagacatgagccatgtcgtcttttaggagacacactgtctacagaaagcctccagcaataagccatatcatggaatcagaagctaaaacactgactacatatgcaatgcttttctgaatcttaaaatgtgactgtgtaggtgataagtcctgaaaatacatgggtgagaggcaaagatcttatttaagtagacattgggaatccaagcaggtttccctgcctcaatggcttcctagacatccccacagtgaactttccactttgctgaacttcttagctcatttattgtgatataagtacagtttaatcaaagaggctaaggtcgaaatcctcttctccctgtctatacttccagtgccccatcatggtagcctggagactgagctcaggtcctcatgcttgtgcagcaagcactttatgactgacacgtctcccagacttagaaacggaagcttcaagccattgtaaactgaggagagctgttgagggagactgctgagatttaatgagcagagatatcactgctgtgaactgggttaattcgatcgcttggtaagaaagctatcttagatcatcagcaataacagtatcattccaggtctcagtgtatgggttcaagtaataatgtatttgccttataacatcaaaatcagagtttgatccctagaacctacaccaaaacaacaggcatcatggtgcatacttgtaactcagagccagggaagcagaaacagaatggtggagtcccaaggtcctgccagtctagtctacttgacaaagaaagatgccctgcttcagaggacgagtttgtcattcctcaggatggcaccccaggcaaacccacagcctgtatgtgcatgcacatgggtttgtgtgtggatatgtacacatatagagacccagacatacagacatacacacacaggggtggggaaggacaaagggagggaaaggagaggagaggagaggagaggagaggagaggagaggagaggagaggagaggagaggagaggagagcagaggagaggagaggagaggagaggagaggagaggagaggaagcacatgaatgatgcaaaagacaaaaaacacaaagttgtgtggacaaggaggtgtcaaacatttgagaggaattgggggaggagtgaaacatggtaaatatatttcataaaaatgttttcaataaaaaatgatggatataaatgtaagactcagggcatatagcattaaaaaagcagttcccaaactgcatcagttgtatgcaaattaaatgtatggtattaagagactaaggctcagagtaatgcagtggggacatttatttgttaccattaaacctgataccagtgttcccagccttagtcccatctactattactccttgagtaagctaacatgcttccttgaaagaaaaaaaaaaaaacaaaaaacaaaaaaacaaaagaacaaaaaccctgcttctgaattaaggaaatagctgccagcctgagtgctcatcttgctccctgtctgtctcaacatatctcctgtgcccctctctagataattaagtctcagaaatagcatcattatatccttatgcatttttaattcttccatttacttatttattcatcatgagtatatgtatgcacgtgtgactgtgtatgtgttgcacacacaaacatgccagagcatgtatgtggtaagttagatgacagcagttctctcattccactttgtagggcccaggaatcgattttatggcatcatgaattagcaagtgtctttacccactgagtcatcttgccaaccctcatagagtttccagaatagaagaacctgtttttcagacacagctcagggtaccgtttttgcatctgaagttagtagtttcttagtatcatatagtcagtcaatttaccacagagatttttctaattgattcactaagactaaaaactaacttttcaaacaaggtatatgtattataatgtattgccatggctctctgaatttaggggttaaggtagggtcacatagttcaggttcgcctcaaaattgctgtatagctgaggatgaccgtgaacatctgatcctccagctctaggtgagttctgagacacataggcatgctccaccccatgttgtttgttagtactgggatggaacccagggcttggtgttggctcagcttcctctcctcttgttttatgcttgctctcagatgtttacagggttgatgcttctgttattgattgggagtgttttccagtctggtgtggctgcttttgataccttggcattatctactatggttgtctcattccctagaaattgatgttgggagtcagagatcgacacatctggatatgattctcaggggagcagccccagatgcaactctgtactataccagccaccagaagttatgccttttcattcttgaaagacattactaactactgcacttgcctgcattcagtattttgataggcattgcacatgggtgaatgtctactctctctttcacatgggttagctggagacaacttaaaaagataaagatttttttctcatcaagtatttataggcagaatcactcacacaaaacaaactcactgtttctcttttattaatataaacaagctactacgttagttccttcacctccttttaaaatgatctgttttgttttctttctttggatgtaatattttttattttattttaattaggtattttcttcatttacattaccaatgctatcccaaaagacccacatatcctacccacccccactcccacttcttggcactggtattcccatgtactgaggcaaataaagtttgcaagaccactgggcctctctttccactaatggcctactaggccatcttctaatacatatgcagctagagacacaagctctgggggggggggagggtactgggtatttcatattgttgttccacctatagggttgcagacccctttagctccttgggtactttctctagctcctccattgggggccctatgatctatccaatagctgactgtgagcattcacttctgtatttgctatgcccaggcatagcctcacaagagacagctatatcagggtcctttcagcaaaatcttccaagtatatgcaatgatgtcagcgtttggaggctaattatgggatggatccccaggtatggcagtctctagatggcccattctttcatctcagctccaaactttgtctctgtaactccttcaatgggtattttgatcccgattctaagaaggggcaaagtgtccacactttggtcttcattcttcttgagtttcatgtgttttgcaaattgtatcttatatcttgggtattctaagtttctgggctaatatccacttatcagtgagtacatatcatgtgagttcttttgtgattgggttacctcaattcaggaagatgccctccaggtctatccatttgcttaggaatttcataaattcatttttttaatagctgagtagtattccattgtgtaaatgtaccacattttctgtatccattcctctcttgagggacatctggtttctttccagcttctggctattataaataaggctgctatgaacatagtggagcatgtgtccttcttaccagttggaacgtcttctggatatatgcgaattagaggtattgcgggatcctcctgtagtaatatgtccaattttctgaggaacaccaaggcttatttccagagtggctgtacaagcttgcaatcccaccaacaatggaggagtgttcctctttctccacatcctcgccagcatctgctgtcactagaatttttgatcttagccgttctgactggtgtgaggtggaatctcagggttgttttgatttgcatttccctgatgattgaggatgctgaaaattttttcaggtgcttctcagccattccgtattcctcaggtgagaattctttgtttagctctgagccccatttttaatggggttatttgattttctggagtccaccttcttgagttctttatatatattggatattactcccctatctgatttaggataggtaaagatcctttcccaatctgttcgtggcctttttgtcttattgatagtgtcttttgccttacagaagctttgcaattttaggaggtcccatttgttgattctcggtcttacagcacaagccattgctgttctattcaggaatttttctccagtgccccatattttcaaggcttttccccactttctcctctataagtttcactgtctctggttttatgtggggttacttcatccacttagatttgaccttagtacaaggagataggaatggatcaattctcattcttctacatgataactgccagttgtgccagcaccatttgttgaaaatgctgtcttttttccactggatggttttagctcccttgtcaaacatcaagcgaccataggtgtgtgggttcatttctgggtcttcaattctattccattggtctacttttctgtctgtataccagtaccatgcagtttttatcacaattgctctgtagtaaagctttaggtcaggcatggtgattccaccagaggttcttttatccttgagaagactttttgctatcctaggttttttgttattccagatgaatttgcagatttctctttctaattctttgaagaattgagttggaattttgatggggattgcattgagtctgtagattgcatttggcaagatagtcattttttagtatattgatcctgcccattcatgagcatgggagatctttccatcttctgagatcttctttaatttctttcttcagagatttgaagttcttatcatacagatctttcacttccatagtgagagtcacgacaaggtattttatattatttgtgactattgagaagggtgttgtttccttaatttctctctcagcctgtttatcctctgtgtagagaaaggccattgacttgtttgagttaattttatatccagctacttcactgaagccgtttatcaggtttaggagttctctggtggaatttttagggtcacttatatatactataatatcatctgcaaaaagtgatattttgacttcttcctttccaatttgtatcccctggatctctttttgttgtcaaattgctctgactaggacttcaagcactaagatgaataggtaggaagaaagtgggcagcattgtctagtccctgattttagtgggattgcttccagcttctcaccatttactttgatgttggctactggtttgctgttgattgctttttatcatgtttatgtatgagccttgaattcctgatcattccaagacttttatcatgaatggggattggattgtgtcaaatgctttctccgcatctaacgagatgatcatgtggttttttgtctttgagtttgtttatataatggattatgttgatggaattttgtatattaaaccatccctgcatctctgaaatgaaacctacttggtcaggatgaatgattgttttgatgtgttcttggattcgggtagcgagaattttattgagtattttttcatcaatattcatgagggaaattggtctgaagttctctatctttgttgggtctttctctggtttaggtatcagagtaattgtggattcatagaatgaattgggtagagtaccttctgcttctattttgtggaaagtttgtaaagaactggaattagatcttctttgaaggcctgatagaactctgcactaaacccatctggtcctgggcttttttttggttgggagattattaatgactgcttctatttctttaggagatataggactgtttagatcattaacctgatcctgatttaactttggtacctggtatctgtctagaaatttgcccatttcatccaggttttccagttttgttgagtatagccttttgtagaaggatctgattgtgttttggatttcttcaggatctgttgttatgtttcccttttcatttctgattttgttaattagaatgctgtccctgtgccctctactgagtctagcaaagggtttatctatcttgttgattttcttaaagaaccagctcctcgtttggttgattctttgaatagttcttcttgtttccacttagttgatttcgcccctgagtttgattatttcctgcagtctactcctcttgggtgaatttgcttccttttcttctagagcttttaggtgtgttgtcaagctgctagtgtgtgctctctctagtttctttttggaggcgctcagagctatgagttttcctcttagaaatgctttcattgtgtcccataagtttgtgtatgttgtgacttcattttcattaaactccaaaaagtctttaatttctttctttattccttccttgaccaaggtattattgagactagtgtttttcagtttccatgtgaatgttgactttccattatttatgttgttattgaagatcagccttagtccatggtgatctgataggatgcatggcacaatctcaatatttttgtatctgttcaggcctgttttgtgacctattatatgttcaattttggaaaaggtaccatgaggtgctgagaagaaggtatacccttttgttttgggatataattttctgtagatatctgctaaatccatttgtttcacaacttctgttagtgcccacgtgtctctatttaatttctgtttccaggatccgttcattgatgagagtggggtgttgatgtctcccactattattgtgtgaggtgcaatgnnnnnnnnnnnnnnnnnnnnnnnnnnnnnnnnnnnnnnnnnnnnnnnnnnnnnnnnnnnnnnnnnnnnnnnnnnnnnnnnnnnnnnnnnnnnnnnnnnnnnnnnnnnnnnnnnnnnnnnnnnnnnnnnnnnnnnntttctttaatgaaatgtggatgcccttgcatttggagcatagatattcagaattgagagttccatttggatgattttaccctttggtgaatatgaaatgtccctccttgtcttttttgagaactttggggttggaagtctattttattcgatgttagaatggctactccagcttgtttcttcagaccatttgcttggaaaattgttttccagcctttcactctgatgtagtgtctgtctttttccctgagatgggtttcctgtaagcagcaaaatgttgggtcctgtttgtgtagccagtctgttagtctatgtctttttattggggaatttagtccattggtattaagagatattaaggaaaagtagttgttgcttcctattatttttgttgttagagttggcattctgttcttgtggctgtcttctttcaggtttgttgaaggattactttcttgctttttctagggcatggtttccgtccttgtattggttttcttctgttatcatcctttgaagggctggattcatggaaagataatgtgtgaatttggttttgtcttggaatattttgttttctccatctatggtaattgaaagtttggctgagtatagtagcctgggctggcatttgtgttctcttagtgtctgtataacatctgtccaggatcttctggctctcatagtctctggtgaaaaatctggtgtcattctgataggcctgcctttatatgttacttgacctttctcccttactgcttttaatattctatctttatttagtgcatttgttgttctgattattatgtgtcaggaggcatttcttttcaggtccagtctatttggagttctatagggttcttgtatgttcatgggcatctgtttctttaagttagggaagttttctgctataattttgttgaagatatttgctggccctttaatttgaaaatcttcattatcatctactcctattatctgtcggtttgctcttttcattgtgtcctggatttcctggatgttttgaggtaggatctttttgcattttgcattttttttattgttgtgctgatgttctctatggaatcttctgcacctgagattctctcttccatctcttgtcttctgttgctgatgctcgcatctatggttccagatttctttcctagggtttctatcttcagggttgcctcattttgggttttctttattgtgtctacttccctttttaggtctagtatggttttgttcatttccattacctgtttggatgtgttttcttgtttttctttaaagacttctacctgtttggttgtgttttcctatttttctttaaggacttgtaactctttagcagtgttctcctgtatttctttatgtgagttattaaagtccttcttgatgtcctctaccatcatcatgagatatgcttttaaatctgggtctagcttttctggtgtgttggggtgcccaggactggctaaggtgggagtgctggtttctgatgatggtgagtggtcttggtttctgttagcaagatttttacgtttgcctttcgccatctggttatctctggagttagttgttagagttgtgtctgattagagcttgttcctcccttgattctgtcagcctctatcagcagacctgggagactagctctctcttgagttttagtggttagagcactctctgtaggcaagctctcctcttgcaggggaaggtgcacagatatctgggagttcggacctgtcctggcagaagatgaaggcctgaaacatggcttgtcccagaatctgtgtagcttctgtagtccacactctcacctgcgcagactagtcttggtggactccaggacccaagatggctcccacagatgctgtggcaaagccctccccggtggtgtggacacctctcctctggcagggaaggtgcccggatgtctggagcccataatgcggtctgcctcagaagctctgtcgcttccagctgacccagaagctgctagcttctgtagttcacactctcacctgccctttggaggtaatattacaacatgtactcttttgaatcctgagtaatcattagctgtttaagtcttcagctttctatgactggtaggagccacttctaggtggaatctgaatccatttagcaagattctggaatcctttcattagcttccagatagctttattaatttctgctgagggaaagctattatctatatttcatgcaacctactgcatactgggttttggttttgttggttttgtttttattttgtttggtttggttaggttttgtttggtggttgttccattttattttgcttttgagatagggtcttgctatatagctctggctgtcctgaaactcactttgcaaactaggctggcctgcaactcatagccatctacctgatgttccctcccaagtgctgggattaaagacatgtgtcaccacacctggttcatttttgtgtaaagttgtattcaaagattatagtctacagagcatattaattttaagttttgggttacagtgcattttaaagtgtgtgcgtttctctctcttagataaaggcacagtagcatccattccttacacacggcatctttttacagtgaacagtatcttccataggtcactcccatgtttgcacttacagctattctgcacttctctatatgactttataggattccattgtgtggcagcaccatgctttatctaagctttcttcaacagtgaacacctgctactctcacacttcagcaggaagccttccctgtattctgaactttgctccctcaaattgtgaatgtgaatggtggcttagtaaattctctagggtcacatgctgagctgggatcaaggtagcacattgtttagtcctggagtgcaggttcgcatttgcccattgtctcttctaaagcactggcctggagttctgttattgactgttgaagctgtgctgatctgtagctcagatcaaggtctgcttagtgtgtagttgataaaataaggattactcttcactgaccaccactccataaatagaattttactgaaaagtcaacttggacctgcaagaggaaagaaaagggtggagacattagggctcactttccagaaagttggaaactagtactggtcagaacacaggctgctgagtgtccctcatgactcagactgtttatctaggtcactttcattctggaaagacaggactattgagaataaatagaagatgctgttagtggctaggccagtggtacttaaccttcctgatgctgtaactctttaatatagttccttgtgttgaggtgacccccaactataaaatttcattgctacttcataactttaattttgctacttctatgaatcataatgtaaatatctcatatgcagaatatatatttgacccctgtgagagggctgttagaccttcaggttaagaactgctgacctagattatactcagaattctagttctagggcttagagagcaaaggcagtctctcaggccactgtgcctggagcccagggtttggccttctgcttagcaaactctacatatccttccatcaaaaggaatgttatcatggtttatagatccaacccaggaagtccttgtgcactttggttcctccaatgaatatcttagacaagatttacctcttcctggtacactaagtgagaagttagatgtgagcttgtaacagaagcaaggagtaaaaagggacctcagaaaggcaagctctttagcattgttaagaaccagtgaattcttagtgctgagtggaatactagttatatatgaattctcaaccagtagtttcatgggtgtgtggatgtgtaaaaaaataattgtgctccaattaaaacaagttttgtttgtttgtttaaaattgcatgagagagagagagagagttatcaatgtcctaattccctttaaatgagatctctcattgaacgtggacctctccatttggtctagactggctgaccaggaaccccaggaagccccagtcccttccacccaggggtctaaggttgcagcacacatggttctcccaagtgcttgtgcagcctgtgctttcacccactgccatctcctcagcctggaatgggaacataaccaccagtgcacaatggtagagctacatcacaagagtctgccatgtgcaggcttccctcttgcatttttctgtcttgcacctttaaaaatcccctcccctctccagatctttctagccagtgctaaagaattatgtctcccccttagcacgaaagcctgactctcaaaacagaacacaaggcaggtgagtactaggaggaggggaagcattagggaagaatgatgagaaagcccctcaacagaggaatggatacagaaaatgtggtacatttacacaatggagtactactcagctatttaaaaaaatgaatttatgaaattcctaggcaaatggatggacctggagggtatcatcctgagtgaagtaacccaatcacaaaggaactcgcacaatatgtactcactgataaatggatattagcccagaaacttaggatacccaagatataagatacaacttgccaaacgcatgaaattcaagaagaacgaagaccaaagtgtggacactttaccctttcttagaaatgggaacaaaacacccatggaaggagttacagagacaaaatttggagctgtgacgaaaggatggaccatctagtgattgccatatgcagggatccatcccataatcagcttccaaatgctgacaccattgcatacactaacaagattttgatgaaaggacccagatatatctctctcttgtgagattatgccagggcctagcaaacacagaagtggatgctcacagtcagctattggatggatcacagagtccccaatggaggagctagagaaagtactcaaggagctaaagggaactgcaaccctataggtggaacaacattatgaactaaccagtaccccggannnnnnnnnnnnnnnnnnnnccacggggattctccttgctgctgccctggtgctgtggttatgaacatgttccaccatacctcatgctccatgtgggtgcgggggaatgaagatcaagagaatgtggcaagcactttgctggctgagatctcaccttctcaccttcccagccagcacctcgtgtctttaaagaaattttaggttcacagaaacattgagcaaaaagtataggaattacacatgcccacacctacaaaattttccctattcctacatcttgcattggtgtggtaaatgtgtttgtcatagttgtgaggctacaattcactcagtatttttaactaatgtttgtagttttcattagggtctgcatttctacctttacttttcaatttcagaatactttaaaatgtggttcctacttaatctctctgcctttatggaccttgaataggtgttgttagatgaaagcagtcaagatctctgtggaactccaaatacccagcagtctgcagagtggctgccaatcaattgtgcctttgtcatcgctcatgacaggacaaggttcttatcaaaatcaatttcagtgaggcttctggtcatcatttgtgagatgttgtattgaagaatcttgtgtagcctatgtgtagtcagtattcagggttttccaccttattttctaaaaataattgctactgataaattttctattacacttccaaggccctggatgctgtgcacgattagcaatctcatatgttgttgggctgcactttttaacctgttctccagccaaatggaactgtttgtcacctcaccccaattgtcagcgtgttcattctgagatctgtacctagaaactgacaaaaaaaaatcctttatgtttccttcaactgcctgccattctctcatgtatctcctcatgcctgttgtacttctaccccaacatgcctttctcataacttctgcatctctccattctccttcctattctccctgctacccctgggtctgaaattggagattctgttctatttcaaaccctcttctcaaatgtcatagcctacacataacacggtcctctttgcacattgactctcagggtgctcaaatcatgcctactcttgttcgttgtatgtcaatgacttctcaatgaattaggaattaaaccttcactttggcatgtatggtctgtgccatcatgttccatttcctgttcactgtgtgctagtaccctgccctccatgatcacatccttccccactcttcataagtaccatacagcatctgttcacttcactagtcacaggtacatgacatatagccatgcccaccaagatcttcaaggtaattctgttaacattgatgagacactgccagtttcaatgatggtgcagaagcagcagtgaagaaagttagttttgccttagcatgacaagggcagcaataaatcatgtatatggctgcagcaaggaaagaattcagtaaacatagcaacctatcagcatctgctgtgtgccacaagaacatggttgggtaccactgccttggtgatgctgagatagcagcatcttagtggtcatatcacatactgtgagcctattcacaccatctctgcccactcatctctcccattctctcccaactggcctcactctatttcatgtcaggcatattagattccattggatttgatagagatagctatggagaaatcacttcatgtttttatataacatctgtagttaattgagggagagaagatggaaaccagagctgggtccatgatttggagcctgtgaattgtgcttctgtagcatgagtgttcagctgtctgtgtgctttatataactggattgtatggcagatgtatttttatatttttgaagtaatgtccatggtgactggaacaccatctttaactgaaagaacaactaaaatgcaaatttaagtatttcacagatatttttaggaaattaataaaggggaccaaaattataaaggtagcatttattgtattttgctcatgttagagttgcacagcttaacccacaactgtgagccgggcagcttctttacagccttccttatccattgcaggattttgggtaatactcatgatgatattaaataatacagtatttttgcacataggtaataatatttgttgacatttgaaatacttgcatgactcaatgagcaaatatttttgtatgaacaaatttctttgacttgcatgggtgcaagtctttcaaagaacaacaacaaaaaatctaatggatcttactgttgttgaggataagacatttattgatatgatttcaattttcatattgctactgatgtataaaaaaataccatcctttgagctttgtgatggtgctggagaagactgtcacatttacctagcatggctatcaaaagttttgtttggaaagcaatgtcatctccacaaaagggcaggttccttctacatacaccagtcagagaaatcctggaagcagattgaatactgaagcagaagttagaatccacctgtcctctttttatccaacacagatttaaaatgctattaaatgctccaaatcttttcactattaaccttttaattaaatattttgataattattattataaaataataattaataataaaatattaacctcttaaaaatattttcatacaatgtgttatttaggttaatgtataataagtttattcttgttaattttaatgaattaataaataatttaaacagtccagttttaatctgagttatagtagatatcaagagatataacacaatttgcctaacagaagccctttcgggtcctcagccatgtttcaagttatgtgaagactttgaaataaaaggctaatggctttcaaaagcctttgatctgtgctcctttgttggttggtctgtcaaaagaatccaagtgactagtgcctcagtgcctccaaagtggaggaaaaacgtatttctaaagaatgcattgttttcaagggcaagaggtagatcatgtttccctgttctgtgattggtagaagcaaatctctatccttccttttctcccttttatcttctttatttttaatcatgatgttagtttgttgtttgggagttactgaggctggaaactggggcctcacacatgctcactgtgccagtgagctagcatcctatacccagagcatttcaccccctcctccatccagctgtcaacccgaagtccttctctacattccttttcctgtccctcttctggcagatagctgttttctgggaaagtcctgtcttaatcagtgttcacttactgtctccaagtttgtgtccttttaagtcctagaacgctttttggtagtgtcatatggtgctcctctgactttattctttctttcttgcccaaatagatttttaagaataacatgatcaatggggttttctattacttaattatttaaaaatgcagacttaatttgagaagtataatttcactaaatatattcagtttctactctaaaattaaaaaaggaatacacggaagatggatgcacaatgatagagcataacatggtgatagtggagcattagtgtgtggtaagactctgtctcaaaagataaggtagagagtgaaagaagtggatgcccaatgcccatgtacatactcatgcatgcactcacaccacatgggatatatatatatatatatatatatatatatatatatatatatatatatatatacatatatatcaaagaagacagacagacacgtgcacacacatacaccaaaagagtagatttccactctctcatctgtgttcagaatgatacactgttaaattcacacttacaggatagatatggcttccttcatcctttatgcaataggaagcatattacccaatgaatactttatcaactgtgctttcctctgtgactgcagaaaggcatatgtataacagaaaagcagttggctgcaaataaaagaaaaagagaaaacattcagtggcaaggactattcagggctcatgcatatctccatccttacgtccaagatatgtattaacaagcattgattcagagattcactatttctacaatgttcatagtcttttactccagctgtagatactataattgtttgctctgtccagagaagaggcaacaggaaggaaaatattaacaagcattgattcagagattcactatttctacaatgttcatagtctttcactccagctgtagatactataattgtttgctctgtccagagaagaggcaacaggaaggaaaatatgatgtctctgggtagattcctttttctgagaatttcaaatgtgttctccaaagtccttagagatatctggcactgtcacgtggccatccctactttcaaggagactggacagaagtaatagccattttaacccctaaaatggaagggctaaggaagaaaacatagtgaataccaaccacattcatgcaatttcaaaagtgagcacataagcaaaaggaaacatgaagaagatgaaaagtgaaaggaaattttaataatgacaataatcctttcagtacatcataggagtcattgctgtacactgggcagtgttctgtgtgactcacatatatcatcttgtctgaacctcataaaaaccctggaaggagaaagcactactttacaaggagacatcactgtcctttgtttttgagggacagacacaaaagtgaattacttgcccaagatactgcagtataaaagcattcaaccagagctggctctggcttctctcttcttttccttgagacaatcacttagaacatgatgtttcctcctgactgaaatctatctcacactcctgccaaatgctacaatgagttacaaatggcctgcaggagagtgggaatttccagaccttggtaatgaagcaatttgaatccagggtgtctgagtgactcttgcaagtactgcagtgcttctctctgcctatgacctgtcctctctataggttttcttctcttaaaactcattgctgcaattttcagttctgaccttgatgcccagtggctgctgcacctgttaaatgctgttagatgtccttctactttaggaggctctgtcgataagtggcttttgagggcctatttgtttgtttagagttgggcaatcattgtcagttagcctaggcaaattactttagtttgtttgtgcaagatcatcttctgggctcagccatatttactaggtcagttaactttcacccagacagaacctctgtcccacagactgaactcttagtctacctgtttttatgaacacctaagattttcattttgtcagtcactaacaatgaatattaggaagccaagtaagcaaatgatctttgatctgacagataagattgtaccttggtaattttccatctcgagaacttagtatacatgaatcatccactaagttaatagattcagtcaacaaatacttgttgagagctaattatgtacaaagcactaagcatatcagcatgaaggtagatagggttgggatatttatgaaacacatttttgtgggaggcagattttgatcaaatacagaagacctaaatgcccatcagcaagaaactagatgaacagtggcagaatcacctttactttggaacagcaataatggtgaacaatctattgctacaccaaactctgtgactagatctgttgttcatgactgtactagtatcacactaagaagctggaaaaactgatcaatgatgataggtgtggagccattttggagagcactatgataaataaaaaaagggggggggagatataagatgattcaacaggaaaaactggctgctgtcaattctgacagcctgaggtccatcccaggcccttatggtagaaggagaaaactcccatagtcttctttctaacaagcatatgcccactgtggaacaagtccatatacatgcacatagaaatgcacgtgcacacacacacacacacctaaacaaacatgtaataatttttaaaaaaaaggttctattggtttgcagagaaggaagtgaaaatcgattcttattcagaaatgagatctgtttggagagagctcttgtaataaggggaggacatgatccagccttgagttgtgagagcaattagtgaggctaatatcaaagacatggcagggacttaaagagaaaattatttaaaacctggagaggatgttcattaagatagtttaaagtaagagagagagagagaccatgtacaatgtacaacatggtaggatcctgaaaggggaagaagaaaggaaggaaaggaagggaaagtagaggcaatcacttctatgagttcaggaggaggaagtctggcagtataagcagcagagacgaggaaaaacatttgtgtacaagtccattctccttaaggactacatcagtcagagatagagaccaaaatcatggtagaggcatggcctgattcctgacatgggggaaggtatctagggtgcctgtgatctacagagaaggccatgacattggagtcctgcagcggatctaggcctcgctattttctcttgctatgagatgagagctggttacattggagggttaattttgtaagaatatatgtatcctgctcttgtgatgtgtttttgtatgtgtgcatactatgatccattcaaatgaatttatgctacacaatataagtattgacaatgtaatggctttagggaaattcttaggaccagtacaatgtgatgggaacataagcatgacacttggtcaggaaaggccatcttagagacgtggggttgtgttagattcctgggtagtggctatatggaaaggcagaaagatgacctcgttagggaacagccaggatgaaacttaagacaacaaaggctccagagcatcagcaaggcagcagtgttctgaggtgggcagaatgtgttctgggacagggcagaattggacatggagaagcacagagttcagtctcagctaggaccttggaagtgtctagttaccgtctccctcaattaactagactgaatgtgccaggcagtgggctaagtccccattcccttttaatcttccaaacactcttgggacacaggttcccacatttttacatgaggagccaaggcttagagaatgcagctttcccaagcttaagtgggtacaccaaaatataagcctctgcccctttgatcctaaatgttttggtctgaactctaagcaatgcccctgtctggcatggtcctctccactccggcggcaacaggaacgacacggacaccaagtcaggttcacgcaatggcttctttacttcgaactttttcccctacagctctcttccccagcagcttcttctactacctctgtccttctcgcagcaagggctaaactcctattacaacagcttcttttactactccttctactcacagcaagggctaaaactatattcatgctgactcacctccttctagctccaccccacctcatccaatcagaattcacacatgctccaggcacgagctcaggtcattaacaggtaggctgacaggtcccaatttcgaggaacagtccagcctggcaggcagcccacgcatgcagcctcactgcgcatgttcagggaaggcagtaaacaagtgggtttcatggggcctgcggccgcacctgcttcccacacctgtctctgaagagtagtactttgtgtgactcctttaaaagtactgagaaaactgtaaaactctacatagaggctactgagaaataacatgtgggctgaattgtgtagatatgtaaaatccctcacatctggtcctattagaagaacaacatgtgcagtctaatggtaagacccatccatagcagctagcataggctaaacacatgtcccatgtcagtcctgtctctcagcatcctcactgccatcttatgcaatcagctttggtgacattacatggaagcaaacacagagataaacacaggttcctctttgcctgatgagacaaagttggagagtttatagattaactgctttatagtaaggaaatggtaagtgtcgatggaaaggaagcaagaggagacttcaggttctgctatcagagttttccttgctcccctgtgctgtgagcttaatgttctcaaagttttttgaaaccagaatttggtccatgacaccactgacattgagaagccactaggcaaagacagcagttgaatcttcaatgtgatatgtggtcatcaaatcatataaggaagggcagtctctcattccaaagattattcctgctcctctggtcagtggccagtctttatccctgagatgtatgatgttaaggtcttcttcatctcatgctcccaatgtgtagctggacttttgcatacactaaggaaaataagcatcaaattttaattatatgtagatcaaagattaattcagagcaagtaaaccattaattatgtgcacaggattgtctatttacattgtgtgtgtgtgtgtgtgtgtgtgtgtgtgtcaaaaggatccaaatctgtctccttcttgttttttttcttaagacttgtatattctgtagtttctcccctctgaaatcctagaacataatttgatctagctctatatgcttttccttttccatatagatggaagagctctaaggatatgcttcaatgcctttagactaccaagtgctttgacctggtaaataagatcaaggaatggctgcgtttttttgactattgaacccttagattctggcagagctctgcattcgtgcttggctctttgtaaatgcctgtatataaatgagctccatgcttatttattggatgctcagatttggctttagtcagcaatcagtcttgatcacacagatggtgtgtgctcctaattttatttcaattactaaagacaaaagcttaccctaggctgcttgcccccttgtctcacaaagctaagattgacaagagttggaacggatcctagacataaagtccatgaaatacccttgtttgttaagagcagctaggaattctgatgttagtaatttctacctaacctgctttggatggacttgtgctagcatgctgtcttgtgaatgggttccctgttgctaatctaggtgtaattcaaacttgaggttcattttccatggtatatgcagaagtccagctacacagtgtgaacatgaaataatgagaaagaccttaacatcataaattttaggaataaagaaagttgtgcagttctgctccagaggcaaacagagtcattgtgtaatagtattggatctgaacaggaaatcataattaaagatgtgtgttccttccatattctaaggctattccattcaatgtataattcaactgtggtgtcctagaagaggaaactatggcttatttgcaagatacagcataacacaaatgaagtgcctcattggaagttcatgtcatgattacatgtgaaagtggtttggagacatattggttaaaataaagcatttgaaagatcatatcaactctttaaaagtttacaaatgttcctaatgttgagtggtggattccctagagcatggcaagtacgaatctcgagagagggaagaagactcagtcttttaatgcctgctgcatttgtgtaatgatgatccaaggcccacagacaggaagaatcctgtgatcccagccccatgtacaaataaaatactgcaatcccagtaccctatatacatagaatctggtgatcccagtcctgtgtacacatagaatcccatgagtagaatcctatattcccagccccatgtacacatagaatcctgtgatcccagccccatgtacaagtagaaacttgtgatcccagccccatttacacatagaaacctgtggttcctgtcccatgtacacatagaatcctgtgatcccagccccatggacaagtatacacttataatcccaccactgaggaggcaaaacaagacagctccctagaacttgctgaacaagcagcctagtgtattctgcaaacctcaaggcccagttagcaccctgattcaaaaaacatgatggatgcctcctaagaaataatatacaaggttgacctaaggaatcttcctgcctatacacatgtgaacaaatatatatgtaatgtgtgtgtatgtatatatataagaaatataataaacaaataagcatgaatctcgtcaaacttaaatcttttcatcttcctttgcttccatatccctccctttccagttctccaaaacttacaatctttagtcagagtacccagctaccagctatgaacattctgggaacccttcctgttttatttcttgagtagaaactcagatgaggtttcagtctcctagagctttaaactttattttctacttatattaatttctaataataaaggcctttgaaatccataaagaaaatcaatacttctttaattaacaaacaaaaccatgtgtgttgcatacaacctgctttatattatgcctccaccatagaacaggttaaatctaaatggcaaagacatcacctcacacaatagcattttcgtagtaagagcactcaccatccaccttccaaactgttaaagaatgcaacatctgagctgtagaggcagttctgtggtagaatgcttgcctagcatgcaagaagaaaaaaaaaacatgaaaaccatagactcaatccatagattgactctctctctctctctctctctctctctctctctgtgtgtgtgtgtgtgtgtctgtctgtctgtctgtctgtctgtctgtctatctctgtctctccctctctgtgtgtctgtttgtctgtctgtctatctctgtctctatctctctgtctctctctcttggcacatgaatatgctcacatacacccacatacatacacatactaaatttgttgtagtcagcctgttaccttgctagtcaataaggactcaattcacggaagagctgcaacctcatgaggcagtaagcagttaaaatgcttactgtatccaaatggaaaaatagatagtgagaccaaatgcacttattcaaagccagccccattctagagaagcttcaactccctggccagccctgaatttaagtggcttttccacaagacattatggtgctactggaaagttatttttctacaagaactgtggctgtcagaagcatgtcatccttcattttgaaacaacatttttcaaagcctttacctttttagaagtcaggaacttgaactttgagtagtttatgaactttatatagtgtcaacagaaagtagagctgtttcaaggctacccacagataatatctttcctgcactttgttcattcagttaaatcaacattaattgactgcttgtcacatgtaaggcactagggaggctgcagggaaatcttagtgaaaaagatagcaaaatgggcttaacacatttagtcataaccacaagtcataaagataaatgtttgcttttgagtcacgtgtgagaaggtcttagtctgagctggaattttgagtacttcttatgccagatctgatcatgttgatggaagatgggacattcacaagaagaggaggataattggcatggatcttataggactatttttcttggatacaagatgattagggttgtgaaggcagttgtacagaaagaattgcccaatatgccacctcactccctgaacctcagtgctattgactcctggccaagggtgtacccacactaccagaagttccacagcctctgcagggtacaccttactaggtgttcagacctctgaagaccctgcaggtagagtaagtatccattatgcacagtggagtgtttgcaatgcagagtagagtgtctgctaggcaacattccaacggcagcctcttctttaaagttataaataaataaacaaacagacctgcttgtttgcttagtggtctttgctgatttctgcagtataattagtcccatgtggctcataacaccagccaatgatgcatccataaatgtaaatctgaaaagagacatgacccacttatctacagattctatcttacaagcactgtgcctataaataactacaggcacaaattaaagtaagaaatgaaaaaaatagcaatttctgaatataaccaagcatcactccctaagaaatgttttaacagccaactctttcaaaagttagaaataaacaaacaagcaaacaaacaaacctacttgacagcacttgctgatttctgtggtaacagaattcttgtgtggttgtaaagcaatgtattaaactgtggcttgtactatttttagcaatgaatgtgttccatgtgagttcagaaagtttgctcatttatcaggccagcccacactctgatagatgggcatctttcttgtgaagtagtcacatccctgtttacatgaagccttcaaggttctctttctctctctacagatcagcaaacagcagctacagactgtcaaagaccggttccaggcttttctcaatggggagacccaaatcgtagctgatgaagcctttatgaatgctgtccagagctactatgaggtaagcactgtccgcaggctgaagctccagcctagcctactgatctgataaagactgcagagggtgtagcaccttggctgatgcagaggtgtcagtagtcatctgacaagggactctatagttgtgttgtagagaatgatgcaaatagctcctgcagttgggcattggactgatgactcggtatgcagagtgcttgacacataagcctgaagacttgagtggaatccttagttccacatacaagtctgagttcagtgttgaatgcttgcaatcccagtgctggggagatggagacaggagggttcctgaggttcattggtgtcttagttagtgttctgttgctatgaagagacaccatgaccatggcaactcttatagagaaaaagcatttgattgtggcttactcacactttcagaagtttcatccattatcattgtgacaggaagcatggtggtgctcagacagacatggtgctagagatatagcaagagagagactctgagcttggaattggctgttcaaaacctcaaagcccacacacttcctccaacagggccacaccttcaaatcctttcaaatagtgccactccctggtgatccttcatatctatgagcctatgaggaccgttctcattcaaactgctacaactgatcagtcaacctaactcttaaagccttaggttcctttcagtaagagactgttttaaaaaacaaacaaacaaaaaaggtgtctcaaaaaataattccaaaataataagatctaaagttgatttttagccttcacatatacatatacatatgtgcatgtacatacatggacacatgtacataaaaaagctgctgttttcaaactcatttttatatatagacaatgtactgtgttccctagaacactttatagctggttacctaaaatattttccattttattgatatactaagagtcagaaaggacaagtcagctactctaacaaaacattttgcatagaagcttggaaatgaaactgaggtcttccctttccccatattctgaaagccagtgggagagtaatgagagaaagtttgtcaaaacgggcagccgcttctcatgtttatacttgtcaactcgagtttgtagatctgtatattacaaatcctaattaagacacttatttgagtaatgatacaaattacaagaaagtgtcatttctattaattaaaattgaaaattaatcatcatcagcatgctaacaagtctttggaagtcacgataactatagtgatctgttagtttcattggtagttcctagttttctatgaaagagctccttctgggtctggtgagggatggagaaggattgagtctttcctgttaaggtttgagtagcatagaaaagaatggagggatttgaggtccagctactgttttcattagctagactttagagagccttagattctcatttctagaaaggctaagcccctaaaatgcagatgagagatcagaattagcactgtgccagcagacctcccagggggtggcactctccttcctccattttccaactcttttctatcccttgcaaaccttcacatgcacctctgccaacctctacctctgccaggactttgtattgcaaatgacctgcagcaagctcaaactagtttaaacctaaagcggatttgttcaagaaactttgttaccatgttagggctagccttaggcatggttgcatttggagatgccaatagtatgacaatatagtatgcatcctccctccatatttctgctagctccatcctgcattcctgcatgtaagaaatgcaagcatgtcccaccaggttagcaactccggggacaaagggaacacagttctttgctgagaactgccaaagcctagggactttttctcagttggtaaggttgaattagcctgactcaaggctcaagaccaggaccacctctgtaacctgagtttaggctcagcctgtttcaagcattgtagcaaagtgtaggagtttccctgagagaaattgggagttgttattattgtcattgggtcagaactatgtggctccattcttggtgacagaggaaaccaccaatggacaagcctttttttctacttcattctaaccctatctcccccccttacttttcttctccctttctcttccttctgtctatttttctcttctgctctctttccctccatccccttccctctctctttccttctttctctccatctctctccggtgtttgcaagtacacacctctgtgtatgtgtgtgtgtgtgtgtgtgtgtnnnnnnnnnnnnnnnnnnnnnnnnnnnnnnnnnnnnnnntactacagtagataagtcagtcatagccattaccgttgttcacatactacctactactctagtagagacccattaagggtaaataaaaaaagctgagaagcactcacttttacccacttgtgtgcccatccagcttagtctgagacaagccatccttagctgcaaggggagaggggaaggaggagcagaaggaggccaagtgcttcagtggctatgaagaatacacaagtttactttcttccttcctagtgaccctgattgcaaggccaaacaggatgcagattattccttgagtctcttgaattatgactatgaggttccaggaccgcagcagattctctcagatgtgatctaatcactgtccttttacctccacatggtcttcaggccagtcatcaagtcatcatcaggatcccaagatttttagataaatgtctcatacatttgacactacaatgccttcatctatagaagtacccccgtgtgtggtttgtgtgtgtgtgtgtgtgtgtgtgtgtgtgtgtgagagagagagagagagagagagagagagagagagagagagagtgtgtatgtgtgtgagtatgtgtgtgtgtgtgttgtgtgtgtgtgtgtgtgcatgcgcgcatatggtagtttcaaattaattctcttaatatcaagctttattcttattcacattctcatgtgggataattcacttttcaaaaaattatgtgtgtgtatatatgtgtgtgtgtgtgagagagagagagagagagagagagagagagagagagaagggggcggggggagatcaactcttattaattcatgctacagtacacatgtaaaggtcagagaacaacatacaacaagcctgttatcgccctgcccccaccttattttttgagtctctcctgttgcttttgctttagatttatatgtaagttcaaggaattgaattccacttaccaggattgagctctgaatgcctctaactactaagccatcttcttggccaagaataatttacttttaagactggaaaagatctgccctagcctcagtctgtcagcaaggaagtagcagctaaaccaacctccctgtatgtgcatatctgttagatatgaatgtgttcatttataaaacaatctggtgagtccttagcaatcatggaaggcaaggctaatgaatggaccttaagtattacatatcttccatctagcatccagacatgtttaggagatgtcaaaggttatgaatgccatagatagaactgttcccaagactgaagccactaagaaagaaaagccaacacaaagaatacaaagagatatactagtgttcatacaagttgactggtaccagctcaggcctcacttgtcttttggcacactaggaagccaggaagattagtgtccagctagtgtcctctgtctctggctgacttacctcctctgatactctgtttctccccatttcctcagtcctcagcctccctgttcacgttgatgtacccgtggctactcctgcatagctgaagtcacatggtacttctctgaactgatagatcacttttcatttcaaagtccactcagctctaccctcattaaagatggaaggctggattggcctcatgtgttggtgaaagacactgaggtccaaaagggttaagtcacttctgaagtcaacacaatgcccttaacacatactaagtgactactctgttcaaggaagggatcaggagagttggcatgtccagaatacactgtcaccatcctgtttgctcatggctatgggttctatagaatcttggtcctaactcacttttttggaggcccacatacatgtcttctgactcctgttttcccatctcattctgatataatctggttaatcagcagggtttctgctggaaacatcttcactgttcttaccagtacacttcaacaagtatgcattgggctcagctatgtgccagatactatgttaggtacaaacaattttacacacaaaacaaggaagctttgggagaaggctcagttgataaaaacacttgtcttggaagtataaggatatgggtttggatcctgagagcccatgtaggtaaagatgtacacagtagcatatgtctgtaaacacagtacttctaggccaagatgggagatggagaaaggaactcatggttcagccagcctggagtagccagcagtgaaaaagataccctgtctcaaacaaggtggaagaagaggatcaacacctaaggttgtcttctgacctctatctgtagcacttatgagtccacatgcacacaggcaaatgtgaacacacacatacacacatacactcacacaaattctcacataacccccccacatacacacacacatacacaaatacatacacacacacatacacacacatatacatatacactcacataaactctcacacacacacacacacacacacacacacacacacacatacacaccagagaaaaggagagaattaaaaatgaataaaaaagataactctttaacactatcttcctaaaacttagaatctaccctgagattcaaatatttaccaaatagtcataaaattatggcagatgaaagctagagaagggctttggaggaaaatgaatgtcatactgagagtttaattgggctctccttggtttgtggggctttggcatagctggggacaaaaagcagctccattgcagtttgaatatttttaaacctatcgtgatctttagagctgacaacaaagaatcaaagcccttgtttatgacaccagtgctccttacctgtcccctgggaggacttctcggttggctccttccactattatgccatgtcccaatttataaccgacagtgtttctctagtgttcttaaaatgcaggccagtggctataatgcctatgcccagagtcctggatatttagcatttcctgttcatctcatgccagcacatcctacacttcattgccatggcctatactcaattttccctgtctcctcaaacatttgacctttttacacaaattattccttaagtctgaaatatctacctcctctctgtttttctgtcctttgctcacattcacttaccatctcagtatttacttctgggaggtgtagtgactcccaaataggcacccctagatgctgggttcttcttgatgaccatagactccagcataggtacccctacctgttgtgcaggacacttgaacacactgtgacccctgagattgtgttatttactggggaaaaagctgttttcagttgtggtgtggctcagtgcttagcacacacctttaatccctctaactggactatagacctgacctaaatacacatctttaatcccaaacaatgaaggtaaagttggtttgtagaaggaagcaccatatttgaaagtgatatctaattgaacggcagacaaagtgatgaatcagagaaagatttgacaagatagggtatgtccaactctcacaagaacagggaagaaagacacaacataagaggggaaagaaggagaggcaaagggaaaaaggagaggaggcaattttaccaagagagttttacagggacaggttaaagagagaacaactagacaaaagtgaaactagaatgagccagagaataagaaggagccagaagatcagaacagattgctagagttagtctgaagccaagtggaacaattcagttagaagggaaagaagccagatcaaatcagttagcatggaaaggagtttgagccagaacagctgagttgaccagtaagtcagagttcagaaagaaaaagaaagagtgagcttattcaacagttaagtctcaaaagctgaaaacattctaggcctagatagattgtatggaggctagaagcttccaggagtaggcctatgttagcagactaaggctgtaagcctgagacaacaatcaagtcaggagaataaaagatacttttacacctacctactgggttgtccttgactaccatagactcccacagagggacccatgactgctgggttctgtgctgtcagtggtcattcctgagtgtgattattttgtatgaagttattaggtgatttctgttgcattctgtgagtgcctagtttatgtccagttctactattgcacctccagtacttatggtcatgaagacattgcagctggaaggataacactaagacctcataacttaactttcttacccttccgatgtgaaattggaaaatcagagagggagaatgatttatcccaggagacacagaatcttagttttgcatcctcatccataatgctgcattatcttcctaaagatgcctcaacttgctttgtaatttactactccttggtgagtgtatacagtgtgtgtgtgtgtgtgtatgtgtgtgtgtgtgtgtgtgtgtgtgtaaatttaaaggttgatactgacctcaggtgtcatcctcaatacctcttcaacttatatcttgaaacatgatctctcattgaacccagaacttggacatttggccaggttaagctggccagtaagcttcaggcttcctcctatctccacagtaccagtgcttggattgtagatgcacatcaccttgcccagcttttttatatggctgctagggatcaaactcaagccctcatgcttgcacatcatgtacttccctgactgagccatctttccaactccctattatttgaacttaaacctataggtgagactcataatatgtcagcttaagtgcatcatcgttaagtagtgcaggctcccaagtgaactctgtagctcatgaagtctgggtcagaccagaaaagtatttgacatgtttcctctagttgacttaagaattaactctcaacattatgaactaaccagtaccccggagctcttgactctagctgcatatgtatcaaaagatggcctagtcggccatcactggaaagagaggcccattggacacacaaactttatatgccccagtacaggggaacgccagggccaaaaagggggagtgggtgggtaggggagtgggggtgggtgggtatggggggactttttggaagcattggaaatgtaaatgatctaaatacctaataaaaaatggaaaaaaaaaaagaattaactctcacatctagttgagttgtaggtcccaggctatcaaagcatgccatggacttcacccaagaagacaaaccctccagcttcttttctaaatcacttcatttaatgaaccttaaatggagactgtattggtaacatgttttctcccagtatgacttggtcgtgatgcacaagggtgactgttttccacaagacactaggcactaccctctcagagcatgcaaggcaagtgctggtgtttggcaaggtgatgaatgtttgactggcctctggaggacctttacacaccttttggagcatgaccaagatacagttccgaagtgtcaggtgttttttttcccctctctgaatacaaagtggtagcaccagcacttgtattgcattcactgcgcatgagcttgcgtgagcttccaggtgtgggcagtgaagcaagagaaagctgtccttagtagtagagaagtcccagggctcagacagcacagctggaaggtcttctgcttggtggaagaacctcaaagagaaggaggaagcagagtgaccttaaaagaccatgtggatgctgaggagacagcttaaagggagcttgctgcacaagcatgagaaaccaagttcaaatcctcaggatccacgtagaaatctgagtgtagctgtacatgtgtctgtaaccgtctcactatagggacagagagacaacaatactggggcttgctgcctgccagcctaatgctgggttcaacaacagactctgcctgtctcaaggaagtgtggtggaagatgatcaagcaagatactgaatactgaatgtcctcctccctgggctctgagtatgcactggagtgtgtgctcatacatacctatgcacatataccacatacatatacaatgtatacactcatgggcctatggactctctttctctcccccactcttcctcttcgcctttatccccatgtgtctgtgagtagacactaaaatcaggcaatggaagttatgatgggcaagtccctactcctctgtgaaatcttgtttccccttctaccctcaagcatatccaatttgtggcccataggtcatatgtgacagaggacagaatcataatcatactaaaactacaagtttttgtgtggtcttttcctgtcttgggaagttgactgtatagttcttgtgcgtttgtagatgactgaatcatgttacagtgacaaagcttgcacacacctttcatagtagacagagcctaacagctacatgatccctatttcttctacagagtaccatgtgctagccagagactggagagacttgaggaacacagaaacttcttgcacacatacaattgcatgtcagtcaagggtacagaaaattggcacatattttcttgataccaagtttcagttatgataagtatcctttcaaagataaacaaggtgcatgtagtagttaacatttcagtgttgtgtgctagatacttaatgacaacgataacaacccacgaggcatttagggattcaggcactgttgtaattgctcttttcaaatgactcacttaattaaacaacctgtatagagttgagtattaccctattttatagacgggaacactaatgttccaaagagattcacttaacatagtttgtatagccactgggccgcagaaaatccagtcagtctaaccatagcctatgctttttctccacctatcaagagatcagtccttgaggccattttgtaagctcagtagttctttctgctataatctttacttttcacagttttatttagactgaaggtgttaaatgaaaaatttcagagttaagcaattcacatactttaaatagctcttattataatgtactgctataattgggttctcactggaaagtcttcaagaagaataaacaccacagcgcaagtcaagtacactaatatctgtgatttcaggcactcattgggggtcttgggacacactccctcaaataatggagctattatactatttttattcttgatttaagatttgggcactgaagagtgtgtgaaaggggcctatctgaaatcacacagcaaggacgagtaagtccatgtaaataaaaaacacagttcagggcagtggcacttccaatggctgactcaatttttcttgactgtcctttgttcaggtgtttctcaagagtgaccgtgtggcccgcatggtgcagagtgggggctgctcagccaatgactctcgggaggtcttcaagaaacacatcgagaagagggtgcgcagcctacctgagattgacggcctcagcaaggagacagtgctaagctcctggatggccaagtttgatgccatctaccgtggtgaggaggaccccaggaagcagcaagcccggatgacagccagtgcagcttctgagttgattctgagcaaggaacagctctatgagatgtttcagaacattcttgggatcaagaagtttgaacatcaactcctgtataatgcctgtcaggtaagtgcctgaagtagacatttaggcctagaactatgggtcagtggaaccactttcaagagtcacttcttgttgggaaaacattataaatcatatgttataagtgtgctgatgaaagattgactattttgaagactaaatggtaattatggttttataagttgttaaaagacactgaaacgtttatgtgagcccataagtggtccttggtctcatgaaccatagaactggcttcattgtgtgaggggagagtaggtcctgtgagtattgtgtggccttggtgaacaaaaacagcaatcaatcaacagcataactttatcacaaagacagttctatcttaaactgagtagtgtgtgcacggtaaggcattcctatgtctctagcaaagaacagaacaagacacaaaagctgggtttccaacgtgactgacaaagaaatcctgttcaagtttgggttgaatcacagcccgattccctcacttcatcaatctctgagagcaacagaatgagatatggaccttgggttctacttggtccacccccaaatagacctcgaatttgcctgggtggagccttggacagcaagttattggaagactctgatttcctacttaccaatctggtgctatccattcactcaacaaatatactgagtttactttgcaggctttgatctattttgtctgtgacacttgagagtatgtttaagatgcacattccagctccatccttagagagattcaacctggggccagcccaggaatttgaatgtcaaacaatccctttctggtaactatgttgtctattctccccaggagctgtcagagtcctcaaccttgctctagttcccctggatcaattccaggccctgtagcagtttgaatagagacactgtaagagattagccaagagtgtcccttgttcagactcacagtgactacgggaaatgctcttctggactcgaactagctttgaggccttggagtttgtgatccttcccatgacaatttgaaattataatgagttaaaagttgattgaaacttatgagggtatgcactatatcctgtgagagttaaaggacacatcccattgtaaaagttttcattagctagtgctacgttaaaatggcagaaagatgtgtcttacctactcaaattcacttgctttcttagctcatcttttccttgaggaataatgcttgtgaagccccacccttgatgtgctaggagggttttttttttctgttttgttttgtttttattcttgtttttttaatacacattaaagtgaaacagagctactaaaatagaaatatgtcatcactaagccttctctatttttattacatattttcctcaattacatttccaatgctatccccaaagtcccccataccctccccaccacttccctacccacccattctcattttttttggccctggcgttcccctgtactggggcatatacagtttgtgtgtccaataggcctctctttccagtgatggccaactaggccatcttttgatacatatgcagctagagtcaagagctccggggtactggttagttcataatgttgttccacctatagggttgcagatccctttagctccttgggtactttctctagctcctctattgggagccctgtgatccatccaatagctgactgtgagcatccacttctgtgtttgctaggccccggcatagtctcacaagagacagctacatctgggtcctttcaataaaatcttgctagtgtatgcaatggtgtcagtgtttggaagctgattatggggtggatccctggatatggcagtctctacatggtccatccttttgtctcagctctaaactttgtctctgtaactccttccatcggtggtacatttacacaatggagtactactcagctattaaaaagaatgaatttatgaaattcctagccaaatggatggacctggagggcatcatcctgagtgaggtaacacattcacaaaggaactcacacaatatgtactcactgataagtggatattagcccaaaacctaggatacccaagatatacaatttgctaaacacatgaaactcaagaagaatgaagactgaagtgtggacactatgcccctccttagaattgggatcactaagccttcttaggtcatttactactgagggtgtgcaaagtcagccaaaacaaccagtactttgacatttcaagagttgggggttatctctaatgccacccccaaaataaagtcacactgctcagagcagcaaaaatctaatttgtgcctaagttggctgcaaagaagagagagcatatactatttcctccagctgccacctagactgcatgtagacagagaggattctggactttgccaagccctgttactaggagtcacagatgaaagattcaaatcctctctttctcagagtgcactccaatttgcaagatgctgccaaagcacaagaaagataacatggacacagaattgagatgctttcattctgacccagtggcatattttattgtttagttttacattttctatgcctttgtgtccttacaagatgaacaatacctaggagcctccaaagcagaaagtatccatggccttttcttcttatgcacaacacatcctggaagcggggagctctaatcttttggaggcaaacttgagtgatgtccctttctgaggatcttccggtctcctctcaaaggagaggaggaatttatgaagaaagaacaattatatcagttctgttgtagcataagctgtctatcaaaacacaaagaaagcaaggagccttcaacataatctctctgtttgtgtatgcaatgtctaatggtccattttgtttgagaatgtgtggattgacatcagaagaaactgctcataacccacctaatattccctgtattggcaacccactatgatgtcagcactgtttcctgttttcagagtgccagggaagcagttacctggttatttgaattggattccaatgctcacaaacccacagtgatctctgtaagatccattgtttcatgtaatagatgccactctgcctctgcatgaaattcgaggctgctactggttgtaatgatacagtacttaaagtattttaaaaatgcatccactctccccttcttcccatttgtcgtcaatttcatgcccagttgatcaatcacttgctgctgcctacacttgtgtttaacatcacaagttatcctgaattacatcattctaaagtgtgtgaacatttctcttgagaagcacattgtgggtctatgaagatggctccatcagtacagtgcttcctatagaagcatgcaaatgaatcccacgtcagtgtaaggaaaagcaggatgctatgtatgcagttatgacccctgtactgggcaggtagagacaggaggatccctggagttcatgggctggccaatctagtctaatttcaattcccaaatccaataagagccttgtaccaaacaacaagataaatagctcctgagaaaggacaccaacgttgacctctgacttcccacagtcatatagacaacacccacacaaacatacacccataaacactcaagtgtacatgcatgtacatatgtattctctctctctctctctcatacacacacacacacacacacacacacacacacacacacacacacacaccccaaaagaaaaccaccatggagttatgtgttagaaagaatttaagccagctaaagttgaagagacatggatgaggaaagatgtttcctttggctttaattctgatatttgaaaaatgccacacataggttaacaagcagagccttcagaggcagcatgcctttggcctgtgctcgatgggcagtgacaataacattcatgttcccactatcaggaaatgacatttgtcatctgtaaatttctacagtgtttgcagataaatctggaagagctggatagagacaatctatagatgcctttacatctctaatactgaattcactatagaattctaatagagacaactataggtacatttacattcctaataatgagttcttcatcagtacagaattctcattctctaagcatttctttcctttccatctattaaaccatcatgcctttgatgatgcagtttatcttattactgtctgccttggacttgattaacacttgtcagcttttcatatagtttattagactctgaagagaaacctcaaattaccaggcttttagctgtgacccagattgctgggttgtatcatacatcactacagagcccctaatcttgacataacagcatagctttttactgggtcacaagttccctaaagttgtattggcttaaaatttgcttcttagtgctgattctatttcttaatcactacttttagccttgcaacaataataaagttccttgttgtgttatggttttacaataaataactgttaagatattttgaaattgtggaataggcaattgtaatagtcatctagtaatgccatttagaaacatacctctattacttattcattctttcagcagattttaaagcatctgttgtgatctcagcattatgtgtagtggtctggggataacactcagatcttacattgccccagtatgatgcatggcataactccagatagtcttctttgcccaccccacccatcctcatgactttgtaagttttttgtgcttgcatgttatatgtttgtgttacattgttaaaattgaccacatatttagcaggttaaaagaatgctcattggttatcaccccttattaaaactcaggcacctctcttcagagtctctgttcagggtctcgcaatacaagaatgagggcatcaggcagactttcccatctggagtctcagcacaaaggaatccacctctgagctccttctcattggtgacaggactcacggtttgaggctgtactccagatgattaacagagatgctctgctgttcctgacccctgggtttcaaactcttttaaaggggattaagtcagttaccaagataaatctctttaaattcaagtgattaagactttgatatctgaaaaaaaaaagtgcttcattcttgccatggatcattgattagaagcaagttatcgggtctatctgtggtggtgggagggactatcacaaggcatttgtcattctgattcatcctaaggttgtttcctgttgctcctgtgacaagttagcaaccttccttggtgtgtaatttaaaagctatgctccctaataagcctactgatatcggcttaagtgtcttttggggtcttttgaaacagagcctctgatcaggatagcactcaatgcaattcagttaccttctggcaccacactctcatttgtttatgtgtctgttccttcccttcccccgaagacattgttatgcaaccctaagtaggcagctttgtaaaaaataagtacacaattcaaacatgtacagaagataaatcatgaaggaattattttagaacaattctctgttaagcatagcattttaccacttattattgatgaatgaaaattgcaggcaagggagataggcatgattatttttacacacaaaaaaattaaatcttggctcaatacttggtactcctagacaaagcatcatcaacatttatcagaactaatcaatattttgatttataatcaccagtactgagaatactgctttgcttataaatatgcataaaaatgtctgaaatatgtttggggccatttcagagagctaggatggtttcctactttttgtacctttcgccaaatgatggagcctcttatatagcccacacacagtcttgcaaattaagactagtcacctgccttctgatatgtctcaccagtccagactccctacagccatttttgccacctcaatgactgagagctgggattttttagaagcctggtcaatagagtctaatatactgattacactttctgatttagcctttatctttaaaccctcttgtagctctaaataaaaatgtttgggttttttccagaatgttattaattctatattaatcatttagtctgtataaacattagtccactcagttgggggagttcctatgatctgcctgcttccttacttccagtttgaacagtaataactgccaactgccaaacatttactctctctctctctctctctctctctctctctctccctctctctctctctctctctgtgtgtgtgtgtgtgtgtgtgtgtgtgtgtgtgtgtgtgtgtgttcctgcttgtctataatgccccatgcatatgcaatatccacagaagcacaaaagagcatcagatcacttggagctagcattgtgagctgtttgatatgggtactgggaaccaactaggtcttctataagagcagcaggtggtctttacagttgatcctgactctaatccctgtaaggaaggtattttaataaataagatagaattggggtcaaagtggagaaagaaagaaggaaagatggatggaggggggaatggaaaaagggaaagagggaatggagtagagggggattaatcacttttgaaaggtcaataacaatgtagcagagctagaatttaaaagcaaggttgcatggttttactctttagctgaactggttaaaaatataaaatttcccaagaaagtttatggatatttctttactgtagaaagataattgttagtgggtatcacttttttagccatctcttttatataacttgctcttattttgctaaaaaaaaaaaaaaagttgtgtgaaataagctgagatgcaattctgtgttttggttaattattactacaggagatatttacttaatggtgatgggttaggtttcaggttagttctctcctttaggttagatggttagggacaatggcaggctccatgtcttgtaaacctcagaaaatgacattggtttggttggtggtggcagccccacagaggagctgatcaggaactgaatggatgaggagattgttttggttgaatgaaaggagattatctgagacctcagttatcttttctgcccaattgtagacaaaagatagaagaaattgtactatagatagagcgtggttggttgagtaattgctctcagttctttctgtgtcctgtttcaatatttagtcatgacttgagagccattgaacagacttctctacttcttgtctttgatactcattctatatttgctttgttgacgagctatcagtggacttaaggagcaaatggcttgacatgtcttggtgcaaattgctatactttgatgacctttctaaaaatcgctatttctgcctctagcctgggcctcaatataagacatttgaaattaaagtaacttaacacacaacctagaaccaagctaacacagcccatagcgtgaattatataaccatgcctactctagatgagcagagccctagtcaacttacaaactcatggacatggtaataaacacaagtttatgtagctactgaattccagatagtttactatccaatattattgtagcaacaatgaacatttaaaaaatgtgtaaaatatgtatgcactgtgaacagcagaatggcgagatgtagctataactatcatggggttttagttaattactgacctctcttcaccatgtaactgcttttccccagaattgttcacttatcctgtctcctctgtattcaacctggagtatcaagctgtaaactgtatttgtgtttgcttcctcgtgttatggctgatgtattaatgctaaagtgtgttctctttaactggaggagatgtaaatctatgttgcatatggctaggaacagaagaaagaatggttgccactttggaatctaccttagttcctcgggtcgtgagtgttgttaacatcccgtagtatctaactggttaaaaccaatatagttgtcaccaaggcactagtttcaggacactatgcagttattaagccatgcagatgctcaaggccctcatgtaaagattgcatagtatttatatgtaacccatgtatatcattcaatataccttgaatcatccctagatggcttatgatagctcatggtatataaatgctgtataagctgttgtcagactatatcgttaggaagccctgccaagaacaatgatttgcttaatgcaaatacgatattttgttctaaaattctcattttgtggttgatttaatccatagatgtagaacatttagttatacgggactagctacatatgctcaactcatttcaccaacttctgctagtaagcaagtaatattttagaaaataatctttttattgctccaatacaaatgctaaaaaggtagactgaatgaatgataaaaaaaattaggtctgtcagttactcaactttcttgaggaaaagaaactgaaattcttcagtgtgaaggtcctttttatttttatttgttattttatgtatataggtgttttgtctgaacatgtgtctatgtaccaaatttggtatacatgaaggccagaagaaggcaactgttcccctagaattagattacagatttctgtgagctgccatgtgaatatggagagtcaaacctaggtcctctgaagaatagccagtgttcttaaacactgagccatccctccaggaaatattgttctcagagaagcaccaggaaatatagaaaggcaaggcccatcattggaattgtcagaattgagagactgcttagtatcattccaaatgtatttcagaggacatattctctctgattatttttaccactaagagacactttccacattatgatctaactctgagataagggtgcacagctttcccatcttaaaatattggcttgcttataggaaatcaggaagtcctcatagagacctgacatgagagggacattaggtgtgtagactgcacactacatggataaattgcgtccatccatgcacacacttcatagggattgagccttctattgacagtgctctggggaaataacgtgatgcctgctctcacaaaggtgctgcttaatgcacaagacaaaaaaaaagtcaacaaataccatttcctgtgaagagagataagggctgtagacaaaggtgtagtcaaacaagaggtcaaagggaaatgatactacttgaggttatctgggcaaaatgtctctagggtttgacttctatgcgaagttctggcagaagggaagcggctttagatgaaagaaaatccatggcatgctggggacggagctcagtgacagaggtcatgtccaccatgtgcatgaccctgggctcaatcctaataaccacatatgcaggaaaaatataggaaagcaataaataaataaataaataaataaataaataaggaagtggtgaggaagaaagggagggagggagggaggaaagaaggaagaaaggaaggaaggaaaggaaaggaagaaggaaagaagtgccaagcttggtttaaggagaagtgaagatgtcatcaaggccctgtggttgcagcatagagagcaggctgcagctgggaagaagtgcttccatttatgggaagcatccgcaggtccttaggatagctttctacatatgggtcagtccaggattataaaaagcttccaatggtttgtgagtgagagggacagacctgctttattcaataaggaggtggaaaggcaatgtctgtggaagtttctggggcttccttattcaggttttaacagtttgataagtctgtactttggaaaggggttgatagacctgctccttgaatttctgcaaattatccacatgtgcattgtataatagcaaacgctctagaaagaactctttcgtactgagtcattatttccccctgctcttcccaactctgcaacttcttttaaaccagagggaaaggtggcaattaactctttctatgtaatgacactaaacactttctttaagattagagttagtactagggttcttctatggaatgcagtgggaaaatgtgaagctaatgggctagagaagtttagaaggaaataacacacatagtccttggttttgtctctatggaacacttcctgtaaactatcccatgtattggcataagcacgcaggaatctacctactaattaatctgttaaatagcaggccatgctatttatttaaaaacctattgtgaacaactacatttactttttaatttgttgaaaaataagattttgtaggaatgtttttctctttatactaattgtccgcttttgttcccagttacataattgacacaattttgtttgacctttgtaactccctaatgatgcaggaaggatatcagcatctgtcctcttaaagatgttgaggatgacagccagacaggggaagagtggatcgaggatgtcacaaatagcaaaccttaagcttagcctgaccaactgccatatgtgaatccttactgtccacagtgcttctgatggcacacctttgagacccattcaccttcacaataaacatgggcattagtgtcagatcagtcagatcttacaggtcgagctactagcacagacttctctatcataaggaacccaaagagctgtgttttccgatgagaaagtctgaactagtggttcttcaattttgtgtctgcgctgtctcctagggtattgtcagtatgcacacaactgaagtggttctgccagcagaatattgactgacaggtgaggaagatacaggcaagctgatgccttggtgattgttgggttttgtcaacttgacacaagccttgacatatctgagaagaagcaatcataattgagaaaatgcctccctaagattggtctgtagacaagtctctgggggattattattattattattattattattattattattattattgatgatgactgacatgaaaggaccacattcactgtgggcaatgctgtccatgtgcaagtgttcctggggcatatgaaaacgtaggccgagtaagccactaggaacaagtcagtaagcaatgttcttccatgacttctgtttcagttcctgcctccaggttcctgcctcaagttattgacctgtgatgggatgtgacctgagatttgtaagctgaaataatcctttttattcccaggttgtttctagtcatggtgttttatcacggcaataaaaaccctaactaaggcaacctttaagaatgtaacccaggtgttttccccactcgggctcaggtgccaatgctaggaacttagatccacgaccataccgttaacaaagaatcctgataggagtatgctctagctggggagccacatgccagctaaagcttctgaggacactgaaggacgaagggactggaaaaggaagaaaagacaatgagaatggacactagaaagatagcactctggtatccttcatcattagagacaaagtctatcaaacgatgctcagctgagcagcaactccttcatgtacatttgtaagctaatggtaatgttcacactgtagtggaagcctactcccttacctctccctccaacacaatgcttactgcttctgctgtttgccccttctatttgtctcttggcatgctgtattcattagcagtcttggtacttctaagtgtttatagtactgctgagactcctttaaatcttcatgactataatgcagaacaggactttttggcttggaatccctacagtggagaaattcattcatgttgctgaatgtagctaaatgtgcacactttcctagacatagctcactgtgtatttgctgtcatttattgacttagtgaagacattccggttatctttgaaacttcataaaaatgctattacaaatatttctatacatgtttccttgtgtatctgtataagaatttcctcagggaacatacctagacatgtcattactcgttattagatatcagtgcacactgcatttaattaattgtatattctcttgacaataaagttgaatattatacacttgtcacatagcctaacatctaaaagaactttttattagaatgaagtaacattttacgttgccgtggagaagaagctgcattttaactctttagtgcccatatttgtctactaaaatatttgtgcatgcacatttgtagaagttctgtccctaaaaactaaatattggaatgcctaaatattcaccacaagcaaaatggatcatttgtagtactgtacacactaggacacattaaaacaggaaacctaattgctacaatcaacaaaagataactggaatgtcttcactaagtcaaggaatgacagcaaatacacagtgagccatgtctaggaaagtgtgcacatttagctacattcagtgacatgaatgaatttctccactgtagggattccaagccaaaaagtcctgttctgcattatagtcatgaagatttaaaggagtctcagcagctctataaacacagaagtaccaagattgctaatgaatcccatacacattacattgaaaaaaaaatctaaaccaaaaagggttgtctatgatttcatatacatgtgtactatatgtacaaataagatgtcattcaaactatgccttattaaatggaaagaagggatagcaagtaagagaaaaggctgtgctggtcaaatggttcaatgtgcagcagctctcccagccaagcctgatgacacaatgacagcatgagcttggttctggtgcccagtgttagaaggagatagaaggatgcaaaaaaaaaataaaatatttttaaagagaaaaaacaaatctttaagggctttttaatttcaattttgaatatgctacatgacacaaacacaggagaaaaagcataagagcttggtacaaaagactcaaacaaataacactcttaaaatcggacaatttatcaccaagtttgattgggcttcttctagacttgtggaattaacaaattattaaattcaaaataaagtgcttgggcttattctagggcagattcctccgattgtgcagtgtacccggctgctcccacagcctcctcgctcttgttgtgttcctgcggagccagtttttattgctaatttgattccatccttaaggatagtttctctccacagcatctgcttgtgtagagacacacctgtcagggagaaaatacctacaaaatcacagccgaatcaaagtggtctgaagtttataaaagttaattagaagcgtaacgtttatctctgccgcagtaacctgagtaagccattgcttttattagctgtgtagtgaagaattcattttcacctgctttgttctatacactagggaagtacgagagtactgtagacacaggtagtcttattcaagtatactcagtcacagctgagcagagaaaagagagggaagcggcctgtggccttgaatagcgcatgagcacatgtacacacacacacatacacacatatacacagccacttcttcctgttttgttttctttttctttttttaaacttccgtggctttgacaatctcctgtttcatttctacttgtctccactacacactgcagccacaggaaaagtactgaggccaagtgacctgtcatttgggccctcaggcatcgtttcctctgtgagccaaggagcatcaagagacggtgaagtacacactggtttctacaacatctaggctatcacaaacatgcagaaaaatgaacatttgttaaatgcatgagtctatgaataaatgaatgaatgccatattatctaatgtttgacaaattgtgccaaaacttactgttttgaaacatgcttgtccttcctccatgtttctgagagtaaggagcccgggcatgactcagatgagctgttgtctcagtgtctttcatacactgcagtaaagtgtccaagggaggcagtattctcctagtaggacctggacttgtgtttaggctcacctgtgccttgagggggcttcagctccttctgcattatgaagatgaggctctcagttcatcatgtgagactccatcacaaccgcttactccagtgagagggtcttctgacgaaccagagatcacattcttctgtgatttaatccccaccataaattttactatacatgcttgtaagaaacaagtctactggccaagacgttcctcagatagaaacagttacacaaggcacaataccaagggaagcagagagtcataggggctacactagatgcagctaatcacagatgtctacttcacaagaccatatggaagtttggaattagattctatctaagaaaggcacaatgagcttattgcttgctctttctaaatggctctttccccctcaaatacacaccagtgacactcttcttatcttccatgatttagcttatgtatctctacccccaagagcaattccctaaacagtatagtacagtccccatggcaccccacacatactttcaagccagaactctatggatttcaagcctcaatatatggttatttcacctgcctattgtcaagctcttcccataagtcccaagctttctgtgggtgggaccaagcttctcagatctgcccttcttttactagaacctcagacaggtggattctaagacaatgctggaaatagattttctttataaagttagtgcccaatcaaagaaggggttatgtttaaatagtttttctggggtttagaggcaaaaagggtggtagcccaggagacttccaagattggagattttatattacaacaacaacaaaaatcatgtgggatataagttattgataaactgcaatgataaacttggatggcctaaatcttggtgtctcagacgtttgtgtttgaaatctttgtcactgtccacccctggcctgtcaggcttctttattaccagtctctcactcttccaagctgttcccttcaactctgtctaaggcccccaagcaatggcttgattttccagtggtggtatactttcagcttagtgaacaactattatcttcctaattaccaacaggagtcttgaataagaggccaaaataagccaattaatatgttaaagaactggaagaacaagctgcctctgccatgtgtctacctcccattcaccaagcctttccactttctaacctacatttagggagagcaggcaggcatgctgagtcacccctgtaagccagcccttgagaggcagcagtaggagcatcaagagtctaaagccaattgaacaacgtggaaaaaaatcctgactcaaaaaaggctagaaatttaggtaaagcttagtatatacttgcttatatatgagtttctaaattcagtccccatgagggggagaaacggggagatacggacaggcagactgaagatttagaaaggagagggcaggctgggttgttctggtaagaggaccaataagcacattgtcttgaatgtgccatttttaatcctccactatccagtcaaaggctttgtgggagttattggaattctagagccagtgtccctgcagatacttcactcccaggagcctagccccaagtagccctcttatacctcatatccgatttcccttgtgttacaaacttcagtctagagtggcttattctgaagttttgccagaagagaggaaagcacgcacttgtgtaagaacgggaaatgtttgccatggaagggcaaagtgagccgtcttcaggagagctgtctctgagcttcaggactggtgcagtatcctttacaggaaccaaacaccatgaaaggatgctcattgggtctaacatagctctcagcatcctgagtaaccaagcatagtgagaaatagtcagcatccctgtggagatacagacattctacacacagacttggatcacagggaatgggatatagaaagggctgaagaagataaggagcagaactcctagggaagttatctccagacagagctgttctgtgcactggggcatgtgtagtaatacccctggcttttgctttctagatttcaatatcattcttacatataagaaaacaaaagtgtttctagccaatgccaggtgcccttgggatgctgttgtgggggacttgctgtcactggacctggcagagggatgtagtagtcaggataggctatcataacaaaagtccctaacatcttaatagccaagaaaggcaagggttcacttagaatccacatattaccactgtgggatagcaagaagactctatctacatcacctttgctagcagacctactgagcaactgatgcttttcctgcattgtagattgccctgccagagggaacaggatgtttcttacacgggcattgaaaagcttcaacgagcaagtcattgtccaaaactacactcacgaaactacaaggacaccaatggcatgtggttgccacagacgacaagaaggtctctcgtccctgtgagcataaaatgagggagtggtaaaaccaggagatgcaaggctcccagaaagcaacagcaaaaaccaaggcaggaacaagtgcagtctgaacgtgttgggcttaaacccatctgtctgctatcttagttattgcacatcagcccaaaggagtaaaatggttttattttttgcatttcacagattgtgggactaagacaaaatactcctgtaacttcctcaaatcagtagcagagctgagatttgagccacggagtctcaaattttcagtactgagcttatacccctcagagacatcactctggctacactacaaagcacttcttgctatatgacaaatggcttgcctttgtttgtggtttctgttagaagcatgatcaaggtatgtttgtaagcacctcccctcttccaccacgccctattgtttctttcataatgaagtcttctattcccagactacatggaaagtgctgccagtcattccctcatgggctgttcatgttagaatctgttgtagggcattcgagcacagcactgagcgttcatcaacacgggtgctaagagaaccagcacctataccccaaatcaggggtactgtcaccaactcttttcaaacttgcccatatgcaaatgaagcatctctaaaccccaaatacctaggccaggaggtttcatcacgcaagcaaacagtggactggggacataattaaatcagtaaagtatttgtcatacagaaatggaagcctgcgcaggacacatgtgaaaaacttgagggagaaaaacatgtataatcccagccaaacaagtgagagaggcaggtcctgaggctttctgggcagccactctatcctacttggcaagttctggtgagagaccctgtttaaaaacaaggcgtacagcacctgagaaacaacatcggcagctgacatttggtctttacacacatgcacatggacacacatgaacatgcacatgttaagcatgttaagtattgcaaactgggagccttctgttttggctaagtactgggcactgtgtcattttatacatgagaaaggtgcagctgagggaggttacacagtggggtgtggaaggattccagattttattccaaaccatttgtcttcattggtggatagtgaagttgtttcattttacacacacacacacacacacacacacacatctctgtctctgtctctctctgtctctctgtctttctctttctctctcctcctccccctccctccttttctttctattgggtttacctttaccccaagtcaaccttagaatacttactcacataaaagagagtaaaggatttatttctcactcttctaatgattcaaagagttctctgggggtaagtaaatatctatctaagttcaagcagtagctttcctaagccatatataaatgagaactctctggttactataaagagagccttagcctgaacacaatagctcccattctccaatgtagtttgcctcctgtgtttaaagtgaagatcttctattaggatgaagtttctgaaggaagagcaaaggatgagggcagaggaaaacaaaaggtcaaagacacatacagaactctcaaaaattctaatgaactgattttaggaagacatgagataggtattagacttaagagcaacttccctaattgagctgaaaaaaaattattaaaggcagcaagcttcctcccaggagaaacctgaaaagagggcaccctttgccaagtagttagagaaggagctgcggtacatatggcagataggcagaggtgcaagtaagaacaaagtgtcttgacatgtatgcatgccataatgaaatctgtgtctttgtgtgctaatcgtgaaggcaaaagcacagctaatggggtggaaagaacatgacctttaccaagtgctaaatgagcttctagggctaaatttcactatgacttgttgacatgtgaccttgaactagcactcaccttggcaggcttcggttttccttccctggaaataaaacgtagcatatgtcatgtttgccaagctatattatgagcttaatgaatggacaccatgtactatggcattataagttgataggagctgcttaagaacatacagaaataagtcgggctaatgctttcttcacatctgcttttcctcctgaacatacagtcaaactgccagtcagaacacactcatgtaagtgaactacacaggcctcattgaaatttccactcttttagatttttttaatgcatgtttttgcctacatgtatctgtgtataccacatgcatgccctcagacatcagaagaagtcatcagcttcctagcatacatgtttgaaaaagaaaagtcaagtttggctatgtacacataccccaccaaccccagtgtcatggaagattgaaacaggaagatcactggggctggtttccccgcctagctccagaattaatgagagatactatctcaaggtagtaaggcagggtataacagagtgggacaaatggcattctcctctggcctctctccatctgcaggtctacatgtgcatgggcacgtgtgcatgtgtgaatgcacacacacacacatgcatgcatgtacacacacacacacacaaagagagagagaatctccgcatctaggtcccactagataaatgatatatgtccatggcacacagtttagttctctgctgtctcttgaaacagaggttatgaagaccacaaagcattctcactgtggtaagctcccagcctttcatgttatcatttgcaagacatccctctaatgaagaactgtaggaatccccaaatctcagagcggcattttcaagggacatttgcctctctgagagtgtcctttcatttctaattccccattctagagagacactgaatcaccagagaaaatctggcaacggggcctttaaagccaacctgtatcccaggccccacccactgggatgttttggcatgttggttttgcttattttgggcttcatttaaatgaagttatgagagccacacatacggtacctgctgtaaaggatactgaaaggttctctgccacactgtgtcagcttcttttgcaccacttcatgcctccagtttgctcctatcattacagggaatggtacctttttcactactatgttttatttccatgcatgagtgtaacaacctccttctactcgttctactgtttatgaatctttgtattgtttcttgctggagctgctgtttgcatagttctcttgacccttcctatgcatgtgaattgatagatgttagagcgtgtttctctgtcatccggaccataagatgtacatgttcagcttcagtagctattgtaaacagtttcctaaattacttttaccagtaagcactactcccagtaagatcagagaacaatgaataagccaggctactgctttcttcctcgtatgtggatctagattttagtgtgtgtatacgtggtgtgcatgtgcatgtatgtgtgtgtgtgtgtgtgtgtgtgtgtgtgtgtgtgtgtgtgtgtgacagagagaggaagagagagagagagagggagagagagagagagtagatcctgaaactagaaaggaggctctgggagggaagaaagatcttcagggaaagagaagaggaagaaataaaaccagaatccacaggaccagaacagaatggagggtagtgaggggagggggagaagggggaaaggatgggaaggagaggagtggggggtagaaatcaataagaatgaaagtgcatcaaggagacccagttctttgcgtgttaatttggtacgtgaatgaatagctattataaaagcccacatagccacatgactctctccagggcccttgttaccaggtaggcacagggatatggcaaggatttccctctcctgtgggcacttttactaatcttactgcagtaataaggatgaaggagactttgaggatttgttagttggcaggaaagatataaagtatgcagaggggttaagtattcgaggataaatactgtttttaattctgtaagaatcctatatcacttgcaattagccattaatcaatattctccatggaccactcagaggtatttcacatccgggcttaattaaaaactgaaagatcttgaatcctataattaggggcaaaaccaattagatcttctaatagagtataacttgtgacctatgataaacacagatttcctctggtaaggattcagtgtgtagttcctgcttccaggagacaggtcctcagccctcagatctctatggacaaggccccagcactgaggacctgtggttattctgtgtacattctgaatgttatggttctcttactcagcgggaaccatagttctttcacagtgaaacatagtagagccaaagtttttaatctggggccagacaacatggtccatgtttagaaacacagaaggtgtgagataaggccaggaaagtacaaggtcaaaccaatatggattacccagcaagacctgttttccagtaagcaactagcacacaaacacacatgtttcaggctcgagaaagaattataaacaactatctatagactgatagtctatagtggaggaaattgggtgtaagtattcttccagctttgtgaattcttaagtccttccttggaactgtactggtttcctcgccaggatacatcctaccaaacagtgtgaccaacagtggctgcagacagaatggccaagagttcttccctccttcatcttcagttatccagggacttcataaatgcccccctggggcccctttagcttctgggggtccctgttcatgcttttctctacaaaggcatcagacggcctctcagccgtcaaagagaagaggctttggcatagtgttgactcctggttgtcgaatacagatgctggatgacatgttggaggagtggaactttgggcaagctgcttatgtagtgcacttctatccacccacctttgaagtgaggaggagaggtagttaactctaagtcagtagtggtgctgaacaaggtctgcagaatgcttcagcaaacccttgcttttctggttgttgcttctactactaggagttgcatagcatagttctgacagtgatagatctgcagcttgattgcagcagtaaaaacttactcttaggcaccaccacgtgctaattgcaaaggcagtgtgcactttgcatatgctcactaattccaccaccactcacccctgtgaggttggaataatcttcatctctatttgaacaataggagaaagtaagcacactgttaaagaccatggtcaagatcatatgattaattaatgctacagttagcacttatgcccagagggtctgtctctgctgtgtgtattttcccttacgcttgtacagaataacatgtctaggatgccacactgctatcaagagtgaaattatgagggctggagagatggctcagcggttaaaaacactgactgctctcccgaaggtcctgagttcaaatcccagcaaccacatggtggctcacaaccatccataacaagatctgactccctcttctggagtgcctgaagacagctatagtatacttacatataataagtaaataaatctttttttaaaaaagaatgaaattatgagactaagaagatggtccactggctgaagtacttgtaagaggatgtgagtttgaatcccatagcccacctttaaaaagccaggcatgctgtgtgcatttgtggccccagtagtgggaggtgaaaacatatagaacccataggctcattagcaacttcctacttggcaaggtccataccagtaagaaaccctcaatgtaaataaaggtggatggcacctgggaaatgatacatgaggatgtcctctcacctaaacacacacacacacacacacacacacacacacacacacacacacaggcatgtgcacgcacacacgcatgtgcatgcacatgttttatatgtgaatgtacatatacactgtacaaacacacaaaagaatggaatgttcaaaaaaagttctagactctgtctactatcataatcactaggtctagcaccttttaatttgattcattaaaatgtaatacaaatgaataactctttgttcacatggggctggtagctacccctgtgggcatcacagatgtagaattttaggcattgaacataagagtccagatgaagcaagggagaaagaagcttaagatctgaggcaaagatggagatgactaagacttgtcatcaatgctgatcgggaaggggaagagacagatgagtggagtggcagtcttcctgaggcaggccggctgactgactgtctgactgatggtacctccttttaggttagtgtcttctgcagtcagatctttgtgttcgaatgcacagcagtcaagagctcactgtgtgacctaagcatgtcacttggcttctctgttgtcctcagggttctgtgttcctcacccagggcagcggagcaagcatgagctatgataggtgtacccttaggaaagtgttacctatgggttttgtatagaaagagacataaaagtcaagcaaatgagcaaggagatgggtctggcaagtgggaccttgtactggaaacagatcttagcagaactttcaactgtcaataatctgtttaaaatgagaggaataaagtctctctctgtgtctctgtctttttttatgtgtccctgtttttctgtctctgactgtgtgtctctgcctcagtgcctctctttctctctttgtctctgtgtctctttgtttgcctctctgtctacgtcactctctgtcattttgtctccctctgtctctctgtctctctgtctctgtctctctctctctctctctctgtgtgtgtgtgtgtgtgtgtgtgtgtgtgtgtgtgtgtgtgtgtgttatatcatcccatatacttagagaatgttttcttatttgaaaactattcttttcctagttttcaacattaaatgtctttttttatgaaataatgttccttatagaaacactctatataaattagggctcataaatactagggatattttatgtcttcaacagacacaagaaaatgtacaaatatgttttcatctacgtacttgttttaaattaattagtttacatatttgtttatttctatttattgagacagcttttgcatttagctccagctgacctcaagctccctgtagagcccaggccaacctcaaattcacaatcctcctgcctcctgagtgataggattatagttatgtgtcaatatgcccagctttaaaaatattatttcttcactataaaagcttcaaattgcagtggtgtccaaatatgaatatctatattctttgggagaatgaagggccactagaataagccactggatatatctgtgaaggttagaaacagagaggatggtccccagagggctagtggtgactggagggatggcagaggctggtgagtcatgactcaggctctgctgcagcatctccatgtttctttcttgcccaataggaagtctgagcacgtgccctaagcacacacagagcaaggttaaagatgtgcagttcctcccacctcacagaaatccacagtgatgcccacactgaggtagccacaggagactgattcatccatactaccttctacccagtactctcctctcccctcccctgcatattggcccctaggcaaatctgtaggagttctgaagctcaggagtccctgggtatcaaaggctcccagctacagtctacctagacaggaaagaagccagccagagtacagggagttgccaagaccagagcagaaggcttcttgcattttaagcagcatatgcaaattcaattagcataggtttcacttccccagtgtggctcagccaccttcccaataattcctaagccaaactgacccagtttgaaatgaaaatcaggtttaattttagagggatctgtttatccttgtcttgggctctgtgtattttttcccccgtttggcttgataaacatccaagtgcattattcccagacaagcagagtactgctgacagccatgtgatagatgaccctgtaggagagtaaaactgcctagcactgagggaactgatcaggccctcttgcacccaaggaggcttctacactaagtcattttcctctgctttctgccaacctggagattttcttctggggtcccttgtaatggaaaaataccacagtttacggtgattttaagcttggttacactggggttttgcaaaaatctggtggtattctttgtaaacccggaacatctcataaaaacccagttcagggccagtaaaatggcgccattaattacagcagctgtacaccaagcatgagagtccccattaaatccccagaccccactgaggtaggaggctgcaatacctgcaaggcgtcctaggacctcctcacatacacacaattgattaattacttaagtgtaaaaaaacccaaacataacaaaaacaataaacagcccatatgaattgctccttgaatctatatccaaaaatacttctgaccagagaagaggcacagtacattttgttttgactgtatggattggaaattccatgcaaaattgtattggtcacttttgttttcctctgcaaactatgagttcccatgaggccccagctacctctgctttctgccccattggcatgttcacagcccagtatgatgttaggtcctcaaggatgagtgagagcaacttctagacctggggctattggctggggacaattttgacatgccagttttcgattccatgaagtacagaaataaaagaagctaacgtccaagatgctgtgaaatataagcacagcacagagtaggggacagccctttcctcaccctctcagcaaagatttagacaaccctacttctaagccaatcagcactgttaaggctcaaaacccgccactttcaagtcaaggtaaatttgctcatgtgaccaaaccagctcagacagtcaacagggtctcaagggaggaagtgaggattaaagaaagaaaagacaattagacaacactataacatgagtccagctagttctgaagctgaagagggtatactttttccagtctgctcttatatgattctaggttcatacaaagaatatggtcattcataaggcataaagtagtcaaggaacaaacaaggcattaacagagtagtgaaggaacaaacaaaacataaataaatgtcccatgattgctgtattcagggttttaacaagatacaaagaacacattcctctgctatattcatcttaagcctgctttcttgttctagcccaatgtcaaattcttaccaaattcctagaagcagccctagaagctctccacactcatatatgcttataaccttctggctaaggaaaagcatcattcttaacttcgtggtccatctagaaacaccatcaatcttactgagaagtaggtgtttgtcttgttcagcatagcttcgagtactgaaggtaggggttatttacctccggggaaccaataaattgcagtatctcacttttctaactgctttcctgaatctggacaacgcagaaactcagctaaagcccttgtccccctgtttgagttgttcaactgacctcacatctttatagagacacgtaacagtgttgcatccgatggctgtcatttaaggtcacacaacttgataacatttctggaaaacagaaaccagaatgtggttctaacagagaggtggagaagcaaggtccagctcccaagtctgcaggagcctttgttcagcacaggccaggacagacactgcacagctacactgcctgctgtgaatacaagggctgccaccacttgcttgggaactgtgggtaaaaagcttcaccatgatgagcccaagtttccttgactatatggtaatggaagtccccagtggacacaacatgagaaaattcattgatactctgtggagttcccactgcctcacagccagttcttattgaggaacttcttccactcactatgctgtggcagctatgtgtctgcttattgttagcattctgttggttttggagacagaatggagtttataccccagagctgacatttagtatacacgtgactgtaaatgacaacctaacttaccaaacctgggtttattcatttgcaaactcagcattaatcatggacgtattatttacctcacaggtactattgaatactaaactaagtcagatgctctgaataaacatctaggttagtttctggtgacagtcattggcttgtaaaatgattagttgaacaatgtattttaaaagtcatatttggttgggttctgttgttgaatctaagttctaaagttctatcagcaactggattctgaaaatgccatagctagcagagaagtctagatatttagttctggcaacttcataacagaccaaagagtgctagtaggctttttaggctgcagttctgtgatgacccaatgcactttttggactctggaaagcttagagcatgctgcccctgaaattttagattcatcagtagataacagacaatggtaaattttcctgggaatgaatataggaccatagttatctgtccctctttatatgttggctatagtaccccagtggcacagtaccccaggttgaatagttctgtttaatacactcatttagggggcttcttagctttcttactgactgcacacacacacacacacacgttttacagaaaaaaaatgtcccacatctacaagatgatactctgcccaagaggagagtgtttgatgcatctccatctacacaaaagtcagaatgtgtgatgccttccagcctccatcgctgatataaccttggggtccacaggtagtttcttttaatcattggctcagtttgatgtctgaaggatgagcagatactttccaagtaaaataagaagggaagaaagaaccttcaggacacaagtactaacatgtacgaagacccaggagaggattcaggatggagagaccatcctgtatgaaaggtccagatatggattcatgatggagggagcattttgtgtcttaagatccaggcaatggcttggaatggaggaacaccctgggtaaaggcacaggcaaggagaaaatctagagccatgggggagggcagtatcaaaaagtttatgtggccagtgcagggtcacagtatagaagatgctgaagcactggtagggactgggccatgccttttctaaaagtgttctggtcagggtctgggtatattctaccctgagctgaagccattggtaaagttaggatgtcataagagctcatattgtcatggccttgacttaccaagggttctttgtatttgaaggcctatctgattgccttctcttgcaagaaatggtctcacctcatggacctgcatgtttacctgagacattttagaacatgaattagcgcccatctccaaatctagaccccagggttggcttccgcttaccaactgtacccctttctgcctgcattcctcatacccaaggaggcctcccatagactccaaagaggggaacatgcaatctacttgctgcagtgcaacctcatacagagggtaaaacacccctgcagtgacaaacaatatactttccttcctggcatgtgggttgctttccttttccagaattagaagaatgaaatatgtcacctgtctaacactagaggcttagagtttccttctcaggtgccaaagctggctcaacccacagagcacactcaggcctgtgtccgcacctttatgtgagtgagaggactgacccacagtaactgtactggcaggcagatgaacttctccaaatggtattctagaaactgtagcacttgaggtgctaggagagagaaagagcagtagtttgctctagacctgtctgggaaaccatttagtatggtcattcactctctttgaaggatatttgtctagaaaccctgaaagggtaaaacagtttatcatttttacacttacagtaaaagttctttttgccagacgtttaaatgtatggctttctaaaaatatatcaattatacctgaaactatcacttagagagcacccactgatgcagacaatgtagaggatgtgaactaggtcttctcagtcttttgaagcttttgatctgttatcagggaactaatggattaagattagaacatcgtggagtggcttgtgtatcttcggattggtgccagcactgggccaccttgggtctgaactcagtggacagtcccatgatcccaagaggactctcaacacccccagggtccctagaatgaccaatatcttaggatcactggtgagtggaacacaacatcttttccaacagaatgagctacgaccagctggagcacagacaaaggaactcagaggctcaagttccctagcctaaagaaagatgcccaagaacatacaagaagcctacagaactccaaatggaccataaaagaaattcctcccgtcacataataatggaaataccaaatgcacaaaacaaagaaagaatattaaaagcagtaagggaaaaaggtcaagtaacatataaaggcagacttatcagaattacacctgacttctccgcagagactatgaacatcagaagaccatggggacatgccatacagaccctaagagagcacaactgccaactcaggctactatacccatcaaaactcaactatcatatatggagaaaccaaagtattccatgacaaaaccaaatctatacaagaactttccataaatccagcctttcaatgataataaagggaaaattccaacacaaggagggaaactactctctagaaaaagcaagaatgtaatctttcaacaaacctaaaagaagatagctacatgaacaaaattccaactctaacaacaaaaataacaggaagcaacaatgacttttccttaatatctcttaatatcaatggactcaattccccaataaaaacacatagactaacagactgcttacataaacaggacccaacattttgctacatacaggaaacccatttcggtgacaaagacagacactacctcagaggaaaaggcagatttccaagcaaatggtcgcaagaaacaagctggagtaaccattctaatatcgaataaaattgactttcaacctaaacttatcagaaaagataaggagggacacttcatactcatcaaagataaattttaccaagatgaactctcaattctaaatgtctatgctccaaatgcaagggcatccacattcattaaagaaactttactaaagctcaaaacacacattgtatctcacacaataatagtgggagacttcaacaccccactctcagcaatgatcctggaaaaagaaactagagacacagtgaaactaacagaagttatgaaacacatggatttaacagatatctacagaacattttatcctaaaacaaaaggatatacctttttctcagcacctcatggttccttctctaaaattgaccgtataatcagtcacaaaacaggcctcaacagatacaaaaatattgaaataatcccatgcatcctgtcagattaccacaaattaaggctgatcttcactaacaacataaataatagaaagtccacatacacgtggaagttgaacaacactttactcaatgaaaaagagacttttagagcttaatgaaaatgaagccacattatatccaaacctataggacacaatgaaagcagtcctaagagaaaaaactcatagctctgagtgcctccaaaaataatctgaagagagcatacactagcagcttgacagcacacttaaaagctctagaacaaaaggaagcaaattcacccaagaggagtagaaggcaggaaataatcaaacaagggctgaaattaaccaaatagaaaaaaaaaaaactatacaaagattcaaccaaatcaggaactgtttctttgagaaaatcaacaagatagataaacacttagccagcctaactagagggcacggggacagtatcctaattaacaaaatcagaaatgaaaaggtagacataacaacagaatctgaggaaatcaaaaaaaaaaaaaaaatcatcagatcctactacaaaaggctatactcaacaaaactggaaaacctggatgaaatggacaattttctagacagataccaggtaccaaaattaaatcaggatcagattaatgatctaaacagtcccatatcccgtaaagaaatagaagcagtcattaatagtctcccaaccaaaaatgtccaggacgagatgggtttagtgcagagttctatcagaccttcaatgaggacctaattctgatactcctcaaaatattccacaaaatagaagcagaaggtactctacccaattcattctatgaagccacaattactctgatactaaaaccacacaaagacccaacaaagaaagagaacttcagaccaatttcccttatgattatcgatgcaaaaatactcaataaaattctcgccaaacaaatccaaaaataaatccaaatgatcatccatcatgatcaagtaggcttcatcccagggatgcagggatggttcaatatacagaaatccatcaacataatccactatataaacaaactcaaagacaaaaaccacatgatcatcttgttagatgctgagaaagcatttgacaaaatccaacacccctttatgataaaagatttggaaagatcaggaattcaaggcccatacctaaacatgataaaagcaatctacagcaaaccagtagccaatattaaactaaactcaaagcaatcccactaaaatcagggactagacaaggctgcccactttctccctacctattcaatatagtacttgaagtcctaaccagagcaattagacaacaaaaggagatcaaagggatacaaattggaaaggaagaagtcaaaatatcactatttgcagatgatatgatagtgtatatataagtgaccccaaaagctacaccagagaactcttaaacctgataaacaacttcagtgaagtaactggatataaaattaactcaaacaaatcagtggcctttctctacacaaaggataaataggctgagaaagaaattagggaaataacacccttcaaaatagtcacaaataatataaaataccttggtgtgactctaactaaggaagtgaaagaactgtatgagaaaaatttcaagtctctgaagaaagaaaccaaagaacatctcagaagacagaaagatctcccatgctcatggattggcaggattaatatagtaaaaatggctatcttgccaaaagcaatctacagatttaatgaaatcccataaaaattccaattcaattcttcatagaattagaaaggctatttgcaaattcatctggaataacaaaaaacctaggatagcaaaaactattctcaacaataaaagtacatcttgtggaatcaatgcctgacctcaagctgtactacagagcaattgcaataaaaactgcctggtactggtacaatgacagacaggtagatcaatggaatagaatcaaagacccagaaagaaacccacatacctataatcacttgatctttgccaattagctaaaaccatccagtggatagaagacagcattttcaacaaatggtgctggcttaacaggcagttatcatgtagaagagtgtgaattgaaccattcttatctctttgtacaaattttgctgtaagatcaagaattgacaaatgggaactcaaaaaattgcaaagattctgtaaggcaaaggacacggtcaataagacaaaacagcaaccaacacattgggaaaagatcttcaccaatcctaaatcagatagggagctaatatccaatatatataaagaacccaagaagttggactccagaaaaccaaataaccctactaaaaaaatagggtatagatctaaacaaagaattctcaagttaggaatatggaatggctgagaagcacctgaaaaaatgttcaacatccttaatcatcaggcaaatgcaaatcaaaacaaccctgagattccacctcataccagtcagaatggctgagataaaaactcaggtgacagcatatgctggcgaggatgtggagaaagaggaacactcctccattgttggtgggattgcaagctggtacaaccactctggaaatcagtttggcggttcctcagaaaattggacatagttctaccaaaagaaccagcaatacctctcctgggtatatacccagaaaatgttccaatttgtaataaatacacatgttccactatgttcatagcagccttatttataatagccagaagctggaaagaacccagatgtccctcaacagaggaatggattcagaaaatgtggtacatttacataatggactactactcagctattaaaatcaatgaattcatgaaattattagacaaatggatggatatggaagatatcattcaaagtgatgtaacccaattacaaaagaacacacatgatatgccctcactggtaagtggatattagtcgagaagctctgaataccccagatacaatttgcaaaatacatgaaactcaagaagaaggaacgtcgaaggtatgtatactttgatccttcttagaagggggaacaaaatacccatggaaggagttacagagacaaagttccgaaaaggggctgaaggaatgatcatccagaaactgccctacctggtgatccatcccataaacaaccaccaaagccagacattattaaacatgccagcaagagcttgctgacaggagtctgatatagctgtctgttgagaggccctgccagtgcatgactaataaagaaatggatgctcacaatcatccattagatggagcacaggaaagtgaaggagctagggaaagtacccaaggatctgatggggtttgcagccccctaggaggagcaacaatatgaattaaccccagagctccctgggactaaaccaatcaaagaaaacatacagagggactcatggctctagctgcttatgtagcagaggatatcctagtctgtcatcaatgggaggagaggtccttgggcctgtgaaggttccatgccccagtatagaggaatgcctgggccaggaagcaggagtgggtgagtttgggagcaggggtgggggaagagcataggggattttcataggggaaagtaggaaactatttacatgtgaaatgtaaataaagaaaatatctaataaaaaaagggaaaaacgattagaacagcttggtaaatgctaagaaaaactaaaacataatgacatggactgggaaggagctgtctcgttagtgtggtgatcggaaggcaaaaatctctccaagaggtgtgagattcaccctaaatagtaagtgtttagagggaggcaatgttagctatctgtgagaccagcttccaggtaggcaggacaaaaatgttgtagtgtggtgtggcatggtgtggcatggcactgtgtgctgtagcatagcatggcatagtgtggtgtgatatagctgaccacaccagacagggattgaggtagaaagaaaggaaatcacaaagatggaaagaagcagatcatagtctctcatggccctgactgagttgtggagtataagcgaggtattaagatttcatttttactttaagaagagcacctttgctgttctgtagaagcttttaggataagcaggtatgactgactgggcaggaggaatctgatggtcaagtgcgagaaaggagtgggggttatggttggagttacaacctctttccctctcagggaaaaacaaaaacaaaacaaacaaaaccacaaaacaaccaacaaacaaaacacagggcaatgattataataaatgtgactggttgactggatttggaccaggagagaaagtgaacgcgcaaatgattcaacaagttttaatatgagaatattataaataggggcgatctctagaaaagcaaaaaagatggaggagccaggttagtggtggaaatgttactgtgtttcctttttcaagttacctttgaaattttgttcctcgattcagtggccttaaggggtatgtaacatatgaatagcacttgggaacaaggatttgagtgaagtgtcctcttgtatgtcaaataccacaagactgatttgaaaggctatagcaacatttggcatttgtctgttctttcattcaacaaacacatgcttagtacaacaacctgggagcatctggggaagcccagcaggtctcttctcatcttgggtgctggtgagtgggtgatgcagcttgtcactgatatatttatctggctgcctttccctgtggtgggtctcttgagtaaatgttgaatatggctaagatatttgcatataaaagaaacccacaaaatcagtcaattctagtgtacagattttcagtctttctctacaagaggaaatcacctgacctctgggaagctcagatgatggctgtgctgaggctatgcactgtggacctcatttgtcttttgattatctctgtctgtctagagttggccttatgaacactaatgtttctagaacctgcttttataccactgggagatgagaaaagaatgttcaatttgaattataaatacttttttttaagaaaggactttgaatatccactaatatagctaaaaatgtccatcaaacaacatgatagaattagacagtcagcagcaaccagtgatgataagccaggatattctaaagttagttgcccaatagcacatgaggctgatctgaaggagaaagattgtgccatctctgtgtcccaattaggtgacttttaaaagatttgagaagttgtagaaaccatcagtacacatagaaaatagcaatgcagatggcagcatggtggagtatatgcctatagccctaccatgtgcaagcctggggcaggagggttgcaagttacttctaaggacagtttcagaagagaggacagaaaggagatcaaatggcagcatagtctgctttgagtgacagcatgagatgccactgttgggaactggccgagtgctttgattcccaggcacacaatctgggacactttgcggttgtctaaagaaactatcatcaggcatttaaactttaagctttctagagttttccagatagtccttagtacattctgttaccataacaaaataaactgggtgcttattaaattgcccagtttgtaaggcagaattccaagactggtggacccatctgcttgtaaggacacccataaccttgttaccatagaaattacaacatgattggaggacatgggggaggggaatcacatatgatgagacagaaatccaaagggagagtcaaatatttaaactctcctttttacaacaaccaactctagcagaaattaacacaggaccctgcaagaactgtattaataccttccaagcgtggcacccacataactaattaccatacactatgggttccaccaccttctcaccctgacatcctgggaactaagcttgcaacatacgagcctctgaagaacacagtccacctctatccccaacatggtgtcctaacagtctaggtatggatgcacacattgaaatgacataccagggtttacagtccattatttttcttaatctagaagtaggacataaatgtgaatttacatagcagaaatccacatgctctgctatattttaagtaactgagcagaatgtattggcatttcatttttaaattccttctgtaccttccaaatgcatttttgctgtgtcgtgtgattttgtcagtatgggctgtgctgccctaatttacctgcaaacctgcggtggaatgcaacattgtgcaatgcttagtttcccccccccccaaaaaaatgtattttagatttacttatttttattttatgtacatgggtattttaccttcacttatggctgttcaccacattcatgcaacaccaacagaagccagaagagggcatgctatctcctagacctagagttacacatggttgcaagccatcatgtggtagctggagaatgcaacctgggtcctcttcaggaatagcaagtgctttttttttttaagatttatttatttattttatatatgaatacaactatagttgtcttcagacacaccagaagagggtgccagatcccattacagatggttgtgagtcaccatgtggttgctgggaattgaactcaggacctctggaagaacagtcagtgctcttaactgctgagccatctctccagccccagcaagtgcttttaaccgctgagaaatctctccagacccagaaaaaaagagttttaattcttttttttttttcatgccagggattaagcaagacttcatagagatgacccagttttaaaaggcaaccctaaatctcaagagattacagtatttcaaggaagaataagctcctcaagttatagcacatcaggcattcaatgaatgttgatctaataaaataatccaatatttaagtatattcttcatagtgacaatagcagctgcaaaataggagtagacacgggttgggtttttatgccttgtgcttcttatggtttattaatttgatatttacaatatttctagagctgggagatgcttcagaaggtcaagtgcttgcatgaggccctgagttcagatccctgaatccacataaagaaactgggcactggtgtggttctatggccctagtgtgcagggaggtctctggagctcactgaccacacatgggtttagtgacagtgccttgcatcagaaaataaactggggacaatttacaaagcctccagatatggctctctgaccttcacacttatacactcacatgcatgcatccgtacatacacggacacacacacactcacacatacatacaatacataaatacatatgtgtgtacatgtttccacatatacaattctataaagtatgttttatcatttccaaataatggtaaacaaagttactaagaggtaaaataccttgtcaaggccctacatttgagatgctagatatgaagcttatataaaggctatctaaagcctaagaaaacatagacattggcaaaacagtgtgtgtgtgtgtgtgtgtgtgtattagagagagggaattaaaagcagataatatgaatggttatatatggattatgaaacacattgagttttgtttaacttttcccatagatgtaaatgagaaaggatttctgaatgggcctacggaactatcattcatgttttaccacctgtcacctagttgagatgacctcctttgtttcatggtgattctccacccatgcccctacccttaggctaccttgaaacagatttcacacaccctgccatgaagagcaacaaaacaatggacaattctggagaggatatgtgggaaacggaagcttcattcactggtgggagtataaactggtccagccactctggaaatcagcatagagaaccgtcaaagagctagaaataattattctttatttcccagctattcccctccttggcagaagaagcccaaaagattgatcacctcagatcttcatgctcagccatgtttgttgctgttctatttacaatagctagagagtgaaagcaaactaaatgtccttcagctgataagcagggcaaggaagtgtggcatctatacaccacagaatactgttcacttctggatttattcaccacataatgctgttcatgacagaaaagataggatcaagtaaggtaactcaggcccagaaagtcaaacttgcatgtcctctctcatctgagatacctagctcaacatcttcagatatgagtctataacctctagtaacttcagaaacccagaaaagtgactggataaggatgaggtggctaacaaagaagaactgcaagatcacttcaaaggggaatgggggtggtcgctaattaggcagggatggagaaggaggcaggagagcaaagtcaggatgtctgaaaaagtcaaaaggggtaataattatctatctaaaatatcatgtaactctgtctacacatagagtaaacattaaaatttctcaccttggttgacaatgcttcccacaagagctgtagacaaaaatctagcaaaatccacaacacaaggaataggatctttatttatttaaagtaagttttcctgatgccatatgtagcaagatatttttatacctacaaaaacttaaaatgacaagaatctttctttctcaggaagcccctgctgtgtgacccatcacatctttgtatctatgtgttttgctgagtattactatttttagctgattttctccacacatctgagtgagtccctgatattcttcaccatgctaaacaagtaatgctgttgttagctttcttttagaaatcacttgctggcctcccagcccctgcttccttctgtccttgaaccctcctgcccactggttttcttgagattttccagcgtccagccatgaaactcaaacagctgctcctaagagatcatcatcactgctacagcccaaagctggccacaaatagtgctcttatgctgcatcggatagcaaaccacactgcaaagctgggggatgctgaggtggagcccctttgtggtggaaaggactttgaacagcgttatgtcagagaagttatgttctaatatttgcttgcatgtgtgtttcctcagtgccaactaaactatagtatatacttatgaatatacataagaaaattttggcattgtatctattttgaggtgtttctaccaccttactagctgagtaagttcatttaatttcaatgaaaccagaaagaacctgttacaatggttacctttattaaagagaaagatattgagagaatatggtgaatttagagaatttaagaaaggaaaggaaaaaaaacagaaataaaggtgtgtataaggatctaagaaatgggactaactaaggggggtgcccccatggtgtcacccctgacaagctccaactccaccaagagttgtgcattgcttgagacgtgttatggggtcatgtctttatctctagggaggttccttagttgacaagtcctgccaacgttaaacttggtgcaaaagagtctacttctttgaaggtgttggaagtagataaaaaacccattacattatctcagacctttaatgtagactaaggaagatgatacatcatagggactgacacttgataaatactctataagggctagtattattctgatagtatgaggagacaatgagcagtgactcaaccctaatgcaaagtcatacactcattagcaatccgttccccatggcaaagtctgatacagaaataactccttgtctccagattggctaggataaggaaattaaatataatagatagatagatagatagatagatagatagatagatagatagatagatagatagatagttatggaatttcagtgaggggttagtaggtttattgaccatagaatgatacagttatgaggtattgtgtaatattcaggcatattcattggcacatacattacctgaaacacttagtaaacctttgtgctgggaacattcaaaatcgtctttgtctctgttattgtatatgtctagttgctgatgagtatttcatgttgtgctaaagagcatgtcaaataatccctctaacccaactacagcggtggacccattgaccactttgtgtctaacccctcttcttcatcagctgtgcaaatccctgttctctacctcctatatggtcaacattattcttttaataccaaccgtgagaggcagacacaggaagatcctggcactggctggcctgttagtccaagcaaatagctaagaggacctgtctcaaaacacagtgcgaggaactatgggaagcagggtgataggcttgtaggacatgtgtgtataactttttctttgcttagatacttagtgtcttagttagggttttactgctgtgaacagacaccatgaccaaggcaaggcttatacaaacaacatttaattggggctggcttacaggttcaaaggttcagtccattattatcaaggtgggagcatggcagcatccaggcaggcatggtgcgggaggagctgtgagttctatgtcttcatccaaaggctgctagtggaagactgacttccaggcaactagagtgaggatcttatgcccacacctacagtgacacacctactccaaccaggtcaaacctattccaacaaggccacacctccaaatggtgctctcccaagaatatacaaacaaccatcacacttagcttaattaagatgcatgtcattgtcccctattctctttcacctcttgcaggaattgctcaaaaccaaattcacagatgtgggaggtgacagaggtaacatgttcagtgttctaggagctcaggtaagtaattctcagtccacctcagatccacatcagtgggaagcacatgaattagaagagctgaaagatatctttctagaaggctagaaaccatttatgccctgattttggcagtggttgaatatacatgtctacagatgccagtttcactgggttttcatatctgtgtgcttgtgacttttaagaaagaattttctaggttccaacaacagagagtaattgatctagacatggtccaagagtcagtagttcttacaatctcctgcttttccttgtctgtgaagtctcatggtcaggcaggattgagaatcacctagaaacttcacaaaatgtcattattctcccagtcattaaatccacaaatatctgaacactgttgagtagtgaagatgtgggaaatgatcattctgcttcctaatttttactgtctttcccttcttactacatgaactataaagtaaaattatcactactgaagtattagcaagtaacccaggtcctcaatcttcagtatccatctccccactaacagttgcctttggcataggttgaaaatatggttcccaattcctataaggcaggaagaacacaaatttgagaccagttttgaatagatggacagtaaattccagggccacatatataaccagttctaaaaaaaggaaaaaaaagaaaaaaagaaaaactctctttcaaagaaaagttgggggggggggaggtaggcaaacagaggcaggaaataaacatggttctccagttccagtgtagaatgtgagattcagtacatcttagctggggtctaaggaatctttaaaatctagcatggggcaagtatgtacctgacacagaatagagagcaatagatactgtccacaagtgctgcacatacaatacctaatttaatactgaaactgagaatatatactaaataaaacttaattgagcacaagggaaaaaaaaactctgcagattgcatactttatacctatctagacttcctcagctggtaagctgaaggtagagtagagactgacaagccttgtaaaccgcccaaagcaaagctccagcccacacaatgcctgggcttcggaagtctatacataagtctaaagtcagactttgcctggagagaccgagttgtattttgtttcctccctggggaaagtgaatgactatagatagacagggagtcaccagggtcctcaggttacagctgcacaccactctgtgtgagcagggtctcaaaccagtgctgaccactagtgactagaggaagagcctgagaactttgatttgagctagctcttcaactacctctgcagtaaaagggaagttgttcatgcattaaactttatttcctcatattccagacagtctttctggaacccagtggtcctagctcattgttttatgtctgtagttactttctgcctgattctagtcgctagagcatctctgaaaataacaatgtgctggttgaccattgctgcctcttttatcatgttcctctgctgcccatgctatggcagctgggctttctgctccatcactgatccaacacttcaggtagttacatcagggttaccagttattcatcaggttccttccttatgtctctataggctccatcttggtaaggctgagaaggttatattatttcctcaggattatattccctatatacaatagatataaagcactaaggtattgactccaacagtaataatatccatatatgatgaatcatatggttacataaaagtttatgcacagtattcatccttcatttctacagaggatttccttgtatatcagattcatggacgttcaagtcccttatccaaagaaatgtggcattcatgtgtaacctacacaaatcctcttgtatgcttacaaatcctcttgtacaaccatctccagactatttataacattctccatttttaaggaatagggacaagaagcaggtgtgtttctggttagtacagatgcatttttccctaagagctctgaccttcagctgacctgcaaaagtgaaacttatagacatggaaagacacctacacacagcacaatgcaagcatgtgcatggtgtgtacacatactattgatgtgtatacacagaagtacatacacgaatgcccacaaaataaaattgctgtttttaggctttgtagccaccagtggccatgggttactgggttcctgaaaggaaagctctggatggatgggaaggatggcaagagaaataacgagccaaggcaaagttctctaatcaaggctcaaattttaatgtacagctctcaatatatatgtgaaaacccaaggacccatccctttgttttggctgagttctgttgctgtttcagctggagtgagttgcaaagtaagttcttcagcagctctggggcaggcaggtgggcagtcctcagttcttaggtctccagcatgtaaatgtaaatgtaaatgtaaatgtaaatgtaaatgtaaatgtaaatgtaaaggtaaagaaaggtaaaggtaaaggtaaaggtaaaggtaaaggtaaaggtaaaggtaaaggtaaaggtaaaggtaaaggtaaaggtaaaggtaaaggtaaaggtaaaggtaagtgtagcaaggccagactcctggctccagtatcagaagaggtttgtttagccaactcaaggctgggggaagggaacgaggcttcctcaggcttttgtactttgtctatgctccaagctctctttaaccagccctgtccaatgaacatataatacaggccacttaacatgccctagtaattatttaaggtataacaaaccaggtaaattttatttcaataatatattacttctcccaatatacctaaaatatctccattgtgtaagagagccttagcttacctggtaccgcctgagtgaaccacgtggagcatggtttgttgaaaaaagcaagaggaatttattgttccagtgtactggttccagccctgtggtctgagaaatgctaattagcctctcccttctggaggggcaagtgtttcatgaccttcccaaagttcctaagctgaccttttcaattgcaacatataacagacagaaaaacaaagttttcttgtgttttaagtttttcaggctaaaatttggtgtgtattttgtggtcatagtgcagttcaagttgaaagagctgtgttttaggatttggtaccctctggtgctagatggctgtctgatcagtgataaacactgttctcttaactactctgggaacattctgatccagcaagtccttcaggcttcactagcagcttctgctcattcatgtgttcagtgttcaggtctaccatgctgcaggtgctgtccttagttggtggaaacagaggtagctcttgctagtgggtatatatattctttcccccaaaactcatgttgaattttgaatccacctactgccagtcaggctgaaatgatgctcacaggaaattttccaatctcttggaatggtgccattatgaaaaaaggaaagtagacacagagacacagtagacttgaaaagagagattaacattggagtattgattctgtaagccaaagcacactgaagataaagacaatgtaggtgctcttcttcaaagctctcaaaggcaagcatccctggctataaaagacctctccatggtgccagtatggaaatgtgaacaactgaaaagaaaaagtagctagagagaagtagctaggggcaaaggagaggacttccccaattgcctcttgaagcagctgtgtgtgggataaaggtgttctctgcaggaggcaagaagaagaatctcaggtggccttgctccagtttccctgagttagatagaatgttaccaactgttgagaagctctgcatggagaatgacaggaacagaggtgctatccatttcaggactttataaagcatgtagcaaacaaaagaaagagaacaggaagcataagataagggacaacagatcatcaattcagccgactgagcatcatctcaggcactgacaagagtcaggcagaaagcactgggaaagccatgctaaagccccatactgaaatcactgactgagacaccccagggaagactggcttcctggaagatgagtttctggcttcccatttctgcccgaggtacttctatgccatgagataagcaatagtaacctctgctggagatggtttaccttctggctgttcttcagggagcgatgcattagatacgtttagccatctgatgttctctgctctttgctgcagagggggcagcccatgccaccacaggtagttttggagggcattagaaataaacatgcttgaaatttagacaagggcaggggagccccttgctccctgagcctgctagcaacaagtttaaaacaggggtgacagtctaccaatgcaaatccatcatcaggtgaagaaggaagacacaggaaaggaaaatgacttttctggttcccacccagaaaaaaaatctctccacttattcatgtgaatattatccaagttatacattatttataacatgaagctggaatcacaaacatcagccaagtccagtagttctgagctgggtgagctaatgtgggtttttcttgaactatattcttcctctgttaagtccattagggacataaccgcatttggggctttccagaagtgggccaataaaagcaaggaaatggaatatttcattgctacattgtgttgattgataggcaggtagtttacagaacagctgaagatttctggaataatgtgaattatcaagtgtgatttgacactggatcctcccgggtgtgctacaatttgatagtactgtcatatgcattcataaattctgagtctgagagatgttgttcactggccatctcagagatcctcagcatgtgtcactgataactttaatctcaggacaatccttactaacaaaaactgagagtgagcagatgagtgggaacattccaggcaacaggaagaacaacttaaggggtttgcttaagagcaaaagtacaggaatggtgattgaagtgaatagtaatctacacctatagtaaaggagacctacatctgcccttcattgccattaagtcatataaaagtcatattcaccctagttgggtgcaacacagacaggaatctcccactcccatttaccaaaagagatgtgtgggacagtttcagaaagcaagatggaaggtttttctaagagcaaagaatgaagttacagggctgggattagagttcagtggataacaggttttcagtgaaagccctaggtcctgagtttgaattctcagaactcatttaagtctagggatatgagcatacatctgtaatcccagagatcatccagcaagattggaaatggagacagggaagcccctagaagctcatgtgacagctaagcctggtataaacagtggtaaacaagaaacctcatctcaaacaaggtggaagccatggactgacattgtcctaccttgtcctctgttgacctccacatgtgagcgatggcataggaatgcctgcactctctcatatgagtgggtctgtgtgcatgtacagacacacacacacacacacacacagtaaaagagtgacattgtttataccaagtacaaaataaataactaaatgtagcatcattttctaagcaatataattatctaaaatactttcattctctctatatctctgtgtctgtctgtctgtctgtctctgtctctgtctctgtctctgtctctgtctctgtctctctctctctgtctctctctctctgtctctctctctctgtctctctctctctctgtctctctctctctgtctctctctctctctctctctctctctctctctctctctgtctctctgtctctctgtctctctgtctctgtctctctctctctctgtctctctgtctctctctctgtctctctgnnnnnnnnnnnnnnnnnnnnnnnnnnnnnnnnnnnnnnnnnnnnnnnnnnnnnnnnnnnnnnnnnnnnnnnnnnnnnnnnnnnnnnnnnnnnnnnnnnnnnnnnnnnnnnnnnnnnnnnnnnnnnnnnnnnnnnnnnnnnnnnnnnnnnnnnnnnnnnnnnnnnnnnnnnnnnnnnnnnnnnnnnnnnnnnnnnnnnnnnnnnnnnnnnnnnnnnnnnnnnnnnnnnnnnnnnnnnnnnnnnnnnnnnnnnnnnnnnnnnnnnnnnnnnnnnnnnnnnnnnnnnnnnnnnnnnnnnnnnnnnnnnnnnnnnnnnnnnnnnnnnnnnnnnnnnnnnnnnnnnnnnnnnnnnnnnnnnnnnnnnnnnnnnnnnnnnnnnnnnnnnnnnnnnnnnnnnnnnnnnnnnnnnnnnnnnnnnnnnnnnnnnnnnnnnnnnnnnnnnnnnnnnnnnnnnnnnnnnnnnnnnnnnnnnnnnnnnnnnnnnnnnnnnnnnnnnnnnnnnnnnnnnnnnnnnnnnnnnnnnnnnnnnnnnnnnnnnnnnnnnnnnnnnnnnnnnnnnnnnnnnnnnnnnnnnnnnnnnnnnnnnnnnnnnnnnnnnnnnnnnnnnnnnnnnnnnnnnnnnnnnnnnnnnnnnnnnnnnnnnnnnnnnnnnnnnnnnnnnnnnnnnnnnnnnnnnnnnnnnnnnnnnnnnnnnnnnnnnnnnnnnnnnnnnnnnnnnnnnnnnnnnnnnnnnnnnnnnnnnnnnnnnnnnnnnnnnnnnnnnnnnnnnnnnnnnnnnnnnnnnnnnnnnnnnnnnnnnnnnnnnnnnnnnnnnnnnnnnnnnnnnnnnnnnnnnnnnnnnnnnnnnnnnnnnnnnnnnnnnnnnnnnnnnnnnnnnnnnnnnnnnnnnnnnnnnnnnnnnnnnnnnnnnnnnnnnnnnnnnnnnnnnnnnnnnnnnnnnnnnnnnnnnnnnnnataatgtgtttgttacataatggtacttatctctgcaaacagatgtgtgtgaacaggatgctggcgtaatcacacagcagctgagaacatgagctctgagactaggatatgtctgcttggtctctctgactagctctgtcaccctgggcaagtgacttctcctcacagcagctcaggttccttaactaacagccacacctcctacatccggtccttgggatggcttgttgcatgtggactatgctgatcaggatggtaatccctcctcataccgaggatagcagatacaagtgcaatcctgctttgctagccacatttcaagtgtttgatgactgcacatggctggtagctacattctgaacaatgcaataggataaaattcttttttaaatttgtttttatttttaattgtgtatttctgtgaggcagtatgtgcctgtgcattccgtatacctagaggacagaagacagcataggagctcctggagttacaggtgtttgtgagctgctgatgtgtttgctgggactgaatttgagtcctctgagccttcactgagaggcctatggtggaattatacctctatgaggcaaacgattaccacaaacagcttggcactcacatggttactcctgcatttgctgaactcttctcctcccacccctgctaccagctgttcttgagttggcacttttccccatttgggtggtgtgtgtgtgtgtgtgtgtgtgtgtgtgtgtttgtgtgtgtgtgtgtagacatagaagctaaagtcacctacagttatcattcctctggaactttccacttagtttttttgaaatgggcagctctcattgacctgtagctttacacagagagactggctgaccaatgagccccaagaattcccctatctatccccacctccgcagtgctggatgagattacaagcatgtgccataatgtctggtcttttcatgtgggttctggggatgggaactcaggtcctcatcttacacagcaagcactttatggtctctagcctggtgagctggaaacagtcattctatttcctctgtgttctcatagtcgtctattcatgctgtccttggcaaggctgtatcttggtcttctcacattttgacttnnnnnnnnnnnnnnnnnnnnttctcacattttgacttctctgaggtcactaatggaacttccaagctgtacccccaaatcctttatcattcatctggtgccaggctagagccttttaggaccgagatcacattccaatgatgtgtgttttcccataatcctcagcttgaaataggcatgcagatgctcgcaggaatgaataattctatgaatcagtctgcaatcccctgcttgttctctaaagcatgtctatgcccggaggcaaagctcacaggtgtgagcctgtaggtgctactctgagaccagatgccagggggtatctttttcaggcatcacgttgcctttgggctttccagaagcctctccaggggtgtcttggtcccttgtcatagatcaacatttgtgagctcatccgcaatcttttcttgcctgtgctgtgatgccaggaggcccttagctccccgctacaatctcctagtcctgggatatcactcaagataaccaccgacaatagaaggaaatctttctttttaaacagcacccctagtatcctagaagaatctatatgcaggcagctacagtttcaggatcactctaagaatttgctgttgaaatcttaatctcttgctaagcagagacaggattttgccaatagaggacagagactcataagtaggattgatgcccttatagactagaactcctgagagaatattctcaggcaagcacctcttcctgcccccctcacctaacccatataaagaagcagggagaaattagtacctgcagctggaagagttcctcaccagaacccaacagtaagggaatgctgctcttcaacctccagtctccaagaatgtaagcagtgtttgtgtgagccatggcactcatggtattctgttaaagcagcttccactgactgactgcccccactactactgtagctcggggacttagacaccctctgttcagttccctaactatgaactgaggcacatcctcctcattacggtgagaaatgggtggagtgctagactctgaatcctacacttaatgagaccactcaataagtcannnnnnnnnnnnnnnnnnnnnnnnnnnnnnnnnnnnnnnnnnnnnnnnnnnnnnnnnnnnnnnnnnnnnnnnnnnnnnnnnnnnnnnnnnnnnnnnnnnnnnnnnnnnnnnnnnnnnnnnnnnnnnnnnnnnnnnnnnnnnnnnnnnnnnnnnnnnnnnnnnnnnnnnnnnnnnnnnnnnnnnnnnnnnnnnnnnnnnnnnnnnnnnnnnnnnnnnnnnnnnnnnnnnnnnnnnnnnnnnnnnnnnnnnnnnnnnnnnnnnnnnnnnnnnnnnnnnnnnnnnnnnnnnnnnnnnnnnnnnnnnnnnnnnnnnnnnnnnnnnnnnnnnnnnnnnnnnnnnnnnnnnnnnnnnnnnnnnnnnnnnnnnnnnnnnnnnnnnnnnnnnnnnnnnnnnnnnnnnnnnnnnnnnnnnnnnnnnnnnnnnnnnnnnnnnnnnnnnnnnnnnnnnnnnnnnnnnnnnnnnnnnnnnnnnnnnnnnnnnnnnnnnnnnnnnnnnnnnnnnnnnnnnnnnnnnnnnnnnnnnnnnnnnnnnnnnnnnnnnnnnnnnnnnnnnnnnnnnnnnnnnnnnnnnnnnatcaccagcaccaggtcaagggaagcatgaaagtccatctcttcaaaaacttagtagacataccacacatgtaaaacattccttatggtagataatgctctaaacaaacttgaaaggcttatttggtttatatgttcttacctagcttgtcagataaaatcatttggaatgaagatatatctcaggtggcagagtgttgctgcacaagtgtgaagaagtgagtttgatcttcagaaccaatgagagagaagccaggcttggtggtgcaagttctagtttcagcactagggaggcagagacaggcggtgatccctagggctcactgtccagacagcttagcctactagtgaaagatcctagatgatgcctgaagaacagcatgcaaagattgtcatctggtctctctgtatatgcatgcacgcaccttagattcatagtgagaatatgtatttctatagatttcaagaagagtgttggcaagcttttctgtaaatgttcagttagcttttttttttttaggctttatcatgaggggtttcatctaaatggccaatgtctagaacacatttcagctcaaattaactgcaaccttttgggaatgtggtaccagatatccatagcaaatgttcccaggagatgctgaaatgcagttcaaactagtaagaacgaatgctgtagaggcaacccagatggacctgctggtgaagagatatgctacctcttcagaaggaagtatacatgggatttaaagaaacaagcaggaagaagcgaatgctttctctcccaccctgcaacctcccttagagctccctatgtgcagagtctagcagagctaggttttcaaaacacataggcaaaacacacattgctggatgtgaaagatggatttgcaagatagcaatagtgacttaagtcaagcctcatcgctccatgccctttggctgctgtgcatttgaatatacttccccatccgtatctaatttccatgtaagaagcaagccactcctctgcttccacacaagttgaaaccagtcttcctgtgagcaaaagcatcttctgtttcctaaataaataaataaagatcacaatttttttttttactatgaatgacacattattcagtcattttctttaaaactgaaactctggaaattaaaaattaacatccttgcctgtgagcttcttgtacacaccagaaaaagtttcaacctcgtgttccacttnnnnnnnnnnnnnnnnnnnnnnnnnnnnnnnnnnnnnnnnnnnnnnnnnnnnnnnnnnnnnnnnnnnnnnnnnnnnnnnnnnnnnnnnnnnnnnnnnnnnnnnnnnnnnnnnnnnnnnnnnnnnnnnnnnnnnnnnnnnnnnnnnnnnnnnnnnnnnnnnnnnnnnnnnnnnnnnnnnnnnnnnnnnnnnnnnnnnnnnnnnnnnnnnnnnnnnnnnnnnnnnnnnnnnnnnnnnnnnnnnnnnnnnnnnnnnnnnnnnnnnnnnnnnnnnnnnnnnnnnnnnnnnnnnnnnnnnnnnnnnnnnnnnnnnnnnnnnnnnnnnnnnnnnnnnnnnnnnnnnnnnnnnnnnnnnnnnnnnnnnnnnnnnnnnnnnnnnnnnnnnnnnnnnnnnnnnnnnnnnnnnnnnnnnnnnnnnnnnnnnnnnnnnnnnnnnnnnnnnnnnnnnnnnnnnnnnnnnnnnnnnnnnnnnnnnnnnnnnnnnnnnnnnnnnnnnnnnnnnnnnnnnnnnnnnnnnnnnnnnnnnnnnnnnnnnnnnnnnnnnnnnnnnnnnnnnnnnnnnnnnnnnnnnnnnnnnnnnnnnnnnnnnnnnnnnnnnnnnnnnnnnnnnnnnnnnnnnnnnnnnnnnnnnnnnnnnnnnnnnnnnnnnnnnnnnnnnnnnnnnnnnnnnnnnnnnnnnnnnnnnnnnnnnnnnnnnnnnnnnnnnnnnnnnnnnnnnnnnnnnnnnnnnnnnnnnnnnnnnnnnnnnnnnnnnnnnnnnnnnnnnnnnnnnnnnnnnnnnnnnnnnnnnnnnnnnnnnnnnnnnnnnnnnnnnnnnnnnnnnnnnnnnnnnnnnnnnnnnnnnnnnnnnnnnnnnnnnnnnnnnnnnnnnnnnnnnnnnnnnnnnnnnnnnnnnnnnnnnnnnnnnnnnnnnnnnnnnnnnnnnnnnataactgtttcctataaagcatccatgccaccttcaaactagtgtactttctagtggttataaggcttgaaaggagaactgcaattctgtagtgaggcccatgttgtacgttatgaaaatggttagttgacagaggtggtgctatgtgggatgctctgtcttctgaccaggggcttgggctatccctgaaagatgctgctttcagaaataccatgcaccaagaaaacatgcccatagccacaatatttcaattagggatacactgcaccctacaccactgtaatcagcctgctaccagcttaccagctgctacctcccagatataataccatgtaaaagactcagtgtaggtcttggtattgtcaggtgaggtactcagaggtagccctggacaggtgagcagtggagatgggaagtccattttaaaccacacatcacatctattccttttaccactgcaatattgtacatggaccatggaacgagtgaggagggagggagggaagaggatgctgacagctgcaggagagaacaggaggcacacctcattcagtgcacgccctactgctatgaacttttgctggaccttcagaagaaacagggatgaaatgagctagaactaataaacataatgtggtggtgggggcatacaactgtaaatggcgaagctcaagtgttctactattagtcagaacccacataaaatagtgaggcacagtggtgtatgtttattatctcagcactggagaagcagaagaaggtggatctctgaagatgaccagacagacagcctgaccagaccagcaaggtccaggccaatgggagaacttgtcaagagaaatgaactgagttggtagatggctcctggggaatcacactcaatgcgtggtggagaatgaacatacaaaataagcagactcggcagaaggaccatggggagacaaagagatggttaatgtgagaaagcacaatggtgatggaaatggcatggtcaggaagggtcttgtcacggaagtggccttaaagtgaagttccatgtaggggagcagccaggatgccaatgggaaaagtttgactattcctcataaagggaaatcacagggtctctctgatacacaaagcactgcattcaagtagcaagacaaagctaacgtcaatgaggaagagaatggatagaggtgagtgatgcaatgtggttattaagaagccaaatgaaaagagaagtggatgctttttaagtatccgcatggcacaacctcatttatacaataaaggtatcaattctctgtgaatttgtttataattcaatgtgttcttcattctaaaaatacccctaggtctgtttaaaacaaataaataaagcagcacttgggtgtgtgaggaagctgtaacgtaggtaaacatcaagccagggagaacaagtggactgttcctgcagttggcctggtgggccaccgtggactggactggaatggtgaacactgaaaggaaggacatcatcagggtgaggttacagaggcatctatgtgtttggtggggcaaccagacatgggtttatgcatccctgctattaccactgggctggaaacaattgatagacttatttcccctgtgccagttttaaccaggtgagggtggagggtgaatctgaagaggctgaggatggaagagtacagaagagaggaaccaggaaccatggcttctgctatagtctggggggagcaacatggttagagatttgccttgtctggatagctcttaagctttgcagaacagagtcaccatggaaatgagatcccataccacatcccctagtaattctgatccaaagatttgggaggaggtctgagcatttatatttttataaactctgaagtaatttgtccatgtttgaagacctcgactgaaatatcatcatgaatatctaatagactgggactagagagggggcttatccgttaaaactactaattgctattgcctaggatcctggttcaattcccagaacccacatggagactcacaccatctgtaatgccagttctagagatttttacacccccttctgaccttcctgggcatcaggcatgcacatggtacacagacatccatacagccaaaacactcatacacacaaaaatttttcttgtagattgcattgataaatttttttcagtgtttttggtggtggtgagatgttccaatgatacatgcaaattagttaagtgacaatgttttgaaacaaaatgctatgcccctggagttaaaaatacattttataagagaaaacggtataaaaagattacattatccttgagccaagtagtatggttcatacttacaatcctagtacttgggagactgattcagaattcttaggagaattgtgaatttgagactctcccagggaacatagggaaaatctatataaacaaagaaacaagtcaacatcaaagtttcaatcaaggatcacactctggacaaggggattaagtgtgaccctctcttcccatgtgaccatcactcggaagaataaaatatcagacaatcaacagccactaaagccatttggagccagtgtttcaaagaatgaatttcaaaaatgatgggagaggtttagaaaatgttatagaagaaagcttaaagcaggtactatagcagaaagtaagaagagctcctaaagaataggtcccaagtgaattgttacagtgcccaataggtcccaagtggattgttacagtggattgttactgggggtcagcgggttaaggaggtttcagtgggctgagataatggatgctgggctggtcagtttgtctggcccaaccagatatccccacaaggaatctatgcacttctccttccccaagctggactggagtttgggggagcactttcaaagaccagtgaagtttctgattacacatagcttccaggcatctgtgttcattaggagactgtgagaaatgagaagaaagatgaaagcaaaagacacaaagcagggccactaagtacttctagtccctggccaagagagaactatcaattgagcagccaaaggcatgacttcagaccagtgcagaattgtctcttctcgaaggccacaccctagcttcctagcaaggtcatttctctgattctcatctttggggaaaagggagatggttgaaccagtaaagcttttgttgtacaagcttgtgaagcttatttctgatcccgggtgcccacataaatctcatagagtctgcatccatatcccaacatggggcactaagataggtggatccctgaagccaacagcccagctaatattgtcaaactgtgacctctatatttagtgaatagccctgtctgaaaatacaaagtggagaacaactaagaaatgcacctgtcgtcaacctccagcctccagagacatacacatcaagacacacacaggcacaaacacacatgtataagaagaaaagaacattgtcctagcatttttatgtgtactgagaacacagagcagagaccttctcacctcacagtggccaggaaacagatgagaaactgttggggaacagtggctcttcaggagacttccccagggacttccctgtccttcatgagtacctacccagccacttaaggttgcatcaccttccaacaggttcctaggctgagagtatactctttaaacgtggaagccatagcgttcaccaaagcatttccagaacaaggcctgtgactactggaagaatatttcttctctttcaatagaacttaccatttgcacaagtttatgttcatagtacaactgaacagaatgtccagaccacccatgcacacccccagggtttgttacagatgatgagcctacatcattatcactcagagcccatgttttgcttcagaattacttgtgattgtgtgtattctgagtgttggaataagtatatcatggcgtggatctacaatatgggatcatatagaccagtgtccctgccataaaagtactctgcagtgtccttgtgtgtgtgtgcatgcgcatgtgcgtgtgcgcgcgcgcgtgtgtgtgtgtgtgcgcgtgtgcgcgcgcgcgtgtgtgtgtgtgtgcgtgtgcgcgcgcgcgtgtgtgtgtgtgtgtaactggaatggacatgtgccaaggcacatatataatgtaagaggacctctttcaggagtcaattctctcctcctgtgatgggttaattagttaactcaaactatcatggttgtgtggcaagtatgtttatgcattgaattatctggccaaccctgaatattatttcattgctggggtttgttttgtagtcacctactgaaagacaccctggttgcacccaagtttggacaattagaataaatatctatgattgtctattacttatgttttgtggccacattttttttattcttttgggcaaattgccaaggagttgggaaaaatcagttttgatgctttcttctgtgtgctgacgaattaagaaattctttcactagatgggtatgtctcccccactgcctctctctagatcatactaaaccaatctatccattaatttagcttctgagatgtgtgagcaaggaagttagtgtgtattgagcttaactggtaggtgggatctcctatccacaaaccggcagtgcattgagacagcccaaatgcttccttttagtttatgcagaggagttgggaatggccgtgtgaactgcaaaatttcatttctatgtcaggcattttcttcccctgtgaacttggaaagttatttagtgtcttggctacaggcctctctgtccataacagaagcttgctgttctcctcagatgagttttacatgaaagaagtgttcatttctgggtggctgcaacgctagccatgaagcttccctctgagccttgcaacttacccatttattgagcatatgctgtctgccaggttgtgttccaagctctagaactatagttataagaaagaagcatacattggtccagtttctgtggagcacaaaaggggccacatccaagaagctctgtagtcaccattagtgttaatggtactgttccatgtaagtataattaatcatgtagacacctatgcatcatatcacaaaattcaccaacagtgtttccattttcttaaacaggtagatagcattatgcacacttgggtaacaagcaactattcaatctaaaaatttaataaaaagatgaagaacctgacctgggatgtaacagcagcaggcattgcaggcagcatccaccatacaattatcccaactctaacattcctcccccatatgcttctgcttacaatgcagattatttacaggatgtccagttgcctttactagtccttctgaccttacttagcttagggaagactggtagagagtcgtctggaaggtgacacattcccatggttgacattccaccaggacaagatggtagctcggagcgatggttctatgaaagaacagtgagtgcagcaggccagaaaaaaagagctgcagcaatggcagagtgactcagttggtaaagtgcctgaggcccaagcatgaagatctgaactccaatgcccagtacccacataaaagccagcgcagcagcacacatctgtaaccacatctctaggggagcagagacaatgggattcctgggactcaaaagggaccagccagtctgtgaaacttcagctccaggaagacatcctttctagagacatgaaggagaaagcaactgagaattacacccaacatagacctctggctccacttacatgcacatacatgcatgcaggcctaagaccatagctatgagaaaagccaacttgagatttctgtaacaagccagtgtgagtgtgtttaaggtcaagttataggtgataaaacagcagcatgtgtctgtgaaacacctacacatgcatttaaaaattgccaagcaccagtgactgaagcaaatgacaataatcatggcaagcgattctctgaattgactccagcatgcaacatgatggctgcccattctttcagacttagaaactttagtgattaggatgtaacacatacatacatacatacatacatacatacatacatacatacatacatacatgcatcatatggactgttcttcagttctctctctccccctctctccctctccccctctctccctctctccccctctctccnnnnnnnnnnnnnnnnnnnnnnnnnnnnnnnnnnnnnnnnnnnnnnnnnnnnnnnnnnnnnnnnnnnnnnnnnnnnnnnnnnnnnnnnnnnnnnnnnnnnnnntccccctctctccctctctccctctcctcactccctccctttccattcctgaatccctgactcccttgttgtttcctcatggctcttggatgtgactctctctacagttctcacaggagcatcttcctgactctgtccggcctctcagcctcattgtctcttagcgattcccattgccttcaccttctgcctgtaaacttacccacttccccactgccccactgccccactacctgacttcccttggcttcttcatcctccccattttccctcatctcacattttcaaatgctctgcctccttctttaatttcagacaggctgaagtcactcatcactttttcagcatatcaagattccttcttaattttttgctgtaccttagagaataataaaaacgcttgtgacgctggcttctttctccatctgagtcattccaccttcacccttgcacctcactgctgctagccctattcagggtcttggggttcctcacttctgtacaataatcacctcatgatttgtattccatacttctcaatctaatgtgacatttcatgctcaaattgagaattcccactgccctctttgaagtctttctcatcctcccatttaagaaaagccacatagagaagctttcccagttattaaaagggcatgtatcctgggaaagatggctcaagaggttactagcacattgatgtgaattgatcggacagttagaaacaaaaccattctataatgtcaagaacatgtgaatccaaagagttgtacaaacatgttatccaaacatgagctatgtttttatgcccttcaacttctcctctcatgaatgaaggagtgctaacagactacattttataaaacaatgatcctgttatcacttggcgattcgtgggcattggtatttgaatggaggtcttggctaacacccaatctagatttctggtctgcttctccttcatcatcataggagcagttggaggtcattacctcaagatgacattctatttttgcattatgtttgcattatgattttaaagtttattgcataaaaactcttagatgcatatttcctattatagggtgaatatttataagccatctaaggtaataacagaaaacagagtggtgggatatggaaattcatttttttttcagctcaggcacagcctgggaaaaattaattgcattgttttgcctagaggaaatgctttattgcttggggaatatcaaatgtcaaccttctcttattcaagatgtattcattgctaggactaggagatttttctacaaataaatatcttaaaggctgtcaaaccacagctactaatgaaggaaatcaaaagaggcatcgtttatcaacaccgttgctcttattcatattctggaagggttcctccaccttacaaaactcatctcaagaaaattgctggccacatcattttaattttcctcttccttttttccaaattcccttcaaatgcttctctccatatagcaccatgcaccattaccatcctgtcactcaaacatgtgacagatgtttcaggttgctcctgaggataaaaggctcacatatagcatcctcatctggcactatctataataccaatatgagaaagtcttttccaaatctgacctgttcgcagtgctgtaggtgatagaggatggcggcaggaacagacataatggatgtttccacatggcaatagcaagaataaaataagatttgctgagaaggaaggcttagaagagtgggtagctggaagatcagatgagtgcctgatttgaaagttgggacctgaatctatccctaccttcctatttatagtggcgaatagtaggtattcttgaattattgagggacctgaataaaagcagtagtatagagatggcctccctcactctccagccacttgtagttcattcactagctagcacaatgccattaggtagaaactgttggacttattttagagtcaggaacctaggaacatgaactgcagttacctctgtggtcaactgtaaatacaatgctgattctgttctacagggggcatttgtcaatgtctagagttgggtctagttattgccatgaaactctaagcttccaatgatagaagccaggtatgtcactaaacatcctaaaagccctgtgggccttagaagaaagacataccctttcctgtaagaagcactcaagcctcgaagcctttaaaagccagtgattttaataaatcctcatatctcgttatccaaatgtattctcctacctaaagaaccttcccattttaccagtgcagagcaaatgagtagcaaaatcatgtgttcaatgaacagctgttgagtgaatgaacaaagggattagacgagtgacttacttaggatttgtccttattgttctgagcccctcccctgttcctctccagcaaatggcttatttcatttctgactgtatcactgtgaaggaatgcccttcagatagaactgtgtctttgatgttctttacaaattgtaaaaataaaatgtgtgacaataaaatacctctctgtagacagattaggatagaagtgaaagcaaaacgtgaagggcaactgagaagcaacaggtaatcagtgatgacaagaagatgtatggacaagacctcaaaacacaaaataaacaatattaacaggaagggggagtcataattaccttagctttgaaaatattcgctgccagcgaccctagcacactgaggtcttaaggacctcccttcctgacctttaaaccaattcatgaagagcaagaagaaataccttaagctgtcaacagttcagtgcatcttcttagaactcactaagagtcatagacacaatgccccagttgttggaagttctttctacttggttcacatggcattttgctatgttttgtttctttctttgccggcttctcaacaattccccctggcaggtcaatgctatcttaacacaactatgaaaatgattgtgtgtgtgtgtgtgtgtgtgtgtgtgtgtgtgtgggtgtgtgtgtaggggtgtttctcctttgcttggtgagttttttaacattgaaaattgttctctgatatcagccctttcaaaaatagcagcagatgggagggatctatcaccctcctatggtccccctcaaccctaatttgtaataccaaggctgccaagctctctcctctgctataagcaaatctgccggccatgttctgagccttgggccttaggccatcaaggcagcacattcttcgagtgtgcttctgggctgctggcacagttctaccagcagtgccacatgataattacatcattaagacctagcatgaggccagcatcttctggtcattactgtgtggggaggcatatgagaacaaagggtatatatacataatgacaaagtttctagtccttgacgacttaaagtataggcctttctaattacctcgagcattctgggaagcttcctgaacaagcaattctatcaaagcacagagcgttaaataagtggtcactttaaactcagacctaagtacaaatgagttggctagctattatgatgaactaccgaagcagatgatccaaggtgccaattgaatgcccctccataaacaggacattataaacagcctaagaggaaaattggaaatgactcatctttaagcatgtgtcactagaaaatacagggtttttattgctctctgcttgtctgtatgcactccccacacacatacttatatcatgctttacaatgtatattgactccaattgccctgcccccaagaaaaagcaactttggatgttcatgagaatgcagttaaccaaaaaacaccatttgtgtttaatccttgtgtatcacccacccttacagcacacatctccctttaccctgatgcttcagcctccttggccagctcctgccctgcttcctgcactgaacccttgacacacttcctctccaagatgttcttcaccacggcagctgggccaatctatactttcattctttcttatttcaagagctgctgggctagatgtctgtcttaaagtttctcatgcttgttttgagcacctttctctttgtaagttcacaccatggtgtgtagctacttgattgacactggcacttctgtttctcactagattaccaactccaggagagaaggcccatcagttcacattctcccctagtgcactgcctagcagcatagcctgtgattagcaaattttgcttgaatgatggacaagacagaaggaaagaataaaccatctttggtttacacacattcaggacataagtagttaacacaatttatttatttattcactttacatcccaatatnnnnnnnnnnnnnnnnnnnnttaaactcattttcttctaactccagtgaataacaaagtgaagagtattaacacagagccaattggaaagtcctgcagctggctgacacaagcagtcttcagagatgagttcttagtgtgggagcatgttgatgtaatatataagtttgttttcagctatttccagccttcttgtgtgaaaacaactcctcatcttatctcctctcctctgcatttcctcctctccctcaatctctctctctctctctctccctctctctcccctctctctctccctccgcccctttctctccctccctccctgccccccctcttcccctccctctctggtttgtttttgccttgatgcttttactttggttactttctatttgttttatttagtttgttttgatattggtaggtgactttggtttgaggtaaggggttcattgctctgttttggtacatgccaggcaagtctgccacagggcaagactctatgtctttaaatcactagctttctacttcctttcaaaagtcaagtctgctttcaaccatcaatttcataccacatggaaaagtctttcctccgtgcccccctttgcttggaccagctttccctgagtagaaggtggagaatgtgtggatatgctggagggaatcatgggtatctttctttaattgaactggtgcctgtggtcataactgtttcactcttttagttgggatgaccatgggtaacaaattaatgttggttgctcctgagaggttcatgcaaggagtctgtctgctcctgtcctcagtcacatgtaggcctcatttctggggctccattgaaaaatttttgctaagtttacctagaccagccttgaccttctggttaaggtggcactagttcagctcccttcctcagtaggaacgtggctcacttggaagctgtgtgcatctatcacaaaagatcgtgacagtggtggtagaagtgcctgtggtggcccctctctagcatgccatggctctccacttgtctttttcttctagatctgcctggctaggcataaaggaagattcaatcagttatctacaaagttcttgttcaagaaaaccaggaaaaatgtgatagtaccctctcacacacatcccaggttccctcagtggttcttgaagggaaatcttaacgaagagccacagagaagactgaggaaagccacagtaatctcttcctcagctaatatatgcaaggaagcatggcagacttccttctttccaattcgtctccctctgctccagtccagtttttctctttctatatacctggtaagaaaggccactgggatggtgactggagatagcaagtccaaactggttttctcataatgatcctgggagggtatgtattttccagtaagatttccgtgcctctacctcctgaacatcagaaagaaactatatgaacactgtttcagaagctcttcggggagatgggagtttggccttcccagctccgtccatggggaagcagtatgggagagagaacattcactatgcaaacataagtgcataattcagttcctagcacccatgtaagaaaacagatgcagaggtgcacacttgaaatcctggggctggggaagaaaagacaggaggatctcagtctcactggccagttctcctagcctggctaaattagtcagccttagctcagtgagagacctgtcgtaagaatcaagacagagttaaagaaagcactgaaggagctgaaggggtttgcaaccccataggaagaaaagtaatatcaaccaaccaaaccccccagagctcccagggactaaaccaccaaccaaagaatacacatggagcaacccatggctctagccacatatgtagcagaggatggccttgtcgggcaccaatgggaggagaggtccttggtcctgtgaaggcccaatggatgccccagtgtaggggaacgctagggcagggaggtgggaatgggtgagtgggtgggggagcaccctcatagaagcaagggggaaggattatgggataggggactttcagagggaaaacctggaaggaggataacatttgaaatgtaaataattaaaataaccaattaacatttttaaaaaaaaaaatcaagatggatggttcctgagcacatatatatatatacatacacacatgcactctctcacatgcacacaaatgcacatacatacatatgtagcgtgtagttttatctacaccactttgtattcccagctggttacacatgtgcacccacccaggagctatctctgatccttggatggaatacacacacacacacactcattcatttttaatatgttttttagctcaatggtcaggtacttctaaacctccagtggctaacatgctcttaccttcactcccagctcaacacctctgcaccttccctcagcttatctgctcagttaccttctgtgaagcccattggtcttgcaacctaagatgatttcagactgttttcccttaccgtctgcattttagaagatctcccctgtagcgttcagtctgtcctgtttgtttgtttgttttgttttgttttgttttctcctatgtatatcaattcttctctcctagcctgcaggaaccttgaagttcagtctctttttatactgcctagccattattagtacctagcatctttattgatagatcataaaccaattgggggtgaggacctttagtgttagtaaacagattactaatcacagcatcagaaccaccacccacaatatacatgcacacatgcatgcacatatgcatgcgtgcgcgggcacacacatgaatgcactatgcttccattagtgtttaaaccaattttacaaagactgatatatacctctgagccctcaaaatctcctttttctcactacaaaaatgccttggtcaggaaagagaacctgacttgacttaagaggttctgctataaaatgagcctggcaagctatcatctcagcaaggtttgtgtgaaagaatcctgggaagcagatgttagaatccagcatccatctttatccatggttacacagtagagacaccaaccaaaaaaggaagtcatctaaaaactgaaattgaaatttgatataggacagcaataaattttctttattaagaatgaattggtttttcaacatttaaaatgaacacagtaatgaggtagcctgatcatgcacctgggtctcaggctctggccctggtttgaccccagctctccacccctttttctgtttctcttgttctaatttgactctggccattgtctcaagcttttcactctgggatgggttggtgttgcacaccatcatccttttcctctgagccccagcgtgggggccttggctgttagtgcaccttggtcagggtacttgtgatggacgctgaggaaaagtgctcttgatcaggtcagtctgcgtgctttctcctggagtggtggagctttcaataagaacatgtgggtgacctgtcgaggcttgtctactaagagctctcccagcaagcattgttttgcatccctgtgtctcacacatctcagagaagtttcaaatgtgcagtctcacagataccagtcaagattgttcttgctcccttgttgcattcttgaacaagtttcttaactgtgaaataaactttcaagttttccaatcttgcctctttctggcctcaaattatttcatacctcagcctagctgatgatagttaacctggaggattaacacagtgaagttaagcctgtcggtctacaactactctttgccaccatatacacgagtcacaagggcaatggatccttgcttctctgaggtcagcatctgcagctgggcctctcagagctaccctactgacattttggactggctaatatcttgttgtaagggtctggcctgggaattaatcatgggatgttgaacagtacacttgccctttctcacaggaagtgtattagctctttgtccctcaactgtgacactaaacacttctctaggctatcatgtaatccctggactgggattcccattccctagccagtgaaaactatggacatatggagattgcagatttttatgagagaaaccccacccttcattggtatcaattttgaactgagaaaatatctgttagcaaaaagtttgctgtccaaacctggcgacctaagcttgatttccagaactacgcatttaagaagccaggtgcaaagatacattcttagaatctagtttctatggagggaaaacagcagataccaggaacttgctaggcagccaccctggtctactttgcgaactgaaggccagtgtgaagctctgtctaaatacatacatatatacatacatgcatacatacatacatacatacatacatacatatcaaagagctagagagatgatacctaaggttgttctctggcctctgtgtacatatgtatacacacacatatgcatacatacacatgcaaatttaaggatttctttctgtataagatgtgtaggcagaaagactgattagcaaaatatgatgtgctcttacgaattgtgacaactactgtcacggcttgtgctgaagcctgcctctgaattcctgcagctctgctcttctgtaagaacttgaaagttcccgtgagattaatcactcctgcacatttccagagggaggtagtcccaatccgcatcactctccagtgttggccgtaaaaattgccagggtttgttgatttagagattaattattgattatagggaaccttattaatttttcagactttttctcctttgggtgcatgtctgactgcctgtagtgagcataagattccttccagtcattctgcatcaaagccactggctgtcacccagggtgttatcttgttctgtgcaggctggctgcgtatgttgactctgaagtttttaatcaggcatttcccgactcaactgcacatgtcaagctgtggagacagaatccattagacactggctgaaaccagcaaggacttcaagtcatcatgatttgatatttccacaggagaattttccaataagacattaagaaagtatacattctgaagatagatgagcaaaatgcctgcaggattcaaaaggggaacgccatcaacaagaagtctttcaacatctggaagaatttgtatcaatttaagtatctcaatttcttccatcaatcctgtatgttagcggatacaatcaataggtaactgtctcaattaaccttaatcaatatacttgtcaataatgagcattacatttaatgataataacacagaggaagagtcaggagatgactcactcagtaaagtgttcggtgagtaaacatgagggcctgagtttgggtcaccagcctccttgcacatgccctgcaagcctagtcatggggaggtagaaacaggagaatccctggagctcgctgaccagcttgtcttttccagttggtgaactccggggtcagtgagagaccgaccctgtctcaaaaggtaagatggagaagaacagagggaaacaacccatatacctctcacctacacacacacacacacacacacacacacacacacacacacacacatatgtgcattcacataagaacacacacacatgtacattcacacaggaacacatacacactaatacacctaatacacacacatatgtgcatcacacaggaacacatgcatgcaaacaaagagagaagacagagacagacagaaacagacacacaggagagaagaaagaggcacagagggcaatttttttcaattaagtaaaagcatagagccagtttagagtaatgagagttccttgttatgctgagtccacccagcaaatacagatggagcctctattgcatcttaggcatgcactaagctggacaaataaaaatcatttggacttgggctttgcttcatgctaaaagcctttttcaataacatgttttctccctcattttcataacaacaaggattttgctgcaagacatcattctaaaaatcaatcctattacatgaaagagcaaggccttaacgtggtgtatgtgtgtgtgtgtgtgtgtgtgtgtgtgtgtgtgtgtgtgtgtgtgtatgtgtgtgtgtgtgtgtgtttatagatgtgaatttgccttccttgtgcaggtgaaatcttttttgtaatgatagttaatggggcccacaattactttttaaatttatttttatttattttttttgggggggtggggttcaagatagggtttctctgtatagtcctggctgtcctagaattcactctgtaaaccaggctggccttgaactcagaaatctgcctgcctctgcctcccaagtgctgggattaaaggcgtgtgccaccaccgcccagcccataattacttttatcccagatgttacagtattgtggagaagaaagagaagaagaattttctacaatgacttcaaagccttgtctctgaaagagttttcaaaagcattctcctagctaaggtattttacagacatgaagcactgacaaatgagctgtctgatcctaaactggtttcaaacggaagtagtctggggtctacactccaaatgaaacagcaagggatgagagaccatctgttttactggtggtcaatcactcaagtgtttctcagcctggacacttacagatccattaggaagaaataagactgcaagaccctagggccatcttgaattgaacttcacagtggcaggtgtgtgcagttcagtcgatactgttttaatttacactgcttaaattactgcttgtcacaggtttctctctccaagaagactgctgctgtcttcagattctctacaagcccaagtcgtacttgcaattcatgatgcaagtttacttatttgataccatgtttacctgagtttgagttgacataaaacagtatgcacaggccaggtagtgcaaggaaatactccaatactcaaaacagagtctgtgtcttaaaatgctttaacttatggatactttaacaagtggttcttttgtagcagagactttaatgcttataaaataatatacacatgtctccttacatcgtctagcttcttttgcagaaagatcaatgtcacatgattgctctatgtcaaaccatttatagattctccttgtccttgttttcctgaacctagaagccacatgctgacataaacaatgcataagatgaggtccccacctgccctgatcctttgagaaagtattctgtaagcaggagtcaacaggtagaagagataagaaatgagcctccatgttaaatcactaagagtccaggctgaatgcacagaggagtaaattatccactgcttgttagctcattgagctctgactttcccctctcagtgtgtgctgatgtgctcagtgcagccttgattactggtgcttatgacagatgtgggattattgaccatggctccattacaactacaaaatcttccaacctggcaaaatcttccaatgtggcaagagttagatgttgacctattctaacaaacaagagctgtcaactgtgtccggatgaatgtgctccttgtgtctttagtgtcacacttattgtaatcagcaagtgtttaacaaatgctgataatctatgacggaggtattagttattcttctaccatctaaaagtgagcttgggattttgttctttcatattacctcctcctcttttactcagatacttcaaaaaagattgtgtgtgtgtgtgtgtgtgtgtgtgtgaaggtgcatgtgtatacatgtgtgactgtggagaccaaagatcaaccatcagaaacactctctaccacctttgagatggcatctctcacactctggaactcaccaattactcagaactgactgggcagcaagcagcaaggatcctcctgtctctgtttcctcggctttgggattataaacatgcaccattgtattagtcagggttctttagagtcacagaacttatggatagtctctagatagtaaaggaatttattgatgacttacagtcggcagctcaattcccaacaattgttcagtcgaagctgtgaatggaagtccaaggatctagcagttactcagtctcacacagcaagcaggcgaaggagcaagagcaagagctagactcccttcttccaatgtccttatattgtctccagcagaaggtgtagcccagattaaaggtgtgttccttaaacacggagattcaatcttctggaatccatagccactatggctcaagatcttcaaaccaagatccagataaggatctccaagcctccagataagggtcactggtgagccttccgattccggattgtagttcattccaaatattgtcaagttgacaaccaggaatagccactacaaccatccaatttgggtttttaaaaaatgtggattctggagactggatttagatccttatgctttaaggcaagggctttaccaactgagccacgcctccagccccaaacttgtccaagaatcaataagtggttcattgggctggagagatgattccatggttaagagcaccgactgttcttccagaagtcctgagttcaattcccaccactcacaactatccataatgggatcactgccctcttctggtatgtctggcgacagctacagtgtactcataaaataattaaataaatgtttaaaaaggtatatatgctcagtttgggtatgaatttgataccaggaactgattgacatccaactagctgggtttttttttctaatttatttatttattcactttacatgccaccctctcttcccagtactcgctcatgaaagtgctccctcattccaccttacccttctcttttgagaagaggaagctcccctctgggtgtcattcccctactaagcatcccatacacatcaagtcattgcagaactaggcatatcctctcccactgaggtcagacaaggcagtccatttaggaagcaaaatccacaggcaggtaggcaacagactcagggacagtcccagctccagtttttggaagacccacatgaagaccaaggtgctcatctgctacatacatgtagtgggcttaggttcagcctgcactcactctctgggtggtgattcagtctctgggagcccccaagagtccaagttagttgactctgttggtcttcctgtggagtccctatcctctatgggtccctcaaaccttctcccaaataactccccagctacacctagctggtcctaaccaaggtgaaatccatgtcacatgtttgactttgagccacaatgataccatattatctcctccccttttacccagatacttcaaaaaaaaagattttgtgtgtgtgtgtgtgtgtgtgagggtacatggggcaagcaagaataggataatgaaatatattgctagacatgtgagtagacccagtctctagcaggcagttgtacaatagtcagcctgggggtgggcatgaaatgagcttgatatttgtgacccactacccaaaggaagcagccatgcatgcagcacaatgccagataccacctcagtccagttcaaatgggtacggtcaggttgatgatttatggactcactgtttgctgctgcttgtgacctttcaaacacagagacacattctcaccttataagcatacacatctgattaagttataagtgtagaaactgaagggctcaacctcactctgaccatgtgagtgcctggttctgcatcatcaatgtgtagaatgaaaagcccttctgctcaaagaacaagcagatgtagcagatgcaatccatttcattagagctattttaagcactggtatattttctagacttgcagttgaatacattattcttgtcacttatttttttatatcaaaatttgatgctactgaaaatactacactactcattgcagaaaaggtcatttgtttcctgtaatattatgaccaaattcttcagaagataaaattatctctgacttactctgaaaaaatgatggctatattttgaaagagaatctctgaaattagggaaatctcaatttggggctgaggctatggcttagtggcaagggacttgcctagcatgcctggtttgatcctcaataccacaaaaattagttaattgcttaattaaagttgttgcacccaaagccgggcgtggtgacgcacgcctttaatcccagcactcgggaggcagaggcaggtggatttctgagtacaaggccagcctggtctacaaagtgagttccaggacagccagggctacacagagaaaccctgtctcgaaaacaaacaaacaaaaaagttgtagcaccgagtcctaagattcaggaatttctgtgaaaaggggatagacaaattgtaagagagactttgatgtaagtttggatctcctaggaacatcagaagctacatccatgactccctgagcatgatcagatcaagaacagtactaagagacatgttaacgtggatctgggaagcttacaaagactaacaggcaaggaaggaatcctgagagtaggggaaacagtcttcctaggagaagagcatactacctggttatacaataccaaatcattaactctgaaaacatatccatacaattaatgttatatagactgagcaattctatttatatatttaggtgtgtgtgtgtgtgtgtgtgtgagagagagagagagagagagagagagagagaaagagagagagagagaattaaagaaaaggagatcatgaacttaagagggcaagggcagaggtaaataggtcgtaaagggcaggaaaaaagggaaaatgatgtacttatattacaatctcaaaaaaattagaaaattaattactggagggtgtaaaacaatgatagaacttgtacttagtacatatgagttcacagcacatgcatacttatacacacgaaaacctaacagaaagaaaaacaataatttacatttatacaatataaaagtggtttttaacatgagtatctcttgctgggcatcatggcacacagctggaattcctacactcaggaggcagaggcagtagatttctgtgagtttgaggccaacacagtctacatagcactaccagccacgtatgtggtgagaccttgtctcagagacaagcttttcttcttgacaattcttcgttatttgtttctttaggaatccttgtgtactcagatctcaccataccctaaacaacacatgcgttaagggaatgtgtttgggggggtcagtgtagggcagggatagtagttttgggacaggatctcattgacctggatttcactatgtatcccaggctagcctcagacttataaggatgcccccacccaggctttcaagtgctaagattattacagccatgaatcactgtgccttgctttggttatgttttaatagtaattgaaatggtcatattcccagcctgctgacatggagacagtctcacacctctgctgttcacaccaattatcctctaataactctgttcgcatcatgagtcagttatcctctgtccctctgcccagcaatactcaaattccatccaacaaggattatgtgcgtagactatctgcattccaaatgccacttaagaaacattttgggatgtcagaggccacacctactgttcagtctcacagcatattaaccccgacacaaatcctaagtaaattgtatttctccccatcttaagtttaactgcagaaatatctcctgcttgcctgccacacatgtgtcagtccctggtgctttgcacagtgaacaggaaagacagtgccttttcctctgaggtacttacagtcttacagaaaagacaagaaacaaaccatgcaaagacgaatagatgaataagatgaataagatgaataagaaagatgaataagaaagcatgtgatgtcaggaactcagagagagcaacagtggccaggaccagctagatggaggtttgagtgaacaatttaatgttagctaggcaaagacaacaactgagaggagggaaagcaggctccccaaccaggggtcaagatacacggagtatttgaaaacctagaagtacagatcacctggagcctggagagaagggcagagggcatgaactaaggctggaaatcggtgccagaggggaaggtgaccattccctaagctttggtgagtgtctctctatcgccatggagaatggaaaattactagagagtatggggtcagagcaaatgtgtgccacacagagaggagcacactgctgtgcttgaagccatcatcaggagcggtgacaaggccgactcttgaagctgtccccagaagtgctgaatccaaaccccatagcatagatcaaaaccctcagagctgtaactgtgatttctcatcatatccagggcatcgcgctgagtgcttttggagtacaattgtccttcattcttgtaacaagcctgtgctgttggtattttaggactcctgctctgaaaaatagatttaaacaggcagctcagtagatagcctagtgctacagagctgttagtgccagaccaaggcttttaggacagatgtaactgtttacactgaaaccctgtttaaatcaaatccctacaatggctctgaaaggggcaggaaacctaggacacaaggcaggttctgcctaagataggttatgggctcgctggtgatgcttctaaaagtgcccagttgccacagtaaagcaggcttcttgaagaagatgaccagggaaacttaatgagacagaagcttgaaatgcaagaaaaggagagagctcccaggcatcaggtgaatgaggtgcttctagaaagcagaaaataaaagcagaaatgcccccaatataatgctgctaagccctgccctctcagagaatcgcattttggagtttttacattatgtttaacaaattgacaagaagccagcaaaatccatatctgatgactcaaaggaaggcaggcagtattctcattggctggcaatagccaggagctaaactctgtgttttgcaaccaaagagaactgtggcttttaatggaaaatttgacctcccaaggtcttctccctaaagggaaataagatgtggtaaagaaagacaggagtggtgtggtttcaaggctcctggctgctgatccctccttggtgtggtttcaaggctcctgccttttgatccctccttggtgtggtttcaaggctcctgcctactgattcctccttgggtaatttttatgaaactgggtgtaagttaatgttcaggagatatcctgacccatgattttcctaagaagagtggaggccttttttcatatcttgactgggagtcaagattcttctccagttacagcagttgggaaatgtatacccagagtggacagccctactatgtgatagtgggcaactccaccatgtagaagtaggcagccccactgtgtggaagcagttaacaccgctgttcttgtacttgtcctcagaacggttaagtttgcctgagcccagatcacacaggactgcagtgttgcaatgtgatctcacctcgggtctctggcttagcatctgtgctgtgttttctgaggttctcagtgctctctgagactatagacaactacctaacaatctgcaggttggcttcttacctaaaaggcaatatcctgatctgtctgtcacattaaatattgtttaaatgggaatgcgtgcagaaggtgtgtgtgtatgtgtgtgtgcatgtgcgtgcgtgtgtgtgtgtgtgtgtgtgtgtgtgtgtgtgtgtgtgtgtgagagactgtggaagacaaacaaggatgctagttatctacctcaatcatcttctgccttattctctgtagagagggtctccatttcagaaagcctgcctgaccaacaagctgccaggatccacatatctctgtcacccaagccttatgggtgtctgtaagctaatacttacccaggattgcaggcgtgggcaaccatgcccagctctttacatggggttctaggtgtttgatctcagattctcaagcttggatatcaagtactcttactcactgagccatttccccaagacctcaggacccctaagccctaggatgagaattttgtacgggagaagctgactgggtgatgccaagtcctggctgctgagattcagtcagagaaagtgaccatttgccaagcttcaccttatatttgccacataatttaacctctgatcttccaaaggtagctattatcatctttatttccattttagagctaaaaaagttaaaacaaataaaagctaaaactcagagaggccaacgtcttatccaaggtcattcaaccgaagaaggacgaggagaatataaatctggacaatggagcaggggtgccagctgaccacattctccagcctcaccatcaagggagacaaacaggccatgtgcagaaaggaattggaaggacatagttttacactacagctatagctcaaaccacagtatgttcttggagtgccagcatctgctggttcagagctgggtcacagctgtaacttaaccaggacacactgggcccagtaggcagaaggcaagtaggaagcttgtctctgaaggaggatgagagacatggaggagaggagggtccagcccagcgagagcagtggtttgaagggcagcgcctccttgcctctgtccactgctgaactcagcagcctcattctcaggcaagagtccctgggaccccagcagccatactataaagtagaaaaggagccaagtgagcagagtgacacccaggctagcaggcacctgcacaccagctgctttgtaagggttcttcgtccatccctcaaagcccagcattgaggatgtgttctcagacctggggttacactgtaggccatcaaagagcatccttcacttgtttcagctggtagcactttctggaacacaagtcattgagtagcaaaacatgacaaacaagaaattaacagacaacttccttagcgcttatgggtggctatgggcaagatacttgctctgtctaggtcacaattggctaactgttattggcaggtcaggggttctctccaccctccagggacacagcaaccagtctattccctacctagtaaaggcacaggcacactgacaagcagaaccatacccatcgctgatctcttgagcttaacagtagatgagcttcaaatgatcccaagtgtgtaagaaagttcacagtgtgtaaagtaatacgcaaggacatggtggctacatgggataaaggataaggtttatctgccagaaaagactgcttctagcatgcaggcactgtgtacaaagacagtatgctaagtgaggaacaagtcatgtcttctcagcaaagctcccagcaaatcatactgggagtagaacattaagcctgatgaagccaccccagcctgtggttgtagttaggttagggataactctaagcttaattggtagagtacttgtcaagcaagtacaaagctctggttctactcctagcagcacaggaacttcatgcttgtagaggcagaaaggtcagatattcaaggtcatccttagcaacatagtgactgaggttgcacaggatacatgagaccttgtctcaaagatagaaagaaatcactaaacctctctctagtcttaactcatggtcatttccctttgtttcctgaggctgaagtcgtctcaatttattctgagactgagaagcacggatgtcttcccacaatgcacagcagttatttacataaggcatgaagtcctctgcctttccccacttacatgtcctgcacatttgaatcacatcatctcttgcctgactgaaggctgcccaaagaaactaaagccaaggatgccgcccatggggaaaatgttcacggctagtcctcccaggggcccctgaggctacagaggaagttcccagccaaggtagctccatgactgacatcttcattcctctggaggtcaatcaggcccccctcccttttttgagacattgacacattgggtctgaagaaatagccccagtggatctgaacctggttcccagcacccatgctgggcatctcacagactcttgtaaccccagggtatttggtgccttttgctgccacaagcatttgcacatatatgactttgcggctttctctctgtgtcttgctttctctgtccctttttgtccgtctctgtcggtgtgtttctctgtctctctatctctctgtctctctcatacacacatacacaaacataaaaataaatcattttttagaagatgtatctgagtagtgaaattgcttcccccctctcccaaccttctatgaaaatcccacccatgggcatgagaaaagtgaagcatccagaagcctagggaagcaatgtgcttctgcaaacttattaacacagttggagccaggaaggcagtaggacagggtttccaaaccttacgtaactgtggcctcccttctcccagtagagctgggggacctgcaaattaacgttccccgaaacatatctctgaggaaatgccaatacagggtcctcagagaatcctgggcatagagatttcctcagaattgaacagagaaattataactttggcctaaggtccaacagttaaggtgggggaaatgagctcgcatccagtgagttcccactctagagtagggtagcctgagaaactatttgctcagctgtgagaactactgtgtggcagcattgtagcttgggacacatggtatttaccttaatcctcctaccacactggcaaaaacactttttcccagtgctgcagctaagaacttcaagactcagaagactcaggggtgcgttgaatccctgtcaataacagaactgcaaaagctaattttgaacccaagctacccttacttctcttgtccagtagagattgttgcttctttccttttagtgcctgtgggcaatagacagatgtccacttgacagatgagaaaacaaaggcttggagaggtctggaagctttccatggtcatacactagagtggtagagatggatgggtataacttccatccgtcagatcttgggtttgcatgtaaatggctgtacatgatgagttcactctccactgatgaggagacactcaggatccagatagagacatggcgggctcaggtagcttgcagctatggcttaggcacttccgtgtgcagtgacacacacagtgctcaagtctgcattgctttggaagcagagcctaaggaagtagtcgtttttgctagagggctgagttagaacagaagcttgcttgacctctacgagtaggcagatgatttctctaattaggcaaagagcttccatgctcatgcacattttgaactctaatgagctgtcgatatgaaaggtttgcccttggctcagttctgaagcagatctttcccttcctcagtggaaaagaccagcgcagtaaacagaacccgtttccatggcagcgagtgctccctggctttttcttgtcaggacttaaaaaggtaatgattggatttctctttatatttttgggtataatgcagtggttgaggctgaccttctcaatcatgccaggctattttggggagcttcagttacattgccctttttatctgttctttagatcgttgttagttgtctgggaagcagggtccacctgctggccactgccactaattaaagtccagcagagcaaaggaacttgacttcagagaaggctgaagaacttgtcaatggtggtcaggatggtgcccacagatagattgaggccccacagtcacagcaaggagaaatactgtcccatctgaagcctttctgtctgatcctttgccgccccatggtggctcttgtcagaaatgcagctgacaaggaccagagacacaaataacaataacacaaatggactcaatcgccatttcctcaaagtttgctgcctgctaaatactttctacctgttgtttattcactaagcagactgagggggagttactctgactactaagatgaggggaccaaaagcatggagaggacacacaacattcccaaggtcacatgatttctaatggcagaaccatgataaatatacactcattcttatcaatctaaggctacatcctacccagaagaaatctgtctatcactataaggaagaagggcaaatattttttcagcttccaaggatggttgtatgtgctgaggggacctgaggtacaagatacatggtgcatgtgcagagttgggttcattgtcaagagcaagcatttaaggagaccagcagaggatggaaatccagctcagtggtagagcacgtgccaggatttgatctccggtatcacaggcaacatgaaacatgaaagaagccaacatattgctgggcatgtattcttgtgtaagccaaaagaaattggagtgcccagtactctatgtcaacctgtccttctaccttcctgaggctcagtttgttcatctgtagagtggggattagtgtactccctcttaaagttggggtgtcccttttaagacgtgcagaacttctgaggtggcttgtcttcaatgaaactgttttgcaaataaaaacaaacaaacacccaaatgcagtgagtagagcaactttcctggattttgatgatgctaatcagattattaactttgagtagtaatctcctgaacccagatccttctctgcagatgcctcatagcatcagcataggtctattggcttctttatgaaaggttgtgaaacgggttggaggtcctgggacttgaacagccatcagtaaatagcaatcctctctccttagctgtacctggtattgctacagtggccggccaaggaccagaggcctgccctgtcctgttcctttgtgcgaccttctctagaaacttatttttgttattttttattggtatatgtgtgtgtgactgtgtgagtgtatgtcctgtgtggcaagggcaagaagagggtggcagattccctggagctggcgtcataggtatctgtgcaatgcgcatgctggggaccaaacccaggtgccctagaagaacagcaagcaaaattccaactcaattcttcaatgaattagaaggagcaatttgcaaattcatctggaataacaaaaaaacctaggattgcaaaaagtcttctcaaggataaaagaacctctggtggaatcaccatgcctgacctaaagctttactacagagcaattgtgataaaaactgcatggtactggtatagagacagacaagtagactaatggaatagaattgaagacccagaaatgaacccacacacctatggtcacttgatcttcgacaagggagctaaaagcatccagtggaagaaagacagcattttcaacaattggtgctggcacaactggttgttatcgtgtagaagaatgcgaatcgatccatacttatctccttgtactaaggtcaaatctaagtggatcaaggagcttcacataaaaccagagacactgaaacttatagaggagaaagtggggaaaagccttgaaaatatgggcacaggggaaaaattcctgaacagaacagcaatggcttgtgctgtaagatccagaattgacaaatgggacctaatgaaactccaaagtttctgcaaggcaaaagacaccgtcaataagacaaaaagaccaccaacagattgggaaaggatctttacctatcctaaatgagataggggactaatatccaacatatataaagaactcaagaaggtggacttcagaaaatcaaaataacccccattaaaaaatggggctcagaactgaacaaagaattctcacctgaggaataccgaatggcagagaagcacctgaaaaaatgttcaacatccttaatcatcagggaaatgcaaatcaaaacaaccctgagattccacctcacaccagtcagaatggctaagatcaaaaattcaggtgacagcagatgctggcgtggatgtggagaaagaggaacactcctccattgttggtgggattgcaggcttgtacaaccactctggaaatcagtctggcggttcctcagaaaattggacatagtactaccggaggatccagcaatacctctcctgggcatatatccagaagatgccccaactggtaagaaggacacatgctccactatgttcatagcagccttatttataatagccagaagctggaaagaacccagatgcccctcaacagaggaatggatacagaaaatgtggtacatctacacaatggagtactactcagctattaaaaagaatgaatttatgaaattcctagccaaatggatggacctggagggcatcatcctgagtgaggtaacacattcacaaaggaactcacacaatatgtactcactgataannnnnnnnnnnnnnnnnnnnacatgaaactcaagaagaatgaagactgaagtgtggccactatgcccctccttagaattgggaacaaaacacccatggaaggagttacagagacaaagtttggagctgagatgaaaggatggaccatatagagactgccatatccagggatccaccccataatcagcttccaaacgctgacaccattgcatacactagcaagattttatcgaaaggacccagatgtagctgtctcttgtgagactatgccggggcctagcaaacacagaagtggatgctcacagtcagctaatggatggatcacagggctcccaatggaggagctagagaaagtacccaaggagctaaagggatctgcaaccgtataggtggaacaacattatgaactaaccagtaccccggagctcttgactctagctgcatatgtatcaaaagatggcctagtcggccatcactggaaagagaggcccattggactcgcaaactttatatgccccagtacaggggaacgccagggccaaaaagggggagtgggtgggtaggggagtgggggtgggtgggtatgggggacttttggtatagcattggaaatgtaaatgagctaaatacctaataaaaatggaaaaaaaaagaagaacagcaagcacttgtaaccactgagcgagctatctctctctctctctctctctctctctctctctcccacctgccttttatgtattctattgtattgatgtattaaaagtttcataaatgaaagggcaaatgtgtgaatgaatgaactgacatatgaatgaagctcagggctaaccttgcctgctcatcttcctctctgtcattgggttccgttagactggttggagaacttcagagccctggtacaactcagcttcagggctgattccagttctgtagtgtcatctctatgagcacctgctttccagtagaattttcaactttcgctctaaacagttccttctgctgctttacttctgcagcactggatatatcctttgcactcggatttggaacaagacgtttctaagtagtctaagtagatgttgcacctggatcagaaatgaaaatgttcagaggaaaatattaaaagaagctctttggaactttggggcagctggggacactgaatgcctcatgtgtgccaatcagaggcagtgatgggaggtgggggttactaattgtggtgtgagtctgtgttcatttagaacaggatttcgagctggtgtctgtgggtgtcataacaaaaataaaaatttatgatccaggttagaagttgttgaatggccaatatctggccggtttccttcctatacagttgttccagagcgtttggcactgcaacttcacactgccccaaggctctgggggcttctctggaatatctaataaaattgttctacacagctactgtgggattgctgcctcaggacacatccacaggtctcagtccgttctcatgatcaaagtaggaatacctctcccaaagcagcggagaaaacaaagcagcaccaagtgtctggtggggagacaacagtccataaaatgtctgccattcgagtctgaatatctaagctaagatcccagtgcccacataaaaatcccagtacagtcacatgtatgtatatatacgtacatacctggatataggcacacacacatacataccacagcatataggtgcacacacacatatgcatgttcttagaaagaaatttaatatttaactagttggttagttagtggatagtttatatgtactaaaaagaggaatgacaaccatcctatttgaatagcactatttcctatcaagattttctgtcacataacttactgaagaaagcagacccaaggatagcctgaagcctattgttaggtttgctaagaaataaatggaaacctccaacttctcaaaaaggaattgatttctatggcctaccacttattggtaaatgcannnnnnnnnnnnnnnnnnnncagctcagtggtagagcacgtgccaggatttgatctctggtatcacaggcaacatgaaacatgaaagaagccaacatattgctgggcatgtattcttgtgtaagccaaaagaaattggagtgcccagtactctatgtcaacctgtccttctaccttcctgaggctcagtttgttcatctgtagagtggggattagtgtactccctcttaaagttggggtgtcccttttaagacgtgcagaacttctgaggtggctatgcaatatgcttgtcttcaatgaaactgttttgcaaacaaaaacaaacaaacaaacaaacacccaaatgcagtgagtagagcaagtttccgggattttgatgatgctaatcagattattaactttgagtagtaatctcctgaacccagatccttctctgcggacgcctcatagcatcagcataggtctattggcttctttatgaaaggttgtgaaacaggttggaggtcctgggacttgaacggccatcagtaaatagcaatcctctctccttagctgtacctggtattgctacagtggcgggccaaggaccagaggcctgccctgtcctgttcctttgtgcgaccttctctagagacttatttttgttatttttcactggtatatgtgtgtgtgactgtgtgagtgtatgtcctgtgtggcaagggcgagaagagggtggcagattccctggagctggcgtcataggcatctgtgcaatgtgcgtgctggggaccaaacccaggtgccctagaagaacagcaagcacttgtaaccattgagctatctctctctctctctctctctctctctctctctctctctctctcccacctgccttttatgtattctattgtatttatgtattaaaagtttcataaatgaaagggcaaatgtgtgaatgaatgaactgacatatgaatgaagctcagggctaaccttgcctgctcatcttcctctctgtcattgggttctgtgagactggatggagaacttcagagccctggtacaactcagcttcagggttgattccagttctgtagtgtcatctctatgagcacctgctttccagtagaattttcaactttcactctaaacagttccttctactgctttacaacacagcaactggatatatcctttgcactcggatttggaacaagacgtttctaagtagtctaagtagatgtcgcacctggatcagaaatgaaaatgttcagagaaaaatattaaaagaagctctttggaactttggggcagctggggacactgaatgccacatgtgtgccaatcaaaggcagtgatgggaggtgggggttactaattgtggtgtgagtctgtgttcatttagaacaggatttcgagctggtatctgtgggtgtcataacaaaaataaaaatttatgatccaggttagaagttgttgaacggccaatatctggccagtttccttcctacatggttgctccagagcgtttggcactgcaacttcacacctccccaaggctctgggggcttctctggaatatctagtaaaattgttctacacagctactgggggattgctgcctcaggacacatccacaggtctcagtccgttctcatgatcaaagtaggaatacctctcccaaagcagcggagaaaacaaagcagcaccaagtgtctgctggggagacaacggtccataaaatgtctgccattcgagcctgaatatctaagctaagatcccagtacccacataaaaatcgcagtacagtcacatgtatgtatatatacgtacatacctggatacaggcacacacacatacataccacagcatataggtgcacacacacatatgcatgttcttagaaagaaatttaatatttaactagttggttagttagtggatagtttatatgtactaaaaagaggaatgacaaccatcctatttgaatagcactatttcctatcaagattttctgtcacataacttactgaagaaagcagacccaaggatagcctgaagcctattgttaggtttgctaagaaataaatggaaacctccaacttctcaaaaaggaattgatttctatggcctaccacttattgtaaatgcaatttcattagaacacatcagtgctcattcatttagaagccatctgtggctgctttcatacaacagaactcatgcatcatacaacatcatacaacatcatacaacagaattcatgcatcactaaaccataaatcacaactttatagtgctctatagaaatgtctcccgagctgccccatagatttgtagagagcaaccagggttacgtaacggaacccttcatggtaaggatgggcacactgaaaccagagaagctggagaattagctgagccttgacttttctgatctttatatactagttgtcctcctggaaagagaagataaggaaagatgtttactgtagatctaagagcaactaattggaaatagctatctggagaatggttgggaatgtctgtgtctttttttttccccaaaagacgtaggcttgttttattttaatgactgatccacatgaggccacagccaggccgctatgtacagacacgagagaagctttatttcttggtctcctcctccttggacagagttttgatgacctcttccttcttggccttgagacgttcctcctggcacttccgagcttccttggtcttagacctgcgagcctcagcctggtcagccagttgcttcttctgggccttgtctgccttcagcttgtgggtgtgctccatgagaatccgcttgtttttaaatacattccccttgaccttcaggcacaggctgtgatacatatggcggtcaatcttcttggattcccgatatctcttgagaagccagcacaggatcctcatccttctcatccaggtcactttcttgggcatccaagcattggcagtaccattcgtcttccttatgcccatatgcctgcccttccattgggtcaaggtgtttttctggcaaggagcccgggaatggacagtcacaagcttcctggtgatcagcctatctttgatcagcttcctgatctgctgatgggagttggcattggcgatttcattggtcccatcggggtccaaccagatcttctttgtcccacagcagaggacactagaggaaatgtcttcagcagcctgagcgcactcacggctgtacgcagccatggctgtagcagtgaaaggaaagagcccctcagtgcttactaagaagagcactgacttttattatgtttaggtatgggccttgaattcctcatcgttccaagacttttatcatgaacaggtgttggattttgtcaaatgctttctccgcatttaacgaggtgattatgtggtttttgtctttgagtttgtttatataatggattacgttgatggatttccatatattaaaccatccctgcatccctggaataaaacctacttggtcaggatagatgattgttttaatgtgttcttggattcggttagcgagaattttattgagtatttttgcatcgatattcataagggaaattggactgaagttctctttgttggatctttctgtggtttaggtatcagagtaattgtggcgtcatagaatgagttgggtagagtaccttctacttctattttgtggaatagtttgtgaagaactggaattagatcttctttgaaggtctgatagaactctgcactaaacccatctggtcctgggctttttttggttgggagactattaatgactgcttctatttctttaggggatatgggactgtttagattgttaacttgatcctggcttaactttggtacctggtatctgtctagaaatttgtccattttgtccaggttttccagttttgttgagtatagccttttgtagaaggatctgatggtgttttggatttcttcaggatctgttgatatgtctcccttttcatttctgattttgttaattaggatgctgcccctgtgccctctagtgagtctggctaagggtttatctatcttgttgattttctcaaagaaccagctcctcgattggttgattctttgaatagttcttcttgtttccacttgtttgatttcgcccctgagtttgattatttcctcctgtctactcctcttggatgaatttgcttcctttttttctagagcttttaggtgtgttgtcaagctgctagtgtgtgctctctctagtttctttttggaggcactcagagctatgagtttccctcttagaaatgctttcatagtgtcccataagtttgggtatgttgtggcttcattttcattaaactctaaaaagtctttaatttctttctttatttcttccttgaccaaggtatcattgagaagagtgttgttcagtttccatgtgaatgttggctttccattatttatgttgttattgaagggcatcatcctgagtgaggtaacccaatcacaaaagaactcacatgatatgttctcactgataagtggatattagcccagaaacttagaatacccaaaatataagatacaatttgcaaaacacatgaaactcaagaagaacgaagaccaaagtgtgaacactttgccccgtcttagaattgggaacaaaacacccatggaaagagttacagaaacaaagtttggaactgagacaaaaggatggaccactagagactgccatatccagggatccaccccataatcagcttccaaacgctgacaccattgcatacactagcaagattatgctgaaaggacccagatgtagctgtctctagtgagactatgccggggcctagcaaacacagaagtggatgctcacagtcagctatcgggtggatcacaggacccccaatggaggagctagagaaagtacccaaggagctaaagagagctgcaaccctatagttggaacaacaatatgaactaaccagtacccaggagctcttgtctctagctgcatatgtatcaaaagatggcctagtcggccatcactggaaagagaggtccattggtcatgcaaactttatatgccccagtacaggggaacgccagggccaaaaagtgggagtgggtgggtaggggagtgggggggagggtatgggggacttttgggatagcattggaaatgtaaatgaggaaaatacctaataaaaatatttaaaaagaaaaaaaaaagaagaagaagaagagcactgactaatcctccacggaccgggacaggagaaccacgccctccatggaccgggacaggagaaccacgccctccatggaccgggacaggagaaccacgcatctgtgccgtgccaggggtctccgagagctataaagctagttcttccctgagtgttcattgtgtgagaacttggtcatcggtcccaaaaggtgttaatcagaccctcattaggaacatttctttagaacaattcaagtaactaacagatcctgtgcaatgtactcaaatgtccagcttcacatgctctacctggaaaatatttatctggaatttcactcagactgcatgcattggttatgagatttgtttttaaattgaaattagttcatagatcaagatgggggcacagagttgtataagatgaaaagtcacaagttttttttggcattgatgccctaaactaatagtctccatgtttgtatgattgtgttttatacagctggacaatccagatgagcaggcagcccagatcagacgagagctggatggacgtctccaaatggcagatcaaatagccagggtaagggacttcatgggctcttccctgggaccaggccaccgcccacccacgaagtgcactgactattagggctttcagaagataaattagaggggctggcaacatagctcagttggtatgcagtcctcagaactgagtaagcaagccagaaaaagtagcacacacctgtagcgctaacagtcctgaggcagaggcaggaagaccaggagttcagagtcattcttggctacatagtaactttgaggccagccttggcttcatgaaactgtgtagaaagaaaaagaaaggagaaaaaagagaagtgaaggaaagtgaagggaggggaggggaagggggaaataagggaaggagaaaggaaggggaggggagggtccgaatcccttggttcttgcaatggccactagtgattatatggctcactgtgacaaaaacccagttgccattctaaacctcagatgtgaccagctgagcaagagcctcagaatccctcagcacagcccacatagctccaggacaatacaaccacttttcaatgacagtcaaggctccgaggcagtggagtgtatcctcttcatgtatcatcatacatgacaatttgccaccacagctacaggactccaccacagaatgtctcctgctgatgacacagacctggactaagctttgtacccactgctttctcagcctgagatctttcttctcccttccactcagccaatttctccctcattcttcagcatttgacctcaaacatgtacatgagcccttagcagatagcctccctcctcacctccgttctgcagcattccacatgcagacccttgcttagctgaccaagtctcctggtgactaggcctcttctaagtttgggatcataccttattgctgatgcctatagcttggtatcatctattttatttctgttgttgacatttatgttttgataattagtcttcatgacagtagcatttatcgggtcctgactctgccagatgttctgtttgtatgctccctctgaatcaataattaagcatatcactaagaacattgtatttatcatctttgttttggagagtgaggtatgtagctgacgcaagataagcactaatgcaggagctgtgctggacgatcagctgaggtctcacgttagtaagtccttatagctaagacaaaatacccacagaaagttcttagaggaggaagaacctggtttcccacatgatgtcagaggtgtcagtccttggaacagtgctttgagtttgaggtgaggcagtaagggcatgtgccacctcctgccatccaggaagcagaagcagacaagaagggctcaggggcgtgtacccttcaaaactgtgtctttgtttcttttttctgttgctatgataaatcaacccagcaaagcaacttaagaaaagaaggggtttattttgccttggactttcagagagatgcagcccatcatggcagggaagatgggaccgtgggcaggaaaaacacggtcagaagcaggaagctgggcattcacattgtattcacactctgagtgcagagagcaaacaggaagtaaagcaaggctgtagtctcacttcccctggcatctcactttttcaatcaaggctccacttccagaaggttctactgccttcccagacagcagcacagattgaggctcccacaggagacatttaaagttcagactacagcccccagtgacctacttcctatgaacaggccctacctctcacaatccacccagcaataacttaatcagcaaattagtccattaatgaatcaaaacccttatgatccaatcaccccctcaaaagccaacagccaagccttgaatatttctaagtttttacacagacactttaatatccaaaccataataggccatgaaataacaggctggcaataggtgaggcagttaccctagcaaagaatttaagggttcccccaagaaacttctatttaaaatgaataatatttaatggaatactttaaaagcataattgattttaaagagccattaaggacaacgtgttgaccatttctacagctacttttctcttctggctgtggggacaggtgacaggctgtcagaaatggcagggtgggggtgagcaggagagagccttgtgctgaagcccctaccacaggaagaagtagcccagtttgaatgtataaaaaggagtcttgctagatgaaaagtcaagggaagatttcaggatggaaaacactctgttagtgcttagtattgcagaaatgtttgcgtcttgtttttttagacacctttaaggcgtatagtcaagtcagtctggtggctataaatagtgagcagctacagatttggctaaaggtagtgtgggagactcttgtgttttgaaatctgtttaaagtgagagtaaatatcactaaggtttgagaatttacctctttggtaaactcagtgtctcctttcggtggatttcctggaaaacaagggcagcttggagcacttatttgcctatcgggtaactattacctccccatgaatatgcttacacgtcttgcttatgttttattttctttgaagcttagtattataattcaagaaactaatgttaggctgatttttaacttttcaagactgtagataacattgctatatagtaaatcaataacacttatctctgaaaaaaaatcaaaagacccctccctgagcccccatcttaaacattttcatacaaagtaaagtgagctgagctttcctagaaaatgaaccaggccattcagataactttatttactaggactagagtcagttgaggctccatgcagggtctccaaacagctaaaggtaccaaggactccaagtgacctcttcacatttctattatctgttctcctcaaagctgtctgtggtcttatggagtattcttctactccagtggcaccctcatgataactcgctggcattggccctgaccttcattgctcttccgttgagcttcatccccaggtccaagctcactggtccctagagggagtccttcattcaaagggaaccaaatgtgacccctaaccttccctggtcatgatgaacaggctaacaggtgataactaatgcaaaccaaaccgatgatgctctttcctaggcacaatgaactgcaggataatgatgataatgttggtaggaaaatgtctacagaataaagctgcaagaacaaatgtgtgggaagagacaaactccattgcagcgctgaggaatagtctcaatgcttgcatttgtgagatcaggaacttctgaggtttaattgtgtgactgcttttccctaaacttaattggagctaccaaacataggataaaacatgaagatgttgcctatcttccagctcttgacaaacttaaatgatgcacctctgtttatctttctttggtgttccctggttatctattaccaacatcacattgagttttagtgaggatgtgtaattcaattcatatcctgaaggtcagctcctatatgtgttataaccagaaattgctgaatatgcccattcatgatgtccagtccactctgttctcccccatgatggattaacaagatggattaagcacctctaactgcaggttagaggcaccaaccagagcaagcttatatgaaaaccaggatgatcataagggacaagaagcatagggatgatgggtgaataagagccagacctctggcaagagctagaagcagaggtcatagaggaccaggactaccctgctgctgtctctgcatcacattggttaaccattcttattctataaggcagcactccttgcttttcatatatgatgtctagctatttgatagcttctgaaatatacaaaaagggaaccagtcagccatcacctacttcttgacatccctttccttccccttacttccttgtcctcctactttcctcaaatttgcagttctaagaatccagcctatggttaacccaagtttcttcgtagctaactctggtacagttaaccaactaagcatgctgcctttagcatggatagaatactgactgaagtacctagtatctcacaaacagggcctgctggtgcatgctgcaatcccagcattctggaggtgaagacaggaaaatcagaggttcaaaattatcctcagctatatatccagttcaaggacagcttgagctaaagaaccttcctcagataaaagtacgggcctcactggacacaggggtgctggtcatatacccctcgggcgcggaggtactttaccagtattacttcaggatcattttgaagcaggttgttccagatatacctaatactattaactgcctttcacgtagtatttcctaagtgccaggctctcctatagctgtttcacatgacaatcccctcaaccctctcagagccttatggacagaattgtgctttatcagaacagagcccaaagcagagatattggaagatttgatcaagtttactttgattaaaaactatattcttgactaatttgccttctagatttactgagttactttccaaatatggaccttcatttcactcaacccccaagtcagctcttctcacttagaccagttacaagcaatctttggcattacagtaattctcccaaaatagttatatcagaaggtttaattgctatgcctgggttcactcaacaagaaagcagaaagaagagtcctgtcttcaaagtaggaaatgactccaagacaggatgggaggactggtctctcctgccctctctccctgtccgctgttactccagcaaacagctacccaacgtccattagcatttctgcatccccttcagttatatagatgcaaaagtgaagtagcggtgatttgcagagctgtctccttggattcagaatgcttgccgagggacatctggacttcagggaagggactgtacagcccatgctgtttctgttgtaaacatgttcaccatcagatgaatcagcacgtgtgtgccctctctccttcagacagaaggaagacaagagtaagtcagcttcccaccacacccagagccctaaactgaaccatcaattcagtgtgacacgtaagtggcacatagaatgctgtaatgtgatctagcttgatcagcttcactgcagccactggctatctttcttaccagtaattctggtggtgatggtggcagtataacagttggtatatgtgtggagacatatacacagacagaaagacaaaaatgaacagagatggatgagactgaatcagtggtcaataagtttccatgtttcttagtgtcttttactcttcatgggaaccctgtggggtttattttattttctatattgcaaatatgaaaccccaactagctataaaacatcacaaagccagcaagcatcagcccaggacaccgagctgcttcaccctatgctagataaggttccttgatatcttctgcgttgcctgtggatgtctataatttcatggtatctgatgggtggcttttgtgtcatgtgtgcacatgatcattacctccagctggctccctcacttcccactggtaaccacagcacttgaagcagggaggaacccgggaaggattgggggaatcggatgaagcagctacaagactgttggtgagctcccctacctattgcctttctgtcaccttcctcctaatcccacatgagaatgtcatttgaatctcaggctattctctttgagtgagcatagccttgtcagatttcacacacaacccattccttcttcctagataaatattcaaaacttgtatggaaaagccaatagctaggaagtcttatagtgcttataggtattattattttttgaaagtattacaatattccgttaatgtagctggacatgattagtcctggtgactgtccccactgagcaatattgtccagcaaaaacaacagtgagtggtcagcaaagatttgtctggaggctccatcccaccccacaccgtgcctgtcttttttcataaagcaatatgaataaaaagtaatttttgtcatttttatctctggaaagaagacaatggagatggaaagctacagttctcttattgggcacagccgcggctttgaaatgtgcttgtaatgagtctgccactgaaacttcctctcaagaatcacagcctagactgacaaaatgctttcttccaaaggctccgtgctcagaggagaaaatgaatggctttgttttccttcacaggcttcagttttatcgagttctttttatgatgccatttgaaactgtccaacttctgggacgagtcatcattctttgggttttcccagtgttctgctgcagaatttggtgggaaataactctgcgacagaacgttgaagtctgcgaccattcactgggtcttcttcaaacacgacaagacagaggaattaaaggcatcaagtggatctgggagatggcacagtagcatttgctatataaatatgaggtcataaaggccaaaacccacatagagccaaatgtggtagagcatgcctatgatctcaaccttctcataaaaaagtggaaggcacaggcaaaaactcatgggccagttagcctggcatacacaacaacaagtaacaaagagaccccatttcaaaagacagaaagcaaggaccagcacccaaagttgccttcaaacctctacatgtgtgcctgcactcacatgagcatgcacacacacacacactcacacacatacacacacagagagagaaagaaagagtcattatgaatacaagcatatacatcatatacacacacatacacacatgtgtacatagacattatgtatgcaagcatatgcatcttatgcacacacacagagacatcatgcaggtaagcatatacaccacacacacacacacacacacacacacacacacccttaagtgagtcacaagtaagtgacagtagataccagacttgatgcactctctcaaagctgattaggaaaaggcaaactatttcataaatgctattctttttctccccatggaaaagacaacaactattagtaaaattgcaagatcctatttactaacttccctttcaaataccccatctatactaatatttgagctttaaaataaagataaaggacctgtccagttctcccaccaaccatgggtggcaagagccaaggaagggaggacgactctccctcgtctgtgccacctcacagcagacaagagtccgggtcggctctcctgaggctcatacccacagggccagctcacccacaatccccatgaccaggaccagctctgatgtactgcccagacaaggtgcagggtctactctcccaaatgctatagcagatgagggccagcgctcatgctttcatgactcaagggctatctctcccaaatcaactgaaacacatgggagagtgggccgtgcagctcacctaggcagcagaatagagctagccctggttataggagttgagggtaagtcagacctgagagcaggacagcataaaaactggctctgccccttgatggtggcattggatgggccagccagggctagacaggataattcatcccaataccgtgggggcaggagagctggcaactgtccagcacagataccttccaggaccagatccagggatttcaattggcccactaccccactgatgaaatgctagagtgcataagaggctggttctacagatccaaagctacaggatacccatgatacagggcaacagcaggatatccaaggggagtcccagtgaggatccagtattaatcgagtagcagaaacaagggaccttgttccagaccaacaagttattgcaatgaacattggcaagcagggaagtgaggacaaaaggtaaactgtgggatacactaacacactgcagcttccatgatgaaatatgttttcctttgttagagaggaaggttgcaagggtggagggcaggtacaaggtgtgagggaaataagtgggattggggtgcttaatgtgaacttcacaacttttaaaaaataaagataaagatgaaaagacaaattaccacactttaaactcttggggtataaactttgtcatttggtagtctttctgtgatataggtactgttgagaccatgtcttcctctgtcttctcttcactctccagatggactctgtgtagaaaaagtgggcagcactatgtggactatgtttagtgatctgaatcctcttggactcatggttatctacatcttccattgaaggggaaaaaagcaatagctctgttctcagctaactgaacctcaaggcaaactcttcttaattgatcagacctctagccaaatatacgtcctctgtgaagccccaccggttctctcaggaagcatccatatcccttggttgtctattcaaatgtttactttgatgattctgtatacatcttcccccacccccaccccaaataacagtgaagccttggagaaatgattgcattctcctaccagaatctttctaatgacagccgcagtattcattggtttgtgtgttttctaagttaggacagccaagcactcaagttcccttaccttcagggttctacaccaactttgtcccagttttacggattccccagtgacccttaaggagtttaagaatcaggaatttcaagcatgaggggaaggtttagagatattaggcgttgggaagcctctctcattgactcaccactaacttctgtcaatactgtgagtatattatttccagcctgctgcttacacatccgcctacagtgtatgtagaaaaccccacacagtgtgagtaccacctttaagcaggaagtggttgaattcagagcttctaaaaggaaccagaacactgaggatgctgcataagttcagacccctgtactcatttcccatgggacagcagacttaagtcatggtcatcctgcctctcctcgctgctgagtggtagctactttaatatttaatatcgattttttgataagtcattgacacagctactcagttcatatatgctgaatgcttactaagtgttacacattatgtggatgttaagattttttagtgggatgtcaaaactgtgtgaccctgattcatagcccagaaggaaagacagacactaagcaaatacaactcataaatgatttgttgattttaagtatgctatcttagtctattcaggctgcttaaaaaaaaaaaaccagaatttgtttcctatagttccatactactgggagatcaaggttaaggcagcggcaaagcctcaactccttctttgatctctagacagtcatcgttccacaaggtccatgcatggaaggaagagcaaatacattagctgtggccttgctggaaggcaatcatcttgttcataagggctgtatccttgaggtctcattataaatgccatcatactgaagggttagggtttatacagggtttgaaaggaaaacaaacagctggccatttcaataacagatacccataaagtagaaagtagtggtaacccgacaaggagacgtgttgaagttgaatgtggaagaagacaaaaggctgagagtgaccaaggagcaagagaaaagggggactagcccttaggaaacaccactggctaaggccagagcctggcccagcccacgggcatcactcagcaagctctaagagaaagatctgcacctattgcagtgaagttgctgactcataagaacaaaacactcttagctaactagcagtcagggaaattactaaaaggaagaggagactcccaagtgtattagtttcttttttttcttctcttctcttctcttctcttctcttctcttctcttctcttctcttttcttctctctctctctctctctctctctctctctctctctctctctctctctctttctgtgattaaaataatcttgacaagcagcttaagggagaaagagcttagttaggcttacagtcccagacagaatccatcatgtcaggaaggcatggcagcaggcaggatcaggaagtaagttgatgacatcacatctacattcaggacacagagagacaacagcaaatgaaacctcaaaatccattcccagtgccctagttcctcaagcaaggttccacttcgtaatggttccatatccttctcaaacagaaggatgccaactagggaatcaagtgttcaaacacatgtccctatggaggacattttatatttaaatcacaattccaaggaattgacattcaagaggcgatgttagaccatgtgtgaattagaaagttgatagaagccaagcttcatttccacgattctgaacaagttctcctgcttttctcctgctttctccttcctgtatactttcctctagtcccttctctttagccctccttctctattgcttgtcctttctttcactcctctttgcttagtcattactggattgattcaatatggcagcaaacgctcagggaaatgttcattttgtttcagcttcattgataactaactacccattgcattcttgatgcttctcaattcggttgcttaaaatagtgaatatgcttgattagcggtcacttaatagaactggttagttgactttagttgagcatccatgtaatcaacctcttactccttggcctgaagaattatcaaaccaattcacgtctcatgtgctctagatcaaggtccatcccagctatatggcaattcattaatctctcatagagacaaagtatttatttttcccatagataattaatatgatatcatgatgtgtagatcctcagcgatgttatagggacattgagtggaaccacactaagtttggagcaattttcttgtttctaggcccaaatatttgaccagaagcaagttaaagaagttaaagaaggaagggattcttttgattcatacttcgaaagtgcagtctattggcagtgaaggatcagcagaaggtggtgggaagtgtctggtggcattgtgtccagttaggaagcagagagcaatgaaggttaatagtcactttcttcggtttagtcagtccctgatacccatggaataggtggctctttaattacactaatgcagaaacacccccacagatgtgcccagagtttatttcgatgctgatagacactattctcgttctgttagcaatcaaaaacacaaatcatacagagaatcttaaaagcaaggttttggggaaacacttatttggggttatagcatttgaactctagtttcaaccttgcttgaagctgagtttatcctgggatattcccaagctaatcagttcctccagttgtttaaaccagtttaaactgaatttgtctataacttataaaataaaaagaaagccaaaaagatttggcttgcctctcaccctatcaattacaaggctgtagagtagggtttcatgggagatttcatcttccagcttggaagtggctctttgataagatcatcaatccaattcaaggcactcaggaaacttagaggtctgagtggacaaccatgtagcacgattagagtgttgcctccccaacagaagctgtagctgagaggtagaatgacagtggccaattcttacgcaccgtgactactttcctgaacacttgcaatcatgtttttctttactttgttaatgttttcaatttttcttgaggatagttaagtatttgtcttagaaatagccacaggctgtggttgaaacatctcaaatgagctacttttgaattatgaatgggagaaaattctgtacagatatccagaaatggggtgtgcttctgttcacataacttacaaacaactcagctgcatttgataaagaaggaaaaaaatgttgaaactgggattagatttgaaaacaaacaaaaaaaaatcacccatttttctttccacaaatctagtttcctggacagaaccagggcaaagagtaaaataatcaaactcttcttccttactagatgtctatgtctgtctccctacctgtggagagattatgagtaactagaaaagctggctccacatccagatggaatgtcttccgaacacacttccttaatgccagggtaaatttgttagtggttgatatggtcaaatctgtctctggtgtgcaaaccttctatgtgagtcaggtctctactctgattatactttgccctttctcttacaaggaacgcaaatttcctaagttcgtatccaaagaaatggaaaacatgtacattgaggagctgaagtcctccgtcaacctgctcatggccaacttggagagcatgccggtgtccaagggtggagagttcaagctacagaaactgaaacgcagtcacaatgcttccatcattgacatgggtgaggagagtgagaaccagctttctaagtcagatgtcctgctgtccttctccttggaggtaagtcccaaatctctgaaagtgtactggtatggtaagatagccaaggagacccatgtgcttagcccagcaaatcttgctttcacccttcggtcctggaatagtttttaaattaacagcttgctaggatgggtcacccaatcagcagtaccatcgcccactcctgaagcccacctctctcctaaggaagtgaggtctgaagagacaactaacaaatgtaattttgaattattttccctgtcttaaggcagtctcaaggattctggaaaggcttttggcaatttagaaagcttacattttagaaacctacattatcatttgagatgtgagatctagagcagttagaaagagttgtttgtttttgttttttgtttttccccattgtctttcctggtggctatatggtagagtcgttgtgaagcattctgttctgttttttgttttgttgatctcagcccccagagtaagacttggcccaggccaactcaacagagtgctctgggagagtcaatgcattcctttatatctctaaccatgttggctccaaatgtatttccttttgaatgatgttgattcaccaacatcagactttactgggaaactagttctgacagctaagaactacttggtcccatctaacccaagtctataggtaaatggagcataaagtgacacagcttctttagaaattaagttagcattttttttctcaaaaggctcaatatacaactgtgatgatatctagctatgctatgctcagataccaacccaagagagctgaagtcacatatccacacaaatgtatttagagaacagtaacagccttaattctacacaatggatgaatggataaaaggaaaatgcaacatgtgtgcatagcagaatattataaaaagaacacttattgatgcacatgttgatatgaatgaacctcatcaatataatacttattgcaagaagctggcttcttgcacaagtgatatgatagtatgaccccactcatatcaaacactaatctacagaaggttaatctataggattagagagcttagtatcaatgtgatataaggttgaaagtagaaataggcataagatgtattgctggggagtgtggcctaagggaatttcagatgattgtgttacagcttggtaagcttattaaaaagtcacagagctatacactgtgggagaattgtatggctcctaaaattgtgcctcaagaaaagctgtgtggatgcaggacagactgggatgtactttaacaaactattcaaactatgtgggggtatttgtgaagaagtcagctcagagatgttggaaaattccaccaggcacccctcccctcctggaaaagacaggtcagagagcacatagaccagaatgaaaaggctaattaagcccctactacctcattccctaaagaccaatccgtttaaagagtgcactgttccaccaatcatattgtgcctgttgctgatgctctattctgccctagaaactgtataaaaactctccaaatgggccgcccaggaacacacacacacacacacatttaactgatacatacatgtttataaaggaccctgcaatattttgatacatttttataatgttcaaatcaagcaatgtgactttattcccacaaacatttattattgctttatgagagccctaaatcccataggaattgtctgatgatctcagatttagaaagaccaggagacatgatgatagctttgtaaatttaattagtgtgtggaaaggataacttaccttctggcctgtcattaaggatgctgtgggtaagtcatttttcccccaatcggcccaccttcacatcacagtgtcagaagaggtgggtctcgattgcaatgcccttgagtccccacatactttcctttgggtgagaaaaatcaccagtgtaacctcacagaagctttgtctttttacattttttttgaagaactgccaccgaggtactgagtgctgttcttttggtgcctttggatttgattactgccagttaaaggtggcaatttatttcctagccactcttgtcttccaacatatgggagggtagaaagtattccatttactgtcatgaagcttttaactatgtaactttctaattcatgattagacctcaatattaaatagctggttacttggaagataggtgtaggtgaggcctcagccatgctctctgcatgcaggattcaaatggctttggcttataaatacaagcacagattgcaatacccttgagtccccacatactttttaattggaaaactaaatgcacactgtagtaaaaccgccagccaaagccttcacacctctattcatggatgtgtttgggaagcagagcacagtgagtggacacaggagcaggtggggatggactgtcctagcatcagggcgggctaccattcagatttgtacactgctgcgtaatatttttcaaataagcagagaattgaatggcttaaagagactgagcacaagctcagtttgtgacaagacaagggaaaaaaaaacaaacaacaacaaaaaaacaaaaaacaaaacaaacaaacaaacaaacaggcccatggtgctgtgaatgagggcaagggagtgaagccaccaaaagcaacaggtatgctcagaaggcagctgtgtgaacccttcttcacaagggccttggaggtgttttcaggtgtgcaaacaaagcccaacacttgcaaatgccacagttaatgaaggctcagaatccgatttaaggccaggtctttcagattctaaattgttctccttccaaggcatattcccctttctcctatgcatgtgtttcttctccagtatgaaaacttttggttatggacattgcctttctagccccaccggtacatatcatgtccccacttcacagataaattcactaagatggggccaaggaaagtgcttgccacacaagtgtggggtccccagtttacacctgtcgaatccagcctgaagctgctgtgagcatttgtacccatcactcctgcagagatgtggaaagcaggcaggactgtacacagcaacgagtaaaggacccaatctcgaacaaggtggaagacaaggcctaacacctgaggctgtcctctgacttccacatgtgcatctgcacatgcgtaccacacactctcaagaaagaaagaaaataataaaaagaagcctctgcatatttgaaaaaaaaacaaaacaaaagaaacaaaaatggaagggacttaagtgtgagataattttccaaaaccccagctaaggggttctctcatagtatggcccctgcaccagcagcagcatcacctgacaccatctgagaggaggagtcctgggttcaagccaacccactgagcagaagatgctcaagaaggggaatcttgtggcctctgctttacaagtgattcctatacactctgattgagaatccatagactattgcatagcaaaatgaaggcttatgcaccccaaatgtgcgtccttgaatcaaaaccattagaagcatgtgtcttttccaatatccacttctcttcctttgtaatgctattactcttttgtagagaaaatgattttccacaaatgctactcagtgtaggtcactaacagatgtcattttattctgaaggttaaagttggtctcatcttttctcttcttcttgcttctgtggcagagtacccccctgcattgctaactgtcagaatagaaagtgattgaatggggataaggaattctagaagttggaagtgacttcaggctagcctggagacatggtgctcaagagctgtttcagtttggcacacaaagatcataactgtgaaagtgatgtacataaagttggcacattttatttctttctattcagaatgtcagcatttctaaatcaaatttctgatcataatttagactgagacgtctctcttcaagcaggaaaaagcagagtatcaggtcattgaactggggacagagaagtgttaggttccctgtagatggagcctgtgctttccagattgccttagttcctgctgtttcctgccttatctgcagccctaaagctgcatgatgctagctctgtatcttaggacttcactattgcttatcttactatccagagaaaagctaatgcatatgctgacccaaaagctagaattcttaaagaaactgggcgaaagcctttgcttcctatttggttaacatgaaaagagtagcccaggtcactttaccactctgatcctgtgagcaaattctgctaagcctggtgggataattgctgacccagacctataatcctagctacatagtagtagttgaaggcctgggctatacagctaatgtaaaataagcttagacaactaagtgagacactgatgtgagagagagagagagagagagagagagagagagaaagggaacaaaataggagaaggagaaaatggggagagggaggaagtaggaagagacagagacatggaaagaagagagagataaaaaggaaaggggacatgaaagaaaggagggagacactgggcgtggtggtacacacctttaatcccagcacttgggagacagaggcaggtggatttctgagtttgaggccagcctggtctacagagttatttccaggacaacgagggctatacagagaaaccctgtctcaaaaaaccaaaaagaaaaaaatgcatattttaaaaaagagaaaggagggtagaaggaggaagttgggaaggaaagaagggagggggcaggagggggaaggaggatgaagtgtgtatctcaggtgagatgtttacttagcagcaaggctccacataattcacaactctgcagagtgagggaatgagccacattgttccctctcaacagcaatctgctacattgtaagcaactatgtccctagaaggtcttgagtcattgacaaaagtctgacagaagaagaagaagaagaagaagaagaagaagaagaagaagaagaagaagaagaagaagaagaagaagaagaagaagaagaagaagaagaagggctagagagtaagagggagagagaggaagagaggagaggggaaacgccatccttgcctgctgtctgctttcactgcagaagagaaatgtgggaactaaaatgggggctgggaaagaggggggagggaggatagcccacgtcccgccagagttccacctatgctctggacaggtgggagggctgccagacgctttccactcagccctggtgggcatccaagcctctgacccactcgaccgggggtggggagtggtggggtggtgggtggacaaggtgcagcccccgaaaccaaaaggggccctggagttacactctgtagccccggggttatgggagagactgcatagggaagagaggttcccacacaggcaagagtttgcacagctgaacagagatagtctatgnnnnnnnnnnnnnnnnnnnncatagaggagacaagatgaaagggagagagagagagagagggagagagaagaaggaggaggaggaggaggaggaggaggaggaagaagaagaagaagaagaagaagaagaagaagaagaagaagaagaagaagaagaagaagaagaagaagaagaagaagaagaagaagaagaagaagaagaagaaaggctagagagtaagagggagagagtggaagagaggagaggggaaaagagaagtgaggagtgagagagtgaggaggggccaaaagcccgttttatggtacgtggctactgttgctaggtaactggggaggagtttagcctgaaagtcagaagcttgggacattgtctatgtgactgctagccatgcttttcttgtgggggctgagggagtggtaactagacaggagccagagttccaggagacatgtgagaactccttccgtcccatgtaggtaaattatcaccaccaggttccggggatcagcatctcagctcgactggagaccagcctgtctatgcatagcccaatgcccacagagaaatagtttctgatcctgtccctggtttcgggattcagtccatcttatgtgattctgtttcaggtggtgatcatggaagtccaaggccttaagtccttggctccaaatcgaattgtatactgcacaatggaggtggagggtggagagaaacttcagacagatcaagcagaggcttctaaaccaacgtaagtagatggtttatatcacagaggttgtcaacattgcttttgtttgtgctaattccaaaagaaaggtctgttttcccagaagaacccaggagaaccaaccataccaatgttatcatacaaggtgacttgactccattttttaaaaaacagaattccatgtagcccaggctggcctcaaacttgctatgtagccaaggatgaccttgagtttatgatcctcctccataccttcacttcgcaagtgcaggtatctcagcaatatgccaatacacctggtttatggagtacagggagtcaaactcagaacttcatacatatgagataggcagtctaccaacttggttacgtctgcagtctcaacagcagttttatttgacagctatgacaagaatccaagttctttcaaagctataatgggaagttgaggcaacagtcccatttctgaagcctttagccacatgtcactgtggggtgtgtgtgtgtgtgtgcgcgtgcacgcacgcgcgtgagagcatccatgcaagatcttgtactgctgcaaccttgcagcactcccagtttagtgaggacatcagggaagtagtcacaagtgtgtattcataaatacagtctgcctgtattttctatgtctttagattcaaccaactgtgggttaaaactttttgacaaaacaaaaaaggaatattggccaggtgttgcctttaattcctcaacttgcaggcagatctctgccagttcaaagtcagcctggtctacagagcaagcatagcaagttgtaggaaaggcagcttacatagagaaagcgagtctcaacaaaacaaaaaacaaaagcaaacaaacaaaaagaatattgtgtggacacagattgtatatagagttgtcattagtctctaaacatgacagtgcaactctttctagagtaggtacctttgatctacacatggttctgagtctataaaggatgtccataggttatttttaggtactctgtgatttgatataaggactggaacatcagtaggtatccatgaagggtggaggaggtcagaaccaatatcccatgggtacttggagacaaatacagctataaatagagggaacggtgacttgagatgagagaccagggggacatacaccagcttctgcatggccttccttggcatacaggagacatatgctctaatattatgaagcacccatgggagtgaagagcttgtgaatggtgctgtggttagcaatggcaccgtggcaaaaaagaacacaaagatgtgttggaaggcatcttctggcttccttagaagggcccaaggtggggcagtccattgctggggcagtccattgctggggcagtccattgctggggcagtccattgctggggcagtccattgctggggcagtccattgctggggcagtccattgctggggcagtccattgctggggcagtccattgctggggcagtccattgctgggacagtccattgctggagcaatggctgacagcagtgaagaattatctattttggagactaggcttcccaagcctcacagagcagtgagagatctgctccctttccccagcaccactgcccccatcctttctttctcagtttccgtgatgcctgcatagtagaatgagcatcttcatcttcgtggctggcattagtccataagagtcatcagaaggtaaccctccccaactccttcttagagcattaggagccgtttggcagaacataaataactcaccatggtgttcaaataaaatagctcaaaggaagcattgaatgttgctcaggctgaagaagggctgagggtattgtgtaccttcaagtggttctttgtatgaataggcaaagcctcagatgcccgtaagagtgtgtgtgtgtgtgtgtgtgtgtgtgtgtgtatagctggatgttaatgagcatacaagagggaatggaggccaatgtgacttgctgcatgctatcccacgctccacatccccaacctccaaaccccctccccactcccactcttcttttaaatccttgttccacaatgatgatactacagttcctttttactgccactgataaaagtttcctcgagtggcctgatctttgtcaataccattgtgctgctttgtttacaggagcttttttcaacgttgtgtgttacatggcaggggttgggggaactgagtgactagggacattgcaatgcttctgccaaaccttttaaaggagtgactccttatggggctacaagagagggagggaagaaagctctgctttttctcatctgctgttacaaggtaactcatgtcactttactaggtgcgagaatatgaatgacaaatatatttttatgaccttgggaatatcaagtataaaatgtttattttagtgttagggtacgcctgaaataacctatctgctcacatctgtagaggttatggtatccacgcacataaactcctcatatcaaaatgctttgcttttgtggccaaggatgctcttttgagtctcctttcatcagagaatatgacgaaaccatcacagacagaatcctgaattgtttaatatacacagaacacaggcatcataatcaagctcaagtctaacaaactgctaggagttacctagtgtggtgtgttgaggattccaagataaatctgtatccagaaggaagaaggtgtcatgaacagcttgtaatgtctgccatgagaaaggaaggggtgtgatgctctgagctagccacacctgcagtgctgtagacataagcagagtctaagatctcccaacacacaagtttcctcctgtctctttctttattcctgtgatccacctccttttcatcctcccctttcctcctacatgcacagagctcctctttctctttccctcatcacagttcaggactgacaggtttgctctgcttctgtctgcttttacctggaaaaataaacgaccttgtctgtgcagctctgctgtctcccttcctctttcatttggacttactgggagtcttcatcatttccttccttggaagctttttatttcctcttctcctcttccctttcatttctccttgcaattttcccactgctgatctctgtgttatttctggcatttgattttggtaatcctaagtggtatctcccattagctagtaaccctacttagggttactagctaacttacttagctgattcctgctggagcctttccatcttgttttgttacatacagctgttgcccatgtcacatttacacattcccaaacaaaaatcctaatcaagcttgtcttgttactatagagtctacctttccagctactaaacattcccagtgcatcttgcccatcatgtgtctgcaaggaatttgtcttttgtattatttttagccaagtatagttacacattcaggaggatatgacataactcatttttcccaacaatgtatcctctgtacagtttacacaggaagagcagagacagggactgtaatagcatagttaagtatgtctgggaaactgaagacgttacatcgttggtgaaccactcactatacacacacagtttagagttctaaaaagcccagcagcaagtaaatctgtgtgatttttttttaagttaaattatgcgtccaacttacttgaactgatacctttgaacagtcattggaaaccctgctctgcatcactcagccatagtaaccaagaatctgccctctctcctacttctttttatcaactgtatctcctcctgtgcacccagagcacctttcacagctcagcaaggccatattggatcagtttcataatctaagtatcccgtgtccatgacttaagtgtatttcatgacatatggttaagaatgtggcgaggtgaccttttccattcagagctgacttgtggcccctgctcactcttcctttcatccaactgcttgctgcacagggataattttccagcatcccatgcatccactcagctctgctttcctcctctcctagggtttgcaggttgtgagtcagcaatatatgctcaaaaactgctgtgagctatacttactagaaatggtatcttccatttacaggttgtttctgcttccagcaggaaaacacggatgagaaagcagaaggaactgaaatcctgtatacgcagaatcctcttaggacagcataggagaaggcagagtctttgtggtttcaggggcctaggtgtaattgttcatctcctttgggatagagctgttagggccatcatttgtcaggtgttcttagctctggagtaacaagagatctttaggtattaccaaagcatggtgttgactgacatcaaagcaaatgggagcaactactccttctccacttctcgcctgcccattcctgtggccagaacaaggaggtaattttaattaggtgctagaaggcctttggcagctcctcaagcctgaggctcagagccctctacagcagacaagagcagttggcactgactctgctcagtgttcctacaattactcttcctcatggccgctgatgctcgttgtcactttgccagcaggggaaatcactttccctttttagagaaatatgttaatatttcagggctgaattaatttaaagaaaatgcactgggtgcataaaaacacagatggcacctagacaggataaaaggtgatcctgctgacaggaacgaatgtggagctacagaaatagagggtgggaagctggcttcaaacccctctaacctagggggggacatgacatttccctgagtagataaaattgtccaaaatcactctttctgtgggaattttgcacagtgtaagtttctgctctaaaatagcatgaatgacttgagaaggttaaatactggagcatttaaataacgttttcacagaacatttgagtaatagcctagtgtctctcttgcttacctgaaaccacactcctctgaataaaacccaagattccacttgccaagttcatttcaccagagcaagccaaggagtgcagattccattgttgctctaagatcagactcttttctgctatttccaagagactgggaaggtaatgtgccttggctgagaaagcttgccatggcgctagtctcttttcaatggcaccttgtcctctgagacagtattttaaaacaagagaaagagcagtggctttctataccatttttcttctgtgaacaatattctgtgttccaaaagcacaacacaaagagtcaggctctcatgaccaggttatgcaaagatggggagttctactgagtcaggcccatagtcagcctacaacaaacacagggagttctgctgctgagtcacacccacaatgagcctgctacaaagatgggagttctgctgagtcacaccacttactttctcctattgtttgcctcaggagtcatttctccacatagtacttctcttcattttgaccaaatattttgtgactggagtcttggaatgacttgagtatctttcctgcttggctcaactgaagcagagagtgtggagtgtggttatctgcccttcctccatggaccatttccttcttttcagctagcactggcatcacgatggtgaagcacataggcccagctttgggactttgtgcagaggtcctgcacgagggcatcagtggtgaatacgagagcagtgtataagacgatagcagagtttaatctgtgcccctgaggggacaaaccagctaccgcagtacagtggtgagagctcaggtcacttaggtcccagatgacgccctttaaattgcagtatgcttgaatgacagaatgtttactatccaaagaatgaggaaggaaaaagtcagagtcacaggaaaagcattccaggaagaggaaagagcgagtgcaaaggaaatagtgagcaggaaaacgatgtcaccagatattagccagtaagcatcctaaggaaagcccaaaaccacagcatggccagacatggtgtggccatctgagccatgagagaagggtttattccaaggagacataagttttctctggagaaagcttagggagattttaggccacagagcagatgattggattgctatcttaaaacccagaacttattaaaaaaaaatcagagtaaacttagaatctcatctatgttggtttgcaaatacccagtaagcacatactgctgggggcattggtgttaaaatgagaaatcctgatgctgccagtgttgttaggatcagagcttgtatcctagtagtactgcaagctgggctcagccacctgtcctcagcagagcaatcaaatagtgaaaagcagaaaaagaaatattcagtgtggtcacatggggaagagggccaaagaaatgcagtgacccctatgtccagttttgcattcctgacctgatggtcagagttatgtgtaactaaatctttctggtcgttttctgtgttccagtctctgcaagatagtccagcatgtcagaattgtgtgaactgtctccctgaatgttaaaaaaaaaaaaaaaaaaaaaaagtaaactccaattacatgatgtcttactcagggtttctactcctggacaaaacatcatgaccaagaagcaagttggggaggaaagggtttattcagcttacacttccatactgctgttcatcaccaaaggaagttaggactggaactcaagcaggtcagaaagcaggagctgatgcagaggccatggagggatgttacttactggcttgcctcccctggcttgctcagcctgctctcttatagaacccaagactaccagcccagagatggtcccacccacaaggagcctttcccccttgatcactaattgaggaaatgccttacagctggatctcatggaggcatttcctcaactgaagctcctttctctgtgataactccagctgtgtcaagttgacacaaaactagccagtacacatgaatactttaatcatgagcagatggagaactaaggacatgctttgtaaagtattgttatttaataatcagaacagcatagaaaggtatgttgtggagtcacttactgtaatattgagattcaggccagatactctaacccagtggttcccaaccttccaaatgctgcaaccttttcgtacactccctcatgttgtggtgatcccaaaccataaaattatttttcttgctacttcatagctgtaattttgatacagctataaattgtaatgtgaatacggtacttttcactatcatgttgccttgccttcctaacaagccagggaaggaagacttttaaatagaattgggcatttgggaagactataaaaggatcatttcctttccataaattcagctgttgtgtggggtaaaatattgctggtatttaaaaagcaataatcctaccaggcgaggtggtgcacacctttaatcccagcactcaggaggcagaggcaggtggatttctgagttcgaggccaacctggtctacaaagtgagtttcaggacagccagggctatacagagaaaccctgtctcgaaaatcaaaaaaaaaaaaaaaaaaaaaaaagcaatgatcccgctgtcactcacactgcacaggtatccaggtcaatgtatccagcaggtataactcagcacatgagcaccagtaccattccagtctccaaagatgggccagagaactgaaagttactcagaaagccctgggaaagctctaaatacgatgaggcccaccttcatggaaccaattacagtcacaaatgctctaccatggctttaaaattcctgtcaggtacaaagttagtaggtggcatatgatcaacagggaaacctatctctaagtcctaccttcaccattcatcagctgggtaaccttaagcaagtagacgttcctctcttctccaatttctccatactaaataggagtgcaacctgcctgtgggactgttgaaaactgtcaggctgtggaaggtggaagcatcagcactttgcagcctctcagagagtagtgctgataacagccaaaattccactccggtcgcactttgctccattggcagagtacatgctgcagcaatctgagttcattccccaacatccatgtaaaaagtgggcacacatcactaaatgtgatctcagagtgagaagatagttaaaggcagatccccagagctctagcctaattggcaagggtcaggtcccattgagaaagcctgtctcgataaagcaatgtggaggctctcaaccacacctgaaattggtttctgaactccacactcatacaaacccatacacacacacacacacacacacacacacacacacacacacacacacccatacacacacacatgaacacacacgaacacacattcctgagcacatgtgtacacacacaagaatctagtactttctcattaaataggaagaaaccttagaaccttaagctcagaaccttactcaatttgccagccaccctttggaaatcaaagagcttattctgcaaaaggaaaaatgaacacagggtttttggagcagtggaggggactcttaaggtgggttgatctcatggtacaagagttgcttctcaaaggcaagaggaatccacagtgaaacatctcattgtttcttatagtcataccccctccctgagtcttactcagagtcctacaaccccatgagtaggactactgtctactgtctactcggctatcttccttctgatcagagacagtgtttgagagaggttggaatgaagcagagctagttgagtctatacatcctaagctgctgctttgatttgtttcccctgtgctgtgatctagaactcacctcactgcactattgctgacagagtggggcctctgaggaaaacataacatgatgtctgatgccaatggtctaaaatgctttgagactcttgggcctttttgtgcttcaannnnnnnnnnnnnnnnnnnnaacaagccagggaaggaagacttttaaatagaattgggcatttgggaagactataaaaggatcacttcctttccataaattcagctgttgtgtggggtaaaatattgctggtatttaaaaagcaataatcctgccaggcgtggtggtgcacacctttaatcccagcacgaaaccctgtatcgaaaaaaaaaaaaaaaaagcaatgatcccgctgtcactcacacagcacaggtgtccaggtcagtatatccagcaggtataactcagcacatgagcaccagtaccattccagtctccaaagaatggccggagaactgaaagttactcagaaagccctgggaaagctctaaatacgatgaggcccaccttcatggaaccaattacagtcacaaatgctctaccatggctttaaaattcctgtcaggtacaaagttagtaggtggcatatgatcaacagggaaacctatctctaagtcctaccttcaccattcatcagctgggtagccttaagcaagtagacgttcctctcttttctccaatttctccatactaaataggagtgcaatctgcctgtgggactgttgaaaaatgtcaggctgtggaaggtggaagcatcagcactttgcagcctctcagagagtagtgctgataacagccaaaattccactacggtcacacttagctccattggcagagtacatgctgcagcaatctgagttcatcccccaacatccatgtaaaaagtgggcacacatcactaaatgtgatctcagagtgagaagatagttaaaggcagatccccagagctctagcctaattggcaagggtcaggtcccattgagaaagcctgtctcaataaagcaatgtggaggctctcaaccacacctgaacttggtttctgacctccacactcatgcaaacccatacacatacacacacacacacacacacacacacacacacatacacacacacatacacacacacatgaacacacacgaacacacattcctgagcacatgtgtacacacacaagaatctagtactttctcattaaataggaagaaaccttagaaccttaagctcagaaccttactcaattcgccagccaccctttggaaatcaaagagcttattctgcaaaaggaaaaatgaacacagggtttttggagcagtggaggggactcttaaggtgggttgatctcatggtacaagagttgcttctcaaaggcaagaggaatccacagtgaaacatctcattgtttcttatagtcataccccctccctgagtcttactcagagtcctacaaccccatgagtaggactactgtctactgtctactcggctatcttccttctgatcagagacagtgtttgagagaggttggaatgaagcagagctagttgagtctatacatcctaagctgctgctttgatttgtttcccctgtgctgtgatctagaactcacctcactgcactattgctgacagagtggggcctctgaggaaaacataacatgatgtctgatgccaatggtctaaatgctttgagactcttgggccttttgtgcttcaacccttaagtctttcagcatctcttggttccctagggaggcctgaaaggctctcattccatttccttacatacagctcagagcacttggccctggtagtctgttctaaaggacagcatgttaggcacatattaggagataaaccttcagctctggcttgagagcaatgtttggagagagacacccacttgtttcagatcccacctttgctgctaacactgttgaatggtgagttgttggatccctctggactcagttccttcccttacaaaacaagactaatggcactaacactagctgtttagggcttgaatgtaatgtgatctcccagtcttttatcttggtgtgaactcccagtctgatctcctggtgtgatctcccagtctggtaccttgatgtgacctccagtctgatatctcggtgtgaactcccaggttgatctcctggtgtgatctcccagtcttttatcttagtgtgaactcccagtctgatctcctggtgtgatctcccagtctggtaccttgatgtgacctccagtctgatatctcggtgtgaactcccaggttgatctcctggtgtgatctcccagtcttttatcttagtgtgaactcccaggttgatctcctggtgtgatctcccagtcttttatcttagtgtgaactcccagtctgatctcctggtgtgatctcccagtctggtaccttgatctgacctccagtctgatatctcagtgtgaactcccaggttgatctcctggtgtaatctcttaatctgatctcccagtctgatcttccagcctgacctttcagccccaccctgccagggccaccaccttgccttcctctctattgtgcctactcacacatcctgtttctaagtagagaacatcactacattatattctgttagtcaaacttagcacaatgtgggcccctggaaactgtctttctttcctactttcctgtttaacaatatcccaatgcaaaacaatctcagccatcctgatctctaaaagtggaagcctctggaagatctggcacacacacctgtggtcatctctgatcaggatggactcatgctatgagcctactctatgctgactccaccagagaaggtgaatcaagaatgaatcagactgtgagagaggagtacacactgacttcattggtctcccctttgtccattcagatggtccttcattcaaggatccactgcatctgagtgtctgctctcatacaatataccattgcctaagagtgacacagacaatgaaggaacgaaggcaaagttcctgccattaggatacatacaaccaatcttgtggtgcgtataatagagacagtaacctgagtagagacataccagggtgtgactttgacctccttatgcagtcaaatcaagtacatgactgtggcttctgccttacctttggaagatgattttttcaaggtcatctctgatgtaggacatgctctgtggccatgtaattataaagaaaagcattacaacaaatggcagaaaaaaatgtataaaaggaagatatatcattctgattaatgttaatataaattttcatgttcagatacagatgagcagtcaaatgcatattggaatcaaaatatccttttatttcatgtgttctatgtctatatatagatatagatatatatatggttttatatatatagatatatatatatggttatatatatatatataaccaaaaggttaatacttgtaatgacttatgaaacaatttctgtgataccaaactaataagtaagtaaaagaatacactaatttagtttctttagggagaatatcctattcatgttcagcaaaaacatcttaatcaaatttaaatatcaccagatggaagagcagagattagatgttatcacagctctactcttggtacacctgtttgacaggcttgtgttcttctatctcattcacaggagaaggctcacccccatccattcctgtgcagaaagaagaaaaacttaactatttcccactgacacaatgatcagaaatttccaaaactggacaaaactgtgtcacttctccatcaagcccaagtcaaagtaaacatgctttttttttctgtctcccatggagacaccatggaaaatattcactttgccatactaacaaatgttttatttctataccatgatagtaaaagtttgcatttcagagcatgaggaaatggctcatctgatcaagttcttgttgcaaaaccacgagacctagtttatttcccagtattcactcaaaaaacgcaagcactgtagaggatgcgtgtgctcctgaggcctgggagaaaaggatccctgaggctcactggacagccattctagccaatcagcaagttccaagttcaataagacgtcatctataactaaacaaattaatagactggaatggagatagattaggaaaacctaggctttatgtctggcttccatatgtacatgtacactagcacacacatgtgcacacatctgtagaaggaagaaaaaaaagcaacaacaaaactcttacactttgactattctaatgattaaagtgaaatacttaaattactgataactccattttattcttatatccttagaaatttgaggacactaattctcatctttagccatacatctgttttaaacccttggacatttagccaaaatttggtgtgtattggggtgcaggtaaaggctattatttcacagagattggccaaggtggagagaagctatctgaatgtaagcagatggaatgttttccaaagatgtgactgttgaagtcagagtaacacaagaagaggacagtcataagcagagaatggtggaaagagaaaaaaaatcacacaatcagaaaacaggcactaaaaggagtttaaggggcagaagagaagccagcttgccaaaaggcagtgaaggaacactgggaaatgtaaatgggaaatgggaagcagtaagaatggctcgaaccagactcagagtcagggctcacagcaagaagttcaggctttagtacaaaatattcatcctggaactcacctacttacaatttcattccagcatatgagaggggtagtagccatagtgacagaggaatgaagggaacattgggacacagggacaactctgacctcagtttgccactcttgcaagcatagcatcaaacactggacagtcagcactgaatagcacctggctcttcaagtaagcatttatagccacggttgtcaccaatcttcttcacacaccctttgcctacttgtaagttgcaatgctgtcctcttggtagatgaccttgagtgagctaaagtcagttcagagccttgtgagaggtcgtggggatacagcgggttctccagcagagtcttttttcctatcccttcaaagagcactgctcagtaccaccaaatgtggtctttctccatattagcagagatgccattcccagcatgctacatgctgacattatgcactcctgacaccaaattcaaagaaagcagacacgttctctccccctgtctggctttccttcccattggctttaaggcagattgtgctgtgcctgaagtactccctgctgctgatacaggcattaatgaaagaagattctgagaaacaacctgcagcgaatacagccccacccaaagaaggagacactctctgcatgtaatgtcacagctgctgcgtatgacatttaattacacgcaaacaaactgagctggacccacagttctagcagctgcaaccgtgaagcgtctgaagcaggaaaaatgtgcattttatacaaacacttgaaataatgtgtatttgctgagtaacccgtgtaagcagtctgtgtgcttttcacattaccctatttttaaaaaatataatttgatgttatgttttttgaccaaaatattaatattttggttgtacagagtagggaaaatataaagagaattaagcatcactcatcatctccatacccagagagcatcactgtaatgatttgatgacgttttccagtttgcttggctgtgtctatggctgtggcatgtacttatacatgtgcacaaactcatacacttacacaaatgtgacatgtacctatacatgtacagacacatacacacacacacacacacacacacacaaagtaagtaaataaataaataagtagaataaaaattaaactagggtcttggtttttcttagtcattggcacagtctatggctgtgtccatgttttatccacctgcagatgcagccaacttatagataatgatgtaatggaaccctttaacatggatgtaaagtcagtgacgatagtgactttgcataaactcgtaaagatagtattactacttcattactagttgtttcttacatgttgagaactaaggcttttaactaaccctggcttaccctgaacttctctaggctgagttctgagagttccacatcttagaacaagctggggacatttggtcacttgattaaaatggacacatccagccaacctccattatttttacctcctgaaggggaaggcagtgagtgtctgacaagcatttgctgaaattggttttggggagacccctgtcccttcagcgtctacccatcaggaatccatccttgtgtctggcaacctcagaggattcactgcagctttcaagtttgagtctgaattaagatgcagttcagctgtttgtgtacaaacagcaagcaaatcgctgtgctcaaatgaaggtcatcgcctggcctcactgaacaatctcaattcgctccatttgtctggttactgaagagaactgcctgattagaattattgtattaacagcagagtgaagcttcatggagctaagcacagggagtgcatatttgaacacggagggaaagcaattaatgccttggttatatttgtgcaggacctcaggtagaaacaggaggaaaagctggctgtagattaaagcctatgagcagcaatgcacaggagatgaacaggacattctagataatctccaggttactctcaattagtattcacagtctaaatcctttataaaatagggcagtcagggccagaagacagctcagcagataaagacactcagcgccaagcctgatgacctgcgttcaagccccaggacccacatggagtgaactgagtcccaggacttagttgttcctttacctacacacacacaatgtgacatgtgtgactcatgcacttacacaaatgtgacatgttcctatacatgtacacacacgcacacacaaagtaagtaaataaataaataagtacaataaaaattaaaatagggtcttgtttttttcttagtcattgaccaggaaaccaaatttagatcacacctgttgtgtcaggtaaagtaggtttgccaaacaagtcttagtactgagactaattcaattgagtttaagaaagatcacctaccaacttcatcacccaccacctcaatgcttctcacattcacatgcatttgtaggtagagaaaaatatgtgttatgtgcataaatatatgtattgagtatatatatgtatatgtataatttttaccttttgctttttattatgttttcttttaatatactaagaagaccatctggcctataaaataaatattttgacacttaagaaatagcttttggaccctctaaatagaaaggtgctgatgaagtacgggatgactggtggggtggcagccacacatgcactcccaggatggggaggaggagacaggggatcccaaggaagctggataggcacactatccaatggataggctgactggctgagtccatgggagctttgggctcagtatgtaagacggcaagcacgtgaggaaggtggcaacctctggcctttgtgcacagtgcacatctatgtgtatgtacaactacacccctcacacatgtgcacgcatacacatacactcaggaacatacatgcaaacactcaaaaacatgcaacaacacaggaggtagttagtcagacttgactctaaacctattacggtccttcatcccagctgcactgtacttcagtgagaaggaatatgtcactagtctgtaagaaaaaaaatcattcaataggagcatgtatggcttcagaacaataacccgagtgagaggatactgaagatgggtgggggaggtttccctgagactggcttgtcagggacaggccccatgagttgtgactacaagttgtcaaggtccaatgccgaggagaaagcatggtcaagcaagagaagggagcaaactctcatgcatgttcacaaagggtgactgtatcgcttctgagagcaagtaggaaatgaaagaaggtacaagccatgtcacacaagcctatgtaccagggacggggctggaacttggttttcttcccagtgatattaagaatatctcatggagaccaactgctgtatgctttgcagaccatggttgggggagaagcggagcactgagcagtttttcagtattctaattcagagttcggtgatagtctccagtgtgcttttagaaaacaaacgcatagggtatgttctgagacatgagactgcacagacgagaccacacatataagcttcaaacacatcgccaagcaagagcagccagatgcaacaccacctgctgggtgcttttacaaactctcaggagcatgcaagtaagtccatggagacagagtagtgtgcttgcttgaaatgacaagtagggtttgtcttcagacagttgcaagagacatttgagggtgagggtgaggtcatgttccaatactggagcagaaaaaaatctgcacagtactgtaaacataccaaaaagcatggctttatagacctaggattgaaggatttatggtattaactataccccagtaaaaggctatttaaaaattcttgaagggagagtcctacatggattgtggtcctaaaagaggagacaaagggcaggagagctcactagaatcatctgagcaagccatggatcatggtccagaggggaaggactgcagagagcagatgtggctcagagagtgacacaaagggcctggcaactgagtgtgagctgtgtgcgtgcagtggaaaagagtgagccatcaaacaagagggaaaccaggattagcatcctggggcagcggttgagccagaagcttgttgtacagccagcgcccaagttatagtcatgtgtctccacggctgacaaaccaaggacagcagcaagaatcgtgctaataatcacacattagatttccatgctaaaacaaaaaggagagagagaaggggagagggagagagagagttgaacatttaagcttaagccttatgcatttttttgtagctggatgacaattgtgatggcccacaggtgccatcacatttaatctgcatgcgtaatatctgtgctatgaccctgagacaggggctgcagctacagagatacgttagacctaaactcctgtgcattcattcgtatctgggaggaatgcacactctgcagtgtttgagatcttcagtgattgagatcgaattacccactatgctcacagaccgatgtctcctgacctgagagattgtctaacaagtccgtgggtcaggcaaacactcagtaaatcctgtatcaacttacacatgctgtctgtcctgagagctttgctctattcgttggtttctatgtttacagcaacaatagagttaatgttttacagccccaactttgaaacgtcagtttggtaaacagactataaagtgggtctcatttgctttctaacaaataaagcagagcagcttgcccatggggatttaaatcataatttacatttaagtttatttttatagacagaccataagcacagtttgcaaagctggataaagctaaagcactagaaaattgaaaggagagatgagagatttatttttccccttaacagtatgctcagttgtaatttgaaacttaactgtttaaattatacagaataattggattaggtagaagtttgctaaatttgtcagaattgaaatatgacaggtaatattgaaaccaggatgttcatacacatatgcacacacataaccacacacacacacacacacacacacacacacacacacacacacactgcacagaaaggaaaatggaaatgattcagaggaattaagaacccaatattacgtaagaattaatcctcagatatacatattaatgatgagatttcatagaaaaatctattccaaatacaatgttgagcaggattaggagagatcggcttggaagaatcctcccttttcaaatgcaacagatctttaacatcaccacagacaaatgtcctggctacatttgccccaaaacatctgttattttggatcatcatcccttcatctctaaggaccactgcttcgggttgttaagtactttatagttttctttacctttttttggtggtgatggtgaaggaggtggtggtgtgtgttcttattcgtgtgtgtgtgtgtgtgtgtgtgtgtgtgtgtgtgtgtgttgtagtgttctaggattgaattatatatctagagcctaagttttatcttggtcccttttttgtaacatttcattttaaggcaagatccagcccattcttaagtttgtaaccctcctacctcagcctccttgaagctggaattatcagcctggtccagcttgttgtcactcataagttagatattacaggtctagccaatggcaaatgaagtaaccataaagtaatttcagtagaaacaatgttagcaaacactgaagctgttcccttctcagaactccaaaaaaaccaaccctctttgtaaacaggcaaacaaaaactctcttttaggagctcatcacacacactgagactctctgaagaatttcaatacagaagagagcctctctgggacctgtgctgcccaaagtcccttaatccatcccataatcagcttccaaacgctgacaccattgcatacactagcaagattttactgaaaggacccagatagagctgtctcttgtgagactatgccggggcctagcaaacatagaagtggatgctcacagtcagctattggatggagcacagggcccccagtggaggagctagagaaagtacccaaggagctaaagggatctgcaatcctataggtggaacaacaatatgaactaacaaataccccaccccacccccacccccatcagagctcgtgtctccatcagtggaaagagaggcccattagtcgtgcaaaccttatatgcctcagtacaggggaacgacagggccaagaagtgggagtgggtgggggagcgtgtgggggacttttggaatagcattggaaatgtaaatgaaataaatacccaatttaaaaaaaagaaaaagaaaagaaaaagagtatactctgacaagcacagtactttactccaaatgtctatgtttacattcattctctcggatgattgttttgtagagtattccatgactttcttcttggtaggtcttcataggacagctcatacagtgatgtggatgagcaagacacaggcactaaccatgggatatggaactcatgacaaaagataggaaacttcttccacagtaggctttgccttcagttatgtgaatggaatcacagatgcaagggtgccttcctgataggaagaccaaagccaagagttttatttgcatggacatgagcattttattacagccttgggaacatcaaatgatcattatcaaagtacttaacaagccatagagtttggggcggggaggggcagagggttctggttttggtgttgtttgacacaaggttttgtacagcccagaccggccctgaacgttccgtatagcccaggatgaccttattgaccctgagtcacctccccagtactgaaattccaagaatgcaccaccatatcccatttgtacagtatgaaaatcaaaggacttacttactgaaccagtcctgagacacaatttaaaaaaaaaaaagtagtagcttgatcaatttcagagaagtatctctgatgtatatatagcatgacttcataagaaagtgaactcagatgacaaggaaagctcttaggatacatgaatattcatgggggagggggcactgtgaattctccctaaatctaaaacagttgccatttcattccaaggaaaactggagagttctctgtgtgggggaaggacatatacagcaggattgtatccagtgaacacagtgcttgcaaatcgtcctgcactgagctaggaagtccttacaactgtatagtgggcgggaagggcattaccacagaatcatctacctcctgcctctgaagtccaggtctatgcaggaaacattagttccaaagagctgctaagaggaggaagagaagaaaaaagtcatctctataaatatatactgcatctaggagggaaaaacagaaccttggaaatgaaactcagagaagaaacttcatcaaatgtgtttagaggagaacacatgctacctagggacagaaagccccttcatggaaggattatgacctgggcccattggcttcctgtttctgtaggactatgacccagctcttgtggtcacctttttctagagtgagaaccagactggcttgtcctatgtcaggtcttgtccctggattagacatgtacagtcaggatggcaaactcacatctcacactctgatgatgggaggccagcccacaccagtgcatctgaacataggagcagggtacagagaaggagttgccctggttcacaggctgcataacctctacacacagcagtcaccaacaggaagtggcattggttttcttttttgctataatcaacagcatgaagaagaaaatgttgagtcatggttcaagggcacaacgcattactgtggaaaggtcatggcagccagagcctcaggtggccagtcacatccagtgaggaggcacggagagatggacattgcttctcagctccctccacattcctctccctccctcctatccagtgtggcactccagcctataggaaggtgccaccacacagaggggagtagcccctgcctcagttaacctaatctagaaaatccaaagattctccatagactttttcagagatttgtttccactatgactctgaatcccactgagttgacagtaaaggtggactacaaagttactacaatccacatgtccttgggagtgggtgaggggatcaggactatggagttaggaccatggctaacctgccttggagaacagaaaagaaataagagcagattgaaagaagacacgcttgtacattagaatccaaagatctcaacaaagcaggaagcaagggcatctgaaaaaaggagagcagccgagtctccacagcccactcttcccgaggctgaagatgcttgggatgggttttaaagaaatcttaccagacctgtcttaaatagtcccatggaaatctatgctagcaagacaagagtcattactacccccatcctaagacagatggatgctctgatgtttattttccaacatctggagctgggatgagtgtgcaagtacagagagggaggtctgggagcaaggcaggcttcagagatgcagggccagacatgctatcctagcagcttggccgagacctgcagctcctaattgtgtccggagctctgtgggtgaggttcaaaaggtgaccagggtttctcagcctctctaggactcacaattttgggagcagttaattcttgatagcaaggaggttagcatcaccttcatagtttaataagttccaaaatgctcttgaagataagaaaggaaagacaaaacacaaatgaatccagaacataggctaagtggatgccaataaaatgtacaccccagtggtgacaacccgaatgtgtcaacagacccactaaatgtccccagagagagcaaaggacaaagtcatcctccctggaaagtcatacttagccaataatttgtgttctctgctatttcaaggcactgtatgtttctgatgaaacaggagctcagaaaatggctgtataagaagttagagtgtgtattccttgtcaccagatctggatgcctgaggggtgactcagaaaaccatcactttagtactgatgcccttttactcctcaaaaatagcagtaacggcaatattttaaggggagaattatgatatgcacgtgtgagtgtgtgtgtgtgtgtgtgtgtgtgtgtgtgtgtgtgtgtgtgnnnnnnnnnnnnnnnnnnnnnnnnnnnnnnnnnnnnnnnnnnnnnnnnnnnnnnnnnnnnnnnnnnnnnnnnnnnnnnnnnnnnnnnnnnnnnnnnnnnnnnnnnnnnnnnnnnnnnnnnnnnnnnnnnnnnnnnnnacatacagtcatgcaaacacctgtacacatgaaacaaaaaataaaatctcaaaaaaaaaaaccaattgaaaaaagatggcaagtgaggtacaaccaagagcaaggggcctagtgaggcacgaccaatcaagctcggatgaccctcagcttctattatcttaggggaccaaatgaatacaaaatcattctggtgtaggctgattcctgtggacatccaggagtagactctgattaaagtgcttcaatccaaaaagtagggtatgggcctcagctctcattcaccgtgagggagttatcagccacctgtaaggaaaaagcaagttccttctcggtgccttgtgcatccccatctaactgcccaggtgctggagaataaggcctggcgtggccttagtgtctgtctctgtgggttcaaagacatgggcctgggacagagccatgtcatgtagatgcatcctcagaaacaacttcacaacgaacccatgtgtggggctttccttcagagaaggacatgtgctttctatattctgttctgctctaaataaacagatcaagactcacatgaaatttaggtacaattcccctgtatcagtcaattaactcactggattcaaatagtagctaagaatacagaagtcttgctgtgtccttacagatttctaaagggctgaattttttcttagccaaaatgccactgcagtaaatggaaatacacttggcagtgtggaattcaagcgcaccacagctgaattgtagactgtctgcaagtggaccaagggcagaactggaaaagcatttacagaccaggactgccatctagtgacgaaatcctgtcacaactcactggtttccatttcttgctttgttttttgtttttgtttggtttttctgcatttcacaaactttttatatgtcttacactctcttacagagatgaaatcattcacaagtcacagcacttatgcatccttcgttatggtttaagtagtgaaaaatcatataagaaggagccagaatccattaaaataataataataataataataataataataataataataataataaccagtacgcagtgactggtcctttagaagatattttaatgcattttaaaattcaagcaatacccattatctatttttaaaatcctagctaaagcaagagctgctgtcagcatcgtgctgtggaaaataattcgacctgcctatgaatatgggcttgattttctcttagcaggacttaggggagctgaggggaaatgggagtctggtaccctagtaatagtgctcagatcatttagctgtctgtaacattcccggtcctgagcattccacattaaaagaaatacaaccaatacttgtggttgaaagtgcagggtgttcgaaaagtcagtcattttacgctgtctgcctttcatgtcccaagtcttctgagatacgaggagggcctactgggcaaagccacactccctggagatatggaccatgtgacaggcaaaggcagcaccagggacctaattataggcaagtgagaaataaccgcatcacacagataactgccaaagtgagatgaataaggtctggaattttccagaaagatgcagtgggtggggaagttggacttacatgaaagtggaaaactattaccaatgaggagcagaatttggcatccagagatgataaatacaccatttaggccaaaaagggagagtttggggaagcacctccatgctttgagattagtgttttggaaggactccgtggcatctacaaccctgcttcctgtgatcagttgtttgccccaacaacctcttgatactcctctctccaccctccgtccttccacttagataacaggaataggcagctcccagaatgcaccactgagagttcacttctgggaggcatctcagatttccctacctctgtggatctgcctagagctttcattcatccatactgcactaaaagaatctgccattccatggatagagattaagtgaccagaataaagccactgggcatgttcattcatctagtccatagttggtgctttaccgactcagtggcagatcagaggagggacagacttactcggcgttacagaaataggaatgaggataggactggagcttccttgttctcagccaagtatgccctacagtccattgcatgcctcctgaaagagacaaagggaggcgagtttcactcctggtctggactttctgcagtggatgagggattccagccaagcccacagctgagagatcaatccaaaagcagatggcggcagccagctctaactggagctccagagatgtgtgtttcaaagcaaggtgcatttgctaaatgcaaggccaacccccaataagtaggtggagctacattaacacagacttgtacttcaaccccactgaagcctttgcctaacttctttgaaccttgtttttcagttctatgatatggaagtagtattaatttctgctccataagtttgtcaggacagttaaacaatatagtgaagtatttaaaatggttcccactatgccgatcactgaataagtacggtaatattataatcattgtcttagctgttgtttacgtgaatggccttgaccaagttatttagactccaaatctcaatgtctccatgacaggagtaaacactccaccttccaacactggtttaataagatctcactagtaagcactaacacatgctcctccatggatgttctctagcagccgagaaatgatggaaacctttcatccctgattgacatcttgtcctgccaaaaggagggtctggatttgtctggctaaggggttttctttccagtggggttaaataaagcataatgataggaacatatctcagttccctagagagttaaaagaggccactagccccaataaataataaatgctctttttacatagaaaacaagtgcagcgttctgactgggtagcataggttttctgccactgaacacaccaaagaaacaaagccaagagaatactccgtatccaccaactcaaaccaggaggtacatccttcagcggtctcttactacagtaatgtgctcatgggctctttctgcaaagcccttcaaagagagagaaccagagagaaggacaggaaacacagatattgacttggaatagtgtcaactatgaataaggaaacaaaaacatcaataaggtgcacgttgaaatgcttttatggctcttataaattgcagttagacctagggaatgctagaaccaaaaaccacataggaacaacggccctcgctaattctgctgtgttcatctgcgttcttttgttgtttaaaataagcgtctggtttcaagtgattcagaaagaggtggaacctgcaaggccctcagccctgaaggcagcacagcagagcacatcacgaggcagcactaaacaatcatgctagctccggtctccttccctcttcttaaaaagacattaataaggcagccagggtgacagaagcctgcggcagagctgcacgtctgaggtctcctggcctacgcagggagacctatctcaaacaaacaaataaaaagctaccactaatgccacaataggagcccacctcatgatttcatcaaatcccaaccatctgccaaaccccacctccaagtatgtttaaggtctgtttgggaattacagctccagcacatgaatcttggggacgtgcattcaaaccatgacaggccctctctttggcggtagacagaggagtggcaggtatcagggaaagcactggctgggaaagcatcacaggaaagatacattacttctttctctttacatgaattccatgaaagactcggctccactgtgaaattttatacctttatacagtgtgcttccacagcactcagcctttcatttctttgtcctcctccccaggcccctccagtaggctgcttctcttttatacgtgtttttccctttttagattctgtaaatgagagaaaacatgtgctatttttctgagtctggtttatttttcttaacattgtgatcttcaattgcatacatcttccagcaaataacataatttcagtgtgtgtgtgtgtgtgtgtgcgtgtgtgtgtgtgtgtgtgtgtgtgtgtgtgtgtaagccactatgatagtcatcatttgggatctaggtcatttcacttatgatgctttatcccatccattttcctgactgatgtgattttgtccatcttgatgactgggtcaaatgtcattgtgtctgtgtatttcatttctttgttcgctcatgtctgggtacacagacaggatccatgccctggctgttgccatgatgagcatgggtgtgtaggtagcagtgtggcgcactgactttgatttgcttttatagatacaggaacagtcctgctggatctggctcactctggatctggttagaggtttaaggatcctccctgctgatttccatattggcctcctattctgtctttccatcaacaggagacaggtctagcgctggacattccgaagtgctgataggactcagattcatccagaagtatcttcctctctcgccagcttatcaactgacacattctgaaacattcacgctatttgtgacttgaaaagatgtaggcttttctttaataagttgcttctgataaatgctctactgggtggaattttccaggagccattaggctcttcagaattcaagttcaccctttattcagccctgtcattaagaaatgaaacaaaatgcaagatttaacttacacagcacatacctgcatgcagaaatacagatcttacataaactatagagccgatggcgtggtgtgccagcagactttctgaagagtcgaggttgaaaatgcttcagttttgtagatcaaccttagcttgtcataagcactgagctctattttggcagtgtgacagtgtgtgcagcaggatataagtgagcaggcatgggcacagtacagaaaacttgtatctaacaaaaacaggcaataaaacggatttttgctcaaacccttggtttgctagttctcaggctaagctgatctcaagcatacatttcaaatatattagagtcctgcacaccagtgtgggatatcacctgatgtaagccgggacccttcctctgtaagctccaaagtaattgaattagtgtggtggtttgttgggtaccaataaatgaggtgagcgaatactagaggaataaaaatcacactttccacgtagtttttgctctatgttgagcctaaaggaacctgggagagacaatgatgaattaagaattcctaagaaatgttcaggggtggaagggccacacaagcctggtgacctaaggtcaatgcctgtgacccccagtggaaggagtaaaccaactcacaaaaatattcctctgatggtgcttatatgcccacacgtgcatgcacacacacacacacacatacacacacacacacacacacacacacacacatacatattttaaaaaaggaagtaagttccagataattcagtaattccagcagagctgtatgtgcatgaaaccgtggttccttaaacaaagggtgagagcaagaaagaagaaacagagctctgccctgctaaaacctcttctctcacactaacttatatatttagagacctggccttctctacatgaacgagcccatcagtcatggaattggctgccatagggccacaggcatagctgaaggagcatacaccagtggttctcagcctgtgagtggcaacccctttataatcagacaacccttttacaggggtggaatatcagatgtctattcaaaatagtaacaaaatggctgttatgaagcagcaatgaaataatctgtggttggggaagagaggttcaccccagcattatgatctgtattaaagggtagcagcattagggtgagaatcattggtgtacagcaatagtgttataaaaggtttctatctctcctctgagctgtgttccctgtgtggtccctctttcctctggaagcaagatgcttactcctagcacttcatggatcacatttcatgatgtagtgactcaaacagaagtagtctcctaccccctgattgcagacatcctgtggttgatcttactgagtgaactgaattaggaacctaggggatgcagtgtccaaaacatccagttttcaatccaggaatgagatcatctttacctaaaacatgcacagagtaaagtaaaaagaggagattcccatggaagctctggaatactgtacccacaagaacatagagcaagcaacaacagatgcccatgaacatgtcatcaagttgccctgggcaactgcctgcctcctagtgatccattcatcttcacagacttggatctctaccctgcatacagtaactaagctggcctccctctacagacatcaacacttctgagagggcagctgataccagatgctaacgtggggatcctaagcagcctttcctctcattctgatatctcgtaggctcccatggtatacatttgctttgtaaagcagcatgcattcattgaacacagtgaaagatttcactatgacattttcataaatgtatatcatatcttttgttcatatggacacctccatccatgaacctcccttgtctctctgtccctgccttgctgccagtctaccttctcttcctggtgtgtgggtggggggaggaagggttcaaatgtgtgtgtgtgtgtgtgtgtgtgtgtgtgtgtgtgtgtgtagtgtagtgtagtgtagtgtagtatatgtatagtgtatatgtgcaagtgtatgtatgtgtagtgtggtgtatgtgtactgtatatgtgcaaatgtgtgtatgtgtagtatagtgtatatgtagtgtatatgtgcaagtatatatgtgtgtgcatatgtgcatgtgtggtatatttgtactgtatatgtgcaaatgtgtgtatgtgtagtatatgtgttgtgtgtatgggcaagtgtgtgtgtacttaagtgtgtatgtgcgtattcaagtgtgtgtgtgtgtgtgtgtgttgtggaaagggacaacctctgtgttgtgttggctatgatgcatgctggtctttatgcaggagtagtacttctgatttgagtcttttgaaaaactacactaatttccattctggctatagaaacaacatccctaccacccactgatgtattagggttccttcccccactccaccccaccccattctcagcttcttgatttgtttctttgatgttgaccatttagctagagtaacatggaatctcaatgtggttttgatttggatgttcctattggctaagaatgttgaggttttggtttttcccccctcatattcttctatgttctcctatgaccttctatgttcttctatgaccttctatgttcttctatgactttctatgttctcctatgaccttctatgttcttctatgaccttctatgttcccattgatcctcttcttttggatcagatggtgcacacctagttccctctgaagcttctgtaccagataatatgttctatgagagcagcacccacgcctgtaataactctaagaacaggaggcacttgatacatgattactggttcaaaaactgagtgcaaagcttaagattatcctaaaagcaaaggagagtcctgaaggatgctcagtggcttcctggaatacttctattatgcatctggtgaaattccctttctatactcattgcttccattgtatccatccttaccacccgctggagttgtgtcatggtgatggattcccatactatccaccaccactgcatccatcctgctctcctctgagccacagtgctcattatctctaccattcatttatcagcccattggaggcacccttgggacatttctggaactatattaaactgttaaggtgctctgtggaatgatttaattgttcagctgattactccatttctcaaatgaactaggagagaaactgtaaggtatacataacgcacttcctcttaactttgttatgtcttatacatggtagacaatccagtcacattaataatattaaagatggaacagtacatcttttcctggagttaccagggtatcataatattgtaaaatatggagaatcaataaagaattggatacaggaaggaggaggagaagacctgagttctaatgtaagctgcatgcaaagccccatctcagaaccaaaagaaaaagataaaatacatatggtagacgtcaggacaccatggctgagtggagatcccagtgtgaagcacatgcttgtccctcttctgacctccgtgttgaccctcgagcagccctggggttatcctgtccctgaaacctccatctagcctggcctccaacacaggaagtagaagccatggaggaatgctgctcactgcctcatttttcctgtaggattttactattttagtgttaaagggacatttaagtaaaacacgcatttttcttataaaatgagtccaattttactccattttaataaaatttaagcatcataacaatctacagaccatgcatcatgttaatctatgacactgagaaatgttaattagcatgtaaagaacagtcagacctatgacacaaagttgttgcaaggagtcaaaaagggagatgtgtgtagtgctggaatctgtctataggatatagtttctgttaatactgtgcacagtgacaccattgcatacactagcaagattttattgaaaggacccagatgtagctgtctcttgtgagagtatgccggggcctaacaaacacagaagtggatgctcacagtcagctaatggatggatcatagggctcccaatggaggagctagagaaagtagccaaggagctaaagggatctgcaaccctataggtggaacaacattatgaactaaccaataccccggagctcttgactctagctgcatatatatcaaaagatggcctagtcggccatcactggaaagagaggcccattggacttgcaaactttatatgccccagtacaggggaacaccagggccaaaaagggggagtgggtgggcaggggagtgggggtgggtggatatgggggacttttggtatagcattggaaatgtaaatgagttaaatacctaataaaaaatggaaaaaaaatggaaaaataaaataaaataaaataaaaatactgtgcacagatatagaaacacatctcagacacactgtaacatgatccatcactatagacctatcaacccaaggccattagacatggcatccaaatgacaatatgattctccatggaaaatagtgattgcaagtccaactttccctcaatcccattgctgcagaaaggctaagtatacatcagtcagacccttgcctcactcatcagattttttttggaatttttttctcattctgtcactcagagatacagctttattttatgctgccctctgttaataaaggagagactccttcaacaccctaaatatcattaacattgtgcctgacacaagcagaaggaggtgggaaaggtctgcccaaacagctctgaattgtcatgttagacacaaactgaatctttaatgatgcaaatattcataaaaatgtacaaatgatcataattggtaataaaattatcatcctctgcttaaagtgatgagactaatgaccacaattcggtgcgctttcttggatggttgatgggaagaataaacttgattttattgtgctcataatgaactgactgccaggagtcaaagctatggtagtcagcttggagagaggaagaagagttttaggcaacaaaaaacaaaatttttttgtaggcacacatttttctttaggggagaggaagctgaagtgtaatgggaaagtggttcagaatgtcgtataagaggtgaatccagggggcggtgcacagaatgcatagagctgctggtttcatagcctggaaattatgtgaggagggtataaaatacaagtgggaacaggatcttgattcccaacaaatgactttttttacttgccatgttctgttccctctccagtcccttcccttcccctctgttccccatcctcatatctgttggtcacaatattgtgagacagaaaatgacatgaagctagagcacccttcttactctggctgttttttcagcatggcatcctctggtatatttgggcatgcttcataagtcaagaacaactttggctgacctttgaccaactgagacatgtgggttgtgtcaagatactctgtccaatattaaataataaataataaaatggccccttcaacttgcttcctgtgtccatttgcatggagtatcctcttccacagttttattttaaggtgatgtctgtatttaatgatgagatgtgtttcttgaaagcatcagaaggatggatcctgcttccctatccaatctattagtctgtgtctttttcctgagaaccaagaccatggattttgagagctttcatgagtaatatttgttgactctttttattgtgctaaactctcacaattccctccatcagaggcaacttggaagtctcatgaaatgaggcaagatgtttggagatcagcccaagtcctgaatggccagttctgtacctcccaggagcttcatctctgtgtatctacctctacctgggcctttatttggacaaagccatagatagatattggggtcccatgtgtgatgctgtgcttattgctttcatgtaggaggattggttatgaatgtctttactgtgattaggttcctatgtgagctctggaccctgaggtttgagagacccaagttacctgtcttagccctggatggtgtcaatacacttggtcattagggaacctccacaatacttgaggcagccttagctgggtagtcaggctgcagtctagttctttatatggtggtcaactctaccacattataaaacagagaagccattttgaatacaacattttttatgtggatgttccttgagtggataccagatatttgtatcacagtgaagggaccttatgatgtgtctggattctatgggatgtgtttttctcatggaggcaacccagaccaatctacagagcatagaatggaagcaagatgtcttaattaggattactattgctgtgatgaaacaccatgaccaaagcaacttgcgggggggcaggggggagggtattcagcatatgcttccatatcacagttctctatcaaaggaagtcaggacactcaaacagggcagacacctggaggcaggaaatgatgcaaagactgtgaatgggtgcttcttactggattgatcctcatggcttgatcactctgctttttgtagaacccaggactaccagcccaagaaaagtaccacccacaatgagctgggcccttctccactaatcactagttaagaaaataccagatcctttcagataactcagtttgtatgtcaagttgacataagactagccagcacacaggatgacatgattaagtatcagagagaggactgtatcaatgagctatttctatgtaacaaactatccctttaaagacatggccattatctgcatttgcttatttttcaattagttgaggtcaattgatccaagataggttcagctgtcttgctctgcttcagtttgtaaacttggctagcttggctcctcgatttctgttgatcccaaatcttaactaaatagtccattctgaatcaagtctgtggggccagcagctatctggaagaagctttgtttattgtggcaatgagcacagggaaacaagtccacatttcaagcgcatgtaatgaccatgtttgtatcaccgctgattctccatggcccaagaaagtcaacaaagataatggcaagggcacagtgcagggatgtacatggtcagccagaaagagaacaaggtagcatccagatggacagagctgacattcagggaggaggaagtgtgtcttttggagaagccaagaaagtgtgaaattctctgaacagtaatcttgatctaccccagatccacttcagaaaagcacatcaaaggtaggtaagagagttggtgctaagggaaagcattcaggtgctcagggtagacactgtagaaaaggagatggttctgagactcatgaccttgccttcactgctaaaacttggggtaacttcaaaccccaattttattttgctcagagaaaaaacagaagctcagatggtttgggaagatttgtaaggtcagctcataccttgctgttctgtgtctcttgacaggtagctcttgcacttgctcgttgcatatctttgagatgccactagctgattgtcaccacaatctttgttatgaacattttgttgagaataaatatgaatgttttgttgagaataaatctgggaagcatttcttcatctaatccaagtaagagaaagttcagagagatgatccataaacacccttgtttacagaagttatggtttaaatatgaaattcacaccacacacacacacacacacacacacaagcttgtgtgatcaatgtttgtttcctgctggtgcttttgttttgacatattttggaaaacagggtgtagctggaggaagtaggtctctgggttcatgttctgggagtctctgcctttctccatctccttctccttatccctctcccttcctcctccttctcttcctctcacttcctctccctcttcatctctttctccctctctccctccctgttctttctctttcctatgaagtggaaaccccctttgccacacttttccccaccatgatgtcctgtccaaatgcacaggataaaacaaccatagactaaacccccgataataatttgattcagtaaataatttgtcagtgaagtaaagtaattcatccaacagagaagaaaagtaagccgtgcaagaaaatgaggcagcagagtatagacctaagttaccagactccatactctgcactcttggttctataatccatggaaaatgataaccaccttgaatcataaacgtgtttatacatctatgcacaagcacttacatatgtactaagtgtttctctcatttgtctgtgagaccagcagataggcaagtcaaggtagatgatctcagacataaaaactgagagttgaggttaacaaatttgtctggtttctgatagagataggaccttctggctttgcacctcatgtgtaaaagagagctaaggctgaagaaattcgctgggtctccatccctcccttttgtttttcctgctttgcttataagcagactagccaaggtgcatttataattctcaggaagccatgccctcttggcctaacttgtaatagagtgagctttgtattgccttgagtcttctggattccacatctaactgtggaatcttccagttatttccagtaattacaggctgcagccatgataactagctcagtttacaaaagccatcttaggaaaataaccagtgttaggaatgcataagggggtggctgtctgatacatcaagaggagaaaattatgtctgacttcttggcctctgctacttgcagaatgcattctctctctctctctctctctctctctctctctctctctctctctctctctctctctctctctcttttcctagtaagtacttacttaacacaagcatgtttacaggaaagcaattaacaggagttccctgaactatcaaggagaagaagcagtaattaccaatggtaaaaacactctctgtggtccagatcatgaccatacaactgttcttccccattaagagaacaggaccaaagatgggggatgagcagcgatgaagtcatttgacaaatcccaggaaatcttactctggaggccagcatcagggtacagatctgagtttattgcctagttcataagcttatatagagtgtttgaaccaatcccaaacccctaagtccttgaccaatcatatctccccacaccatcaccatgctccaatgaaagccatgctgatgtggtaactaagaaggaatgaggggaatattgtcacctgtgaggacttccttaaatatgggggaagtggccactgccctaacctctgttcttttttgctgtctcactagtgtgtcaagagccatcttagagctaatgccttgtgaggcagatcaggaatctccaagtagttgcaggaggctgtggagcctctctctctcaattctaccttttccttcacaatattgacttacttatcccacacaccccatactaacctgcttctttgctctgaccttgggtaatttggattttaggttgaccacctaagttctttcccatgagttaacctacagggagtaagcaatgtgacctaagttctcaaagctggagacagtttcatgatacctaggctgggtggaaattgtggtttccactgtggcatgtgaggagctaagcatccttctcagcctcacaagagaaaaggctgaacaaaatattcagcaactcctctgagcatcagcacagagctctgggtccatagcaagccagcaagccagcaagccagcaagccagcaagccagcaagccagcaagccagcaagccagcaagccagcaagccagcaagccagcaagccagcaagccagcaagccagcaagccagcaagccagcaagccagcaagccagcaagccagcaagccagcaagccagcaagccagcaagccagcaagctctgaccctgactgtagcttcagagactcagggcttgagggagaagggagaggaggatgaggtggcagctagggacagaagttgtgttggagcaaggcttgcactgagttccttgtccccaatacattaccaaactttgcttccaggaggaattacatgtgatactaagacaaacttgtggaaaaccttttcataaagagacagacaaagcttaagaaccagacacagggcaggtaagttggaattatcagactaggcattcctaactaatgttcatattcagattttttttcaaatttttttaatttatttttttaattaggtattttcttcatttacatttcaaatgctatccccatactcagaattctaagtcccaatgtaaggtaagttgcctctgttttcaacttcatagcagtgtgaaagcagcatgcatgtactcaatatgcactcagaaatgacactcaagttgtggcagtccaccagtgcctgggctattaatttgtagttctttctcaagacactcagaaatagtgatgaactctatggctcaggccgcgccatgatcttgagggaaagccatcaggaagccatagtataccacactgctgagcaatagccttcggtagttgacatattcagtgcattttcatcgtatactagtttcggcttccaaagcatttgttgtaacttctgtggtggagaagtgttgatataggtaagatgagatatttaatagtagcatagatagaaactttaactaaaaaggaataaaaaaataaataaaaatctctagcaatcaaatacccaggcacttgggttgtttgtttgtttgtttgtttgttttttcacaaaattagtagtgcctttcctgttgtatagtaaacgctgaatcacttgttagtgaggtctcttgtatttgcagtgttctgtatactatctcctccagccttggtcacatgggcattgattcagtgatccctaggcactgggcacagagctcagtattggcattaccacagtaggaagggtgggctcagtctctgcacttagggaacttgttgattttcttactccagcaaccatgccaaaggaatctaattggtagctgagtattgttatattttgctcataccttcaatcctacccatatatttacacgtgtgggggatttactgctagtgactgagttcccagtcctgatgcctgtgagtatgcctgtatgaggggcactgtgctaggtgctgggaattccgagatgaaggaaacagatggagaccttgcccttgccaatcttcagtcaagcccaaaaaagaccaagagaaatgaggccagaattaaagccagctgttaaggcttctgctgacctgccctccacccagcactctcaaccccaccttcactgctttcttcttcctagcaatgagcacactgtccacaagaggtctgaaggagaaaacaagacagatgtgtgggtggttggcacagtctgattggttaagccagggaaagtcttagaagaacagaggtaagggagccaagttcacactgatgcttggatacagtaagtctcagatcctgagagaggagaccctgcaagggaaatgccaaggaggcaaaaaaaaaaaaaaaaaaagctttcatctttcacctcccaacattgtggacgtggacggaactcttgccttctctatgtaaattaaggttagctttcctggtattccaaaggccctaaatccatcctatcaattagtccccatgggacacactatgatggcacaattgatttgcctggagtaagttatcacacaatcagctgaaaggcaggccaaaagattttaatgcagttgcttccaggcagttactaacattccctcttagcaacaggaccagggtacttttattcctcaaaatgatattcccctcttgttaaagcccaggtaattttatgaactacactgatttaacacccaggccacatgagccatataccttgaataaatgaaatccaatctctgtggcatgaattatggccttatgctgagcatcaccatggcaactaatgacatcaccccacccccaccctcagcccccacaccaacctgcacaaaatccatttccccaaggttctttatatgcctggcataggtatgttcttggcttacatgtgcattcataaatattactgttgtcaaaggttcgtagtggatgtttgctgtcatttggggaggtatattccctttgtggcaaatgtggggtttttttgttgttgtatttcatgtgggggaaattctaatgaaaattactgtgtgtatttgattagcaacatttgttgataacatatggtctaaagaggtttctgcaaataagaggctttaaatagtaaacagagatgtggctgagacggagcagatgctcttggcaaacacacagtacgaggttgctttactggggaaccctcccccaccctgcactgcctttcttcctagatcaaagtgtccattttcaaagcagcgggccccatgcagtacatttgcagaagtaatgtgctgtgactttagtgtcactcctgccccctaaaatatgaattgtctgctactcatgcttcttgctagatattagtaataatgtagtgtgagcaagtgagtcagcaggtccaggttgatctgaagcagcatttgggtaccatgtgtctgaaatgtgctgtgtgcataggcatgcctgtgcgtgcacgggtggaggctagcgaaagaggaagggtatcctgctccattacttgctgccttattccaatgagacagagtcttttactatactggctggatgttttctgctaggctaattagcaagcaagtggcagttgtcttccatctctagcctcacttctcacattgctggtattacaggtatacgtggttaggggccacgctcgggttttacctggatttgggtcctggtcctcatgcttatccagctgacagtctgtcccagagtctgatcttccagtgcactccatgaggaatggaggacatggactgagctgtcctggcaagtgttcatttagagttgctctggtgggtgtgctaggtgagaacacctttaaggtactgatgaaaataaacatggttctattaatgagcaggcaactccaccccttataatagggtttggcttttcagtaaggtccaagaggacatatttcaggctcatgggtcacatgatctgagccatagctacttaactatgatacaagggcagccttggacaccctgtagtgaataagcataggtatgtgctaataacactgctgttatgctttaaaacttgaatttcaatggagtcctcatgtatcacaaaatagtattcttatttaattgttttcggtcatttacaattgtgaatagtaggcttggtaagaccaccagctggataagcatgaggaccaggattcaaatccaggtaaaaagctgagcatgtccactaaccacatatacctgtaataagttcccacaatgtgagggggtgtgtgcagatgggaagatagctggaacttcatcttcctctagccatcacacaggtgttcatacacacaacacgtgaacatacaacacacatatgcatacacagaagaattcttgaatatgtaaaaaccattttggttcatgagctatatacacataagcaagtaaacagttggaactgacccttaaccacggctgcatccttaaagtgaaggctttgtgcacttcgcatgcacactattgacttaaacatagtatgttcaatatctctctcctgtaaatcccttaactagccttctggggtcaggactgctctctgtattattattttttatttatgtactttacttatatcccaactggttttatacacatatttgtataatatattatacatgtatcatacatgtacatatgtacctggtcctgtatgtatatatatcatatatataatttcctcccttagcctctcttgttccccttctaacttttagattcttacctctcctcttaccttctactttcatgtctctgtctctgtctctctctgtccctgtctgtctgtctgtctgtctctctctctctctctctctcacacacacacacatacacatagattatgcatatgaaagaaatatggtattcatgtttatgatcttggattattttgctttacatgataatctcaatcctatccattttccttcaagtgacataatttcattcttttttatggctgacttagaattctactatatgtatttctttttcttttttctttttttactagatattttctttatttacatttcaaatgctatcctgaaagctccctatacccttcccacccacgccctgctcccctacccacccactcccacttcttggccctggtgttcccgtgtactggggcttataaagtttgcaagacctagggacctctcttcccaatgatggccaactaggccatcttctgctacatatgcagctatagacacgagctctgggggtactggttagttcatattgttgttccacctatagggatgcagaccccttcagctccttgggtactttctctagctcctccattgggggccctgtgtttctactataggtattttctttattttgctaacgggcatctaggctggttccatatcttggctcctctgaagagtacagtagtaaacatagatgtgtccttacattaaggacttggggtccttcaggcttatgctaacactaggtcctgtgatgtttgtttggagaaagtccaaccctgatttctctagggtctacactgacttacattctaagcaacagtgtgcaggagtcctctatcccccaatcctcggtggctgttgttctttgcttatgctgatacccttctgactgtagtaaaatggaatctcaatcacatttgcatctggactctccccaaggagaacatggcacccgtgggaaaatagcctactggtgctgtacctaacagacctgatatggtgctaatttgcctgcaattggatacttaaaaatcatgtccccaaagaagaattaattaggcactggccctaagctgtggagcttaggaattactcaccttggttgtcctccaagttagactcttgtgcctccctacagaaggacttgagtgggtgtcccaccacacaagctttcatatggaagtacaactacaggagatagcttttctacactcttcagtatgtgctggtggcactgtctaatcttgctgtcactggtatctgtgttccttccagcccttagctgtgtgagccaaccattgtttgacctacaagcacccatgcccggctccccagaaagctgtcatatgctgtgctctgcatgctgtctgatatcatgggcactcagtcactgtgctccaaaacactgccatctccaacaagagatgaagacccaggtaaaggaggctcctacaggttacctcctgtctcatctccacagcccctgaacatacaaggtgatggttcccagcccattgctccttcctttttagttaaaaatcaaggatgtatttgtagcagttgacttactactgttcttggtgcaggcaataggatgcactgaaaatgtcactttcctcctaacacctcagtgtgtggagaggaagacacagatgtacctgtcagaccatggggcattaatgcattaggagtgcctgagagatagaggcctttgggttcaatagtgcggatttgaggggaaaaaaaaacctcaagagtttaaatcctctattggaagtggcctgatattcttgtgcagttacataacatcctcaagtgtaacttggcctatctataaaatcgtgatgcaactggggtgatctatcaggacgcttaaatgtgctgatccatacaaaatactagacaagggtcttggcaaacataagccctctgtaattggtggctttatcattttttgcaagctaaatgaacaggccactatggtgtcattggtgacagaatcacagagaaaggacaccttacccattgaattttatctaccttgtgtgcagatggaagtcaatcagttaaccttcccaaccttggcttgataaatattatcagcctctggtctttccaaataagagtgcagtggtattttcattctggaaagcttttaaaaggttttcatcttagcagctatagtcaattgcacagcaagggaaaaggacagagaaaaaacagcaaagagaaatagactcagttattgatgtgtggtccactagaacacaaaagtttataacacatctccaccagctaatttgtccatgtgtcaaatatagcattgtggaaaagtacattaaacatgggcaataaatccaaggctacagctcagcgagggcgattcagtgatggctactgcaggctgtcttctatcaagaaggcctaattctcagacctatgcctctatcctgtggtgggtggagtatgaaaatgtctaccctttgtctttttccagctctggcaagaactggctcctttatcataattggtacccagacagctccaggataactatttagaagcattatgagttatatttgcatatcatttttttaaaagcctgtaagctatcctgtgaaatgtctacacttatgaacccatagttacagaggaagaaactgagccacttcaaggtgactcaaaatcccaggagtctccaaatggagcttccccaaagataaagggataattgattaaagtacccaagaatgtatgtggaggatcgaagggaggacaggacatagccatgtgtaattagacttccatttacttcctatgagtgtcgtggcatgcagtacagaatctatgtgactatgggttcataagtatagacacttcatagattatctagcaggtttttaaaaaagataatatgtaaatataacttatagtgcttctaaaataggtaacatgcatggggctgtctgggtaacaattgtaattttaaaaagccagtccttgcccacgctgggaaaagacaaaaagtagacattttcataactctaggaagggcctgagaattaatcctccatgataggaaggagcctgcagtagccttcattgaacccaatccttccttcaggaagcacagaagtttcctgtcaacagcctgggatagcctattctcactgcacagccatctgccaccccagggcgattcacttagtgctggcttcagaggcctggggcaaggaatctgcagtgcctttggctcaggaagggcatattttgctttagtcttctcctgtggccatcttgcagttcatggtgattttatctctgaaggtatttgtgaaatgaagtcccccaacagagtggggcagagaaagtactgagggaaaaaaaatccttgatgttttcacatcattttaaacatgtttatgcttgtgtgtctatgagtctatccatgtgtgcctgtgtgtgtgtgtgtgtgtgtgtgtgtgtgtgtgtgtgtgtgtgtgtgtatttgtgtgcctatgtgtgcatgtgtatatgtgtctctgtctgtgtttggctctctgtgtgtgtgagtgtgtgtgcatgcacgaaagagagagaaggagggagagggagagattgagagagagagagagagagagagagagagagagagagagagagagagagagagacttctccctgaagatcatgtagctagtctttgttagaatagaatcttttatttcctctgcttcactgggccaggttactatttctaaagcctgataaataaatcggggttcatctgtgacctgactaccaaaactcccagtcggaaagcagttgactctaatggtttattcggttattcagcttctgggtctcttaagcaccatgctgccccccagtctgggttattttacacaccaatgagcaaggcatccttggggagcttcagaagtccaggcaaactgggttgctttctactaaacagcctaggatgtccctacggcccagtcaggtccagctgcacaggtgggacaggcctgaaatggagctcctgggaaggctgaagcagcagcagcttttgtagaccaatggccaccctggccaccaatgaactcattgtcacgcagagcaagtcagggagaaatctgagtccaactgaaatggaaagagacagtttgagatctagctcagtgggagaacagcatgggttttttgctcagcatgtgtgagagaccctggttcacccagtctagaaaagacagaccaagaagaggaggaggaggaaatggaggcaaaaggaagaggggcaggcccttaggcagcagtggttaggtcagagtcagtctctgttaaataagccagaaaatctctccagggaggtgtcagacaagcttggcgcagcagtgcaggcagcatccccatcgtatgaggttgaagggaccttagtgggatcctgcaaatgaatggactctatcttgagttttcttgtatgtaaaatgtctgctgaggtgaacattttcttagttacttagtagagttggaatagccatgattccacacattttcctactttgggaatggaaaaggagccaggatttactgggatctcattgtgtcccaggcctgcagctattacatttaaagttatggtgagatgaacttactttacatctgaggggcttgatggacttgcatgttagttagctcatcccaaaccctatgctttgtatgtgacttagccagggtttgagcaggaatattctggttcactttatcatggcatctttgctagggcagattcccccatcctcggtctttatgaaggcactgggaaccacagccagaagttcctggttggatgtacacggttttctattttgttgaaacctggttattttgtctcttctcatacccacctgtatcatctccctgaggcttctgtgtgtgtccagacttgcttcacacacgttgatcttccagacccaggtccttccttcccactactctggtgatttacccactcttcctagttcacggttcctcttagtttagtgcattgaatttaatttgtgaagtacaaaactgagactaacagtcctgtttctacagttttatgaaagaagaaacaaaagcagacataagacacagagtaaaatgtgacatgccctaatagtcaaacaaatacccctgagggctgaagagatagatcatcactccacaaacccattgttctagcagaggacccaggttcacttcccagcactccttggcagctcacaaccatccttaacacagttctcaaggacccaactctctcttctggcttgtgtatgccccaaacacacccgcacggcacatgcttacatgcaggcaaagaactcgtacacgtgaaaccaaaatatagaaatccttttaaagactacgcataaaacaataatgcccacataggccatagaagcaatgtcctgtgggaagtaacgacgacacccttggcttatactcaactccagatgtaggatggttgctctttttgcataaaacgcctgtggagtaggtatcacagaccttgagtatgttcaccactgtacataagtaatgaaggtgtttcctgatgaagaaccatctcccatctaagtctttaatctaggaaataatcagaggcaaattcttaaagtaccctctaaccaacttgtttgctataatagactaatagttatgtaagcctcaatgtacttatgcaacgtaacactgtagtcaataaaattagatattagcaaatgcctgacggtatgggaaattgatcacataatgcaaaaacaatctgtagatgaaagctgttgtctgtactattttctggccctttaaaagaacatatatttgacattatttattcattcaaaaatatttattccatgcctcctatgtatgaagcaccatgctaagttctaagggctgggatataaatgaacagcagaggcccggtgctcacagagctaaaagaaccaaagacaaacagggctgagttggttaacctcacatcactgtgggttggaatgcctgctgtactgaagacaggttgatacctgggcccagcttagactgtgagatcaaaatgacaagcagaacagaggtggcaaagaccgaagacccatgaaggaagcaggtgagaaggaggaccagggaagggtcagggttgtgccttttaacagtgcttggagtgccgtggaagggtaagacaggctcagtgcatatcacagcaagtccacaaggtactccatttgcaactacataatggatggaggcggggcggggatggtggagtggggatggtctctgagcatgatgcaggtgaataaagaaagcacaactgagagaccacgccccaatgcaggtcacgccctttgctccacccacatgctgagtaaaccagattctcttctgtgtctgagacttggctacagaaatcgtgagcagggaagagcacccctgtacttctgcagaccttcttgtaggtggagctccactcagtcctgttttccacttttcctggagagtagctccaacctgtgatccatgtatccccaagtctctctgtaaggtccaaaattccactgtctatgaagctggctttccagggccgagttgaaaggctggcgaatgtgtgctgtgtgctgtttgctgagaagggagctgcagtgggaaattctgatttcctccagtgctgagtgcaaggcactctgggaaggcccatggcagcttcgagagcatctgcctcttcttttttttttttttttttttcatcttacaagttaatcaacactttcctttgctctggcagctttgggggcactgggagtgggtgtgacagtctgctctgccttgggttaaccctgcgtttgctcttcttggggagacagagaagaactacccgttgttgaggggtgcctgtctacactgactctaatattctctccacagctggggcactcaaggcgacttctccacaacccatgcgctgccagctgttaaagtaaagctattcacagagagcactggtgtcctggccttggaagacaaggaactcgggcgggtgagtgcgcaagggcctcaggacagagcacagaccggggtatctgctgtgacctttctgccccaaagtcatgaagatgcagctctacaagtactgaggggcagacatttggaactacgttcacaagtactgaggggcagacatttggaactacgttccggactatgctgttagctgtgagaccttgaaccagtttctcaacctctctgagccacagggtctcctccataaactgtggacaacaagtgtgattcagatgacaggctggggagactcctgaactacacacttgggtattatttatagcaaagatgtgcaatgctgctgactagcttaacgtgaaattcattgctattaaactgtctaagctcctgacaacattaaaatcaacataataagataaaagaggagtaaaaagaaatcaatccatgttttaacagggacattcagaatataaataattgaagtgttctgattaccccagtgtggagaacattttgttaatggcaggttcgagacctgttgttggaggcagacccacaagcctgggtatcagtgaaccaagcaactgatccattaacaaccacaagcaaagtcctctttactgccctggaaacaggccacaatgcaatgctctaagatgtcacacatagttaggtgtagaatgaatatatacatacatatacatcatatgtgtgtgtgtgtgtgtgtgtgtgtgtgtgtgtgcgtgtgtgtgtgtgtgtgtgtgtgtgtgtgtgtgtgtgtgtgtggagagagagagagagagagggagagagatacatacacatacacatacacatacacatacacatacacatacatatacatatacatcaggaggagataacagagtaaagcaggctacagtgtgctcctgttcagaaggactcttccttcttagccactgctaaacacacccaccccatccattcagttgctgaggcacagagagcccagcaaccccaattaccagcccctaggatgctgagctaggcatgttattaggctcagccctccagggacttcatacatgttcccaaggcagaaactcatgaagcccacatgataaaggataaagtaacttgtcagaaaaggcatataggcagctcaccagtcatcttcagccgcattgcctctgtggagaaataaatatggcagggctctgctggggtgatggaggcctagagcttgttgctcttcacacagatacttgcatctaggtgcctagacattcactttttcctccctcatgcttcaggaactctctacttcctaatgtaggtcagcctggacctctactgactggccatgttctgttgggctggtgccctctgcaggtgacagctctgatggtgcaactgggggacatgatggcatcatctttttcaagttcagccattcagtagatcatatagagtgctctattgagacaactctaccaagctgagcataacctttctccagggacctggggttagcttcatccctttagccatatttcatgtattcacctgatttatgtctcatgtacatcaaatttttcttaaaaaatgaatcttttttaatatacttgaaagagagagagagagaaagagagagagagagagagagagagagagagagagagagagagagagagagagagagagagagagaaagaaagaaaggaagggtcccttaagggtagaagaggttgccaccccaggcctgccctcacctccagctccagcctccagtgtgtctgtgtgggaaggatttacacatttttccacagttttaaccaaatgaatcctatctaagtgaacaagagactcagagagatcacgctatatatgattatatatgagtatataccctttttaatagaacaggcacagtgtcaggcctgctgggtctgaccgttagtgctgcagacagggtaaacagaagcaaactcaggcagaaagctctcatctgcaacattacaggacacaggcatcaaagccagaagttacagctcagtgtgggaagtgttctgcctaagtcctgggaggaaagcacacagcaagaggtggtccctctgtgaagtggggatgccattctcaggagatgcaaacagatagggagagagagataggcccaggccagaaatcagcctgataaaaagccagggcgtggcagccccagcctgaggagaagtcctgatggcttacaagcagcctcctgaggggctgggttgtggctgccagttcacatccacacagcaaagcagatcacatatggcttcagcaaagaaaacagagtgcttagtctgcagcctgggatgcccaggtaagatgagaagtcaccctgtggctcccacacatccagaagggcccttgccctcccaaggtgctgacacacaggagggggactctagcccatcttgaacttggcgggctgcaggtggagacagaagaacctcatctctccaaccaccctgcagaggcttcaccagagagtgaatgcaaaggagtccaatagaaggctctgtggaatggccagtgaggaagtggccatctgcattttgaatggacaccatattgccagtgggaactgtacctagatctatgtggtggagggctgttaaccagctccccgtgtacaaggtgctgctcctgctatgactttaccaggcaagcaggaacataaggaagccaaggcctttcttgccactggcatggtcatggtcctcttgccagcatgctcctcccgaccctctctcccaccagactgactgaggatacagctggatggatagctcccttccctctgtctccaaacaaggacaaggatgcatttggagttacagagctccactgcagagatcagtgagatggacttaataccaagcttgacacccagatgtcaaccctcagatctcacagagtgggagaactgagttctgcactgttttttctgacctatgcatgcacacacacatgcacacacattatacacactacgcacaaacatacacatacataacccccacatacacatatatacaccaaacacacattactcacactacacatatatacactacacacacatacacaccacacactacgcccgtatacatacactgtatatacacaccacacatgcacacatacacacaatatgcatacctcgcacactatacactcatacatatgtactatatacacacactacacatatactgtatacacatacacacacacacacacataaataattaataaataagtaaactttaaaaatgtttcaaagaattctctagacatcactctcagaactggcctgtagatttcattagaaagctgagtcctggcaaatagcaaggaaacactgggaccatcccctggcctggtagcattgtgccctcagttcaaagggactgtcagtcagaatgtcaggcatggggtaatagagccctgtagctctctggttaggcacctgtccctaaagatagctgagtaacaccactgctgccaggaggccctgcagatcgcaaatcccaggtgctccatccattatgtacattggcgctgtactcacatgtcttctcatagtctttaaatcacctgtaggttcctcttatgtcaagtaacagatacaatataaaattctagcatgctgtattgggctatactttccagcagtggagtgtgatggagccctcggtatcctcctatctttgacccaccctccaagccctagagttaaggcagcacccagcaaagcgtatctgacatgctgccaaaaggcattttccaggggtagatggaggctacttggagcttcttcaacccaaagcacaatgaggagctggaagagaaaaatcccagtccaggtgctactgacctctgacccaaatgggacccaacatagactcctgccctgtctacgtctctcatttcccattattctatcgtcccccacaggctttgaggtgtttctcttcttgtaatgtgaaactgtagaaatggaaaaggaaggagtagctaagagctggctattacaaacacatctcttctcaataactgacatggttagtgggagatggacaatgttctctctcttaggttactctactacttctgaatttcagaaaaacaaaagtaggaccatgatatcaccatgatgtcaccatgacatcaccgtcctcgctcctacagacttagccagtgaggaaaaagaaagaaggcagagggcattttgtcccatcgatgtgactgtgtgatctcaaccacccacagttcataaaggagcagtctcagcaatggaacatgggctagcgttgcatggcttcacatcaaagtgtctaactctaacaagcatgactgtgtgttgcttttgtcttctgacagaaatgtatgctttctccctgcaggtgatcctccatcccaccccaaatagccccaaacaatctgagtggcacaaaatgacagtctccaaaaactgccccgatcaagacctcaaaatcaaacttgctgtccgaatggataagcctcaaaacatgaagcactctgggtaagtgtttctttcccaatctgagatatgggtacattcatttccagaggcagcaatagaacagaagaggggaacatacctcggggacagatcacttgcctggcatatataaggctcagttttggatctctagaagtgcagaaatgaattaagcaaaacccaaagggatttggagaactgtatgaaaggagctggaaggtgcctgctagcagcaattaaagaccatggcgctgacagttcccataggcttcttcagctgcagttactgtgtctccatttataccatcaagagagtaacttcctgctacctctaagcagactccctcaaaacagttaaaacatgctggacacagcatgttggggtttgtgcttggagaggtcttttggattctgtgttcctgccagaggccttcaggagtccctccctctcacctgtgtggacaaccaccttcatgaagtttaagcaagtgcctaactaggtcaaaagcgatgtcaggttgactgaaataataactctccaaaatggagtatgtgtgtggccttcattctgtgaaggtttgcatgaataatcagttgagtagctccacgcacagcaaaaagaatagggaaatgtggtttcactttacaaaacaaagcattgctttgtttgttttgttttgttttgttttgttttgttttgttttgtttttttaaccaaaagggttgtgaatgactggttttctgtggagccaccacctgctaaattatcttttaagatgtgattctttgcagaggagcaaggcagtataattatgaagagggaagagtctagacagcagaagaaactgggctctttgtcaaatgctctgaagtgccatttgtcgactggctgtcattctccatgaccttcaagtgactaggaagctttcctccaccctcttgaaaactcaagattgcatttgtggcctcgaagtctatggaagtaagaagccccacgctaagtgatagccagccataggtgccagtcgaaaagaagcctgcaagacgtctaaggaaacaaccaggacagcaagtggacatccttgcagagtagcagagcccacatcatgtggtcagtggctgcctgtgatgcctttcaaaggctgctcacaagctggataccactccatgaatgtcacccatgacttaaacctgtacaagctacacatgatattgttgaaaccaggctattcccaaagccagaggtgggattgaagtgtgagaagcctgtgaggaaagataccagctacttaacacttagtctgtactcagccatcactagtgagtgcagccaggttttccttatttcacttggtaccttatcatatggctaaggcacaagttcaaaaatcaacctgagctgaatgttcaaaccatgtaaaaaacaaaaaagttgtatcgaggaaatatccatatcaataaagtgcttattatgcaagtatgagtttgattgcttgctttgcaagcatgatcacatcttaaaagataatttggaagactgtggctccacagaaaccgtttcttgaagcagtattcatctgaaatcccaacattgggcaagcagaaacaggtggattcctggagcttactgggcaactagtctagtcagttgggtgagctccaagttcaatgtaaaaagctgtctcaaaaaataatctggagagtgattgaggaagatgcctcttgcacacacacacacacacacacacacacacacacacacacacacacacacagagtagtacctgcacatgaacacacacgtgtgtcaacacaaacatactacatgcatactcacaggtattttttattaggatttatttcatttacatttccaatgctatcccaaaagtcccccacatgctcccccacccactccctcacccacccactcccacttcttggccctggtgttcccctgtactgaggcagattaagtttgcacaaccaatgggcctctctttccactgatggccgactaggccatcttctgatacatatgcagctagagacatgagctctgggggggggggtactgggtagttcatattgttgttccacctatagggttgcagatccctttagctccttggttacttactttagctcctccattgggggccctgtgatccatcaaatagctgactgtgagcatccacttctgtgtttggcagtctcagctccaaactatgtttctgtatctccttcgatgggtgttttgttcccaattctaagaaggggcaaagtgtccacactttggtctttgttctttttgagtttcagttattaaggtcagtttttcctccttcctatctcactcccggtacatttttctgaaatataaagaacattttttttctccaatatcccttctctctccaagctacgtagtcctggtttcaagtctaatttcaactagtctagtcagttgggtgagctccaagttcaatgtaaaaagctgtctcaaaaaataatctggagagtgattattattaaaaagaactgaggattgatcttcaggctcctgtagtatttgaggaaatatcctccatctttaccacaacattgactcagaaacagtaaatatctattagaggaagcagagggtgagtaagcagaagaaggtggggaaggaagctgaccagaggatgtcagcgaacagaagcaccatcctcacatgacctttataacgtccttggtgaagttagtgcctcagcctgcaggccaggcttcttcaaacccctttccaaacactatcagtcactcccaagcagatactcaacacagtattgttctctgcattgaacagagcccagcttctcacattctcctcatatgctctgtagagagagctctacatgacttacattcaggaacctctctgtggactcactggtgggtgtgctagcatattctaggttaccttcacagtatgaatgatggaggagatacttagctcatatccatcaggctcctcaatgattgaaacactaggctgccattcaaaaattgctccttgccaagaatataccaagagaatttagaacagcctcaaagagtagacaaaggattcactaacatcaagtcagaaccaacatggcccaaactgggacaaatggccttagctgcataaggaatgagtcaggaacagtaaaagcatttctgttgggagctggggagatgacccattttataaaggatttgccatgcagggacaaggactgagttcattaccaatatccacataaccaggcttggtgaagtgacacactgtggtaatctcagtagtggggtgagagagacagcacggtctcaggaaattgcagccagcctccttggtgagctgcaggctactgagaacttgtcttaaaaaataaaaaaaggacaacacctgagaaatgatatatccagggggactatctgaactccagaggcccacacacctcacacacatgcatgcagctacacatgagcatgcacaatgtttatggacatttttttccatttaaacacgggtagtagggatgttaagccctatagcatggaagtcagagtaaagtcacagcttaaatagtggggggagagccttgaagatacacagtggagacttaggttatagctgctttagcatatgagcagaaagtcagaagtcttggggaatcttgattggatgctgtggtttcatgaacgagctaccgggccatgcagaataactctacagagttgtttctaaatgccagcgagttcaactcaacactgtttcttctgattttgagcattagcattagtgcgtgtgtgataattaagcaactccaggtagtttttggcttctcatcacccttctgtccctccacgtgtggaagttcaaggtcgagtacttcacatctctctccccattttatctctgaaacagccctacaggaagtagaaggtcccccatcccatgttaacagaccgcccctcccttcagccaggtgttcagacctacagccctgaagtcatgctgaacatcactcgcacactttttaaccaggaacacagcccatcatcaaattccttctactctgtttccaagccaaaccctgactccggctcctcagtcccactcctctctgctggactccaagcctcccttacttttcccctcttgttactcttgcctcataacctctcgcacattctttgcctccctgtagcctattccatcccctgaaattttctttttaaacttggtcctgttcctcaagtgctagaaaacatccagtgaccctccacctcactcagagctatgtcctggctgttgctatggtaacctctctgcattctcgtgagtactgctgcagccacattggcctcctccttgggtgttagagaagtacaggctacctcagagccttgtgccctcctgcccacccagctgacttggaatgtccccatccctgtgggaaagccttccttctctctcttcaatgacttaatgcttcttcctcctcttcttctccctcctgttttcatcacaaaataagactctgcatgatatagtacatggtttcctgttcatctgtttatatcatgtcttcccttctaaaaagttagttcttttccagtcggccacttgtcttctacaatcacagtacctagcataagttttataaaagcctcatgtattgtttggaatctcactgtatagacagagaaactgaggctcatcatggagaaaatccttccaagtccgagtaagcattgaagctgggcttagactctttttcagttaagtcccaacaaaaggcctgaaccttggctttctctgcatggcccacctcagaatttatccagagaaccactgaggacaccagggataacccacagcatctcagcccctccactgagttagcaaggagtgtggaggtttaaagccaatcattaagattggcccctttccttttcattgtcttgcttgggccagcacagccctcttgttcttcaaccccatcacagctctttgctatccatgggtcccccaaggcgaccaccattcctgccagcacaggctgtccaccatgctgccaggcagggctgttggagtactcacaggactctgagtttctttgctctgttttgagaactcctgcattcacagcttatgccaattaggttgggatgtgtgatgcttctcaggtgctctgtagcacaaccgagcttgcctctgtttctctgtccctgtccctgtccctgtccctgtccctgtccctgtccctgtccctgtccctctccctctccctctccctctccctctccttctccctctctctctgatctggagcctactgtgtagccatagatgatcctatgttctgctcgtcctacgctattgctggctcacaggtatgcaggaccacacacactgtgtgcgggcatataatgggacctagggctttgtacacatcagataagcactgagccggttaaggactcctcagccttcactgctgatttcctgtcagtaatttagtcataccaaactctggtggtcgccttagctttgctttccttgcatgtctgctcagttttgttcaatgtgtgttaaagctttttgagtagatgcagcaaatttcaaattattatagccacttgatgaattaagccactcattactatggaacaatctctctctctctctctctctctctctctctctctctctctctctctctctctctctctgtgtgtgtgtgtgtgtgtgtgtgtgtgtgtgtgtgtgtgtgtgtgccaatatttctgccttgagatttactttctgtgacagtaatgtggaacagtaacactttaaagaagatggctattggcaaggtacacccttttatagcattctatttttaacttacttttgagtttaaaggcatttcttgcttgctggatgtggtggcacaaacctctaatcttagcactcaagagtctgaggcaggaaaatagaaatctctaggctagcctgggctacaaaatgaaactttgtctctaaaacaatcttttcttgttgacaatacagaattaggtctggctcttaattctagccttttaattgagatattagcctatggatacttaatatgaaaactggtgtggcagatacagcattctgctacttattactgtaaaaatttatgtatatgagatgattaaaaaaaagaggagaggtagaaggaggggagggatggatagagggggaaggagacagacagacagacagacagagacacagatagacacacacactcgccagttgcaggcattgccacactgctgccctcccatacagtccttaagacagagggacaccgaggccaggggatttggctgtgacacgtctagttttggggattactgcaatgagtacagaccacatacacctctctcttctgtttggggttagtccttcgcagctcattccagcctcacctgtaactcagacaccttcgacaaataacaggaatagcaatgacccagagttctaacatcagatgtgtcacctcgatatttcttcctaatcagagaggtacccaaaagctaaatgtaaattcagatcaggccttatcaccattgttcttgctattgttagtagtggtgagcataagagcacctagcatttaccagacactacctgctctttccatgctatgcataggtgatgtgtgtctctacagtccatggtgttatccccatagactaactcaagaatagttggtgactgtgccacaatcccctcttaggcatcaccttcagtcccagacataagcactggactgtgccttcactcactacaccttggactgctgacttatctgatggtcagcccaggcttccagacagcaagaagaaagcactagagcattaatgctgcctcattgatcagtgtgctgggagtggggctcagagtgggaagccacctgtgtgtctgtagtctcatggcgtccatctgctccaggtactgtacattctgttccgggaggaagcgactccgggctcactagacagacacggtgcctcacagccctcagagtgtctcagttttgacaccttctggcatgtgccacattagtaatcctttctgaggaaagcctaggagggaaagccccacccttacacaaaccaaaggagaattgtgaatttcctctgatcccaccagctttttactctcagatgccttcaaacagaaacccctctccagttagaaaagcaattcacggagtttgtttcctcactctttaaatgtaaatgtatttaacggatatgtaaaataaaaaacatatgcacagttacaggataccaggttagtctccagtgcatgtaaacactgtattattgtgtgtgtgtgtgtgtgtgtgtgaaagaggatgtaggtatgtatgggtgcagaggccagaggccatcctcgggtgtcattcctctagagctctctaccttgctttaattttaagacaggatctgcattgattagtctggagcttacccattatgttgggctggctggctagcaagcccaaggatgtgtgcatctctgcctccccagtgctggggttacaagcatgtgccaccaaaccctgcttttgtatgtgcttctagcagaaacaaacgcagatcctcatgcttggatggcagacaccttactgactaagccatccctcaggcccacactgtaattgacatcaggatagacacacccatctcccccagcgtcgatcatttctccaacatgaaaacatttacacatgtttgctctcactgtttgaagtgtgtggtacacaacaattgtttctcgagaccttaccatgcagtacctctttttcctcccctctgtagttcctcactaaatctccccagccctcctatatagattcttattctttactggccctagatggggaggcagaccctagaagggcacagagaaaagctgttccacagtgagatgagtctgagtttaaatctcggtcatgtcacttagtggtggtgcgaactccatgcagaatggttccaaactccctccatgcagtagagttccttattcaaggtatcaattcctctccagggtcacagtaaatccatgccaagtgcctggaggaaggcagagttaaccattcaaagcaaatcctgttgtggattctagtgaacttctacaaaagctgcaactttcttgttacatacagtatcttgtgtatgtcagtacaacgatgctcataatttccgagcaatcattctttaaatgcagtgatgctctataacaaggatcacacttgatgtacatctattctttttttttctttctttttttctttctttcttttattttattattttgttgttgttgttgttgttgttgtccttgtttccttaaagttttgataaaataccctgaccggagcaacttaagaaagacagggtataccaatttacagtttcaaaggttttcaggtttttatgaaaggatgcataacagcaggagggaagccttgctggtcaaattgcatctacacttaagaagcagagagtgaacaagaaattgacactaaccctgaccctaaccctaaccccaaccccaaccccaaccccaaacctaaccctaacccttaccctaatcctaaccctaaccctaaccctaaccctaaccctaaccctaaccctaaccctaaccctaaaatgcatcaaggcttacacccagtgatccagttcctccagtgaaactcctcctgaaaattccacagccttgccaaatcaccaactgggagcttagcattgaaaccttgagcctgtggtaaacatttcacactcaaactacatttgtttgtttgtttatttacttatatattcatttgtcatttgtttgtttacttgtttgcttagtgtggtataggggtgggaggtgacgttctggacttcacaaatgctaaacaagccctctacaactgagcaccattcccagcgaatgccaagactcatgtttatacttcaacaaccttgtctaacagaatcctccagcagcaaacatcaaaattgaagccagttgcagcccccctctggatgattgatagaacaagaaccagaagattaaatgccaatgcatgccaggccccctctctctcccaagccctagctgagactctcttttatgtccataaattccatgaatatattgatatctgatcttagcacatagtgcaagaatgctgacaggatcaactgagtgatttacagaagcactactgactgaggtgacatctgccacagtgacctagggctcaccaagcctccggtgatctggcagccactctgcctcagttgtgctccagccaccgtctcttcctcacgtactgtcttgctccctttctatgtgcaacatcttctctacctgcagcaagtgtgcacatcttagataggacctttgcctaagtaccctgcccaacggcttcctaaccttatttaggagaaacttatgggctgatttgaccttttagaaaaccctgtggcttctgtgtaatgtctggagcagaggccaagactaaggagagcagatagaggttccatcatggtccaagatgttagtctttgccccatagactaagcctgccacaaatgtattcataaaatgagtaatttcatttcagtgttccacacaagcatggattattatgtattttagtgtgttctgtgtaatgagtatatcaaacccatgttataaagtttctttcaaaatgatttgattcatgatgtcatagacaattgaaagaaaatagcaattgtatcataggctgtgtcaatgtgggacgagctgtgaatgttgagaggagaaagtctagagcctggggcgtcccctcacactatctgggtgtgttgcagcctcttggtagatgagggctaggtttcctggggagtatggtaaagtgcatcaggcatattagtcaggcactaatgcagccctggtcttccttttccctgcaggtacttatggaccattggtaagaatgtgtggaagaggtggaagaagaggttctttgtgttggtgcaggtaacttttcaactctgtcatcagtctcaagagctatctgtattacagattcggcagtatgaatgcatgcttttgatctgaggtacggcatatggaggccacgaagcctgagcattgagttccatgctgttttccagattataaactcacagaaccacacagaggtctcttcctcccatacctgtaaaaccttccctttgtaatggacttctgggtttcaacagttagactattgctgacagtaccacaaaaaaaaaaaaaaaaaaaaatccgtagatacacagatgtatacacagaagtagagtcaaacacagagaccaataatgtgttgctaatgtttaaaataatatcttcactctcctagatgcatctaaaaatttccctacagacttataataaatgtcctcaaaacacttctccaaccccttttgctgttggtttgagcttcaacttttttcagttggccattaaatttgccttaactctatctggcacacagtctccaccagggcacagaagccataactcaatcttcaaaatgttcactgcagtgctctctgaaatacatctcaaagtgaggcaccttgtaatcgtgcttcctgagctatttcacctctctttggagccatgcctgcactgactctcactgtgtggcagctcccgcttggttctaagtaactgcaggagtttctggcaacacttgtcaagcctacaactatattcaagtatacccttgatgctttttcactgctttggggctaaattcattccaatccatcctaaggtgcttctgtgttgcccacaccacactcacaccttccaagtgtccacaaatgccttcaacagctgcgggaagataaaggaagagaggaaccattcctggcaatgacacgtggttctgaggaagtcagatcacggggtctaggcagtagttgatgacatcttcccagcagagtaagcaaacattctctcggcaggacatggggtccctctgcattctgagcacccaagagttcttcactcaacacgtagcttttctctgagaatgagtgtgaagatgaaaatgaaaggatgtttagaagcagctgatctcaggctaagagaatattccttcagcaaagtgcttgacattcaagcatttgattcctagaactaatataaaaattaattaaaataattgacactgctataaatcccagtgtcaaggaagcagagatgggaagttctctggggctcactggatagccagtctgaatgaattatcccttttcagtttctataaaggaccttatgtccaaaactaaagtggagaataatggcttccaggttcacgtgtgaacatagtacacatctgttcacatgtgtgtgcacacacacgtatacacactcatacaagtagctggcctctctctttagaaaaagaagctttagggaaagaaactgggtgggcagggaagggggagatttggaaaaaatgtaagagaaactgtctctgcatgctgtgtactgaacccaaaagaagagaatggctttttctgggctgtgcaactggaacacagatgttttggggccttcacacacagacttcctttaagaggagatgagaatcacaccatagctttaaaaaagaaagctgtatactgactttggaaaaaaacataaaagggcacaggctgtctgaggctctgtggcattcctagagagcaggagagatgcattgcaggatgccaagaggcttctcatgattaagaggtgctgcctgccttttttggtagcacacccacacactaatcaagcctctggctcattgagatcagacctttcatcccttaccagtctaacctctgaaggtgacatgtcagctcctttatcacagtgatggggaagccagcactaagcctctagtgtactgccttggtctcatggcattgaccatagactgcctgttcctattgttcatggaaccaaggatcaaaggaactaactgggtaattatatgcaaacagcacgccaaggcctcctcagccctggtccctgaaatccctatgcatgccctataagtttagctgtagcctataacccagaaatgacaggggtctttgacatcctaggtcagggagttccttgggactcactgtcagtctgtgggagcatggcaaagactacatgtgccttcatcactatgactgaccacactgagctctattcagtagtcagaatccctgacctgggtatatgaatgcagagtcaaagggaaatgtgtgcccattccagataataaagtctcatctcttctccattcatgtcttaaagttgattttcttggaggtgggaggatagctcagttggtatagtcaaactctaacatgcacgaggctttggagtctctcccccaacacatcatgaacaaactactctaacggattcctgggaggtgggggcagaaggatcagaagttaagggtcagccttggctaagcagcaagttcaaggccaaccttgaacctcgtgaacctgtctgaaaaagtgtattgttattctccaatatgaaaactatttcaacttttaaaagggaggtgtttggtttcccacttcttcaaagtatttcagcccaatgtcagcactgctaaattgtattttaaatgtcccctaaaatgctaataatagcatatttctatggttctgtgaagttcacaaagtgcttgagaaattggtctttgcagatatctatactacagtgaatatagattttctccaaatttaacattagggaaaactgaggctcagtgtgcttatgtgacctgttcaaagacagagcatgatggagctagagaggttgtccagtggtcttgagaagacccaggtttcattcccagaaaccatctggtggttcacacccagttgtaacttcagctccagggaactgatactctcttctggcctctacaaccatgtggttcacggacatacacataaataaaattaatttaaaaattaaagatggtgactgatgagcagctaactatgaagttcagcacaggtcttcaggctgcatctgtctcatccaactgagcacctaggtgggtctgatacgcagagaagtttatgcacacaaaagttcctaggattcatctacttttcattcatgaagtgtatgttccctaaacccacactctctgtttctggtttcctacaggcatcatgactgaaatttctcattattccagctttcagaacagatactaaagctgaataggataaatagcattcatagataaaatgacttgtcaagcagtattttaacaacccatccagattcactgttatttaaaaaatgagttgtaagacatgtaagtggtaagaatgtttccacacagttctgaaggatgtacatagagttacattctgattacaaatgacaggaaacagccaaactggctctctagtgattaccctcttcattgtctgtttttgtttgcttgtttgtttgtttgattgattgatcaaatagtttttgggtttttttaagaggctctgtatctctgtatctctgtatcctctctctctgtctctctgtctctctctgtctctctctgtctctctctctctctctctctctctctctctccatacacacaggctcttactgaatatatgcacacacacacacacacacacacacacacatatagtctgccttttaactggtggtcttcttgcttctgcctctcaagtgttgagattaaggttgtataacaccacacccaataccgtgatttgttttgctttgtcttatacctttgctttcaattatggggatcagacaagcgtcctgtacctaagcttgtactatcatgctctactgatgagcactcagacttcagccctctcaactaaggctctgattcactcgtctgatttcaaagaacttacctatttggacttttccctgacccaatacacacagagatgttggtaactgctgccctctccattataagcccctttctagagaggcccattggacttgcaaactttatatgccccagtacaggggaataccagggccaaaaagggggagtgggtgggcaggggagtgggggtgggtggatttgggggacttttggtatagcattggaaatgtaaatgagttaaatacctaataaaaatggaaaaaaaaagtaataacataaaaaaaaaataagcccctttctattttaaaaacggcagaaaatgagctaaagtagcaaaagtctggtcacctgtaaaatcaaactttgatcaaagcctagggaatcccaggagccaatcctcacttctacccagagggccactgcttggcataaaccaggatgctgcaagccctgtgcccatcactcgtgactattaaacctctactctgcattgcttgtactctctgacttcaaaatcacctctcaggctctggagcacgtggagaacacgtgcctaaagtgtgcaagaacttgagtccagtcccaaaacttgtcaaaatgaacacattggcagtttagggggaaacctgcatttcactgggaatagctttctattaataagatgtgacagctttaaaaatggaaagttcccaaatctctgtcagctccttggtgacctccaagcattctgggaaaactaagatgcatctataactcaggataatactccaaggatactctcccctcttctgaatcctaaagtaaattgtcagatcttaaagaaaaaacactcccagtgagccaactcaggtttgtctagtttgtgttgttgttgttattgttgttgttgttgttgttgttgttgttgctgctgctgctgctgttgctgttgctttggtttgggggcttgggggtggggtggggaggtgggagttgttttattttattttgtttctttttttaaccaagtcacacagcctcagcctgcagggcatgtcatcagtaattccagaagagggcagcagcagacagcactgcagagaggaagccactaaaacagggaagaaaaaagtgaagggctcagtagtagtagaagcatgcctctcagtatcacatgctttggctgttgtatttatgtggacctcaagtgcatattggcgcctttctggctgacctcactgacaaactctaccctgtctgctgttgccaggtgaaagaactaatccaaatcaccagagtagagatctagcagtgtctcctgtcattgttttgtggtgagggcatcatggaggattttttttgtgggtaggatcagccacaggttggaatggcctggtactatatgtggagagacactgtaaatcatggagaagggtgtcatggattaaacatatgtcccccatgtgtcagactcatttaacaaatgcctattgcttgtgaaactgtaaatagaacaaaagtactccttcaaaggactggtcacctacagggaagtcctctttgagctgaatgatggagccagatgcacagggactacttagttacgcacaccaatagagtgattgctgtatgggcctctcacatgatgtgggtacctcagtaactacccagtaacaagctgatgcacagggatgaggggagaggaggaggaagggagcacaacacagacgagaactttgaggttggaagatgacagtttactggacctggccaggaacccagcttctatgaccactcccatttgcactccgacatccattgtaggagaaggggaagtcttgggtgctctgcttgttataagaaactagatggtgttctcttatcaaagttctccttctggtctagcctgtgagacagtgcattcttcagaatcccaaactgggcaggaaaattctcatgagaaaccaacagagggcagcagcagacaaaccagccacgtgaatacgctcttgcctcttactctgaaccttcaggacgcgggacagcgaaacctattgtatagcctgaaagcaccagtttctcgtacttgcccttaaaaagagaccagtctcactgtggaggagactacagctgtccctggctgggttcaaagtcttagaattgtctctttcaataaaggaaagtaaggggtgaaggatgtggcagtccttcaccgaggcatttgacatacgtggatgacggtaaatgtgcctgtgagcttggctggaagctgggggtaggcctgttttgctacaggctccttgccaataggccagatgtagaaaagggaagcatcgtcgccagttctgcatacacagtgacaacagggtcctgaaggcaggcctgcagcttggagcaccaccctgcactgccatggaatgccaatatcagtaaagtgagggctgccatgtagggcaccagtgacaacggccatgccatcggggcttggggctgcctggctatgactggcacctagcagtcgagtgctcattgcttgtgacagcatgtcactgtggcacttgtctaagatggaggggggactctaccaagtcactgcaagtgccccctcaatagcagcaagtagccagaaaacaaaacgagaagctcaacactgacaaaagcagcgcttgttgtatgtgaatgcaaggttgggggggggcatagctttgtgtgaattcaagtgtatgagaggagaccatatctttgtgtgagttcaagtacagcttgttatatgtgaatgtgggggggggggatatagctttgtgtgagttcaagtgcataaatgccacagagcaggttaaaacccaaccttgggcgtcagtctttgattaccaccatgtttggaggcaggatcttttgttgctcttcactgtgtatggaagtttggccagcctgtgggcttctgggcatctcccatctctgcttctcttctctccatggggcatggtgattgcagatttgcactacccattttggctttatgtgagttctagggaagtgaacacgggtcctcgtgcttgcttagtgtcttacccaccaagtcatcttccaagccttttaaacaactgcaaagaaaagaatttttgttctctaactgctggccaagattatattgggtaacacgtgtagaactgttgccattcagtcagccttgtatcacaaaagtgtggcaatgtgtgtgtttaacccagttggtgttaagaacagcaatgtgggctgagctagtgcacagtgtaaccccagaacccacaatattggggaggagaatcagaaaatcaaggccaacctgagacataaggagacctgtctcaaaatagtagataggaggctggagagacagcccagaaaccacatcaaaagggacttgctggccagccagcgcagctgtgatttacaggctgatgagaagcactgtctcaaacaacagggtggatgaacgtcacctgaaactaacctctagccttcaaacacaggttcacattcatgtaaatataccctcacctctgccacatgcacaggtttacatgggcacccacatgaaatgcatacactagacaaaaatacaagtcaaacaaccataaagatagaaacagctgactgttcctaatcacctactaactgacagggacaaattcttacttccattctgcacatgaacccactctaacctcatgggccactgtcagatactatatccagtgtgaatgagaccatggagcaactggggcttcagttaaatgtagatggtttccaagggggcatgagtcttggtgggacagtctcacagtctgattttctgtcctgcaggtcagccagtacacttttgccatgtgcagctatcgagaaaagaaggcagagcctcaggaactcctacagctggacggctacaccgtggattacaccgaccctcagccaggtacccacctctgccttggccacgcactgacaaaagacaagctcgtgttagcaagatggtttatgctaggcaataacctgttacaccagagagtctctggttcaaagccaaaaagaaaacacatactttgtcatttatgcacctgggacatcaatgatgtactctacaatacgctgctgaggatatccataagaaagaatatatacttgtatacctaccagggaactgcatttgtatgggactatggtgtgtgtgtgtgtgtgtgtgtgtgtgtgtgtgtgtgtgtgtgtgtgtgtatacatatggagttgcatgtggagaccacaagttggaatcaggtgtattccattgctctcataattgaaccaggagctcagtgattggctaggctggagtgatgactatcaaatgccaaagtctctgccccctccagcagtagactgacaggtataagcccgactgttatatgggtgctggaaatgagaccctcgctctttcgtggtaagcactttacccgcagaggcaactcttcagcctctaagccatgacttcagcctcagtgtgtgtcattgttttggtgtccaagagaagctgcctcccagcacgcttgtcccctagacagagtccaaaactacacaaggttagctggtggaactagagaaagaaacttgtgctaccctatccactgtattccttacaagatgcctctctctgaattgaaacgttgatgcgcctgggcttaagtagcgaagagcgccttgcaagtggtggtatttcttgtaagttctacattgcatacattctacatcctgccccctcacacctctccccatacccattttattttttccccagaaaactgaatagaaatcagtttcaaagaaccttcagaatgggtggggggtgcgaaatcatttcagcatattaatgaacaacgagcaccagcagccctctcccggagttcatttttatgccaaatctgcactaggcttttccaaccacactgcatcatttggcccaaaacctttttttcaactcccatattgctcttccacgtgcaacaaaatacacaggagggaggggggaagcagaatttgagagaagatggggcattatagggtattaacccaaaaaggtacgacaaagaagacctggtccctgccttcctagggtcatctgtcctccctaaatcctggccctgaggggattcaagcaagtcagactctttccaatttctgtttgtaactacatcctgccagagtacccactgtacggcactgagttcgtgagatctgaattcaaattttgcccagaagttttcctaatgaacaggaaggagttcaaaatgaacattctatgcaacatgtcagaatgacaggattctgcactaaaagccagcaattgggacactgtgaggtggtttgtatttctctcaagtttcttttttctcacttagggtttctttttacaaaggaaaacagttgtacctaagatgtatatcttagagacagaggccagaagatcaatatgacaaaataaaccaaggccattctatacctgggattcctgctgagccaatgccctctccctcttttgtatgcccaccaatgctattgtatgtcaggaactcctgccaagtcagtgccaactctctctcttctgtgtgattacactggacccttgtcacaatcccacaagcaagcgggatcagaaatgtcattctgttttttcaaattaagaaacagattggagaggtctcaggctatctgtcaatggaataagaccctgggaccaacccatgtcaccctcttgcacttgtcactgaacaatcacagcaaagctacccatggactttacagattaaatcagggtttccatggcaggaagatggaggcagggagttctattccacatacaggaataacacctgaatattctcattttaaagtttatgcttattttcaccttctgtttatgagtgatttgcctgcatgtatgttaagtatagcacatgctgtagtactcacagaggtaagaagagggtttcagatcccctggaactagggttagatgtggttgtgatttgctgtgctgagcacttagtgctgagaactgaacctaggtcctctacaagagcatcaagagcttttaaccaccgagccagtgttccgtctctgcatttatattcttaaagcttgatttattatttccacgttgatctgatgagatttaatttcttcctgagaattgtaaataaaaagttaattgactgtggtcttgaaggtaacaagcagttgcttctctctgacttttcctgtcccatttatttcccaagtgacttttaattgaaaatggatatttaatattttctattgtcctaactcagattcttttttctttcttgtgatcttggagatggacactagggtcttatatggcaaacattcagccactgagttaatgccccagcctctaagctctgcatttgattgttaaaaatttctggttcttactaaggagccagaaagaggtgggggcaaaattttcatactctcctaagcattgggtggagcgcctgtatactatgcacttgcccaactttatctatggaggtgtaaacaaattaataacaacatagtcatgtcttcagagatcaggggatgctcttggacagtgagcctattagtcaaaaaagacaaaagagtctgtcttcactgtcctcctcttaatcttatgcaggctttataaagttggtgggctcagcgccatcatagcctattcttttttttttttttaccttaaggaaaggtgtaactggatgcaaggcttaaggcagtggggagtacctctcacgtgagactgtccttggtgtctactgattgcagcaaggtggcacatctccaaggtttgtgtgagcataggcacatgatctgttgactcactcttcatcttgtctccttgatgctcactgaggcattcttcaaagctcttcctccacttctaaattttccttctttttgtgtcattcaagttaagtgtgcactatccttgctagagcatccattttatacaagttatgagaaaccaacttaaatatctcctcagaatgaaagccaccagaaatctcttcttaaagctgttttgatgctaaatcactgggtcctctttgtaaagaagtagccagggctggagagattgtcctaacttaaggccctgctgctcttgcagagggacagcacccacatgagtggctcacaaccaattgtaactccagctgcagggaattgatggtctcttctggtcttcacaggcactcatatgcatatgaccacacaggtgtgtgtgtgtgtgtgtgtgtgtgtgtgtgtgtgtgtgtgtgtgtgtgacttaaaaataaaaagaaagtatctacttattgagcctagtccctgaccattatcaatgcaatatctccacaatatgtagtcacttgtaaaagagatacctggattaacatgatgagctcagggtagaagtcttcacaccattgcaatgacgcctagcactgctctgctgcaaacagactcctgactggccttgctggcagcttggagatgctaatcaatcattcctgcacctcttggctctcaactaatggggagatgacacacatatgacaaaggtatgacccttatatctagctagagaaatcccacctcattgaaaatgcaggctttggaatatgttgatagatatgagctaacttggccttgttttaaaagctgaccttgagagctacattcggaaaaaaactgagaccattatttcaacaaatatttttgaacacctactttgtgctgagttatgctagataccaaagaaatggaagaagttaagtcagataaaaccttggtccatataatgcaaagtccactaggaagcttagtagaagttaataagaacaatagatgactagagagatggcttagcaattaagagcacttcctgtacatgcagagaaccagagtttggttcccagaacacacattggtcagcataccacctgcaactccagatttgggggatcggacatcttctgttttccagtctgcatgagcgtgtgtgtgtgtgtgtgtgtgtgtgtgtgtgtgtgtgtgtgtgtgtgtgtgtgtgtgtgtgtgtaaagtaagtcttccaaagttaaatgagaaaaattagttgtttttatatatannnnnnnnnnnnnnnnnnnnnnnnnnnnnnnnnnnnnnnnnnnnnnnnnnnnnnnnnnnnnnnnnnnnnnnnnnnnnnnnnnnnnnnnnnnncatgtagctaatgcagggtgaaacttggggcaaaacacacacacacacacacacacacacacacacacactcacacaaataaaaacaaaataaaatttgtgttaaaagactaatataaaaaatagtcatggtaagagagattatcagagataattatcagagataaaagtcaaagaaggccttataagaatgtaacttctaattaaagataagtagaggagggtcatatctctctgcaagagctgcaaggagcctctgtgaattatgcagatataaagtgtacacactagagaagaaaggagagactgaaggtggcagagagtcaattgatgtggattgcaaaccttgacagaacctggggtctcgtttcaataggatggggcctcggtaagctaagcagaaaaacagcatgacctgttagattaggcattggctgggttcagtacagagaactgtcacaagaacacaagagtagatgttcttggttgagataggagattgcacaagttaattatagccagattcaggagccagaaccagtggcagaagaagggtccctgctctggtaacccatggcaccaacacccataggagaaattcatgaaagattctaaactagtcccaagattgcatgtgacactttctagctggatgggttcagctctcctaaggtggcaagaggttgagacaaaacccaggatgtcaacattgggtttgacatgtttgagatatccatccaagtgcacaagtcccaagaacccccctagtttaggtgtggagtggaaggagggactccaatgtgctgaggaaaatggaaagtacctctcagcacattcttaacacataaaagttaacaccaggaactataaatacaggagtgtaagacagaaccccaggagcttccacatttaaaaggtcaggaggaggaagaggagaagtagacagtaaactaaacagagtagccaccacgtgctgagaggttagtgggccataaggtttcctgaaagagaaaatttcagccagaaaagagtgaggattgctgctgatcgtgtgatacagtgagcagagttaggatttcacgttgaacattggatgcggcaaggttaataacattgatggctttgacaacaaagattttaggcaggcagcagctggattagaggcttgatggtcaaacggagagagctccttgctgctcaaagatgattctctgacctatagtatcagcatcttcagagaacttgttggaagctctggatctcaggcctcagtgcagacttgtggggtcagagactgcacttgatcaaatgcctaggtgtgctgcctatgcagaagcgatggagaagcctcagtagctatgttcttttcactggaaagagaagacgcacagaagagcagctgaagggagaaggggccaagagaagtgttttttgtgacagtggtggtgatggttgtgatggtggtggtgatgctgctggtgatagtactggtgatagtactggtgatagtactggtgataatactggtgatagtactggtgataatggtggtgctggtggtgataatgatgatttacgaaagaactgtgtttataagtagatgtttaatgtaacttttggcatattgtcaccagcaagacaaagaaagagatatgagccagccttaaaatgtttcttacataccgggtcctactcagtggccagctagtttacagccacctcatccagaagtcataaattgctcctccccattctggcccaaggaaaagcagtgggaattgctttctagggagtgctccctggagatgatctcacagctcagcttagatggtgggctttattttcttgcaggtttggagggtggccgagccttcttcaatgcagtcaaagaaggagacacggtgatatttgcaagtgatgatgaacaagatcgaattttgtgggtccaagctatgtacagggccactggccagtcgcacaaacctgttccccctacccaggtgcagaagctcaacgccaagggcggaaatgtgcctcagctggatgcccccatctcacaattttgtaagtacatatgccatttctttctttctttctttccttcttgctttcttttaaatagttctgtaaagtaagtcttccaaagttgaatgagaaaaattagttaattttatatataggatttgaaaatcagatttgctaggggcatgtagctaatgcagggtgaaacttggggcaaaatcttagatgaacgtaattttaaagtgcaatacttgagattctctaccaaggactaaacaaaggaatgtatattttatatctatgtctatcttttgattttgctgagagtttggaattcgcagccaaatgcatatttgtttgagtccctgaaatatagtagattccgtatatcggtgctccgtctcctcctattaaaaggaatttaaaaatagggatgatttgaaataaacttaaatctgcaatttagaaccatttaaaaataaatgatgacattatcacatgcagtgggaaaaaaaccccatgatacctaaaatcacattttgagcagagatatcagagacctgaaagcagccccagttcatctgcagtttccctctgcctctgtgtctccgtactctttgtattgccactttttgccccagatctcccaatacttccaaaattcaggatacagtgaaagccaaagctatattttttatttttagaaaagaaaaaaaaaagtaagagatctgcagattcattgtttactctgcacagagaccttcagctttgtctacagataactaaagtgtgtatccatccacggaactgtcatggtggtctcttattttagtaggaggttccctctttcagcataggttactgagcacttgtctagcaaggagacattaatgaggaagtcacacgagactctcttgctcttatggcttctccgtcccagtgaacattcaggttacccccaaatcagcctcccccaatgccaaccacttcacacactgacaaatagaacaaatataacaagctggcattagatcaagagggtattaggcacatagacaggcaaggaaggcttctcagaccttaagtccaaatgctagggctatgactcccagatctagaaggcatggatatgagagcagaggtctctgcaagaacagagagtccaaagcagaggctgcacttccctgggacgcttgctcatggctccactgttgctctagagccaaacccgagtgtatatgtagtgattttacagctatagaaactatagagggaaattacgttttcaatgagtcccattactgtgtatatttccatctggcaaaggtatggttttgggggggaaggaaaacccccagttccataccaatgatttcttaaaggaagatgtgttctttggttgaacctgacatacaactccatacagtagccttccacacagaaaactatgaaagaagacaaaatacatgaggctggaactagagtagagtggacagccctgcagtgactacccttgactgacataggatatccaatatttatttaatttctaaataaagagcatctgtgtgacaggtcccctgcccccctcacttcctgatagcctatagttagcacatctggaaaaggcattacccaccataccctcctgcattctctttgatgagaaaaatcctaattataatcaccattcaaatcaacttcatgaaagacctatttcaactgatatttggaaaattctcttctttccaaatggtctcctattctcccaagatcattccactttgcatctcgtgtctcttctgccatccacccacagtaagaaatggctgcttgacttgtgcttggccctacatttcttcactaatagaggaaagagaaaggacaaataggggtaaaagtgagtagagaaatggtgggagtgtccctcagtgatagagcatgtacttgaagcatgtcctcggattctagcatcacccccacaaagaaacttctaagacccatgatagaagctgttgaagagggatagcctttcatggaaatacatgaaggccacaggtagacaggatttatttcattcaacggaacgctctgtgagtcagacatgtaacaacgctatttgaaacatcttagatgggtcgtgcagcaaaatcctagaaggtagaattggaggataaggtcatccttgtagattatacaagctatgttgattatatcacaaagcaaatgtgatagcatgtgctataaaattatcagaacctcgggttgttcaccttctctagtgaccccttaaactctgcatggaagggaaggaccttcagagagtgtgaggtgccttcatagctacctggttctcaaaaaataaggctgccacatccagccattccaattacccactacaagaggctcctttctcacagacaataatatgaatggcgctcatttgattgtgcagtgcccagtcttcacagatgtacatcatgtccccatgactaatgcaacccagtaatactgatctccatgttcccactgttgctttgtttcatctgaagcagacgacccccccacggtgctttagactgtttattgcaaccacagtaccaccaggatacttctgttccccaaacttagaaaccagcagaggatgccagtgaagacgtaaacagctccttcagaccctgaacatttatggttaaggataaagaaacccacagaaagaccagaaaaggaaaccagggttctgcactcagtggtataacaaggcaattatgtctggcaagcacacagaaaaatatggctttaagtggggctcatgggtcttactggaacgtgctatagctctgtcacagtcacagctgcctatactgccttaaaccaaccctgtcgaacaggtcaaacactcgatataggaaacctgcccttatttgcctgaggcttccttacttgtagaaagcaagcccaataccccagaaacccctctgtacagggcaaactgaactacggttgtcactgagggcaacaaagcaggggaaaggaaggatcagtcccagtgaagttctaaatagcaaactttggtcatccacttctcatcacaagaactaatgaaagcacagattttctagctagaagcaaaaagggaaaggaagaaaaggttttaaaaggagagaaagaaaaagaaaatcaagtattgcattttaaaaaggtttccttaagttccaaaaggtcagggtcattgctacatactcgactgtgcacacacctaattaaatcttggttctgagtatttgttcaaagcacttaccattcttgccaggggatggtctcaatgacttttccatgacttcacttggtaattgctgcattagtttgtacacagatgacagaagctgcatagaaaaggaagccacataggaatgttttggggacggagggaaaaaaaaaataagaaacactccaatcttgtcctgtcgctgtcggttctgaggcatcctgggaactggacattctgcaggttgggagagctgagggtatctgtgattgggatgtttccaaattcagtttaactgacttttgggggaagttggcattttttttcaatgtcaaaagttcaatttcaaaatgaaaagacatgtctaaggaagaatggagtggagtatttatgtggaattggaaaaaaaactgggaaaatagatcctgctattcatttgtttgtgactgaagaggtctggggagggttccatcagccttgcaaaccttttgttcttctctggtttttatttgtatgtgtgctgttgatttaatttttccattttagttatttttttataagttggtacctagttccacaatttttgaacaaatacttgtaattctccattttctaaggccaatattgcacactttgaatatgtccaaatttggaattgagtattgccacagttcactgtgcagagtggctactcactgacatcttatccctgtctgtgagtattagagaaatcctacagagaaataatatagtgctcattttgtgtggggtgggaaaagaaggtatgttaagctttgccatttggtcaacgattgctgcatatagtgcttgcatttacttgttttattgtctatttctcaactaacaactgttaactacctcatgcaccccagagttggatgttgctgagaactgctctatttttatcactactgagataatcttcaacagttagagggattttgacgactgctggtttgggggaggttgatttttgttgttgttgttgtcgttttgtttcattttaagttttctcgttcaatctttgctcaaacccaagaactgtagctgctaggttagaactcctgtctgctttcctgagccttgttgctagtctttatgttattctggtttgttccttcttaccctgctaacttctagctggactgaagggtaagtgctcccccatagctagcacagctcagataatctgactcgattatctgacacctgcgatgtgcttcctctctccttttcaacctccctcatgtctagactttgtagtacaactctcgtgttctttccctggccttaggtttgaaacgtaagcttccatactgaagctaggatgcatgtcatgtgtgcataattgcctcctcttcttggctttcatattggcatcaaatgaacttttgagtaaagccaaccaggaacttctgatgtttttcattccaagaatattgattaatatcacaacgcaatggccagcaatgccactgtctcatggaatccacagttaactgactgctcgatgcctgaaaacagatcattttgcactttgacacaatgatgtgttgttgttgttgttgttggtcccctgccccattcaaaagatagaatggtcagctccgaatggtgtaaccatggatacgatacagtagcagatagaaagatgaggtaggaaatccactgatctcaactgagcaatatttggaatcaaaagctacaattaataaattatttgagccttagagaacgtattcaacttggcttactggtacatcctcaaataaaacccattgaggattgattttgaaagcagagctgtaaaacatagtccgtccacaacaatggcaagctaaagacatgaatgagtccatatgctctattcacaaaggtttttggtccaggatctcacagtgcccaggagggttttcagctctccgccattctgttcctcccccaggaacaatgacaacaataacttggtcaacttcatttgtatttctattaaattttctaaatataaacccctaagaaacagaaaatcaatactttaaaactttaggaaaagctttctctattctacttttaaccaaagagagtttacaatttccttattcatataggatcaagctgtctacatgaagtgtgttgcaagaagacgtaacattagagagagctagacaatttggtcaagagagcaggcaaatatgtatttgagttatctgaatgctaatttagaaaactgtaggtcataccattcctcctgatcatttaacagtagccttttcttactttttttttgttcggttgttttattttaatttgctttttctccctttctttctcttttattttgcatacatgtacccctggctagcagactgatgttttccaccactcccagaagattcttaacttttccttcttttgaatatctgatgaggcatcttagcagcttcctgtaggggagaagttagtgggaacgtaggactttgttctgctttggtttcggaatgagaagacggatgactagagggctgactggttctgttctgagtgaattgacatgtattttcacatgcattgctgtcctagtagattttctaatagtcatttgccttatttcttacagttttatttttgctacatcttctattgtcaacttgcaattgctacattgtaggaatgcaataccaaagaattattccaacagccatgtaatttgtatgaccccccccaccacactataaatcttactcttattgttaagactaaatggcttttaaaaggactctatagtaagtgaggtccaaatatttcaaaatatcataatccaatctaaagaaaataaattaaatgaagattcattcttattgactaatatttaacagattgttacctaatcacttgagtattatcatgtcagtaagatacattattaattggctatagaacatttatttctgtttatataggaagaaatataaaattaattaaaattaaatagttataagaggacaattcattgaaaatgtagtaattgcaatagggaaaattacaaaacatttgttattttggctttggattattgacaaaacaataatctctgttgtaatatgatttttactcaaagctactgtctttcaaagaactagaggaagtcagccctgaaataatgtccatgtttgcccttttgggcgttttgccgtggtggttttcaaatgccatgtgacctttggcctccaaagatgccatcttctcccagccattcacaatggagtgcttctagtcagagacaccaagaagtgaagccattcccaggcaagagatccacactgtacctcagggcagcaggcacgggagagccagtcttgtgctgtgcacagctcaggcagggcacaacattcccttgttccctgactataacaagaaagcacttctagaaagatgtgtaaacagccggctgccaccagtcattgtcagttcttgatgtcatgtcttctgatgaggctgacgactgtcattgttcgttactgtccagagcatacattcactccagtactgtcaagcagatatgacatgcacatttgccatataagaaagacacaaagtcaccttttaatttacagtttgagttcacagatgactttcgagttacattagctattcacttgcctccagcgcctatccagagcaacaagcatccggtgtgtgctccaaatttcagaaataaaacagctactgctgctttgtcgcagaatgagacacggagataaaagagccctcttagacaatttattagtaggctatcagaattatgtttagcagcataattctttctcattttcacataaagttccaaagcataacattacaaaataaagatattttttttacctttttttaatcccgaagctgttgtgataatagtggggggagaaattaaaaattagaaatttaaaaactactttatccattcaagcaaagtatatgtatttggtatacactctaaatgtacctaaaatatagttttctaaaagaagatcatataatatgctttctaataatagaaggtattatgaaaaactattacataattttctagtcatatcagctaaaaaaaaaaaaagacattagcaaccttgaactgctcccagacatcataaccacctaaggagcgacataaatgtcaggtagtctcctgggcactagtcacatgaatttcaataaaagagattaaatgaggatataaagtccataaaatgatagcactgtagaaaacagtattttttttaatttccttaaatgtcaaaccacagttgtttccagccacgctcaggtaaagttttgatgacgattcatctgatgagtatatatccgcttattgtaagcgtggattccgtcaccttgtctctgtgtatgagcaccaatgataggatttaagattcttaacatggtagaaatgccattcttaactttattcattaaagtataccttgaagtccatttctatcccataccacaaaggactttagacacccttacacaattaaacctcacaggtcagacgaccaagcatcatttgaaaggtgtggattccaccctagccatatagcctacataacccactttcagtatactacaaaccctcacagactaatgaacacttggagagaacttcctgaagccaagtctgggttgaagttaatactcaaagtctactaaatccgagatatctttaaattatttcacattaataatcacagcaacaaaggtggttaaaatgtatcaaccaaagcaagcagcattcaaaacagcactgggatttcacaaagcttcattgtcctcttgatgctattttgctcaacctaacattggaattcattttcattctctgacacacgcaggggaagtgaccccagtgtcctgagttcaggaagcgactctctagaactttcactctgagctgttttcctctggtgatgtcgacattggagttctcgctttctttaatctaccagttctcattgtttgcacaaagggaaagggagttgtttctcgtgctcagcgctgtaagagaccagactgggccagtgtaagaatgattacatggtgttgcttgggaagcacccacaagttctttgaaacagaattgacaacagctggaccactgcagtgttttattttaaaatagacaacatatgtaatgcatatggtcctagacatgtatggagacacaagcagacaatctgaatggtatccaaagacacctgcaactagaattctgtctccttctataagatttttccctaagaacacatgttcccacttttggatttgtgagatgccatctgaatccccatgtgtgtgtctccttaataaagctcatggggacctgcctaggatggaggtgtcagagtcattcgttcagttgatagccacctgctaagaatctggttcctgcagaggctaacaaggaaatagcagatcagggaatgctctcaaggagcagattacctgctcagagattctgctgtgtatattctgacaccagagaaattagaacatagccttgaaaagccaggccaagtataggaattggttatgtagggacagggcagagttatgaagtggagagacagggatgggctgatagcttcctaaaataatataagcaagcaagaagatatggcgcattagctataaatacagaggcatctttggctcacttatggctttgtaggcatatgaaatctgcccatttactcctagacaactactgagtgtttatatggcagatgcctttctggccagttattacatccagtcaacagttctatgacagggtctgtaaatactgaagacaatgaatcaatggaactttaaacatttggatataattcataccacacaactggtattccagttaatataaattctattctagcaccctgatgaactctctgctcttctaactaacagataaaccagagctcactctaagagtgttcctcagatcaaaaactagcagacactgagcctgggagatggctcagtgtatagagctgattgctgctaagcctaacaaccttggtttgatccccagaacccacatgatagaaggaaagacccaagagttggcttttaaattcaatatgctggccatggtaggaatttacacatgtgcacagagcacatggatgaactcacacaagatacaataaattattgaataaatgtaattttagaataaatagaaaacacttcctgaaaacatgggtttatttactttgatgaaataaacttaatattttaacaagtctgtaccaagtactctctgtgttctgggttctttgctggatacttggagtatagcagaagacagaaaaatcctagaatccctccttaaaactcagatgttttgagttgatacttcaggttagcactcccagctcatttttttttgttttgttttgttttttcttttcatagtataagcttggggaagcttttcaaactagtcccaagaatcaggcgccgtatacacattcttgagttataagaacaattaacataatgagcttacttctgagtagatggtaatgctatctttcttattagagctcactccattatgcaccatccctcatggataggtagacaaggattcgaaagatcactaaactgtagtccaagatagcagaaaagaaacagaaatgtcaactcatctgtcaaacatggaaactgaagcttagagataaacaatcccaccagcacatgactatttaaaaatggaggccagatgctgggaggatggcttaatcagtaaagtactggccgtgcaagcatgagaacctgagttcagatccccaggacacacagagaagcaagtcacatccagtaccttgaagatagtgatagcaagattcctgaggcatgctggctagccagtcttggtgactcagtgagctttggctttagtgagagaccttgtctatgtctggctgtctatgtccaggtctccctagaggaccaaactttctcttcagaccattttctgagtggccagaaaagcaaaacagatcaacagcaaaatgttcaagagactaaaacaactgaaaagtatgatgcttgaaacccatgccatcgttttaacagtttataaagtcaaaataagcaagattggaaaccatttaggaaggtaatccatgttaacctcctaccttcacatgcacacacactaaatgttaagctcaactccaagccacataaatcccagttctggatcattcttcatgtagacagaagaagagacatgaaggagggaaaagatgttttatttttatggttattgttgcaaagagaaaacttctgactttatttatattttttccataagccagcttcagactgtcagtagagaaggaagctatctctagatgtactctcagccaacatcagcaatcagcacagccagcaaagccctgtgacagcttagggacggggaggctgactgtgtccagacctccctagagggccaaaatgtctcttcagaccatttcctgaggggccagaaaagcaagacaggtcaacatcaaagtattctagaggctccaacaaataagaaacacaacatttgaaatccatgccatgcttagaagagcccccttctccacaagctgactgacttaggttgtactatcataattgaagagcagtgagttaactgagccaaactggcaaagtaaggtcctggccaacttgtcagctcacagcctttgctggataatccaagagcaagacactgaagctagccaagctgcccgatatatcattaaacttgagaggcggggagtgggtgtggctctccatgaggaagtaacaggtgagcaattcaagctctcctcatgctcactccttcctgaattgacctggtagtcacaggaaagatggtgagagcagtatctgtgacgggagatagaggagggcgacccaattgttgtaagggtctttctactggcaggggtccagaaagcagaagatacttccttgcctttggccacaagtagaacatccagaaaagcaagcttttcctgcagactttacggtcccaaagatcccaagcttagcaagcaaagcaaaggaaagccaaggccgtgcagcaggctcgatttcaaagcacttccccaaggatgagtctgagacaactaccatggcaagcttatagatcctcttatagatcctctaacagaatttctgcacaggtagtatcgcttcccaaagcctttgttttatcattttaatggacaatttgtctgttaaaatactattcttccacttgccttctagagacaatggttttgtatgtcttgggcataaacaacacatcataaccaaacactgaccactcactactcctatgcaaaatgccaaagattttaaaagtgtagaagctgacaagctgcacagttttgttcaaacgatagctgaagtcactgaaaactcatagtgttaaagtcccacagctaccaaaaaacaagctcacagcaataccctaagtgagggagagaaagaaaaaaaaacccttcctgggacagaggccacataggaaaatattattcaaacaccctctcaagtcagacatcaagtttcctttgccctgattgctccgctggctcctggcagctccctgcatcccgtaaaatgttgcattcgaagagatgagtaaaaccttgcttgattccctctgagattctaccttatcgtagttggatatctggagaggaaatgactcggtcaactgagcagatctctttatccttgaaaaatacccctgttcctaccttttgaggatttttttttcttagtggcacttgagctgaattctctgagttattttgccagctaaggatagactattttagttacacacgttgagattaattagttagcccttaggaggttttgcctacagtcttcaccctgtaaggaaaagtgtgaatacatggagactattaactcacaataactggcagaccgcagccctcacagcgtagtttctgtttactaatggagtatgtgccccacaggcaaagtccttgcctatccaacactaaacccacactaaacttattctcccagtttcaatgaaaatcttaaatttaaattaaaaaaaaaaacttttaattttggagggttgggaatcaaaccttttgtgacaccaaattggcaatgagaatttggaaggggatgacacaaatattgtcactctgctgaaaaccagcataagcctttccccagataattccaataagcacagagaaattactctaaacacaaccgctggaatggcagaatctattacgaactcaaaaacctagctagactgctatcagcaaagatccgatctgctttcagtgttcggtgagatgcaggcgaagttacggtctcatgcatggtttaaagagcaacacgaagcactggaattgtgatcatttgataaacatgttgatgccaatatatttttgcctaaatgcagtaaacttaccagtaagtgatgcaagttgacaatgggggcggggggtggggtcaaagactatctccggggtagcggggtggggcagcagggaggcagctgatgttcacaatgcctagtgaatcctgtgaatctgtaatgtcaaaaaaagcctgtgatgtgtttctctaaattgtgtctctctccacatgtgtaaatgaacagacgcagatagagctcagaagcatggcatggatgaatttatctcttccaacccctgtaactttgaccacgcttccctctttgagatggtgcagcggctgactttggatcacagacttaatgattcctattcttgcctggcaagtataccctttgatgtacagcaattgcagcgtgacattcctgaaaaacatcaaatacccctctacctttatgtcagaactctacccactccctacaaaacccctttaacaattataagcaagtctttaattttctgcatggcagaagttttatttactcaagagtcgatgtgagatggaggaagtgctcatgagagacatagccaattccccagccaccctatcttagccaccccatcttagctgctacgtgagaaatcttcctaaaaaagtggttgaacttggcacctgctcaaaatgaacttataaatattgcctgattgtaggtaccccaccctctttgtcctgtgcctgttattcctagctcattaagcaatacaatgcttttgtcacttctaaagatcgagacagttgctaatacactccactgccactgtaatggatttgggtttgtttatttgggtgacaccttctctgttatactcagaatcatgtttacccttgaggaaaaaattttaaaggtgcagtaggcatttagaagctcagctacccagcagggttttttacataccctgaaatctcattttaaaccctcagtcaaattagttcagtttaaagactgctgttacatatttatccaatttttgaaaacacatttttggtttacaactatcaagccccaaactatgacaaagattcagctcatttctgttttcagattctaaatgatgaatttatttaagcgtaaatattacttactaatcctactttgtagacagaaaagaaggagggagatgatcaaatgattttatgcagagagcagttcttctccttgacttcaaacatgaaagttaatatatttatgtaacattaatattatataattaactgacattagcataaacccttattctgaatgattattttaagttccccttttttgctgcttgaagataatgtgtgttttttaaagaggttaaaatcatcttaaaatagaagtgggattctgtaagataatttattaatctatggctcacagtgacacattatctcatttagaatctcgtcattggagactcttactttgccaagttggaaaggaacaccacactgacttgaaaaacaaaaacaaatcaaacaaataaaacaaaacaccttaccttgcattgcaagtccatttttctcagatttcctactattgtgtatctctaattacatttatgaccgtcgtgaggtgtgcctcagcactgccaccctttcagcaggaactcttctcacgtgatgaacactgtgagacatgtttacactttgagacggtttcaccttttatgacttttgttcacgtcagtgtttgaaaacaattttttttcattctgaaatttaccacgaaggagaattaatatatgccctctaaagatataaccggagatgacagactgatgcctgttccccattaatcactatacgcttaactacatagtccaaatttaaaaataataattatgagtgacccagaacaactccctttcctgattatatacctggatctattaattaaggccagagtttcagaaaataacagaaatgtaaagggccttatcccctatctctctattccatttttctcattagtacagtcttttttttttcagttggttttggagaccgaccagcagggatacataaatttttctgtgtcttcgactcagttcctaattgatatttcttcaactcttttcaaagcagctattttggcatctacaaaagacttggtgtcatctgagtcgtagaaaatatattttaatctttcacagcagtgttgtctctaagatttagcatttggggtagcagatggagtggcaaagaagttgcctataggggcagcccactgcctcaactactctcccgccctctggaggaacttataatttgaaataggaaagatgccgtctttcgttggatgcatcgctgagctgcacgttgccagttgaagatccccagatcctaatacaagatgagagccttgcaaagccctcccttccagactcctttggcctctccctgttccacatcactgactccctcatcccttcgatccaagctgcagtaatattaaaaaaaaaaaacaaacaaacctcataggagaccctcaaagaaaaatgaagtttgttaaaaagagcccaaatgtccaatctagaaactgccacctggactgatttattgcttgcttcaggtagtatggaaatgagacaacatggtttgattttagactctatccatactgaccctcaatgccaagtcacttggccttgctagggacctgtctttccagttacataagagagacacgggtttctatccatcacgatgctgaattactatcagagactccatctggattctcttttgcagcaaggtttggctggtctcatggtgagcaaatataaacaggaaaacaaataattgcagggggtagggtgggactatagatgcagtcctgagaaatctctctcttttgttcaattgaatccgaggcaacttacttactctagccatttagatgctatgttattaccttcatttcaaaatgcactgaaaatttcttctaaggtgtaatgatttacaaagtttagtctatgtgtaaaccagcttaaatttcctttatgcctgaagatagggaaacagacggacccagagtagaagctgggctgggtctggtgtgaatagcaggttccttacccagactctgtgccagtcctgtctacctcacgggcttactagaaggctcagctgaaagctatttgtcaagcacaagttgtctaccaactgaaggcatttgtatcccatttttcccttgccagactctgccccagcttcaccccctatagtacatgtcagagccctgcttgttctcttttcctagaagcatgctgcttgctgatacagctctaccaattgtgttgatatcccatggcatccctgagctcagttaatttacccacctgcaatcaaaagagttaacactggctgtttatcagtcccttcctctagccactcttgatactagcacctctccaaaaagcaacatttaaaagaaagtctctcctttatttccctacagggctggttcagtcctggccaggtgtttgtgttagatgagtattgcgccagaaatggagtccgaggatgtcaccggcatctctgctaccttagagacttgctggaacgagcagaaaatggcgcgatgattgaccccacgcttcttcactacagctttgccttctgcgcgtcccatgtccatggtaacaggtaagcatgggtctagcggtattcctaaaggataaaaaagaaacttccagtggtttgtaactagttctgcctgaaagagtgaccctaactcacaatatatccctatttacccagtagtgcacaaacagactggaggaggggaggaactacacatggggtgggtgggagagaggagagaggcatgctaaactaatttcctttccttagacaactgtgaagaaataccaaacagcccttctaggggagccccgagttaaatcagtctgggtagcaatcattatccgtggtgggctttggttttgtatttgctttttccttttttgtttttttaatcggtgaccttggttggtaattaaattctcaaaattacagttttctggtctataaaatgggaatgacagttttctcatggagttgagaggctacttgtgaacacacatatatatgtgtgtatatatgtgtgtgtgtgtgtgtgtgtgtgtgtgtgtgtatatatatatatatatatatatatatatatatatatataccctcagcccaacttggcaagaaactgatcgctattttgcctttgttgatactaccgttcatttcaggagtgtttgatggttgcttgcattttgtgtacgtgatgaaaaataaaaaccatgggagaagtcgggcgtggtggcgcaagcctttaatcccagcactcaagaggcagaggcaggcagatttctgagtttgaggccagcctggtctacagagtgagttccaggacagccagggctacacagagaaaccctgtcttgaaaaaaaaccaccaccaccaccaccaacaacaacaacaacaaaacataatagggaagatacattaagaaaaggaattcaattctgggtagaactcaataagaagcatgactcggatagtgcggcagagcagcagcagggggctgaggaaatggtgctggagccgagaactgactcgtggaggctctaggcaaaaggaacagcatgtactactgtcctgtgaaaacggaagccaagcacattgctagagctaaagcaagataggtaaagctggcagtcaagatgccaggaacactgaatatatcctcagaagtgggaagaactttggcgatcacaagctaaccaactccctcactttgtaggtttcacaaacaagaccagaatgtcaagtctcctgactctgtactaagtattctatttctttagaccttgcccagctcctgaaggggaaaaaaaatctatgttctgaataatgcaaagaagcaaataatttaagaacattgccatttggctctagaggcatggaataaatttccacgctgccacagccagcttaccatctcaatgtatgtagccacacgttagtataaagataagtctacgatattccaaagcacccctgccaacagccaggggaggcagcagaagacagctgggtggctttggaaaacaagcctcagatgagcaagttgtcactcgggagaaatccacgtcagggaagaagccagtccaggctacctggctttgaagctagggttgtgtcagccttcctcatctttgcaagccacacggtcctggaatatctatggaatttgttctgtgcttttcctgtctctagtactgatagacttttatgaaatgagactctatcatttatagctaggtagtaataacactgtagctttgaatattttaacagaaaataagattattctcatctcctattgttatggctccatagtccaacacatgaccttttattcgcataaaagatactcataaagactgtgatacctgggttgaagcatgcctaatttgcacttttataaatatgtacactttgatgattatctgttacagcctcttggactgaatttttatagagggtgagagagagagagagagagagagagagagagagagagagggagagagagaagttgcattatattctcttggttgtcacactgtattctacatatgttactgaataggaaagtgttataaaataatgaaatgtttttgtaaactccctcgtaaacatcatcatgaattatgatacacattgtctgggtttcatattgtaagactgccacttgattcacagttaggtttatacatcttgtcgtgggaacagtttgggatttcttatttccttttcagttttgattttccttatgcattttgcatcttttttttgcttattactttagcttgaatgcatttgcctttgctttttgatgcatccttctttttctttctttttgtttgcgcatgtgtgtgctcttggttttcctatggttggccaccctctatgcatgcctcctgccaccacaccctctccaaagtcaacaaatgcatgtgtatcttagtgggctgctatcaaacacagactttcaagggggcaaatctccaccttctcctgaaccagagattaaaaaagattcacgaagagaatcaaaaaaaagaaaagagtctaaacctcacccaagtcaagaacaaaaaaggtaagaagccatttgtgttagcttttgttttcagcccctttgacctgtccctgcatgcatgctaccatgtccatgtctgcaaacaacagctttgtgaatcccctaaatctgaatccttttccaaacatgcagtttttcataaaagatcttaaaaatgggaaaatgtgcattgggactaagtttgagccaggtgtttggtgtttgtattggaaagactgacctagcaataagcaaacagaagtgagtcagattgttttaggtggtgttgttgtgttttgttcttttgttttgtcttcatgtctagttttagtctgatgtcttacaagtcatttgtaattaaaaaaaaaaaggtatgcttggtaattttaaactaatgttcaagaggcaaataagatgggttaactgatgttagataagataggcccatacatttattatggatctaatttcttaagcaaatcttcctaattttcacactcatctgtttagaagaaacccagctgaaacagtgaattatgataaagcacaaagtaagcccatcactaaaccaacggctactagtagaaaaacaatgagatcatctttaaggcatgaagttctaagcttctgtctaccttatcctgtgttgaccgtcagcaatgctctcctctttcactggaaaattggtgccttcccccttagacttcctttattcactcttttcattctcttcttatttatattcttcctctgtctttgcctgcaattctggacagacttgtccaaatagatggtcataggcaaggatcctgtatgctttaatgttcatttatctactggccatttctaagccttgtgtatgcagtgaacttacagaagcttcaagtgcacctgggaaattctgctcactggagaatgaagcaggctgtcccttatagtaggcagagctattagtgagcatgcagagaactcccagaaccaccgagtcaccccctccctcctggcactgaatatggctgatggtgaggcagagttcctgcttgtgttttgctctgctgtccatatccacctgcaagaaaacagaaacttccagtcaggatcaagaagccactgtggaagctgtccagagtgctgcttttcgacctagcatcatccacacagagcagagcaagtcgtttctgttgaaaggcagctcccactggactgtggcccatttcctagcatataaagagctatgcaatggagctttcctacccaatgggagctttcctgtgtatttgacgggattaagcatggtgagttttccctccagaagacttttggtgaggtctggagatatttctgattggcgtgggggtggtattaaatacccagtaacattcaggcccaaatgccagtggcattgaggtacaggagtctcgtgttaaataatgttcccaaatgatgggctgatatgtttcccccttggatttgttgttgtttcttttacgtcgatgctgtacctatgtgttgctctgcaaaagcagcagtcttccccctctagggttcacatgagtcacatggaagagtctaataaaatatagagcatgtgttcctaccctcaaataattcagcagttcttacatggagccagaaagcttcttctaatatactctcatccgtgattctgacttcagaacacatctagccaagatcttggttgtttcattactgtatgtttgaaccacttgtggtaaggaaatgaaaataattctgattcctgaaccccatttgcagccaaaagccctctggggaatttttacctgaaccattaaagtttaataaggagataattaagcacgaggaataaaagaactcaagtgattctaatacatatcaaactttgagagtaattgaatgaatattagtttgggccaactctttataactaagcccattttctcaaaagagagagagagagagcaaactaaaggaaaatgtgaacatgttcagctggttgcatttggcgatcacaaaatccacagatgtaaattgctatatcttctcatttttaaatcagctcctaaggttgcagtacttaattttcaccataatatttttagtattctttctagatgacatttagattagcatcactttggtcactgtcccacagtgacaaggcaatcaaacagctccgacgattgcaagttgcgtcaatgttccttggatccctttattattgagattggaaatttttctcatttacattattatttaacatttcttgaatgccactgctgcttttcacatatggcctgcatagaaagtacattgtatcagcaattaacaaatccataatgccaaacgcctcaatccacagctcgctgcatagattaatgagtctgcagtcagatgtaagagggcatgaattctaaaacatctctgaaaatgtgtccaaagatcatctggggagatgtgctcgaagtcaaggttctgttcatcttcacagcccatgtgcatcctgtgggttcggatttgaactcattcttctccattcatccagcagggtccctagatcatccacccacttgcccaagacagaagctgagcagccatgccatgaactcccccttccttcatagcatgtgacaaatcaattcctggctctaccaatgctcttaagtttatctcaggtatttccatttctgtcattgattgaagccactactatagtcgaagtctctgtcttctctcccagggactgaacacttggcttatttatggtgtctttgcctcattcagttagtgtcatatggtggttattttattttgttttgctttgctttattttgttctgagttacatatttttttctttctttcaaccatatctctacctcttcatacacacacacacacacacacacacacacaattatgtttagtatattttatctcccccccccaaaaaaaaaacagtatcgcactaagtgggtatagatttgccttacagagaactctgaaaacagtgctttatgcagcaaacaagtatggatagagtctaacagtgaaatgtattcttggtctcatgttacagagagaaatgatacttttatgaacatgtcactggattgcatctagctctgtacaggtattggccttgtgcaaggatgaagcatccttatgttctaaacaccagactcacctaactggaagtgatcataagagagagagggtaaattacaaacaagtttcaaaagaaagtaagcatctcccacagctaaagaaaaatttcctttggacttgtcaccttcattaaaaccattcgactatcttcctggaggaagcttgcttccataggaatagcatgaagtcttgagaaatctgtgtagttggtagttcttacctaaaattccacagtgtgaccttaccctggagtcactgaagctatttgtacaaactatttgcagatttcacacactttgagcatgtatgtgatacaatttttaaaaaaacaacaacaagccgggcatggtggcacacgcctttaatcccagcacttgggaggcagaggcaggagggtttctgagtttgaggccagcctggtctacagagtgagttccaggacagccagggctacacagagaaaccctgtctcggaaaacaaaaacaaacaaacaaacaaacaaacaaagcagcagcagcaacaacaacaaaacctcacatacattactgttgtgaccagtccaaagtctaacgtagggtctccaatgtcaaatccaaatccatagcttctcagtcttcatcaatctgctcctattcctccaaggggagaatctatgaagttctggtccttttcttggtgaaacacatgctcttctatatcttgcgttatttcttcaatcatctttgagttctttgctcatccaacacccagatccaatgtgagccttccttactattgccgacattctaatagcatctatattcctggtgacggttcagtggggaaagcttcttcaccactcccatgcttaaaatagcttctatattgttgagtcataacttcagatgagacaggctgcaagcaagtcataaaagagccccttggaatagtgccctcttcaatactactctttttgaaattgcctattagccaacctaagaagttacaatgcccacttgtaattgtgtagaaactacttgtttttcttcctgttttgccatttgtgacacaaacatttttatatatttgttttagcagcatatctgagccccagggcatcagggcataattagaaaagggcatgagctgggagggaaggagtgggaaggggtaaggctggctttcataagtaagcagaggctatgggatatgaggggcctaattataaattataattaagctaggattataaaaagccatccagggagcaagcagggggacaggagtggctgcttttagagactgctggtggtttgaggctatcttgaatttatatctattaactgcccaaaagaaacaaaggaaaatactccacaatccaatcaaattttggggtaacatctaaaaattataaaaatgaagagtgccagatattacaaatatatttttaagtcaaaatttatcagagtatctgatgtaattgtcctatttagggagccttgcaaggaatgccaaacacactctgtcctgctctgttcctttaaatgctcatgtttctaggctggaacaatttagtagcaagtaagattcagttatcatgcttgtttaaggacattttcatggatccataatgcggtctgcaggcatgcatccatttggagagaaagattatatcgtgtttacagtgcctgtaccagcatatgtggacatttgcatttggagatgaagtatattccttcttcagcgggagttttaccccttgttggtactgattggaggctgaaagcttgttgtatgcagagctgtggagcaggcgctctttcctcttctggtgaattcatatgtttctctttacacctggatttggcacttaatcaccaaatcacatcaatcattgtatgctttggattaacttttcatcctgacgttttggaaaaaggcaccttacttttgaaaggttttgcaatccagatttccacatgctgaatagagccatgccctggggataattaaatgctagtaatctgggtgcttaccagagtggacggggacagtttagctaataggggggtcagtcaattaccaagatggttttacattacaagcccagtacatgcaattaatgaataattaattctccaggagatatcaattaatcatctttagcttggaaacaccatggtaaggggagagagtttatataactgatagcccaaaagattaatgctgggtttgatagctttgatttgataaaaaatgaaataggaaaaagagattgatgtgactctggatgtattattatttgtgacatggctcaagatgggagaccgtgaggagagtagagatgacagaactggtgctaaccacagtgataaggacttgaagagcagccgacatgacatctttcctatcatgctgctgagaatgtcagctttgtgaaggacagtgagaaaatggtttgccaaaaacttgaaaggtggattccggagatgccagccatgtcagatgcaatatagtctgctgtggctgcagaaacccacttctggctccagtgatggcctgcaggtgggagagcttctgatcttcggcaaggctccaaaaatgactacacttgacctgcatattgtctcacgtttccgggatcatgatatacaagaagtgaagctagccagtgtgcagttaggtggaatcagaggccaggggctctctctctctctctctctctctctctctctctctctctctctctctctgtgtgtgtgtgtgtgtgtgtgtgtgtgtgtgtgtgtgtgcatacaagtctgtgtacaagtgtgtgttcctaaagcatcgtttacaagcttccgagcttctgtttaaacctgatgtgtggggaaggagggaatgtatcttccgtgaaattacaatgtatgatcatcaagtaagctctgatgtagagaacacacagaatagaaaagaaaagggaatcaagaaagctaaagaagagtaggaaccaggtcagagcctgggctctgcatttgaatcacctgtgagctcccaacatgcccctctaagcccccactacacaaggctgatcacagctatcaggagaagtggtaatcgagatgaagaattcctagcctatgaaaactgtggtcatgacccaactgctgagatcagtacatgccatctgcttcttctcaatctgccctgctcatttaccattgagatttcagagaggatctgagctgaagagtccagctgagacatgcagtggctgagaaatgtaggtgctgccttcaaggaaacccttcagcattaataatggggtagtaaatacatctatttttctttcccccaagtctagagcagttagtgagcagtagatacctaagaagccagaacctaggctctgaggtagaggatatacagtcatgcataaaaaaggggacagccagtttcctggacatgcatcccatccagatgaagatacatcccagcctgggactttttaattaaaaacttagaaatctttccttttctcttcttctttgtgattcacaaagtcttaaatattgagaaaggaaaaaagacactgagctatattatgaaaattaaagaacactctccatgtttccgggggggggagtataaaagtctgtcctttgtgacacattagccccttgtgtgtctcctgtcaaggggttgctgggatggctcagccaatgaagcacactttgcaaacagaggtgggctagcactgggaaacaggagacagagcaattccctggggcttgattgctggccaaccagtccaagtaaactgacaaactgcaggtccagggaaaactctccatctcaaaggataaagtggacaacactgaggatcacccccaactcaaatccatcagccaaataccaaaagccatgtaccaagataaaagtatcctttcagacattggaagagcctccactgaggttctgtgtttgtatttgttactaaacacagacagacagaccgatgatagatagatagatagatagatagatagatagatagatagatagatagattcttagcatatgattcccaaaccagtggcaccacagaacccactgggtatactcagactcattctagacctattatttcaagaattctggatgaatccatgtaatccaggtttctgcaaggcttccaagtgatgttgaggcatagtcaaatttgaggactgctaaaagcatatattgcttctatagaaaacataactcctagatcaacaatatggcttaatgaaccaaagtgttcacctcaaatatgacaacccgagttcaatcccatgaaccaacagtagaaggtgggaacccacagaactgactctcagaaattatcttctgaccttcacatgcccatctctgagcatgccacctgtgcagtcgttaccactgaactatgcaagtcaatggaaaagaaaatggtatcccgcagagctaaatataaactaaagtgacttcttatctaatgttaagcttgtgatctttattgagctgaaaaccaatggatatttcaccaagtttgccaataccctaagaatacaaatatggcagtttataaatgagagagagggagagaaagagagagaggaatgggaagggaagggaagggaagggaagggaagggaagggaagggaagggaagggaagggaagggaaaggaaaggaaaggaaaggaaaggaaaggaaaggaaaggaaaggaaaggaaaggaaaggaaaggaaaggaaaggaaaggaaaggaaaggaaaggaaaggaaaggaaaggaaagggggagggagaaagaaagagaaaggaaggnnnnnnnnnnnnnnnnnnnnaaggaaggaaggaaggaaggaaggaagaaggtttggatttgctgtcaagacattgcattgtcttaacacctgattttgcaggtaaactctcaaagagagcttttcagacttaatgaggttcatttgctttgtttatgttaaaagtgaaactgttcacactagcattccgtgattaagaagcaaattaaagtgactataacaataaacatttacttggctggtgttcctgtggaggggccaggaagtaggagccctctgattctcttactatgcatcaccagaacagcaggtaggaggcaaagcagtttccatttgtggtagtgcccttcatcccaagaattagctaagaaggtgaaacacatcttatcattcagttttctatcatttcagcctcaagcaaaaatactgagtccaagaaggtttcttgggcaaaagatgacttgattcacagacaggcttatctcaggaccgaagacttatagctggggatgtacctcagtagtagaataattcccaagcaagcatgaggccctgctcagtcctcagcaccagagagagaattatacacacacacacacgcacgcacacgcacacacacacacacacacacacacaccgtgcgtgcgtgcgtgcatgtgtgtgtaaataaatcaccaaaaatgacaaacatctctgggatgtgcgctcataatttcaaatcttctagacagatgccaaagatcaagtcacaaggtttgttttgaaaatgttttgtaagaaatgtccctatttcggtcctcaaatcccaagataaacttgtcagcccccacagaatgcctattaggctgttcttgataatgttacatattgattcggttagaagtttaaatttccttcagttctggctgttgaatcttgtttacttcaaaaataacttactaaagtgtgatcggcatgtacacccactttttgattgtgcattaaatctattagattaaattgtagattaaatctattagattaaattagatctaaactaatagatttaatacacaattagcagagaagcccacagatactttcattactctgaacattttttacaaactgagtgattcaataatgagtgaaacagatgcttatatggtacctaatttttgtaggaattttcataactgaagagttccaaacccagagctagtgtggcaggtaatacaagctagagatatgatcaggtaaatagcacctcaggttagaaaaaaaggtgttggttgataactaccaactaatgttctgaatttccaaaagaggccagaaacccaaactacattgtaaaacttccctaatttaaaaaatgatgaaagggctggagagatggctcagtcagcaaagtgtttcctgcactggaccggttttgtccccagaacctgcatttaaaagcaaggtgtaggaatgagcagctgttctcccaagcactggggaatcagagatggaggagccttgctaaccagcaagcttctgactcagtgagaaatgctgtctaaacaattgaggtagagagcaattgggaaaaatacctgctatttgatctctggcaggcataaacatgcatgtgcgtgtttatgcacaggcatacacacatgcacacatgcacacagtagtggtacttcttcagatattttaagaatctatgaccagcaaaatcttgctagtgtttgcaatggtgtcagcgtttggaggctgattatggaatggatccctggatatggcagtctctaaatggtccatccttttgtctcagctccaaactttgtctctgtaactccttcccatgggtgttttgttcccaattctaagaaggggcaaagtgtccacactttggtcttcattcttcttgagtttcatgtgttttgcaaattgtaacttttatcttgggtattctaagtttctgggctactagccacttatcagtgagtacatatcatttgagttattttgtgattgggttacctcactcaggataatgccctccaagtccaaccatttgcctaggaatgtcataaattcattctttttaatagctgagtagtactccattgtgtaaatgtaccacattttttgtatccattcctctgttgaggggcatctgggttctttccagcttctggctattaaaaataaggatgctatgaacatagtggagcatgtttctttcttactagttggaacatcttctggatatatgcccaggagaggtattgcaggatcctccggtagtaccatgtccaattttctgaggaactgccagactgatttccagagtggttctacaagcttgcaatcccaccaacaatggaggagtgtccctctttctccactgtctcttgtgagacctgtgagactacgccggggcctagcaaacacagaagtagatgctcacagtcagctattggatggattacagggcccccaatggaggagctagagaaagtacccaaggaggtaaagggatctgcaaccctataggtggaacaacattatgaactaaccagtaccccggagctcttgactctagctgcatatgtatcaaaagatggcctagtcggccatcactggaaagagaggccctttggacttgcaaactttatatgccccagtacaggggaatgccagggccaaaaagtgggagtgggtgggtagggaattggggggggagagtatgggggacttttgggatagcgttggaaatgtaaatgaggaaaatacctaataaaaaaaagaaaaaaaaatctgagaaaatgttcagttgtctgaattcccatatagaaaaatgtaactgaaatgcgtgcctctgagagatacagctacaactactcagacttgatgataaatacagtctgaaatcaaatgtaactgtcaaagatattaagagatttaaaaatggataatgttttgcatgacaataaaattttggctagatgcaaaaaaaaaatttatgaccaatcagaaccagtggaacttaacctgtgagcagtttcactatctcacaagaacacgatccggttctatgctaaccccgaccaccttccacttgagcatctccccccacctccagccctgcacagcagggcttctgtggtcacagccatcatcatgctttttgccattaaggcagacagtttcctcctggtagagatttgatttggtggtgtcagcatatgaggttcccgtcactttacaacgtgtcttctttcaggcctgatggaatcggaactgtgactgttgaagaaaaagaacgctttgaagaaatcaaagagagactccgagttctgctggaaaatcaaattacacatttcaggtaagaatttaggtttaggggcctactgggttgagaacaaagctgcacaaaaaggctttgtttccccaaaactctaagtctagcagagacacataagatcattaaagcaaaatagctaaaggaagaggaagaaaaccaaccagttggctccagctctcatttgctacctgactttgtgttctttgtttgtctggtgtttgttaaggaagagtctaaaataggccaggctgtcctcaaattctctatgtacccaaaggttatcttgaagtcataatactacaaactctacaacttgaatactgggactataggtgtgtaccaacacataccagatttcatgctgtgctaggaattgaacacaggacttcagaaacgctaagaaaggcattctaccaactgaggtgtaatcccagctctggatttcaaattcaagagtgcattttagttgcttaaagaacaaagctttcgatggaccatctagagactgccatatccagggatccaccccataatcagcttccaaatgctgacactattgcatacactagcaagattttgctgaaaggacccagatatagctgtctcttgtgagactatgccggggcctagcaaacacagaagtggatgctcacagtcagctagtggatggatcacagggctcccaatggaggagctagagaaagtagccaaggagctaaagggctctgcaaccgtataggtggaacgacattatgaactaaccagtaccccagagctcttgactctagctgcatatgtatcaaaagatggcctagtcggccatcactggaaagagaggcccattggacaggcaaactttatatgccccagtacaggggaacgccagggccaaaaaaaatgggaatgggtgggtagggaagtggggggggggtatggtggacttttgggatagcattggaaatgtaattgaggaaaatacgtaataaaaaaatatttaaaaaaaagaagaacaaagctttcctcatgtgttctgactgataattcatgtcatataaaaagttgaagaatctttaaggttcctagataaaacagtttttaaaatcctacaatttgagtcagaatgaatgtggacaaaattaatggcatacataaatcatcctttctcccctcctactagctgtacataaaatagtggaaatttaggtgagccctgttggggcttgggatggaaacttgacatgcaggagcagcagcagcagcagcagcagatcacacactggaccttcacactatgcaatccacttcacctgtagagcatatggcacgtttctaatactataatgttggcttcacacatagactctgaggcagtaactccaagtgaggaagtgtgatcctaatggttcccatatactagttacagggttggaggctggaaaggtactgacttttgttttgaatctataaacaactgtgtaaaacaggtaacctccagttaaacaatgggcaaaatgaggctgggggagattccagaaagtgctcctggctgcccactgtagactgagtttaagcagcccatcccattctctacacttttgagaagtgttttgaagggctcttggccaccagagccattgatggcacctgtagcagtaagtgacatgcttctgactgtgctactggaattctccttatggaataagatttgatgatggtcctttaactgaccatacattatagcaaaacgtatcaccaatagaggaaaagatccagtaacagtgaaaaaatcctaagcaaattaggcagagtcaggaacttatcccaaatgcatgcctgcttcatgcttcaacccttcagggacctaaagaagtgtgtttgcattccagctggtttaactcctagttttccatgctgtcccctactctaacacatgaggtcatgtttttgctaactagtgttttccctcacaatggaaatccaagctgagctctgtgtcaccactctcaatattctgttctgttgcagacatttacagagttcctctacagtcattattcacacatatacatatatacgttatatatacatatatggtgtgaactaggattagcataacacagtgtgacaaaataaaaagcattttccattcctcggtataagttgctataggaatcaaactgcagcatgctttctgtgaaaatgtaatggtgtgggcaacctgagccttgcattttttctaggtactgctttccatttggtcgacctgaaggtgctttgaaagctactctctcactcttggaacgggtaagaatgaacgtgagacaagtaaagggacttgcaagttattacaatcaaacagtacagttggacgaccgagtcagtaattttcaaagggtttgtttaccactcatgaagtaccagaataaaagtgaggaaactgccaatattttggaagttttgttttcagatttccaactagttatattcaaatgtcactcggggcccttctctgatgcctgcacaagctttgtcaccgcagctgctctgtggttttctttctacctactgttatcatattagtcagcattaatggttttacacctgaggtctttggaaagcagaaatgagtaacacattgatttagaacttaatagtcccctttccttctgcttgaaggttttgatgaaagatattgtcactccagtaccacaagaagaggtcaaaactgtcatccgtaaatgcctagagcaggctgctctagtcaactactcacgcctatctgagtatgccaaaattgaaggtaagacttctatctgtcacttgttttgaatttgtattttgatatgcctccctgggaaaatctatctcttttcttaatggacaccagaaaacagcggtccatctgactacgttagactaaatatacttcaactgtggaaaatgccttggtcgtggccaaataaatagaagaaatctcagaagacagcctttagaggaaaaccaacaataaatgtggggcgttatgtagtaaccaggatccttctgagagtttgtgttgccctcagatattttctctaaggatgatgttaacctatgaaagagctgggatgcattgttaccttctttaagtagagaaaaaggaagctgtctgctgtctgttgccagtagtattggaagtaaaacaagagttgaagaatgcaatattcaggttctatttaactctttctgatgccttggaagtcttttgtctttagggaacatttcaaatttggtgacagcatagtgtggagccagcttcaggggctccaagttgactctggacttctttcttgtttccagggatgtagcaggtgcattgctcctgccatctcaaatgtcagggaaacagacattgatgactacataattagaaggcactttgagtaaattcaagaagctatggttctttaggacctattcactctcaaaggcattaatcacttttcattgttacccctgttggctgctatagggtgatttgaaaaccacacccaacttgaccagaggtgtaagtgtattcatgtggaagttctgtgtgcaagacttgatgtgtccacactctggaatctcatgttctctcacacacaaaacacatgacatccaaataaagcaagcaaaggcacactgtccaccttgggccatcagtgaggggaacacctgactagcatacacacgccatcacatatactgccaatgtcctgtttccttagaaaattagctgacaatcatgttaaattcccaatgttctgtacattacatgtcttcctcccctctcgattttgtctgtgtgacaatgcaaattgtgtaccagtggtaatgagttcattgttatgcatcgagggagaaacacttaagaattgggcactagaagggtgtttaccaactctagatttggtaataagtgacaaaaagagaggaacgagaagatcaatgattaaagggctttattaacaaataattgttccagcattcccagcccaggacataatggttggttggattgggtaaagtcaaccatgtaattactaatccgaaagccagagatgggataggatcacgaaatgaaatgttcagtttccacaactgctgcctcatgggtcttggtccagctattactagtcttttggtaagatctgctctcttctttcagataagtaaatttaaaaaataaataaaaacaaaaaacaaaaaactttgcgatctgtaagtaaaaatgcattcatttctgaagtagatcagctggtctgtagtctccttctgtgcctcaattcttcttggttgtgttaattatcttttgcactgtgacttttaggtctggggattctttgaagaaaccaatctttttattccaactctcttttcagagaagtacctcattccacactacttgctctcttctgcttttctccttccttgtccgtgattggctcagccactttttgacacaacctctgcaaaagtggctgagacgccaatttcaaagcatgctgggattgttaattcagacaaccccacattctctggctgcatgtgtcaggttttcttccatgaacatagtccactgtaggctgggatattgcagcttcaaagatattactaccagacagctttctttgaaaaaggctcaggtcctaccctcagaaaagaaatgcttttttgtttgtttttttgtttgtttctttgtttgtttgtttgtttgtttttacacttgagcctctctgaacattatccatctgagaattttggaaagaagttgtagtaatattgctgggagactatgtttatgaagaaatacctcaagagccttagatactaaagtctgaaatccttagtatcttggagccttaaaccaatgaaattctgtttctctctacccatgatgttttttggtcattgtattcttgccaacaactctaaagagatgtgtaaaatcatggtcacaatctctctcgtggctcatggcatgctgaatggttaatccagtagttcccaaatttcaaaactcctttttcttttatcctgtgtttaccccaaaatactctgtggctattttcccttgggctaatgtaacgttttcctctaacctatgaccttgaacctctttacctctgacctaagcctcttgcatgcccaaatcctcttttgtagggaaaaagagagaaatgtatgagcatcctgtcttctgcttggcctcccaagtgatggatttaaccattcgtgagtacccaccccctcctcgccatgctgccttcactctctctgttccattatttcaagaaactcagatccaaaccaactcactctccttgcttcaagttttttagcattggcttgtctgttggttctgtctgtgaaacccagtgtgagaagtccagtcactttgtatcagcctaaaacaggttagacaattaagccatttgtttgtgataaactcagatttgtctgtaagttttttcagttaccctgtctgtgacctgaatgcatttttactttgcttgtgtgtaaccctaatttgtaaagtacttgtcactggtacacaatcaaaaggtgtcagctaagctggggagtgatgtactaggtgtcagaaaaaggacatttgaggcaaagccatgccttctttatccatgtttaacatgtcaaactataaagggtatgagatcatacaaggtggtccatactctgaaagctagttcttctatgcttcctatctattctctctcaagctgggaaattttcctccttctctctgaagagctgtatttgcccttgtcctcaaagctctgctagaacacatgacttaattgtcattcgaagagtttgtgtatgtttcatagcttgatttcacattaaacttaatttactaattttctatttgtgcagccttttccacatctgtgaaggagccctttttttgctggcccccaaactttggggcggtgggaagccaagggcaagcttttctgtctgatatcatgtatcacgcataagtggggggcattttggtccacttgctcattaatcttgcatatgtgttcttgtttctccttctcttctctcctcgttgtgctctctctttcaaatagagaatcaaaaggatgcaggtgaactgattgtatatgccttatcaattaccaggactgtcgagttatattcagttgtttttttgttttgttttgttttttgttttctgtttttgttaagtagctccttaaagtatgcgctcccggagagcagtgtggagccgcagtaatacttaaggagttaatttgtgctgtctaaatgcatctcatgcccactcactgttggtcttcagagagtggcacttccgtaaaggtgtaagtttgttccttcaggaacagcgttctggtttgctgcagaacatcttttacccttggcttcagggtctcacaatttggcctcatgagtgtatggtgttttgttttgtagttttaaagacactgaaccaaatgaatcttcccttttactttttttctttctttctcctttctttcttctttctctcttactttctttctttcttctttcttcttttttctgttttctgccctatggagaagtttgtgttctttggtgagtgtttatagtcaagaggaagcaatggtgtccatagtgtgtgtgtgtgtgtgtgtgataggcagagggactaagcaggagctcttgtgagaaagttctctgactttagaaattttcttcttgtttcctctcaggtcttctgagcctatttagatgagagctctgaaatgaaatattaatgaatgtataatgtgtcttaaagagttaaaagattccataaggatttctcatttagacccacacagcagttgaacatatttcagaacaattcagagagcatttctaatgtgttccaagcaccaggttagcaataaatattccaagactcaaaactatgctcaagacatatgtactcccaaatagagaaggtactcatccatccatccatccatccatccatccatccacccaccaggcaaggacttggcagaggctaccttgaagcaagtgcagtgtgaagagccaggaagtatccaaatgaggaaaaacaactattagcttcatgaaacatgaatgcatatgtgtaaatttcaaattcaatacatctaaatccccactggttatgtgtcagaggaatatgacattgttagaaagctaaaaacacattcaagatattgggtttcatttgcacattggaagagatacattggaatcagttcatggaagctagagatttggggacatagcctacacagagcaaaatatacaaatgtaacaaactacacagctgataaaaataatattcttagataagatgttcatgacatgagtttcatcaactaggtgtggttttgtatgcatttaacgtatttaatcttcagaaaccttatgtagctcctcccattttacagatgaacaaacaaagattagagaaacacaaatgatgaacaaacacatcgatctagaagcctacacagagaccacatgcctatctactcagttcaacatggctgtaaaacagtgtcagattgcaaggcgagacattcagtacaagagctgtggcctggacacgccataaagacagagatctggctagaaatggtggcacactcctgtaatcctggtattcaggaggtggagacagtagcccaactgggaccagagtgactttaaggcaaaaagcaccattgcagcaagaccctgactttaacaaagaaagaagttatgactctgtcctggtacaaagtcccttacccaggaatctctgtgacttttatattcatatagatttttcaaaggataattccaacacatattatctctgcacgtgacagccattgaaggttccttaagcaaaattaaagattctctccagaataaccatattagagttgtaaagaaagtctgaagtccaggaatagagtaaaactgaactttaaatataatatgaaagcgaagatgaatatgaattttgggatacttgagccctcttctaagcaaagcaggtctcactgtcttcttccctggcctttaaatattcttatttctgttatgattaccctaccttttcaattttcctagggaataagatagatagatagatagatagatagatagatagatagatagatagatagatagatagatagacagacagatgatattacagacaggcaggtggcaggtggtggcaaggagttgtcagggttaagagtgcaaattggaatgcggtaaataagatgctagaagtagattacagagatctcctggtgtgtttgctcaaagcattctgggagagtctacaagactctgaccatggcttcctagctgacttcatgctttctatcttgtgaccatattagaaattaaatgttcagcttagttacggtatcaaaagaaaaatagaaattcaaaagatttcaaaagtctattaaagaaaatctgtgatcctatcaaagaattctattattttaaacattcccattaaactgtcacatattctaaaccaaacaaacactggggaattcaatattatcattgctgttttgcctccactcttggaatgcctgcataattttcagagcatcataatgattccactagacatttaaataaaactttttcttttaaatgtaccaaggatttgcaaagctttgtacagataatcttttagatggggataaatataataataggtaagtggaaagaaggaagaagaaaaaagacaggaagaaaaatagacacaaacaagaagaaaggagaggaaagaagggagggaggaaagaaggaagggacataaatagctagatagttacatgtatgaatagtgagtagatggataagcggggaaaatgcattatttttgcctggacactgggatgagaactatatgaatgattcaactggatctttaccttaaactcataaacatgccctcactgttgctccatttatagctcaggaagctatgtttcataaggttgagtggctttctcaagcagtacttggcttcatgtctaagcaagtgcaagtgatatgttttgtctccttttactatgcagaccacaagaaatcctgggcacttggacactatccattcagtgaggagggaagaggcacctatagaggcacctatagctttagtatgggaagaatacaaaatagcagacaagtgtcatgcagggtcagacagttgccaaatccttacattgtgaattcttatggcagtttttgtagatatttttcctctttggttgacagaagccttttagagcagctcaaatccaagaaagatacctgggaaaatagtaaagtactttatgtacacatgtaagagcctaattccagatcccccagaatccatgtaaaaagctacacatagtaacataatttcacagtaggggaggtggaaacattcacatcattgtcttgctggccagccagcctagcctcttcaatgagttgcaagccactaagagaccccatctcaaaaatgaaggcagaaaagaccaaggaatgacaccaaggttgacttcaaggctcctctttttttttttaaatacactgtagctgtcttcagacactccagaagagggagtcagatcttgttacggatggttgtgagccaccatgtggttgctgggatttgaactctggaccttcggaagagcagtcaggtgttcttacccactgagccatctcaccagcccaaggctcctctttttctctcttcctcctcccctccctacctccctccctcttacacacatgcacacacacacacacacacacacacacacacacacacacacacactcttacttcacataaggacttctagagtgtgttccgtaattccgtgcttctgcaatatccagtttagtttcccactgatctgtgaattattaaaagagaaaaaaacagccaagattacagtctcaccagaccactgtgcaaagccagtggcctccagtctcctcacaaggagccagtaagggtgaatcctattgtccaaggatccatgctgttgtagagtgatgagtatctcttgcttcatgtcttatacattagttgttaaatgtctctcttcccatctctcttgtttcaatgatgcctaaataaaccagtttctaagtcccaattattctatgagtagctcttcatttatactatacaaacagtaaggaagacaaggacaaacacatttatttcccagattgttatcaaaggggattttgaaggaagagaggatatactaaagtatgttgtgaagcaatgggcataaagccatctttcctaccagaaaaaaagccattatcagtagtaactgatcttcactgaaagtttaaaacatgcttagtggctacatggagatctcgcttagctctcttaagaattctaggagataaatgttttattgccatatttcattgactctaaatttaggccattgatcataaggtatagtattaattaaagaagaagaatatagtattggtatcagtcaactgatgacatgccatcaaatgtagtgatttgatcactacaaagtaagttcaatcctcaaatgcatcaaatgcatccagatttctgaaacagtccatgtgttttgtgcactgagataagaaattggtcgtttgttcatagaaatatttttcattatgagctttagcctttgatgtgtgtcccatctctcaagccctgttcatagaaatcttaaagcagaaagttgctgggcaatatgctcagaattaaactgggcaggtacagctatgatccagacttaatctggagtctttctagtgcccacagctcacggtttctgtttctgcatcacgaagagcttgtgatgtatgagcaataaaattgaaagatcacaaagtagcttctcaaagaaaaaataaaaatataggaaattattaggtaagcctgaacctcatttgacaaacaagaaatcaagtcctggagaaaagcacttagatttcaaacaaatgaaatggtcatcttcaagtctgatgtcccaggcactcgctttcctttcacttgagaggaaggcactgtccacagtccattgatgagcctacacttccaaccctgctgatgctatcctacagccaagtatttgagtcacaggatagcagatctcagaaaacactggctagaaccaatctgaacactcattcaaggtagacattaaatcccatgttgatattatgtctctttgatgactaagatgtcactttcattttctggtggaaatgctaatcatagttactctctcagaagataacttttaaaaagtacaggagattccagaaagctagctcaaccagtaaagggcttgacttatatgcatgagaatgtaagttcaatcctcagagcttccatttaaaactaatggcatagtgacacattcttataatcccagcactagaaaagcagggacagatggatccccagggcttgtctaaacagccaacctagcctttttgacaagtttcaggctaacaagagaacctatctcaaagaaaataaaagataaatggcacttctaaggaatgacaccaaggctgatttctggcctccacatgaatgcaaacatgcacatgcgcgcgcgcgcgcacacacacacacacacacacacacacacatgcacacacacaatagccccacacaatttccaaataaggattttagcactgcttcatagtaaccactcgttgttatacagagaactacatatgtatatctattaacttatttattattatttaaagggctatgcatctaaatcccagccttccttgtgctttcagcaatggaacgtaaaaacagtgttgcataaaactatcaaaatgaatccctgggaatcttgttgaaatgtgattgtggttgaggaagtgcaggcagagcctaggaatctatatttctagtgagtgccctagcaaagctacagctactaatccaggaattattcttcacatgggtatttagaagaaattatattttagtcaaaattctaaataagaataacaacctagtctaaagttagctaaacccacaatttcaattctgtgagctatctatgaagttccatgagctatgccaggtaccagggaactatgcagtaatcaatagtaaaaaccagttcccatcctaaaggaagctatcactaagtaaagaacgtgggagtggatcaagcgagtgaagtccaatgactacagtaatgaggagattcaagatgctataagaatatagttctacaggagtgtgcccaggccagaatctacgatgcatcacagagtcagggtaagcagcagaggaggacatcatggagtacagagctgaaaccccataaactgacttgggggtgtgtgtctggctttgttgcagtgtttcatctattaatgatgtcccctcccccattctccaagatgctgtccaagaaagttgtgactatatacaaagattctaaaagggctttaacaagtccttaatagtaccactaagtccatggtcttcctatagcatgtaaatatttgtgaaataagaagtaagaaaaagaaacttttgccagtgtatctggaagaactttgaaggaaatagccttagagatgaagatgttgagtatatttcttacatctaaatagggacagaaagctttaacataagttgtggtgatatgagtttgacgagagacacggccacaaggcttttatcctagctgccaacactagaagaaacagtttccctctctaagcaaccatgtgaaattttaaaggagtttctcagtggctcatcataggtcatatagaatagagacagtcatgtctccaaaggaaaaaaatggggaaaatgattcatgatatacatgtcaatctttgttaacatactggttaggacatggaatcctctgaagagggttaaatggagattcaagggatccactatatgtaatgagcactgccactaaaaaagtagtatgttttaaccccacagtcattagttcatgtatccatcactataagggggcaaagtaccttacaaaacactgtatgtctaaccaatcaactctgttccccctccggctttatccactctccttctcccaaatcttagcaacgatctacaggctgggtgttttcagtaaagcgtactacaggctccggcatcttcctcaacacatcaatgactggaacttggtaataagtgggttttccctcagtcatatctatccctcgtgtgatatttcaggggctggcagttcgcttgctggaaccaaatatggtcaggttatttaagggctaattggggtgtctctccctcctggatgcttctcttccttggcttagctatgcctgtagaggaattctcttttttgtttttctgcagtcacatttaactctctttctggaagccaaatggaattaattgtgtaaacatgagcaatggtaattgggtaaatgaagttggaaaccaaggtatgatgtttttgttttgctctgtgaggagcagaaagggaagcttgtttttctatggtggcaaaccttacagtaaaaattctggacagagagttggcaggaggaaatttatgaatttctccccaggactcattgagatgaaacatgtgtctgacgcctcacaggttacagatcaaccacaggtctgctctgtgttgtggggagccccagatcaagcactttgatacatataatcagtccctaggtgtaaatgagcatagagtttccatgagaattacacgctaaggtatcaaacattcaccacatgagccataaacatgcgtgcctgagatgtccccagctttacagaatgctcttagccacgtgctttttaaaaataagcctttctttaaatagctttatttttaaatgatttctactaattctgtggtcatatgatctttcccaaaggattcaaattaactgataaagattgtttcaggttgtgtgctcaaaaacactgagagtccagcaaggtcagtcttgaagacccccacaagtcttgctttgccggaacatggcatttattcatgaccttgctccctttctctatcaatgtgactataattgtattttctctgtacctcagtaaaattcatttgcccagctgaaaatccacgcaaactcagaagcaagcctggaaaaggagtgtgtccctcagcactcagatcactctctaacccagaactattagaaaggagaggtctgaggctaatgagacactcaccaaagagagaattgtagaagctgctggtactctgtgcttgtgcggaagaagaaactattgtcaaaggacgtttgaagcactgatattgtaaaccacatgacagatgggtcaagtgctgattacggtattctaacatttggaatagcgagtaacatattcgataagctggcaagtttttatatatgattcaacccacaatataaaagccatgagaattccaaattgaaaataattaaatgagctggaaacaatcagataccacacattttccccccaaatgacagattttgacatgttgaaattccacaaagggagcatgaatattccctagctcacttgaactaatgacggccttttatctgtgcttgcaaagaaattaacttcagccttctcacaattcggaagctaacagtggccatttgtaggtactttgacttgaggaagacctatcccatgccttgtttgatttgttctagtcagcaatcctgtcaaatacagggaaaattcttgactctgtctcattcatatgataagaaaccaaattacagagggtacaaaattagttaaaaggcaagtagcctatgaaagataagaatccacatcaccaaccgttcatgtaccatactctgtctctggtcgcgtggaggggagaatctgttaatgacctgtgcttgttcttcgtgataaaaaagtgtatcttctttcggttgctgatacagcagctgccattcgtgtttgtccatcttgatagagcattttttttgcatttggcctctgagtgtctgggtagggtgtggtgagatgctggttagagtccttatcaaaccccatcacatctccaggacaccaaagctgctgagggagcagcatctctggttgtcgtttgtcacgtttgcttgtcggggtgttcttttcagagttccttgtcacttgtcactctttgtgaaagtcactttgtctctttacttttttttttctgcctctctcctaactgaacagctccccagccagctcctgagcctccttctttattcacacaattgcagaccagcatgttatctcagaggctcgcaagcatgcctaggccaatatcaagtactgtaaaccttctatcttctgtcacttggctttctagctttctagctttctagctttctagcttagttggcttttctattcactcttgaaattctgttttagttttgaatactaagctgaggcacaggctctcaagtgtgatgtcgtaggttttgagatactcagaagagagcatttatttccaaatgtccacattttttttttgtctagcaatgtctgacatatgcaacattttcaaatctcaatgtcagcacaaaataacattgttgttgcataacattttgcatgatggtttttcctatgttatgagcttcaattctgttgaatgaaatgtctcctaactatactgtattttcggttctttttccatcagtgctccagctactgcaaaattgggtcaggggaaggaatatctcagtacattttatgactgcagaggtgatcaatgagccagactcatttctaaacaaaacttctttgcgccctttggggaatgggttgctgaaggcatttacacagtattttctttaaagacaacatcctacagaattcatggctagtatagtttttgccattgagttagcaaatcagctgtttgagcaagtagggaaaaggtagctgtgcctcactaaagtggcttaagctacagataatggagccacaactaattagcaataagtagaagttgagctacatgggttaattggcagtcaagtagtctagattaaagactcatagcccatgtacttcagtggtcacatgttcaagtcaaattatacgaggtttattaaacatactgttggtatatataatacataccagacatacacatacctgtgtacatttgcacacactcatcaatgactgcatgcacatgtacacataatgtgtatctattgctgtttattgtagtcaatcgaaaagtcttgcatttcaaaaaaaatcacaaatcttcaggcagtccttacttaagcatcttagatttcttaaaacatttaaaaaaaaaagcatttgcacttcataggtaaattgaataaaaatactggtggaaattactttatttctatctctgatgtcatgtacagccagaattccctttaatttggtgagtatttcatccaaaagaacaatgctctctattttgaaagtgaaagatttcaaagatgtggtccaagtgggatttcctgcagatctgtataatgtgcaggcttgtctggttataagaaaatgtgtgtacatgtgtgatgtatatatgtggatgtatgtgttgaatgggtaataagcataggataaggaatttgcaaattgatgtgtaaatgtgaatatcaactaatgaaaagtagccactgtgcatatttactatcagaatgcaaatccctcactctatgtatagtacccaaacatatatacacagtatgtttgtagaaatgccagaaagtctactaaggaaattctgatagtctacttgtaaaaatgacaaataggtcaagtgtcaacaaaatagacaagtcaatcttgcttctcatttttttccaagaatgttttctctagaccaggccatcagctgttaccagctatcctcccacatctgctgactaggtgttggctgtcctttacctaccctgaaaactcccccaaactcctacattctagctccaactagttccactcaccttgccatttagctacagtaaagataaagatgataatattgactgcatacagaaagtccatctccatacctgcagttgtctaattgaactgaaatttaaaacctagtcatctgagttggtcccatttgtcagtctgtctcccaggggataaaaacattcccctttgcatagtgttttatggagtttgttttctattattaaattctaaatactaatgacgtgtatcacttaagaaatgcctatctttttaagtagctattttctatccttatatttaaatacaaccaagtgtgtagggagtattaagaaattctatttagtgctggggatatagtttaataataataaaattgcctagcatgtatgaagcccttggttcaaccctcccagcaccataaaaaggaaaaaaaatgcaaagaaattatatttagcaaggcacattctaacaccctaagctgaatcagtcaagaaatgacactgtccacgggtgtgagctcaaggtgtggcgaaggcaagagttctgttcctgctaaaatataggttatagccatccctgtaacaacctatccttaataccctttaataacctgccctgaacttctacataagcacccaagaatgttttgttttcttctcatcttttccccgggtgacttgaaacaaagaggccttgaatgttcatctccaaagtgatcatcgaagtacccagtcaacacgtaggcctgaaataaaaacaattttgtcatgttgaacagttagtggcccacatagaaaacaaaccgtgccaatcaatatgaagcctggagtctcttgccccatgccaggtaggctgagcacaatgtagagagtgatctgaggtagtccatgtatgctgtctttaaagaatgtgtattgtatacaaaacaccactaaattagcatgggctattgtagacctcacattagcttcatctgcaactcgggagctggagcactgttctcgtaagtgtttcataatgacaatgacaaggtggctttatggtttgctcacttaacatttgcatgaaacttttttttatatattttgataaccattcagaatttctcacccactagttctattggccacaaaactagcctgctgctttcgttgaatcttaccacaaattcttatactccagaaaatgtaggccgcttaatcactcccgccaaaaagctcgaagacacaatccgtcttgctgaactagtcatcgaagtactgcaacaaaacgaggagcaccacgccgaggtgagcaggcaggggaagatggcacagtgtccattagctgaggtgccagcccgggctgcagctgccttgctgtgagcaagatgccttaacttgagttttctcttaattgggctgaagggaatgaaagtagaagttttggaaggagacgtctttagaaagttgtctaagtgaccaagaggtggttgtatgttgtgcatttcagcctaagttttcagacatttctctgaacgcgggactgaggtgagtgtaactcaaggctctgtggcatccagcatgcagcacagatccattatccggagaaacagaaaactctccagtcttttgtggttgttttgttgccagcactgttgttctgattggttctttggtgtgtggaccctaggtcatctttttattttttattttttaaagcttgagtttttctctgtatcttactctgataatgtagtccctctccctttatgaccttagattgcccagcttgctgagcacagtgacagagacaataataagtctatgctgtttgacttggcatttccatgacacaaacccagataaatacagcttctttcattgtattttgacaaacctctattaaaatgattttgaaggaattataaatggaagggcttcaaaccaactagatgtcaaacctataaggacctaaatgccccagatctcccagggaagagcagaggattaaactctgaaactgttccaaattcgaactttaaaatcatttctctcaacataatctggtttttaaaatgaagctgattctccctttaaattggtgtttacagaaaggggacgaaagggctctgtaaaagtcatttcttagacccctaaactgaccattcccatgactaagaaaacagtgacagatgggtaaatgatagagcatacgctgtaaacccagccatcccaactaatgctgattgcatattgaaatttcctccctgtttctctactgttccggtcaaccttggctgatcgtggcaggggaaagaggtatgtgactcaatcgaatgaagtggccacctgctctcatactctgtgcatgccctggtagtaccatgtcttctaatgggattttcctggtgctcctgctttctaacactgaccccaggaatgtaacagcaactttgagtggactgcttgtgacatgggtgactctccacagcagggtaaatgtggggtgattctcttgtgcgtgcatgaggcaactgatagacttacgaggactgcggttacatcctgacacacgcctcccacctgccttgattctgcccctggcctgtcgtagtttcctgtgcccatctgtatttacctttattacagaaggggagttccaagcttagtaaccagtagccccttggagtgatactaacctttttctacagctgtctgtatgtgagtcatatatacagtatttatatatagagagagtgttgaagactcctgaattccctgcagaccctcatgaatggggggaagacccatgactgggtgttactaacccatatagcgcttagcaatggacacacagcctgaagggaaaaggggtgccaagtagcacccgcctaccacacaaacttaagagtgacttctagacagatgcaaggaagttggattgcatttttcttctacttttattttgtaaggtattctttttagattgaggggttggatgttccagtgatgacaactttcttctttctgggtgtcttccaaaccatctcctgggacttgggggattctggccttcttttcctggctttgagaggtaaaggcttgaccaagtgcacgtatttgtgaagccatggatatgaagaggatgcagctgtgcgtttaagtgaataacagaaggaataaacggcagacatactcgattagtaatcaagctactctctaaggctactcccagatcacagagaatgtgtatgttccttggccacaccaaagaggcaccaccacagcaaagaaatcccagaactgcacaacaaaaatatatttttggaaacccaacttccaaaaaaggcatttcttcttaccttacccaaaagttggggtttgggcaaatgtcaatcatcatccaaatgataatctctcataagcaatgttttcatcttacagatttagaagtcaggcagggtaaacaaacatggtgactttaatcttgttctcaacaccggtttttgaaattagaaataaaaaaaaaacctcaaatgtaaataaagaaaatatccaataagagaaaaaaaaccctcagcatattttaaattcccaaagaccaaaaattattttaggtatatatacaggattacccatcatgagatcttacaacttaatcaaacctacccattggacctacccattggacctctcctatctcctgctctaagtcaaggaattcagtgctccttgaaagacaatgaaaaataaaatgtcctgggccataaaggataaataaagtacgttgcagccagagcttagaatccagagcagagaagtttgggcttgaattctaccccaacatgttcatcacgtgactatggtccagttacttacccagccggacggatgatcactggctagatggaaggtgatattaagcaagggctcagatgatattgtgccggacacatggtaagcgctctacaaagtttagctattgttatatgaagaaaataatccccaagaagtcaaaatatctcatgaatttttttttaaaaagctgatttctaggtgaaaactacacaatgtctgagaaccaatgcgctgagttggaaggagaggggatcctctcttggaggcgtgggctcatcctgaaagacaccccacctgccctcagttgctgcatacagataataatacctgaagcatttcacagatatttgaattctcctgtttggtgccagccccctaactggactctctagggagttatagaaccttgttctctttcaaaagctgcccgggtaattcctatgtgtagccaagtcactgactaggatgtaataaaaaaggttgacttgacgcaacacattgtacactttttcttcccgaaaggatgaggatttgtttacccagaattcactttctggttgctccctaagctttgacaactaaaaaaggcactaaatcttcactacagatgttaacttttgtggccatactattcatagatacatcacaaataaaagtaacaatacacctgccaccaccaccacccccccaaaaaaaacttcatctttttaaaagctgttttaagttccagtatagtaaatgtcccaagatggaaatgtctctcaagcaagagcccatccttcccttcccattcacacatgctttgtgtggaagctcgtgtcacgttttgctttcatatgcaacagaattttcttctcagaacatgacctactaatagtcacacagatttgatcttcatgtactcccccttctcaatctctctctatgtatatgtatgtatatgtatatatgtattttggtgcacagaggggtacatatatacatgttagtttgtgtgcaaaatatataatgtgttcagtgtagtgaattgtaccccctaaagctcacagcttttgtctttgaataataaaaacatctggtaagtattaatactctactgtgtaactctatattttctatgagaaaagtttactgaacctctagatgccttttagcatatattacttcatgagcaaaagtggttctcacctatcagagccaacctaaaataaagaatagcttttgatcagcacacttattcagattgttcatctgatcagaattttcctttaactgtttagtattcctaacctatctaaactctttattcacttcttagagagtgctaaaaagaaagatgttggtttttatttcttcattcactgtaccagcccccctagtgataatacttctctttgtggggctcccagtctctctagcctgtatgactacaattgcaaaaactaagagttgctcagtaacacattacttagaatctggttctctatagcggagagatacttcgctccccgtgctctcttgcttacaaattctttaaattaaaaacataagagccacaactgcagttgggttaagaatcttttttaatttcatacattttgactgggttttggtttgacttggctttctgtttttattccttgtcatcttagaacaaagttgtatatgggaacataatacagtcttccccaacatatcttcttggccatgccctaaagatgtaatgttgatcaatcaactgaagaataagtgccagccaacttgctgtgcctttctgaacgttacagataccctggatgaggagagaggagtcaccctgtataggctcagggctgtggacaggactctctgcctaagtggcaacaggctacaaaagctctgactcagggagaggaaggcttccttcccccactggcctatcagtagagcaaggcccatgccccagggctctcatctccaggtggtaaagctacaataaaacctcattaattcaggacaaatacttagaatctgtgatgacttggttgcacctatggctattttcattattcttaagtaaaatatttagcataacaccaacactatggtaattaagaagtcgtttcttataacttggagccatgcagttcttagacctacaaagttaaacttcccatctttttaagtaacaggccagtttatcaacaaatacttagaagttgggaaaatttttaagcattctgatacattcacatactaaactcactctgtgagtgccatctactttactacccagtcacaggcttccttcagaagcaataaaatagctctagaaagtccaacaacttgagctttttggctaacggaacagcttctgcccactcccattgctctgaatcagtgaggttttactgtatattacgttggaaacaggaggtgtctagttccaaccaagccatccttaaagaatggtacatgacttgattttttccatttaatttgcaaaccagccacatgttgataaaggagaagtaagtaatatgaaatctcatgaaagaagagaggtagaccctctgctctgcctcctagtggctgttagaatcccccctcaaataaggaatagattctcacagaagagcttggccattgaacaaacccttccatgtatagaactatttccataatcatccttcatatttccaaacactttcccatcttttttggtgaatgctccggaaagtgtttccagtgtgaatactttacagcattgagtgggggggtggggggacaagaaaaggctggcaatgtttgtttttctgctctctttgaaatcagcaaaacagggcctattgacaccaccactcattctgcatgcctcctgccagaaattattagacgacatgcatgcatgcctttgaactgcattcacatctggcccaggctgatgtgaatgtcacccctgagaccctgcacagtgatttccaagggctcatgtgcatgaaaatgagttacttcactgatattttttggttttcaatgtacatatgtctaagccccacagaagtaagttctaactttcttccatgttccttaggctaagcctgatatttcctctcgaccagaagcaaaaagcaaaggctccctactgagatagactttttactcaacagttctgtagtaattctaataatggcttgctttgacttagtttgagggaggactaatggtttcagggtataggaaaactggaatttctggggtttgaagagaccacagacaactaatccccagatagagaaatggaaatgtacagtaattacaaattttcaagttagaccagcagaaaacccataaacacagtgaagaaactcccaaattttataccttagagcaagaaccagccagcagcaatgacacagagcatgacccaagcctactgagttattgtaaattgagcagaagttcatccgtgacctctgacctctgggtcaggatcaaggctttctacacagagtagtgccttggacactgaaaggcccactcatatccaaactgctgttctctttacaataaagtgaccacgccccgctgggtgtccagccagtcttaaggagtgagggttggagcacgcagccttcatcctggggagatactcacccctctctgtctattgtttttctgccacatttcaaaggcctttgcgtggtggtcagacttaatggtggagcatgcggagacgttcctgtcactctttgcagtggacatggatgcagccttagaggtgcaacccccagacacgtgggacagtttcccactcttccagctgctgaatgactttctccgtacagactgtatgtatcaccctagactactggcctttactgaatagtatgcagataaacttgttgctaagatatctttatttcatataaactgtgggttagatcaagctcttctttgttttactgttaaaaacatacatatacacataaacactccacacacatacacacatatacatgcacatacatacatacacacactccacacagacacacacaaactacacttcacacacaccctctgtacacacacaaacacacacacacaccacatacatacatacatacatacatacatacatacatacatacatactccacatacacacaaatcctaaacacacacacacatactacactctacacacaccatttgtacacacaccacatacacatacatacatacacactatacacacatatggagagagagagagagagagagagagagagagagagagagagagagagagagagagagagagagagacttaactgtggatagcagttctcttgcctgtctttgagaagaatccaagagctgtgtgggaagaggtattcatttcttgtgttttatttactcttcataaaattggttagtttaacctctttaagcttttcaatttttaccagatgatacttcctggataaaagatacctctggccaaattacactgcaagcatcttgtagcaatgtcaaccataaagcagtccttcttacgggagaatgatgaaggaggggaggagacaaggaacgttttttttctttctagtacctagccagcagaggagaagtaagaggaaccatttacaaatgctgtgggttgatgcttttcatagaaatgcacacatgggcaacatgactttggttcacatttcccttccacgtggattcaagtacgatttgtttcctgcttttgtctttttgtttctttcagtctcctttgaagcagggtgttgtatatagaagacaatactctctgtgtgtacactgtacttcgaaaaaattgctctgggttctgacggagattttgcttatctgttctagataatttgtgcaatggaaagtttcacaaacacctgcaggacctgttcgccccacttgttgttagatatgtggatctgatggagtcctccattgcacaatctatccacaggggctttgagcgggagtcatgggagccagtcaagtaaggaaaactgcttttaataccatcggaattggggtacaaatccatatagaaatggattaacgatggcacatggctatcactgttagtgtgaatagaaagcaagcactgttttatttcttaacatggtactggtggcttccctgactgaatgggataaggagaggggtagaagtatgtttttatgaattgaaacctttgtgtcacaaaagatacagaggactgagagatgtaaccatgggtgtgttattcattctgttcgtcttactcaaacgctacttcccacagtgttttccacaaggtactcaggagagaggaagccccgaccacagtatacaagtttttatgggttgcacatcacacaggacaaatcatgagagagtctgtatgttgtaagcttgttactttccactgctgctgggcaacctcagctattgagtgtatttggcagacccagagaacagaggagcaggctgtgcctgtggacttccaagtgccggtccaaatatcctggaaatgacacccctatatgaagggtgtgtgatatggtttgaaaagctctagtaaaccctggctctgcctttgccctggtagacactagttgtttgggcacccaccaccaccacttctctaacaaatgattttgtgctctgcagcactttacatctttgagatgtaccaacctagaacaaaacaggcatatatgctagaatttttaagaaacccagaccttttctctcaattggaaagaactcaagagactttcctcaatacagaatccttttctgaagtaggtttttaaatgaatattcctataatgtcaatctctaggcaaccctgactgacacagttccttttgtcccctcccatagttaagtcacaggacaattgctttgatttgcccccaactgaacgcaggtcaatagcccaaagctcttggtttgaaggaaaagagaagtaacggttctggtgacttttacctcaggtgtctaaaactaggttaagcgggtaaggtattcacaagggggaatttatttatttattggtcatagtaatcatggccattgtgctttggagaagagctgtgaagagaaaaaggcttaaaggagtgatatccgtgttttgaaaatagcaatggtcttgaaatagcatttccttgcttgggttgaaatgtggaaggttctattgccaacccagaggaggggaatgatatcaccctaggctcttaaagagccatagatctggggccttgccctagcaggaaggcaaggggttgacttctaggaatgtgttttctcatcattaaaattgattctttaaaaagttcctacccagggcctgagacttgtcataaatttctgtgaaaatgtcactaaagtcattttataatctgttaacttcttcagaagccaaacatatgactgctattcatttggaagcattcagtgttctgagtacttactaccagcagtagagatagaattaaaatcactttcacaattggagtcatagtctggaattttttttaactgatgatattggactcatggatccataatttaaatgcctgaaactttcaaaagagtaagtgttatgaataatcacctgagacagatgtggatgtggatgttggtgggagctgagggggaaggaagtgaatgttttactgtccaaattgtgctattgttagtctgtggtttgttcagctcatattcaagcgtgtcgtcctttgagagtacctggaggtgtttgaaaaggccgtgtgaagcataagctcgattaacactccttttaaccacacaccaattggcttagttttagacagcatggatgctgtgtggaagttctgatgcacagcagggcagtaagagtaaaggtagattaggacatatgggtatatagagacaaagctctctattcctctaacaatgcaaagagaaaacagggagaacacctttgatacttgaagaagatcatccctcttccttaaacaaagatgcctctttcaactaggtgttttatcaaaagtaataccaacaaaaactttcagaatcctctccatcaggctccttcctaaactaagaactgtcttctcagttcctgtcacatgactataagacacacaaacatccatacttgtgcacacacgtatgcatacacacagagatgaacgtgcatacacacatacaatgaatacaagagataaaaagaaaatacatgacaaacagtattcatctttcatatttctttgtatgcaactatttccctatttaaaaaattaagtacaattgtctgagcttaatataatggaagttatttggtagtataggtaaatagctaagtcttaagtttgtttactttgaaaactgagaagagagagattgtatcttactcactcactctattattctgtggatgctgatgtggaagcccattgcacagcttccaactatacccaaagactctttcaagatgcgctcaagtgttcaatggaacctcaagccatagcccttcctgagcacccatcagggcataccatagggtcattatctagagttgggagggtagtttgcaagtctggcagccctggatgtgaagtttgatctctgtacatgggtgggcaacacctcacccagccatatagtgatagctcattactaataagccataaaggtcttcaaagtagaagaatccaggaattcttttctgtgtgtgggtgacccctctgtcttttcttggattcttctaagagtagggctttgtggtttttttgtgtcaggttagggaggctaagaagagtaaagcaaatgctactttttgataaataccataaattctggtttcctagtagtcaaaatacttgctgctcctctgggcctgggatatacaaattaaaagtaccttttaattaatacccactcccaataatgaagatgtgatagtaacagaaagtacctcctctagggacttcagcagtttgtgggggactagctgtcaaatatacagacagatattattgaagctagatctcttgactctggggccagtgaaatgactcaggagatatgatcctgtgaacccagaaagtttgttggccagaccccagggaaagacagaaggagagctagttctacaaagttgttccctgatctccagacacattgcctggtacaaggggacacaaaatattgatcataatcacaataaaattaaaaaagaagtcttaagacaatacttcaattcaaaagtgtctctgaattaagatcctttctcagttgactttcccaagactcagtgcccccctttataaaacaatggcttttgataaccataaaatttccattgctaggattcgtggtaataggatgtggacatgcttatgcatgccctctcacaactacgcactctcttctctccagcatctagaacagagcagggcttggcacatagccaggctcagctgtatcagcagagtgtgggcaacctgtacaggccagggattataagaatacaagagcaaagaaccatagagatgggtgaggaaaagatgcaatctccagattggcgatttatatctagatgggtctattaatatatagagaagaaaaatggctttaaatattaccaaagtatgtatgcacaaatcgtacaaagagttgtaagaatgtgggtcgtaggggcatgagcttccactgaagggtggggatcgaactgacttcaagagtagtatttcaaaaggggctgggctccccaggagcatacaggggagcagaacgcaacaacacaatactgagtatttggtgtgggccagcatgggctatcagtgatggggcaagcctcaaggatgcttgagggttctcaaatcctaggacatttagggtttattctgtaaaggatgctttctcaatggggcttaatagtcccaaagctgtggtaaatgatcttacagttgtcatatagaaaatgtaggtctacatacaatacataagtagataaatagtatatctgtggcattaaaactttcatagagataggttaaagagatgatatctccgcagttaagaacaccagctgcttttccagaggtcctgagttcaattcccagtaaccacatggtgacttataaccatctatgatggttctaatgctcccttctgacatgcaggcatacacgcagatagagcactcatatacataaaataaataaatcttttttaaaaaaaagagcctacagacattcatagagaaggaagtttgaggctgggcagttatgaataacaggttaggagacattactctgggctctaggaaggtatcaagtaatacccgtatccctgagtgggattagacctaagggcaaacacagagaggagcttcaatgtgagaccaccaggaaaagacagatgtacttcatatattcatgcaacaaatggcttgtaaaagtagaacatgttctgtatctaaaagtctacccccatccataagcttaaaccagaaatacttgagggatgatgtaaccatatcccttccacattgaaacagtcttgattaaaaacaatgttatgaaaagggcctcacctatattcactgccatcgtagaaataagatgcacacatatctctaacgtaaattgacatgagagagagcaggtgagaattttgtaatctcaagctctagagagttaaatgaaagcaatcctttccgttaaggtccctggattagatgaggataatttttaacgtgtatcagttactaggattctaattctcacttcttgtcctacccagagacatctacttagagttcttacagaaaagcatgaatagctagctgcttgtccagcagtcactggagggctctctttgaaaataatgattcattatagctatcagcagctcgcagagcagtgcatcgtaactgagtgctatgcaaaatcttcctttaaatatgtgatagtgaaatattatgcttagaaattacctctggttgttactcttttagtgtcccagataaaatataagtaacattaaaaatatgctttattattctgataaaactagaaatgtcctattttatcgttttaaaactaaatcattaataatatgtgctatataggatacaggtctatttaagcccaagttcacagccaaaatgctgtattttataaggaaacaatttgttttgattactatgagtatttttattttgtatgcaaagcgaaagtctcttcccatttgtgtactcaccatgcactaatatgtttaaattaagttgcttttgcagacacttgtatgttattcatttctagctacttataatttgctcagaattgacattttaactttccaggctgccatctctaagatctcctaattccttgatcattattcagtgtgtgtatcgtttaatgatcacatttgcttatataggcttacacatgtctcagtggaaatcgcccatggatttgtttcatggcagtgtttaagaccgagaaccaccagggactgaattcaaaggcaaattccccaattaaacagagacacatggaagagaaagttccttttttttcccccttctatttaatagtaatatttagctccatttctcttgagttctccccacccccacgcccaaggcatcgtcccaccacaggaagtcatgggtctgtgaaacacctatctccctgaaagaagaggatagtgggttggcaatcgtgcattctagggttttcagtttataatccagggctgagttgccatagggaacatttaaatgacttatttgtggaggaagacaggcatctaagccattcaccagggccagcgccttcgctgccgctttgccctgcagagcgtgcccagaggcagcctgtcctccaggagtcctgctaggcaaacagctcacccagcgctgctttggcgaaacttcctccttccctacaagatccaaaaagagaacctcaagtcctctgccaaagtgctgtcaattcccccttaaacaggaaggctcctttcagatgcggagctaggctgggctctaccatgccagtgactttggctgcatggaacacccttcaaaagcctctgcaagatgttcagtgccagtgtttggagcagtacatgacacagaccctccaaagaaatatagttgatttgactcaaatctctgaacatgttctctctctctctctctctctctctctnnnnnnnnnnnnnnnnnnnncctttctctctctctttctctctgcctctctcccctcatacaaaccatccatctctcattcatcactcaattgaactttatacctccttagaaaccaaaaaactgataaaagcatcgctatttcatttgttttcacaaattttaaactttctatagaaaaaaataaacagctcatgaaattttcacacacactctggagctcccagtcctgtgaaagccatgccgaggagaagggtcagggtgcctggctgcttcaccagcccagagcttttgtccagttcctagaatccccataaaaatgctggagcactgtggaaaagcatgggtcagtccatggcactggcaggctaagtgctctcatctaactggtaaacatcaagccaatgggagagtttgtttcaaaggcgttggacagcaatccttggttgaccattctctctctctctctctctctctctctctctctctctctctctctctccctttcccatgcacatatatgtatttaaaaaaaaacaacaacaacaggaaaaaatagccttcccagaagcctctgtcaggcattatttattcctggctgtattccattccccggggcagctactataatattaaatgatactgtaaatctatttatttgacccaagggttctaagaaagacctcaatctgggctccttttctttccatgtgtgtctgtctctgtgtggtggcatatttccattttaataagtctgagtttggggaagaaagcatccattttccttcagcattccacaaaattccctggggataatcattcttctatatgagttcttcatgtttcccatccattctgacaccccttgtatgaattcctgtctttagaagtagcagttggaagacattcaatttctatatatcactattacaacacattcaaatcagtgagccttcctttcccatttggtgtctaatgtctgcctgaagaaatcttcccttgacagtaagttacaaataaaagtgggcacagctaatgccctgcaccacttatattcttaagtattttggtagttttcgtttttccttaaatatctttattctttgaaaattccatacatgtacacactgtataaatgtattttgggttgcaatctactacgtacacacatttagaaggtgctgtacaatatgtggcttcatgtgtgtattggtcagaggaccaagtgcgtcagctatctttcactgtgatcagtgttttttgatgagcacactcctttcctttccattgggaaatgtgacaaattatcaattatatccactgcactacagtatgaacgtgagtgctggtccaccgcacccctttaccttctctcctgcctcgccattctatcaatcccactgtctcatggcaccccagttccagccatggtcagccagaattcctccaacatcaactcttctgataagacaagctctagactcttttgaaagtggtcttgaagacaagagttctctgagacatttcggttatgtgatcattgtgcactcatgctccatcagtgtccacacttttaagtttaccattcactttactaattccctctggataccaagtcccatcccagcctgtaacctgcttacaaagtgtgttgctcaagtctccaccattgtcttctgtgtacttagccagtttatttacagctgttgtgtgcttctgccgcatctacattgtcactgtgatggtatttttctttctgtctgtttcttccacaggagtttaaccagtaacctacccaatgtgaacctacccaatgtgaacctacccaaagtaccaaatctaccagttaacatccctctaggcatcccacagatgcccactttttcggcaccgtcatggatggctgctatatatgatgctgagtgtgtattcagttcacattagatctcatttaaatttaagtgatcttggcatggatatgtattgcttatttctatacatcctatataacagagacggagatggataattagacatattttgctgatcatgcagagacaatattgtttatttctggcattcatcgtgtttataagacatttgctatatatatgcagtaacgatttgtctaacacccactgaacacttgaggactgtgttttacttcctgaattactttgtaagagaatttctaccccccagttttgaatgcaggggtctttgtgcaggactttatgcttttcaaatgtaggactttaggaattattcatccccaaataatcaaagaaaattctttgatgggcttaccagtcacttctgatctggagcaagtctacaaaagaagcttgctgacctaagagcatgttttgttttgtttaatatttaaatatttttcaaggctgattaaagccataaagcattttcctggtgccagtaaatagcagaatatccgaatggaatgttcagggccacatgaaaatttgtgaatggacctcccagactaggtatattataggtatagacatttcccaaagtcaaagtacagtaggaagctttgacatctaggcagcaaggcttctgaacttgaatgtgagagtcaagccactcacaattacagttgggcagcgatgtgtctgcgttctcagtacagactcatgttttgcttccttcatagaaagtcagggatgtgggaggtatttttgcctagagcctcttcttccaaacaagcggtttaaaggacattgggattgagtggatatttctcctcacttaggaagtgaatcttctctccgttttccttagcaagaagatccagtgcccctcagttctacctcggtgagatgaaatgaaaaccatgtgggtgatttaataagtgaaatgaggtttaccagttctccaccttcctttgatcctccgctttgaccacagctaattataggccagataagcttttccttggaagaataaattggcacattttcaaagggaagtgttattatcaaaggaataaaaaatgacctgaaactggcagggatgttttgaaatctccagttctcattcatcaaggtggcccttggccatttcagatccacagttaatccagaaggagaatgggacagtaaaatgacttctcaacccagtgccccaaaagctccctactattttttaaaactagtcacacaaaagcccaaagtgaaatcttgagaccaatgggtctgattctcttctagatacaaattcaaacttccaaattgttcatatttgaggaaaaattttcctgaaaaaaatacatcatattcatgctaagatgacaatattacaagttcaattagttagtgtctgtttattagattagatagtgtctgtttcaaattaaaaccaaatagatgaaagcttctcttagcttgtcccgtgcatgttctgtgatactgtttttgaaaagatatgaatcaagacattgtgataaagcagataatagcctccattcaattaattaaggcatgggtgggaacacattttggtaactgctcagcaatcaaaataatcttggtgctattgccttaacattaacagtttatcttaaaaataaaaagaaaatattcttttcctcatgtcaaaacttaataataagctcttcaaagaaaaaaaatgctacaagaattttttgaaactctgaaaccagatgggtgtcaaaatgttgttgtaataaataccaattattgcattcatatgtacttaatgatttaaaacataaaccatgcagttccaaaacggggcttagactagacaaagttggggtttcttttttcccaagcatggggtggggtggaggaaggctgaactttcatgaagaggagtgcattcccccactttcaaatgaagttcactgtagtatctaaaaaaaaaaaaagtcatagatcctcagtcgcccactaggaaatgcctgattcgatatcttttcatgatcctggctctttcctctgccacctttcattttaaggacgtgtttccatgtcacttgctccttcgtgtcagatacatctccgtactgacctcgaactggtctgttctgaaagcattgccctgttggtgcaggccgtaggctctggctccctctcggcatgctgggaatttgtcccctccccaccctgcagtagctgtggatgcatctctgcactagctatatttctctctgaggcattaattcaatgcagctggcatctgtcacaatagaaacacccactctcgtctgtttctatagacgatgtcagaagaagtggtaatgcatggtgtgttggacactttataaattactgtgttagcattagtggtatgcgaggaagggggtagggggttggccacccctcagagttccaaatggggtgattacaaaggagaaagccagcccaagaaggctcagaatggaagaggtggaacacttcccatgtgcaggccttccatggatgtaccaggtaaaagtctcttggaagtcatagtacaaaaaggaatcaaatcccatttccccagatctagagaggactgggaacaatggggagagcgctcaggtttggagacctgaagtatcagagatccactgtctactcactttgtctgccccaactcccttcatcctagagctgcctatgtaacaggctggtctaggaaaattggaaggctagccactggacaggactttgggattcaaggtatccaagtgtccctgtctctatcagagtctcctcagtttttttccagctcttcaagagagaaagaaggtcctcgctcaccactttgttagcactgtccttttgaaacccaagtcttgtgccatttccaagaggtctccattctggaggagaactggggaaatgcatgaagccctggatcctaataactgcatgttatcatgtagttcttacccatggagacttactcctccccctggtccatagccttcgtctgaatcatcacatatgctaatgtggttattaaaagaaggctgatttttaccatacgatatcttcctactcataaggagacaacaacctcttcagacatctcgctggtctgaagcaattggctgagcaaagtgaactgggtcctgtatggtaaaactcaagttctgccagtggagattgccccccttctgccaccaacacacgttgtttcgtatgtggaagccactgtttgccttaagcctggagccccaagttgtctctatgttagtttctctcaagcccaagacaactgggtgactttttatttctaatttttttatcctaccagtaatggatcaggtacatcagaagatttgttctggaaacttgatgcccttcagactttcatccgtgacctacactggcctgaggaagagtttggaaaacacttagagcagcggctaaaactgatggcaagtgacatgattgagtcctgcgtcaaaaggtaggaatgagtggctggaaagcctcagtctgtccttcccattgtgcagccctggaaagaccagtgagcccatgacaatgggctgtgatttgtaaagttctagagaaggaaatcgctagtccaagtcagctcccgtaaagacgggtatagtgtaaccccagcactgaggaggcagaggtggctctaagttcaaagcaagcctgggctacatagcaagaccctgtctttaaatatgaacaatttttaaaagtgactgccatatgcagggatccatcccataatcagcttccaaatgctgacaccattgcatacactagcaagattttgctgaaaggacccagctatagctctctcttgtgagactatgccggggcctagcaaacacagaagtggatgatcacagtcagctattggatgggtcacacgccccctaatggaggagctagagaaattacccaaggagctatagggaactgcaaccctataggtggaacaacaatatgaactaaccagtacccgggagctcttgtctttagctgcatatgtatcaaaagatggcctagtcggccatcactgcaaagagaggcccattggacttgcaaactttatatgccccagtacaggggaacgccagggtcaaaaagggggagtgggtgggtaggggattgggggggtgggtatgggcgacctttgggatagcattgaaaatgtaaatgaggaaaatacctaattaaaaaaaaagttagctggaatgcttagctgcccacactgaacatctactaatctgctctgtatccagcaataaaactgtttggctgccaatttgtcccattgcaagtcccatgaggaaaggaggctcaaacccatactttttcattcctatattcctgacatctagcatgtctgccacaaaatagccacacagtaaacatttataagtaaatgggcatggagaatgcacagagaaaaaaagaaaatggacaggaagagaaaaaatgtgcaattctagaaatctaggtgactgaatttccaacaaaagctaagcatcatcattcactctgtgcatgtgagccgagcacctggcatgtgcaccaggggttaattttcttgccctcattctaaccaagaatcatcatgaagtcacgagacactgcacatgtgctttagcctccacagagttccctttttgccactagggcttagggtagaaagtgaatccctctgcatgcaggcctgaagctggctggtgtgagctggagaagagaagaggattaaaaaagtctttatccattaagcaaaatccactggtctgatatcatagagcaggcccagtgctgagtccttggcatataatggagaaagaaatacacctgtcaaaccagcagaattcacatctgtatttgatatcatcaccaccctgcctatccctcaacacacatccaagtttcttttctggtttaaaagtatcccatttgttttcctctttccaaaaagaaaagaacaagggaaaaattagaggaagaaaggggaaggagggagaaactaacccgtaagcaatcttggcttccccgggtctccagatgttatgtactttagttgatgaataagttgtgtgtggtggtggctgggcttgcttaaaagtgctatgaatccagcatttgataccctggaagaagaaaagagaaataatgcatcaatcctgaaactgctcaaggcaggagagcagtacgactgcaggtaggtaaccagcaactcagtggacccaggaaagagccctgagcttgggggagactgagcaggacttgcccttctgcagattgaaagcctgtgcgattcaggcagcagattttcttcttttctgcccacctgtagaaccaagtacaggtctgattttcaactatatggtcaaatttttccagtttttaattctataacctctaatagtctgtattaattttaggcaaagcaattgctgttcatgtgaccaaaatctcttcacagggcaactttttgaggccatctattccttcctactatctcatacaggagccaaagtgagttagtttaagaccttgcctctcttgatctttgttccccatctattcagaaaggtatttatgtccgtcagtctgaagccaatctgctgaataggggagaaataagagaaatacagagaatatctgaggatgggaagtggtctcattcctcacagaccacatcattgttatgttcaggcatagaaagaaggtaggtgactaagaggcagacaatggacctgaatccctgaacactcctcacccccaagccacagaagtctaccaggaacatagtagctaagtcatcttccaatgtcaggactcctatctaagtatgggcacataagtatgggcaactctaacattcagacattcctgctgcttcttgctgtcaaggctccaaacataaacacaaatgctgctggaaacatcccctgacttggcttttaaggcatagaatatatgttggaataacatattatttctttggggcagaataaataacctttgttctagagccacatggtaaggacagtgggccatggctttctgacactcaccagacagtgacagtgcctctggtctctatccagtctaggtgcaaagcataggcgctctaccctcaaggagtcaattgggttaagtgacgtctctattcctggctttgtggacccgtagaactctctcagtcacattcattttccacatctgccttcctcttttcacagccctgcactctacaggctaggaacagttctcctgtgaagagaaatgtgaaaagggaagacgcttgcttcattggaaaggagagctttagcatttccatttctcagattgggccggaactagcacataagcctcagaagatcatcacagggcccagtccaactcagtacccatcaggcctccttttcacagagctagaaaatgatgtattttcagcagagcttaaaatgatcatcatgattagaaagctacttcagtgcactgagtctttaggagccaagatacatttaactttaacatgatcatataatctataggggtgttttgagggtgttttttccccttaggaactgggcttccaaccttagaaattatacttggcttccctacatgcacccagggtgtgctagcgagctggcatcctttcctgagctaactagctgtgtggtcctcctatgcaccaatagaaaatagctcctgattcctcttaaagccgtgccatcctggtggctgcatgagctctggaaggtggcagtgggcaatgcagagaagcaaccaatgtgctagataacgggcagacgttaatgaagccacttatttactgagtgctttcccaaaggatatgtgaggatgcgacccacttctctgaaacctttaaaacagagctgggtccccttgcgaaatagcagtgccaagacctatatcaacattatgttaaaaaaaaaatggtcgcatggagtttctgtaatatagttgtatgccaaagaaattactattgctatttaattatgtaaaagaatatctacttactaaaaaatagtaacaatggtaacgaaaacaaaacaaagccaaaagctacgccgtgagtggccatggacatggcttcccatccatccccaaaggcagccgtttccatggattgatacattttcttctaatgattctttagcaagctcaatctatttttttctactttttcaaccaatataataacaattttggacttcaagaatttttaaatttcttttcaaaaccaaaagaaaaaggaaacaatagtaagggtcatttaagctttttctccacactggagttttgaagatgagaaactgcctgcttgtgtttggttttttaagtgaagtgctcgaggtaggcacttgccaatgtgagagaagctgcatatgttgtaatgctataatcagggctttttttttaattcatttattctcctacaattagggctctccataccatgtaatctatagatagcacatagagctacaggtgttctgtgaactgctgaggaagagtgggtttaaagaagccctccttagatgcacagagatctgtccacacaaagaagcccttctaagaaagggaaagtcacttgaaaaagaacgtgtatggagtcattttgggttacttactacaaccttcaactttcttttgcactagcctctcaggaagtgtctcctctacctcctgccatctgaatgctgaattattctatccctcctttgttttaatagaaccaggattgcatttgaagttaagctgcaaaaaaccagtcgatcaacagattttcgagtcccacagtcaatatgcaccatgtttaatgttatggttgatgccaaagctcaatcaacaaaactttgcagcatggaaatgggccaagaggtaaaaataataataataataaaatccttccccctccctcactcctcccccctcttctctctccattgatcatatacaagaaaacgtcacaaatttcttcccaagtctgctagttttagaaatacattcttaatatttgcagattaagccatggataagtgttcagtatctgtcaagtcaatttctgaggcacgtgctgatgagcgtgccagtcacttggaagtagttcttggctggagttcaagtggttgtaaggtttctttaagctaaaggatgtttgatgaccttatttattaggccattctctgtactagatatgggagtgtccgaatgctagtctctttccatgagtagtacatcttagcccatgaacatgtggctagcaggagaaatccaaccaacttcaagccactcccaagctatgccagtaggttctgcaagtccaaagcaattttcaggctttcagttttccctagaatgaattgattgtgaatctgccctgaccagaagtttattcctttgcagagtttctgattctaaagtcagatttaaaacgtgaaggagaaggaagcagcaacttggacttgatcaaagacgatcatgatcattttcctccgatggccttaagccagctagatattcatataccaatttagaattaattcagtaacatttctggcaactctatactgttgccaattggcataaattgctcctaaatcagatctttcgataccagccttacatgctcagaatttttactaaattatatttgctccttgttcgttatttattttctctttcggcaccttccattttatatgtgggttggtggtgttctcttctggcaagatctcctccaaccttgtttcccccacaagtgagcttcctcagccacccctgctagcttctgctctagctgatttcctttgagcctcccccatgaagttaaagctctaggcaccagagtcaatacagagccctgggttctcattcccaaagcacctgtgcaaaagagtcagaaaacttctctacaaattcattgtgcatcaaccatccagaattccctggagattcatatcatagtatttcagcttgtctgggctgtgttaaaagaatctaaacttctggaggacaattcttgaggaatgacatccaagatatcctctggcatcccccacacatgcatgcaccagcacacagatacaaaaatgagcacatatgtaccacacacgtacacacatgcaccttcatagatacataaatgcacatgttaccaaaattaaaaaaaaacaccccacttacacacaggaatttaggcttctgtggctatctctgatgaggatacccacattggtggcaatcctagaagacacaacctagaagcactgatctgaggctcccagttgtctgaaaatgagacacagagagagagatgttgaaacaatgggaagggtatcctaggttgccagtcacctggaaaagtgtcttgagttgtgctgcaaactggacttggataatcctggcagcctctttgagcctcagttttcccacctgtaaaatgatatcactggtgtacttttatctggcctactctagctgcagaatcagtttttcatactttatgcagaagcataacacataaaaatatagaaatagagttgatctggagggggggtcactttcctctccaccctagagcctctacacactatcacttgcccacgtttacctgaaggattctgaagttcatggttttcacagagtccaccttgcaaatcttactgtgagatctctaaatcatcaaatctctctaagtcattaaagataccgtttcagtttatgcttctgggatggtatcactctggaacctctctccccttaaagcctccactgcttgtgttgttgttgttgttgctgctgctgctgctactactactactactactactactactactactactactactattactgttgctactgcttcttaaatcatggaggtataaatcacattcatataggatttatccttcaaaagtatacattcccatagctgtcttcccatagcagccatcacagtcaattgtatgccatgttcatggtcttaaaaagaaaccaatcatacatcaatagccagtgttctacctatattcccagttctacgttatcttcaacctatattcttcagatgtgcctgtttctgtttattgccttttacataataaaaaccaagcaataggtgggtggtaggtgtctgccttctttcacttagcataatattttcaagatccatgcatgttgtagcatgcactgttctttctatttgtgattaaataatattccaggatatatatctttgaccaattgttagcttggttatttggtatatatatatatacatatatgtagagagagagagtttttctaggcataatgtacatgtatttgcctctcttccattctgtttcaatattttttaatatatacatcttctgtgtgctatagtatccttcaaaacaagaacaaaaagaaagcaaagggttttttcttttaaggttggagtccaatttgtaaatttcatctcagagcttttgagtatacatcatgtctgagattcacaagaatgacgccccccacccccgccaccgccacaggagaagagagtgaatatcataggtctgacctctctgcagtcataggaggtccaaggtccaggtttatttgctactgccttgttaaggtgccacactccttgaacaggtagctaaacaagccatgtcactctgagctcaggacaattgagagaatggggagacggtgagtttgtttaaactctgctaagaatctcatcaaagctatggatccatttcccaggaagcatttataaacaatattcccgtgcagtttcagggaactgatagagtttcttagtccaaaccataaatctttgataaagacagttgatacaatacaataaagacagttgatacaatacaataagctcacccttgtcacaaagactctgactctcatgatcaccatgaattatttcttgcctaaactaaaatgatctcggcttaatgttggagtgttgttttcaccaattgtccagggattaaatcactagatcctatgacccttcagcttatctctcaaactgtgcactcttgaacaaaccagttaccgttgtttattgagtaacacataggatccagcatgcaatgcattgctatttaaaactattccggcttttgacagtggagatccattcccacaacttctaggtataagattaaaaagttgtgacacttagcggttaaacactggaatgtatttattgtaggcatagagtttaaaagcaggaaagactgcacattttttctaactcagcacttgttagatgaaaatcataactggtttgtacatattttccccagaaataatacgcaaatacccaagattaaagacccatctaacactgtattctaatcttttgttctttacctaaggatatttgctcccatacaataaggcctatcgggattttcttctaaatataatgagccagcagcacctaagtcaccagtgtgtgggaagtgaagcctcctagtgtagcccaaaatggtcaggatgaaaccatctgtaattttattgcatctccatggtctgatatgtcaactgtggcctgaagtggtccatagtatacaaaatggtaacacttatctttaaagtgaaaggaggatttgagcaaagattgactggcaacattctaaaactgagataagcatacttggaaaccatttgacttccattcccatgtgctgtgcactctggaataccaaccattaagcctgtattacagacctagtttctaattctggctgccacctggattccgtctccctcaacctgttttggactaggcactagtgagcggatacagtctccagttttacaatcacttcctgagtttcatcactgggataaagtctcatctaaaggcagctgttgagacatttgttcaccatacttttccatcttaaatatttattttttcattaaaatttgtgaaataccaatagagaggaaattgtgtattaaatagtttctcacttggcctagtgtgttttcatctcgtttccaaggtcagatggtcttaacagaaagataacgtacacacaatctgttccatgacaaggcaaaatgtgcagcgcaggaagtcaagtgggatgcttttcccgtagcaggcctggattcacagtcacttaagcccatccgatgcaaaagccaactccccattcttctcatgccactgaaaacctgtgcttcccttagttactactgccatgacttcagggtgtgggccaagtgaaaccaaagaagccacagagagaattgaaagatgcaaaatctgctaggtagcaagtagaatgggataaagaggcaatttacaatgggtttcatgacaacagctagcggggaattgggaacttagaaagtccctatgcacatgtgcccacatgttatgaagcttcctgtttgcccagaacaataagttacccatagagaacagagtaatggaggaggctcactgtggttccagaaaagcaagttagtcaaataattcacctatggcaggaaactctggcaaaacaaggatggattttgtcattacctaaatagcaatggggaattctttgatatctagcacttagcaacatgatttacacagctagtatcaaggcataattgctgtgcagtatatagagctgagatgtgtttagaaaaatgtgtacagccatgtgaccacatgctaatggactttaatgtgagtcctgcgggaaatagtaatatgaccatgttgtaattctctctctctctctctctctctctctctctctctctctctctctctctctctctctctctctctctcatcaaattcttactctatatcccaggctatcctcagactaaaaattctcttgccttaaccttctcccaccaaatgttaggattataggcatgagccaccaggccagttctacctagcttctacactgtgtgttcatgtatattcgtgtactatgccagtgtttgggtaggtctatgtcaattctatatccagaatataattctcattccactgcaatggtgggaaagctaagcagcagagacactgtgctcaagttaaccctgaaaaagagaggcagactaactataacaaaacacttcactttagggtagaggatgcttcaggccagagagtggttgctgtgcaagcctaagaacctaaattcaatcctcattatccacataaaaagctggatgtttgtgtgtgtgtgtgtgtgtgtgtgtgtgtctgtctgtgtgtgtgtgtgtgtctgtgtgtgtgtgtgagtgtgtgtgtctgtgagtgtgtgtgtgtgtgtgtgtgagtgtgtgtgtgtctctgtctgtgagtgtgtgtgtgtctgtgagtgtgtgtgtgtgtctgggagtgtgtgtgtgagtgtatctgtgtgtatgtgtgtgtatgtgtgtgtgagtgtgtgtctgtgtgtgtgtgtctgtgtgtttatgtgtgtgtatgagtgtgtgtgtctgtgcctgtgagtgtatgtaagtgtgtctgtgtgcgtgtgtgtgtgtgtgtgtgtgtctgtgtatttatgtgtgtgtatgagtgtgtgtgtctgtgcctgtgagtgtatgtaagtgtgtctgtgtgtttgtgtgtgtgtgcaagtatgtgtgtgttagtgtgtgtgtctgtgcctgtgagtgtatgtaagtgtgtctgtgtgtgtgtgtgtgtctgtccccctatgtgtgtgtgcaagtatgtgtgtgtgtgagtgtgtctgtgtgagagagagtgtgtgtgtgtgagagagagagagagagaggagagagagagagagtgtgtgtgtgtgtgtgtaatcccagcactagggaggcagtcataggaggctacacttgccttcttagcaaatcaagactgatgagagaccttgtggacagctcctgagaaatgacacccaagtagtcctctggcctccacaaacaaacatttatgagggtacacacacaccatactttattttataagcaggtgaagatattttttataccatggaggtcataatatttatgcacagcaaaagggagagatagtgggtctacatactaatcgatgcatgaaggcatactgtgcctcaataagtcacagggtctctgcctcatgtccaaacggaaggacatgttcctcttaagagacagattatccccaatgaccccttagacacaaaacccgggcctgaccctgtcttcatatacaaagaacaaggcagtctgtttttaccctctccaccaaggtttttaaaagaacatgtttaatctcattggtactttttgcttggttagaagccccttgtgtggtatttcatcttgtgctaactttcatatagcagctcttctggataagcataatatcctagttattttaataaatgtgactcaattacagcaatccaaagaaagtctagtgaaacaactctgtcacgtgacaacagaaagtaggaatatgattctggatcctatttcaatagctaaaaatgaatttggaaccctgtcagtattcccgtattcttttgatttaacattcttctttgtgactctagtacagaattctgtgaatttctttttttttttttttaaattcagctttggtttatgctatttactagtaaactgtcttggagctagcaatgtggtcaacaagggttctgattcgtcaggacaaaacgccttgggccatttgttttgctttttctccagtcaactggaaggaggggaggatgccttggtgatggtgtcctctgcttctctaccctttgtgacttcttgaggcacttgaatacgtgataatgtttgcattgcatttacagtaggcaaaaaatgttttcacatctagatcctcactagatcttcaaagtcaatgtacgaatctgatgtgctcagggccagaaaggggcttgggcccttagttcttaagggacataagtaaaacaaacaacagaccaggaaagagcttgtcattaagtttccttcttctttattgtcatatttttatgacccattattgatacactggatgtcttcatatgtgaagatatagagaaatacatggaatagtcaagttgaggcacttaatgtgtccactgctttaaacacacagagagagagagagagagaaagagagagagagagagagccattcaactatgtctcttgtctctcctggttattttgagacatggagctaaagacatattcaccaggacttgcctctcctcttctggagatcagtatctgtattggtcccaggctcccccaggttcaggtcttagtgctattacctgtttacagataaggaaactgagctcaatatgtaggcagtatggcttctggcccttgcactaggattttatccagttcttccaagtctaaaacaatgcctcatctgcttgcttctgcccagtcaccctgcttgccagcaagcacgtttgcagcacattcctcctgtcttatttctgtatgtctgcacagccttgtaatgctttatttaattttcatctttctgtgtgtccttttgtcctgatttttatttgcactgttgctttttcttttttgttcctaattaatcctcctcctgaaagtttgctaaagagtgggtaagtgcatttttctttccaaataacaatgtttttgtattgttgtttttgtgtaacggaaatacaaaataattcaaatggatactaaaatgttctaataaatgtcaaggagctggcatataataacttgtgttgaaattgcttttccttctcccctggcatttatagcagatttttgtttgtgtgggggtgtgtttttacattactatttaaatttaatcgacagtgccagtttgaaaaaactggaaaaacttagcttcagtctaagcagaaggtcgaacctgggtctgcttattgatgaacagaataaaagggaaggggaaaagtgtggcttgtagcgatggttcagaaagagactctacctggcctctgggtcaagactgtagctaaaactgatgggctctgaggcatataccaaaaaataaaataaaataaataaaataaaatacttagcaggtttttataaaattggtgtcttagtcaagttccctttggagggatcccactgtttaaactacatcccccatcagatccccagaaataccattcctctcccagtgtactagattgctattgaatcaagctttgtataatccagttcaacacactgctaggccaattaggccagccatgtgtgctggggtgtatgtgtgtttgtgtgtgtgtgtgtgtgtgtgtgtgtgtgtgtgtgtgtgtgtgtatacatcaaaggctatctaaagccttagacgagaaacaatgagcctgctgattttttaagtgcttcgggtctctctatcaaagagaagtcagaatcttattgctgcttctaggactatggaaacagactggatctgcaggccaggctttatttatagattctgatctaaagccagggacacaatgcccactgtcaactccctgacatgctaatgtgtgtctttctgtcttctttagcatcaataccattcaaaaatagatgaactaattgaagaaaccgttaaagaaatgatcacacttttggtggcaaaggtaaccttcagcttcaggtggaagggggcactgtcaatgttgctttgttgtgtctgcttttccattaaaatgtaacacactaaaaagttgctctggacactcacagctcccaaggaacaggactgcacatcacccagccccagcttgcgaggattttctgatgtgcgtgagctgtgtgaagatcaattgatgaagcggcatatgttaacttaataagaatgtgtccctaaacgcagcactaggttatgcgggaaatgtttgttttgtttctcagcactgacaaagttagattttaaaatacataaaatgaagcggtaataaggaattctgccatcctgaaaacccctttccctctagtttcacatgcagtgagagtcataataacacagaaaagtcagataaagctatttcagtcaccctcatgaattatagaattttaactaagtaatgctgaatgggaagacatttatatttgccagtgctaaacttctgtttctcccaaattactgataaaatacaaataaaaatagattggattaaatgtagtgctaatatgtaatgtaaagactgctttgcgcagtttgggatttcgaaaagtgcatttaatattatcgcatgctatatgcaactcaataatattttgtcactttgcacttctgtaacactccgtatttgcaatcacataataatgaagagaaagccggataagtcaaatattgccgtacaacggcagtcttttccttcctccaagtgagagtttaaaagatggaatgcagaaacgaacagggggctgagtcctagcctctaggtggctgggacatgctgttctttcttgtaaacaactacaatttgaaataatactttttcctttgtactgttttactagtttgtaactatattggaaggcgtactggcaaagttatccagatatgacgaggggactttgttttcttcgtttctgtcattcacggtgagtaaagcgtatcctgctctcccggttgttggtctggttcagttctggttctgcttgggtgagaggtaatgtgtggttttgcgcggcagtggcaaggtgtgttaattacattcaagcgctagtgtaacgtgttaacactggagaagaggcggggcattcattgccattaggccggtatgctgtccagttccacggcacttgtgaatagcctaccttcaactgccttggctatgacaggaaatgtagtgtgggccacgatttttaccagtaaatacttttagtaattgtatatggtgaccttcaggtcagttgtaactgcaaataccttttttatggcctttactctacgtaagttctggttttcttaactgagttagttgtatacagttcaagtccaggaaacctcatagagaaaggagtctccatctctaagtgagtgtgcttggtacacagcctcaggcgctgggagttgaagtaccgggcctttatagactgaaagtgcttgcagctagcgagcctccttaggaaaaggaattctctcattctgcctgcctgagctcaggagctgtttgcatttatagcttcctgagctgttgacatgtcctttccaaattctttgaagctccaattcagtgctaaacttgtgtaagaccaagggcaaaggtaaaagaaaaagaaaagcaggaggcagcagatttctgtggatgggtggtcagaggagagagccattcatcctgcttcactcccagttcctgccaagtaggtacagtaaaagtggtattggttctaggctgttttaacaacagtacaagaacagcaggcagcctaggagcctgtgtctgtagtaatctcccagtgagaatcagatgccagacaaggcccagaacatcagcatcatgggtacaaatccttatctttggaatccctaggagctgagttcaaatcctgatacaacactagccaactatgtgagcctgagtaggtctctgagcccaagtttcctcctgtaagggtatgagagatggataatatctcccacaatgccatagaatgagatgaaaccctcatggtctgagtttgtagtcggactcaattaaataacatcttttacaagtaatgaatatgattgtgataagatacaatcatacatgcatacaacttctttccagacatgtcctaaaaaggagtaaatttatgaacaaatataccctattttggcttttcctcagcctatagattctccttctatttaggcagatgttagctgataacatttcaagccattgctagatagcgttcgtcttcagcacacccagcttgttatgctgtttaactctgaccttcccaaatataaagataaatttaatccagaagtatgatgcccttcatgcctgctattcactgacaaagtgagttgattgggaaggggacaatgcaaagaaacattgaatccaatttcactctgaaaacatatgtgtaatgtgtcattctctgcaaagaaacctatctagcccactcctttgacaaagaaagtatcccagagacggggagtcatttgtctgaggtgataccgcaatatgtagagtggagactagaagccaactcccctgccagtttccaaccgctgagtggcctctggagagagtgggattctgctggtaaatgcctgatgctggaaggcagatgggcttgtgagtgggcaagattcacagagaaggatccagggcacatgagttggagacagacaaggcctcattcttcattgcaacagtggagatgacaaggaagtgggtgggataaagtgcactatctctgcaaacttctccgagtgcccagagactagtgctttgagacttcattttgagccagtgttttcacagcagtgtgcttgaacccatgacccaagaaggccccttttttgtttatggattccacttttgttcctggcaagaccctcctctgggatgaactctccaaaagatttgttagcaactggcccagcagcagccagatgaagaattcaggattccaggaattcccggggagagtgagaaacccagaccaaagtgtcccatgatgacttcccatctttctcacctagcctacgacattgtacagcctagaggcatgcccagcaatggtgccaccataccgagccttccagctctgttgctgggcctggaacttccctccttatgatactcctcccacacacttggccacctcatggccacaagcacccacttctcatttgcagcctatgatctcattgcctgccaggattccagtattagagatgagaactgaacttaggggtagtgagaatctctccacacatggattctgagttcctgcccaaattgcagaggacctctgaaggatgctggcagcccggtgatgttaacgtcccaggaacggaatagaggtggaagaggatagaggtggaagggtgggggctgtggtgaggggtggagtaaacaagatatgtgagaacaagtacaggaaccagcggagtgtgttcgggctcggacagaggtgcgcagcctgtgcggagtctggcatacttgcctttaactctgctcctattttctgattcctttctttgtgcacttaccacatccccacctcagcagggctgccaaagatgagccatgtgctcggccccccagaaagctgacgcatatcgacaaatatgccaccctgtcccccctctttctcctgctgagcgcctcctttgctgggtgggcttgattttgtggtccaagccagacattttggaaaacgtctgcagtggcgcagagcaggcaggaatatttatttctcatctccatctgcattgcttcctctcttggagaggagctgggggaggagggcggatgagatgtggcttctcctgccagcccaagaggcgcccaagcgcaccctcctttcctccctcaggggcctcagcagcagtagcagcctgggactgagggaggcaggcgcctctcgaacttttcaaagatcagcccagttggaagatatagttagcaaccatccacccattttccttgcctgcaagatgtgcttttatggcggatgactatttggaaaggactctgccttgtgggtagtctcatgctgttcttttaggaggccaaaaggcagggcaaacaggtgcccaggtccctctcccatagcatttaaatgcatcactcacccttgtccagggtttggcaagagcgctgctcctgaaatgaattcattttcccagtcagtcaccccaaattccttacaaagtacctctatgtcaggtgttgtgatggtgccggggtcacagcagtgctccaaaggatgttctctgccctttgggaggttacatttatccgaggagccagacaatcagaaagagaaagaatgaatgatcaagtggaaggaaacattgcctgggacataagctggagaaaaagggagggttgaggagatagtatttaagccaggacaacccctcaagatccttccagggaaccatgatcagagatttctggggccagctgtgaacaaagaggaagggaagggactatttcagagacagcagcagccaccaatggccacaaaacagggaagcaagagacatttctgcatcatgaccctgtaaggtggagtagggaggttttagagatggaaattggtttggagaggtcgaaggggaaactttggtgtggtatgttgtgctgaagactttaagggaaatgagtcccaagcttaattcagattcggaaagaaaggcaaccctaaatacataggaaggaagctcagctctgccccttagcatagacctaggtgacctggagcaatgtcccattccctacattttaattgccttagctgtggtaaataaattcaaacatctaaaataagtacaaaggcataacttgtgttcctcacgtcctcgctgagtgcctggcacagagctaaatgctctgaaagtatgtttctgggactctcagagcagctccgttctaccaacgctgtttagaaaatgttggaagcaaggctcagagaggttgggctccacctcaactccacctgagcagtcctgtacagccttcacggtggggtgaagacagacatgggaaggtctaactctcaccccacccccacaggtcaggaacagcagcccttccaaggcatcaggatttcagccagctacagttctccttccaaacacatcatttgttacttacagaacacgaggaataaagcccatgtcaaggcttccaggaacctaatccctactgtgtgtcctgtcttctgggtttctaattgctcacatcgactgttgtcattatcattgtcattgtcatcgtcagctctcttcctcgtcttcctcctcctcctcctcctcaccaagattatagttgtttttccacttgagagtgaaacaaagttgaaatggttgatccctctaaaagttgtgaccaaggctagagccagttcacatcgtcagcagtgactgcatttttcttttttgttttctgctttttttttccagagcaccctgaaacatgtctgtcactttggtaatgatcagaaatggagcaaagagttaacctctgtccagaaggaactgtggttgcagaagcaattggaggcatagagtagggtgagattttagaatagcttgctaatgtttccccggacagtattctgtttttgctttggcattagaaagcacccaggagaggaaaggtttttatgttgtgagctggtgataggacagagactatcattaaaggctaacagcatcaggctatcggctgctggattcctgtgctaaccagttagctaatacattctgagtggaaagtcctgcctcagatgctgtagcagcaggcgtgcctgtcaagactaacttactgacactatgaaatgatttctatgcatttttcttgagacatccttacagccagactctgccataggttcagttcatattataaataaagcacacttagttactctctaagccatatgactcttttattatggccagtataattgcctacatgtacagaactcatcaatgaaatcacctggtgatgcttttaaaaccaatccactgttactttattcctaagtgggaaaaataactatttggggggctgaaaagatacttagtgagtaaggacacttgctacacaacctggaggatgtgagttcatgtcccagcacccttgcagcaagcccagaatgggctggggacagaaacaggaggatttctggagcttgctatataaaatcttagccaagaaacatgacctctaggttcatggagagactctgcttcaaataaataagacaatgaaaaaggaaatcccatgcctttacacacacatacacacgcatacatataccacatgcaatgctcacactaaatgaataaaataaaatatgacaggcacaattattttatgaataacttagcctaattattccattttggaataacacccaggcaagagacttccatttccccactgcctttgtgcttctacataattaccagttttattttagtcctttcgtaaacacatttcttaatacatgctaacacactaagtactggggctcagtattaaataagagaaactattgctcttactctgtgtttacatgctggagatatattcccaacaagtaattagaaacatcattacttttcagagaaagaggaaattagtcagtgcagtggaattacagggcaaagattctcaacctcctcctctagaggccagcgaagaaaattacttggagggagtggacatgatcctgtgtgtacagttgtgtctgtagataaatatgcccatatgtgcatgtacatatggaagccacaagacaagcaggtgcctaggtaggctggccaaaacatgactatctctgccttctctatcaattgggttaggaatgagcactaccacacccatctttgtatatatgcatgatgggggtcaaacttaggtctccatgcttccatcacttcttaagccatctccccagccccagaagtgactcaaactagacctacaggagaattagcatttgacctggcaaggaagggatatggttaagacaaggcagagaggccagctccctggtataagtcagtggcaagctgtggtcttttgacactgaagctgtgagctgccattagaaggtgacttgaagagcctttcatattttcctaattcattttcctcatagccaactagccaagttcctgtgctcagaagcactggtctctagcctgcgctagtctctttcatcagccaccgccaaacatttcagaatgtggcatgggctttggggtctgtgatataatatttcatcacctatttggataccctcatttcagattgctgccatgacaattaacatgcctgctgactagagcaacatagagaagaaaaagacaagcatctgaaatcagctgtttcctttaatgttcttttgtaaaaacagctatctttgaaagcgaacatgagatagacacagtattttgttcagactctcaggtgctgatcaagctgctcacagaaactcaattgtgaaagaaatacctacaacatttgtatgcagtttcacatgagctataattaaaggtcgttgagtccaccttgacctccaaccagacacagtgggcccttattgacagaaacttaaagagagctggtgaaacccaggttgagagaatttgacaggttgttggccacttctgagatccggttcagttatctgcagagtaaggctgctgacgtcagtattggatctaggaaccatggactttttgtggtatcttgtatgtagcaggtgccctgtgaatagcacttctagagctgagctcagtttcctcagaagagtgaggaagttgaaatgaccccatctaaacatttaaacagctttcattagtgtagtagccagttctcctctaaggccagacttacctgcacacagggtgaagcaagtgattcgatagatttctgtgtccagaatttagaccccaaagatacttttcattacacttactacatagttagcattttctcttttattactcataatctttaggatgcttctttgtccattagaatattagttagggctatgagatagattcaatgttaaaagtcttgcctaccatgtatgtgaccctgtgttttatcctccaaaagagatgagagagagagnnnnnnnnnnnnnnnnnnnnnnnnnnnnnnnnnnnnnnnnnnnnnnnnnnnnngagagggagagggaggagagggagagagagagagagagattaccatgtctaacattgacatcgcttattcaatcagccatcatgttttgaatgagtgctataagtaaattactgaaccaaaagatgtagacacaagactttttagctaggcatggtggcatatgtctttattcccagtacatgagaggcaaagacaagggtatttctgtgagttcaaggccagcctattctacatagcgaattacaggatagtcagagctacatagaacctgtctcaaaaaaaatttctaaatgatgtatctgacatcatttctcacacacacacacacacacacacacacacacacacacacacacacacatcctataagttactacctagagtacattaataaaaggaacatttgagactttctgactttgtgttttcaatgattggcattgtctagttggttcctattgcctgtaagatccagttctctgttttgcttccaaatctccatgtttatattatatgttaggagcttgaaattgatcgtggtggggtttctctatactatcaaatttaaccaacataccaagaagaaaattggttcttgttgtttgaggggtttgttactgttgtctttttagagggaggcagaaatgagtcaagcataggatgtaaccacattgtatctaaggtgatgtcaatgttagatgttataaaaattctgctttaagtacccaaccacatgggagaaggtcattctttctgaactctcttttcatctttatttttacatcaagggataatgtttctatttaggccacattttgtactttctgacatgtatcctggggggcctcagctcaaccctctcaacaggtaaccatgtctgcctagatttaataaattcctgttatatatatcccttcccttatctagagtggtacaatgcattttccatgtagtcacgcaagttgtctgtctctttacctacctgaaaagaggaaagaaaaaaaaaaactccattacgcaacagagctagactgatatggtatccacatcagtgatggcttacatggtccgttgcttgaggactgaggagatggctcagtccgtactgaggggacctgctttcaatctccaggatccatgaaaaaagccagaggtgcgtccacacgcttatcagccccagagaattgatatctctggggttcattgaccaacaagcagagcctaatcaatgaactccaagtcccagtgagatagctgatctctggcacttatcacaaaccctagcaagaagggaaacttcagggacaacgttggtcccttcactcagaaggtgactatacgcaagagctcagtgaaagcactggactagaatgctccatggttagaaagaaaatgtttattggagctcaaactactaaggcttgtcggggtggggcagggacaaaatggggtggggggaagcaggtagattctatttgacaatcagggtgaagtctttgagctgaaccaggaactagatgcccttgcaggacttgttggcttttaagtgtgtattaaggtggggtcttggtaaacagaaatctgccttataatactcctgaggaaaactgaatttactcttcagcttacccagttacaattcttctatttgccaagtcagagttctttttgtttaggacattgtcaccagcactgccattttggaaaaccctctttggacataacatccccaactggagtccatcaacagagtccgtagccactcagcactagagcaagagcaagcattgacctcttggaatttgagttctggtcaacttcttgttgagagatgttcaaggcagaaaagtaaggcccacaggtgtgaggggcagcaaaaggagcttgcctgcttgcctggagagtcttcataattacaactttgcaattcacagctgagttttctctaaagatgcaagtatgtcatataaacaaacaaactgggaagcagtacactgtgacctttaggagggcaagccattaggtcagcccacactgtggctagttgtgggccttctgaggaagtgacattaaggaatgtcactgagcctggtctcctcatctgtcagtgtgatgtctgtcaagctcagcagtggcactgtgctcagcctcaactaggatagactaagcattcaagcatccttcaggcttaggggtatggagacaggctggctctaaaggaatccttgaggcttgtcaaattcctgtctcagaacagaggattagaacagaagtgaggaaaacttccagtttttaccagatgtctgttcagaaggttgagaccatactctccatagatgtaggtctctgagcacagcattccagcaaaggagacagaactgttctaaccattctccagcaaatgaggatgcagctgctgagcagggcgtggaacatgatgcttctgcttaaggagagacaaggtttcctaccatctgcccagctttccagcagtgctacagcccttttcttaaagaaaggcaggggctctgagtggtctgttggcatggcccgtggtacactcacattggtatcctttatctcaccacagcagttgacttagtatttgcattgctgcagtgaaacactaggaccaaaaagcaaactggagatgcaaaggtttattcggcgtacacttctacattgtagtccatcattgaaggaagccagacaggacaggaagctagaggcaggagtgattgatgcagaggccatgtaggggtactgcttactgctttgctcttcttagcctgctcagcatgctttcttatgaacccaggactcagggatgctaccactgataatcactaattaagaaaatgccctacaggcttgcctacaactagatcttatgggggcattttcttaattgaggtccctccattcagatgacttcagcatgtatcaaattgacataaaactattcagcacagtagttaaatcacagacgatcttatgaacatgcacaaaagccgagcaaccactgacagtcctgtagccaggacttggtgctcttgtctacagataggtggggaaagccaggaagtgctcctaccttccctggccctctagaaatctgcagtcatcctccatggggcaattcagagtgtccatgatagttacacaactatttatgaagttctatttgtggtggataaaacaatagtgatttctgttaccacagtcaccatttaatggttacctgcaagttatctcaaggaaaacatgacagtggccacactaataaccatcactcacagataaggaaaccggtgcttagagaagcagtctacacagaagtatgttacagcagtagatcctttgctgccagaccagagaagttccaaccccacctcttttccttcccagctgtgcttctgtggaagtgccttagcttcctggagcccggtctcgtattccccaaatcaggaaacaggaactcaagaattaagcgtgcacattaggcatccaggtaaacacatgtaggtaaatctgtccatatttcctgtatgacaaggtatcagtgcccagtgcatccatgttgcttatgatacaacagcaactaacttgtccccaaaagacagagtggcagaaagcaggagcagaagtgaaaatgtgccaactgttctcttttctattatctgaactttttaagatacttcccatatgtaggccatttcaggaaactttctgaaaacaatacaatacttcacctctcttctcaagcaccaattccaaaggccactgatcacttttttgagccatgagctacttatgagaaactgccaatgttcacagttgccacacctgtgaaaacagcacccagtagcactatgagaggattttccctctttttaattgtggccagatacacatgaccaaatgtactattttaactcttttgaagcattcaattggatggcaagattttcacggtgttaggcagccatctccctttctgtctgcaaagctcttttcatcttgaagagctcagctccgcactcctttatgccacattcgattcagggatcacatggactagaacacttcacaattggcccagtatgcccttgatctttggcaagcaataaagacatttcatcccctctggtggcacagttctgagaatccatcctgctgtctgtgattccacatacacttcaagggtaatgtttttttttttttcctccagtcctcagaaagcattggaagggattctcactgtcattgtcacttggccccaggcaggagccactgagacttgctcaactgctcacccgcacacacagtcccagtacaacccgcccactcgcacattctgtctcacccagtcaatcctcggctggcacttagctcacattcctcttcccaagacacactaagagcatgcagactagggctgggggatggccaagtgttgctttagccttagaagagggcatacattccatccaaaccatgactccgttgaagagatccaccaagaaagttgcctttcagaaagagacacacttcccacaaaaggcctttctccactggagtgttaaccattctacactcattttaccctttttaacaattcatcataaaataaaggtaaaaacatctcaaaaaataaaatagggaggctggcaacatagcttttactgccaagtccgaaagcctgagtgcagaccttagaagtacatatcattggagccatatttagggatatgccatccctttccattccgtttgtgccctgaagtgaaagtatgaaaactggaaattggggtgaatatggacaaatgtaggaagtcttgaaaaattagcagatgggcttcctaggaaacaggaaacttgtttctttgagctagtaattccagcagcaatgggacatcagccagcatgcctctatacccatactatcctgaaggcatctagcctcggccagtcttggaagccaagcaggataggacctggatagtgctgagatggaagagcagctaggatgtgatgagaggtcagcatgcccctttggaatagcctttgagcaacccctaaataacaaaagaggttagatgagtagcttgaagctagaaggttgctaggatagtcaatgtggtgactccttagagatagatacctaaatctctgcctggctgggagcatgtgccccacataggctgcgtgtctaattccgttatgcctttgcgaagtctccccactggtcatgctttattgtctggctcctactagatgctctttatcttgaactattttcttcccctgctactatagtttctcctagatacttatttccagaacttatatgaatactgaactattaatagtatttttcttttacccctagagtatttataaccctttcaaggtttgagaaatgtttcctgtctcacattcttactagaacctgagtcatatgccctctgagagtcccatttttcaaatctggaaggactctaagaagaaagcaactagtctgatcctcattgtaatagataaggaaatgaagccaacaaactaggccgctagccaaagcctaccaagtagttaatggtcaacacaggatgggaaattgatgctttctaattcttttcacacactaaactatcttccccttaagtctgtcctaatctacaagagggaaaattccatctgaaaattggaacataataagtatttctgactttggaagctacatggcctctgccacaactactcagctctcccctttgagtacaaatacagcaatggataatgtgtagataaacagacacacatgtgttcaaataaagctttatttctggatgttgaattatcagtttcaataattttcatctaatatagtattattctctttcaaccacttaaaaatgaaaaagccatctcaacttattgaacagtgaaaatcagacagtggactcaatttggcccatggaccatcttagccattggaaatgtatctggaatagccaattcccttgcagataagcatgagtgagttaaaccataataataatttagaaagatggttttgagttcttactgcatgccaggtgctctgctagcaccgtgtgtgatgccaacctgctgagtctcacaagcaccctcagaagaagatactgtttgtcctcatgtttcacagttgaagatgagatcatagaaactatggaaggctaagtgatttcaaaggccatggaactactaatgagtgtagttggtgttcgagctatatattttcctgtagtaactgctgagaattgtttaggctttctgagcctcagtattccaatctacaattaattggattaattagatataaagtgccctggctagtattatagtatatagtattatagtatgcccccagatacctgtagttgatacctctccatagtcttgagtgtttgaatacttggtccccagtcagtagcagagtttgggtgtgtttaggaagtatatcatggggaagtatagatgtttcaaaagccacatgctactgcaaaatcctatcctagactatcagacctttcccatagtccttctggggaatgtgtgcaagggatagcattgaggaactagaacaaaaggtggcactttattcaatggcttagttagctatcattgcaaagcatcctatgccagaaccattgatttaaagtgatcattgcacccagaaatgttgaagtgcatcttgtaatcctggaaattgggaagtagagatggtaagactgggagttcatgattaactaacaacatagtaagtttgaatccagcctggagtatgctagatcctatctcaaaaggaaatagaataattaatatattttgctaacagtttgttgggtttgtagtctcaggagagctgggacagaaagttgtttggctctgtccctgagttgtacccttagctgcatttggcagtggctgagctgggctgctactggatgtctgctaatgtggccgctttcttcattgggcttccttcccctagtgagggatgtcatccccgccaggtttttccaagcgatttgagcttctccacagtgtggcagccttctgatcgactcatttaaatggcagctcgctttctagagtgagaacacagacacctccaatcagaaaggacactgtgccacctctatcacaatctgtctgtcaatgctgtcaccggccagcctggtctcatggagaataggggaacagaatccaattctcagtggaggaggagtgaccatggagagggaggagcagaacctgggacaggaatgtttgaaaaggagtaacacaaagtgaactggacctcaggactgtgatccaatgtgaagatccatctacagtcagccaatctgtataacctttgtgagcttatacacaaggaggagagtcggagggaaggacgagtcctcaacctggggtatgctggtggaaagggggagataatcaggcccctttcatacctgaaatattctcactgtgagctggaagcaaccacattccagcacaggacaatgtaagggcccatgatccagttctctagcacacataaccaactgtgccaataactcacctccattacttctttaatgttttacctgaactaagagaattgatgcaagtgacatgcttgcaaccgtttcctgcatgtgccaggcacttaagaaatccctctcctaggctgcagagagggctcagtagagacttcaaatgaagagtcctgagttcaagtcctcagaacctgtataaggagcctggcataatgtcttgtacatataaacccaagcatagtgagatggcagaggcagaaccctgaagctcaaaggccatctagcctaacctacatgatgacattctaggccaatgaaagacctggcaaacaaaaaggtttgaagatgccttcaacaaccaaagttgtcctctatctactgggatacactcacatgcacacatgttcacacatatacatacacacataaacacacacacacatacagagacagacagacagacagacagacagacagactatgtacctctgcacctgcaagtgcacccatgcccatacacatgttaatatgtttttaaattaataaaccacaggacacactcacacatgaactgggctatgtattaccattacttctcttcctttaccagggagaaaattgatgtctggcccaccggggcagggacagaaccagatgacagccaaggcaatcaacctcctgatccccactttaagggaacagggaccctaaccccttctcatatgtgtggcgagtactagctcccttatatctaagacaccctcttttttttcttaatcatccactcagaatgctgggactcaaacacccacttctaaaaacttcaggaaacctctagcttaagtaaagtgtatcataccaaattccttctgatagttttttttttcttcaggcaacactgtgtgcctggaggtgaggaaagagaagagatattctgttccttgacatggtctattttctagggccaatgagatggttcagggaatagagagactgcagccaaatccaaggacctgggtttgatccctggaacatacatagtggagaaagagaacggactcagaaagtcatcctctgagtatacaggcaccttggcaccatgcatgcacacaggcacacacaaagagcgagagagacagagagatagagagacagagacagaaagacagagagactcaatgaaccaaccaatataataaaagttttttttttaaagaacctgtattccatagacgaagaaaatgatggatgaaaactgagctaggaagagagcttagctgaagaatggagttgattgaccaaagcactgttttactgaactgcctttacttaagtctcatccctcggatggtctgttttgaagacatgagaagaaggcaccaaatcctggcagctagccctggcactccatggtgctcgaactttgagatggtagggtggtcagcagtttcaaagcaaaggaagcctgacaggcaggggtggagtccactcacacagagactgtggggagaaagaacagcctaggcaatagctaatgcagttgtctgtgttcagatttctttttttcttccatctttgagtcttgtccaccagatttctgtatgaaaaaaaaaagacctaatccacttcttttttttttttctggtctgtgcattgatttaatagtatcaaaccctgaggtcctcatggtctgcacctgggttgcttttttcccctaatgaagcaggagaagtggtttaagcccctgcggggatcgctgtcaaagctacacaatgattaactcaggtccccttattaggaatggactgaagaaaatcccttagtcatcagcattggtgagtgttcaatgaaaagattaccttgggcacctgaaaaataatggcagtgctcaatagagggaccattaaaccggctacacacaccaagtcaggtgggagttgagggaattagctggaacacggaggcctaagaaacacttttggaccttctgccctgcccaagttagccctatgattatttaaacctctatgtgttctcctggagaggcattttagtttgtatctacacataaacatagatgtgtgtgtgtgtgtatgtgtgtgtgtgtgtgtgtgagagagagagagagagagagagagagagagagagaacacagctgaatgacaagtccaaatttctgtgacttcaagtcctattgtttattctcttagccttagttttttcaactgtaaaatgggaatattaataaggtccctgttcagaaggttcatgcatgaattaaatacacaacactcaacaattccaactcattaataagaagtaaacactcaaaactgggttttaacttattgttagttgttaaaaagcagctgagtatttgaagcttttgtgtgtttggatgtcatcaaagaagtgttggactcatggcctttgttctatcgctgtggcctttgttctttagctgcagcctttgttctatagtgactaagttgcaggcctgtggatgtgtgggctgtatctccacttccacagcctctcttgatttagatctccttttctgttctcatttcccaggactggttgtaccttgtgggtcagggccagcgagctaaggaatatgccagagaagggaacgatgatgtcctatgagaaggctggtcagaaagagtcccagggaaacaggaccagatgaagctaaacttcctgcctctcctttgagggcaagtgaacccctgctcggaaatgatgcatacctagtgcctgagggcaagtccttcttccctgtttccacacaactgggtcccagagaagggaaggtagcttcactaagcatataactgaggcagaaccctgagataatacccagagtacttggaaatatttagatatgctttgagaagaaacaggattctgcctgggtcctccagcctcagaattggctcagatacctgatagtactctggggagatcccagcttccttttcatagcgagaaattgccataggatagaggcgtggaatagctactaccagctgagtggggagtacccactctctgcagtaagctgctgttcccagcaggtccagtaacaatagctgctcttagtactattaacatgattggatggacttggctggatcatctcagtctctggcttccctttgagtaacattattactggtccacttacaaaggaggctcaaaggcaccaagctagaaaatgggctaaaagccagatttctaacccagacaatcctgaacccatactcttagacaatgagaagacttcttacagagttaaaaaagaaaagatattaaagatattgtgcgcacacacacacataaacacacacacacacagttttgataaccactgatgaaaaactccttaaagacagaagtttgcttcggaaagcaatctctttacccattaaggaatgtttatcatatatcacagacaatagacttggatagctgtcatttatttgattcagaggcagtacctagttcattctcagataatcatatggtgtgtgtgtgtgtgtgtgtgtgtgtctgtgtgtgtgtgtgtgtgtgtgtgtgtgtctgtgtgtgtgtctgtgcgtgcgcgcacacgagcacgtgcatcagtcgactacatggggtaggagtggtgcaaatggaagtcattgattggctcagcttgctgaccagagagcaccagagattccatcagtttccacctctttcttgacacgggctttggagagcagactcaagccttcatgctttgcaagacaaaatgttaccaactgagtcactccacagcctgcagacttggagtttgtgcagatgaatccaaggtcctagggactgagaagatctggtcattcttctttacccagaatgcaagtgacctaaaggcatgaaattgaaaagaactttggtgcttaagactgttctatggtatcacacagggaagggggtctctcctcctgctgctctaaaaagggggggaaggaagagttgaggagaagaaagaagaggggttgttgaccatttcctgcctcacgaagaggctaaaataagagaaggaaaggctttgtaaaggtaaaagaacagatctgcaaccttactcctagtgagagggaagacatgagcccccagaggtggcaagtctctgctgggatgatgctcactgggcaggccttctgggaccccactcttttcctcctcccttgccctgatttggtgatttggaactgtcatacgaatctgaagccaacaaggatgtgctttcaataaactactagaagattctagattctaatacttgtcactcatttcccaagcaaggggtcttctgctttactctccctctaaactatacctccagcctcccttcaactctaccctcagcatctttcctaaagtttaatgccacagcccaagacagtaacctacctctcaaatcacaataggagtacaatttcccctaaactattgtttgttctgttctaacgtggatagggaaaggtctgtaagatctggtggatgaccagatgaaggataagccaagaaagagctaaggagatggctcacaaagcctgatgacctgagtccactccccactgcccacatggaaggcagattcagcaatatcctcctatggccccagtactggaaaaggaaagacagaaagattcctggggcttacatgccagccaacttagccagaccactgaactccaaattcaaaaagcaagtacatggagaagcatccaaaaggtgcctagtgttcatctctggcctacacacacacacacacacacacgtatgtgtgtgtgtgtgtgtgtgtgtgtgtgtgcacatgtgtgcatgaatatataagctgggactggaaactgggacagtctaagggtacatgaagttttcattcatgtcacaagcttgcctggcctccccaaaggaatagaatttgtaaggaaaagaatttgactggtgtcagtctctggtaaatggtgagaaggcgtgcttaaaggttgatcatttcagctgtagcgaaactcctaccaactgctaagcatcaacttgaccgagcaaaggaggtgctttctcactgagaacagctctttagccagcgcctgctctgaccactgatgcttctgctcctatggctttcttttccccaagcactgaagagacgagaaattccagagtggtagcctgggcttagtaaatgtgcgtgtatagctacctggcttccctctcttgtggctgagaacatggacacataaattcctaaaacttgagcccatcaagatattttgcaaagtgaaaaacatctagtaatttgtagataacattgtatgtgggggaaacatgtgtgagtcgggggtgcttgatttacgagtgtttggaataggataggaatggacagatttatagagggaatcactgtgtgtaccagaaaagtgtctcttctcctagtagtttttacaaagaattcacctccaaccactactgtattgaccccagcagaggttcagggtctatgggtttgtccttagcctcaccactactgtattgatcccagcagaggttcagggtctatgggtttgttccttagcctccctgaaaaggttaagccagcgctgttcttatgttctccctctggttcctgctgtccagatttccccttccaagccaggcagccttagctgctgacagcagagtaaggctgaactagtctttgttcaagtaacattttgtggcggtcagatgctgatccaaaagaaaccaaattataattgcaatcagtgtcactctcagagaagctgtagtaagaagaaactggaaccatcaaggtgccgtgaccttagtggagaagtgaaagcatgggttgccatgaagtagccaatggatgtgtgtatcccccactttaccacacacattctcatgtttcctcatgtcatcagaccagcagtcatactgagtacacagctttgttgccctgttccagaactctagaaagcagcctgaaggacttggcaggatttccccatggcaaaagcaaattttgaatctcaaggtagaagtctttctacactagtatagatttcccaagcacctggaactcaccagatttgcttatcagaacttaattccagatggttccatgcttagggcatccctggactttgtgtcaattcatgccatctcagtgactggacttctcatgattactatcttccattttcaggctcagagagataaagtctcaagtgtgtcacagagtgtgcatgtggtagcgctagactggaacccaggactgaatccacactccttgttccaacactactctctggcacccaaaaatgaatttcataaccattccctgtatttttcatacggatttttagtgcctaaaaccaaaagtcatatggcaacagctttgctgttagcccaaaaaattctgcttgaaaaccttgtggaaaaccatgcatgacttttatgctaaaaggcttaccacatcccttctacttaaaagtctgaactatcagacaccaagcttggaagaattcaggacaacctgcagccaaattataaagactccaggtgccaggaatgctgacactcttgattactaatatagacttaagggcactctcccagtaagcccaggtttaggcactcacctctctattttaaaggaagggaggaaaatgccaaacaccggtgccagcaaaagaacctgaaactgtaaaactgctcactgtccccaaacagtggtcatggcttgaaacaaatggagtaattttcttttcagtgacttttgtttttcctggtcagttttgtgaattggaataggcacatcatctgaactcagatggtgtctgagctgtggacaggaaacacaaacccttgcctaatatcctcctttctgtcttccttaggtgaaggcagcttccaagtatgtggacgtgcctgtgagtatctgaatattcagcactgcttgtggttgggttggtttcacttttctggtttcatggggtcttgtctgagatttgtttgtttgggatttttgagacagggtctctctgtatctctggccagcctagaactatgtagaccaggccaacttggaacatgcagagactgcctgtatctgtacccagtgctgggattaaaagactgtgtcctcttttgtgcttttcttccacccatgagtatgtgagcatcatgttttgtttgatggtatctgtttctgtgctttgctttcttcacaccggatgctgtcctcataccttgcccctaagctctatatggaccctcaaagtaaaagattgggaccatttttctccattgagaagaaggcatggtttcctgtatcagaaagaaaggaccaatgtgtgggttaacccagctctctcttgcttttgttcctctgcttccctgtgactctttctgctcatagagaatgcaccccttacagccctcagttataaatttcaacaaggtttccagtatttttttgatttaaacaaataaattctgaatttgttcatttgggggtcaactcgcaattgttttaaggaaaacttacaaaactgtccagaattagtactggcctcattaatgaagagaaccctcaaagttcacagagaaggcacttgaagttgcccaaatttacatttaaattgaggttaagtactgcacatgaatgctaaagtgtgggattacctgagacaaatcagaagacatttatagacagactttgccctgcctattagcaaaataaaattggagagatttttaaatatattcctataaaggggaaaagaaaatgaagttgtttctccatttctaacaaaagtggtgtgagtctattataaaatattaaatttaggagcttatctcaacagtcgccgaggggctggtcctgagccgttctcattctgaacgtggttaagtaccctccttgttcaaatacttatttgtgaaaatttgtttttttctaaaaggatttatattaacatttaaattcatttccccaggaagctaagtgtgtaatggtttattggcttatttctcaaaggaagacaaaatggaacattggagtgactgtggcattagcatgcattttgtttgtttaatgaaagaatgtacaatcaataattatgtttgaatttatacaatacctctcatcaaggggccctgactccttcccatcagcaggagaatggggaacagaaaaggctcacagagccacaactaggagagcattttactcctttaagctcctttagtacaaactctccctttatgtgaagtctctgtctatgctattccatctttaaaatgaagacacctcacagctaggtgtgccccatgtgtggccctcacacagcacttcctagccctccgtagaagtgcatgcagtgaagggcatttcagggtgtgacgatacccagagcaaaggatgcatgcactcgctgccttagcactatcctccactgggcttcaagagtgcctagctcccagcacagagatctgatgtcttcagcttatgcctcaaaccagagaggcgatcagatagtaacagtagattctattagaatagctattctattcaatgaggctcaatatatgaagaaatttgatttagcatcagggttaacaatcaaaccacatgagagccacgttttagaaatgtcagaaaaagctcaatgttagcaatgttttatgcctcaacctaatagcttcccaggccaggtctagctttattctgaagaaggggtaaaatggacttgatactagtgagtgttttctaaggtcagtaattgtaaagacacttgtccatggatggtgccatgctagaaatttgaggctatgaaagaacagaaatgactttgctgagtttccttctggaggaagcttagctcccaatgtggtttatcttccattgatgacacagagtgtaattataaccatctcagtcaagcctgtgactcacccactacgtgcccatcattgttttaggaccatcaacacttactctttggaacttctccattttaaagacgggaaaaggaaaatggaggcttactcactctgggagggccaggcagctgacagcagtgcagctcatactacaaactatgctcttaaacactgtcacactacaagatgagtttagttaatgcacagacacatagttgagtgattattctagtattagaaaataatgtaatcagtagaccaaatccataatggtaccaaaagctaatggcttaggacaatgctacatgttgaaagcaaatggattaaatgtttacttttatggctggtcgcagtatactaagtattacagaaaataaataattccatagaaaatgattccacacaatacacatatgaatatgtcatgtttacatacagtaagtaatcatttacttttgaagacagtcctgtaaggggccatcattcatttcctcctgttcatcagaagaggaaactgaagcacctaaaaggttaaatagtatgcgcagggtcacctgggcaagaagtaggcagggaagagtcagtagcatggggtagaacctgtctactttagtttccaagataccatgtgcacaaaatcaaccttctagtactgtttacaccttggaaacagcaaagcagtgcaaataagggagatggtggataggttggtgttgggtgggtgggtagatgagtcatttggggtttttgaagaaccacttcacttccataccaggatgtacagcagtaagacatggcaagaatttgggcattgtttgatgacattttcatagatttctagctctcatagaaagtggttctgattcagtggctctgggatggagcctttcaaatctttctaaaatgtgtttcccattcttctgtaaaagaatgaaaacctgtgggctaagtcagtaattcttgacccaaaacacctagatgtttttgttttagttgcttggcagattctgtgggcccaggcaccatttctgtaaagttttgtaggccctttggtatttgcagccaggcttataagcccaaatgcaatcaccttaaatcccgtctctctgtaaactctttgttttatattataaggtttctgacacagtttggatttacttccatgtgtaagccacaagtttattatcacaatgagtttttgcttactgagtcccactagcagaaagtggcactattccccataactcagaacatttcttcctcttgatacagtgtttgatcctttcttgtacaattggcattcatactaaagacatacttaagatgccaaaaatcagggtttgtattccctgcctagaactatctggcaggaactgttgaagatgaaaacgtcccatttgaccaaatccattggtgtttttatttctaaactatgtcttccgcgtgtggtaatgtcagctccacagtaatctttgtgtatttgtttagatgctttctgaagtctgtgttctagtctgtccatctgtcacaggcatatctaaaagccaccacctaaaggctgatccaagcaggaagacacagtactgatacaatccctaacttacctagtgacattagttgttcagtcaggtgttgtgtttatcttgtaactaatacttagaagtcagttttcttatctgtcagaacttttgattttagtttaatacttaataatacttaacaacaaatacttaaaatgcatttattatacgtctttcctgccttttatacccctgtcactttaattgatgtactgattgtaactgaatcttgtcttagggactcatgttcaccaccatgaccacctcgatatggtaccagcatagtgctccctgtaagtctttccagggtataggctcttttccccaggagtcccaacagttggtgagcatgagtgtctgatgaggcagtctgtcctcccagaatagcactgtctcattagtacacaattcccagacaatttttttcttccgtctcctccatttctagttcatcaagagatggaagcccaacttgtttgaatcagatgtggttctcacatcaaaggaaggcagttgtgaacaggagaaagaaaactaattgtgcagagactgcatttgtatctgtttattgtctctaccaggtctccttttcctttctaagtcaaaagtagatgctaatagtaaaatttaatatcaaggggaggggataattgcagtataaatctatattgcaatgtgtaattttcaagacatttttatatacattattatagctgccagtcatagtccttgaaggtcagataaagagatactaatcccactctgaggctccataactagggtctgtagatggtcaaatggtctgcatattatttgggaagaggtaaggatccacacagtgggatgaagagctctaaaagggaggtttctggaggatctggtcatccattcatgaatttgtccatccagcaaatatgtactgagtacctacgaggtaccaggcattgttctattccggtgtgctaagaatataattaaagattaaccaaagccctgctctttgtggagcttttgttcttagaggaaaagccagataaaatcccaaagtttaacacatgatgaaatatctattggtaaatggtgcaatgatagataaataaatcagtaagagtcaaaccaaacagattttttaatcaggagttctacatgtcaaatacatgccctcttaaggaagtgagttttcctgaaagagaagatatgctgaagatctcagcattataaaacactgttccctacatagtaagttactaagagtggctacatctgacttttttttcatctagtctctaagatgtacccaggaaaaggctatatagcaagtatccccaggaagatatgaagtactaataataagtttctcaggttcctcaggtaaggatcccattcctaagaatatcttttggtgtgcagctgccaaagagatgggagagatatacctgcttagaactggttccatctcattggagaactactgttgttttgcatcataaaactggtacaattacaggaccatcatggaaactgctccatgcatttgctgaaaattgcttagaagtgtaacatttgatactgtggctttggggtgtccctcattgtttttcaaattaataccttgtcattgtttcagcatgtgttaagaaatgttactagtatcctgggggccaagcattggccctttgcttgataattgtaagctttgtatcaggagaaaaaaaaatacagtcctactgtttccaacccttcctcattttcaccctggaaattacacagaagtgttaactaacttcaatttgcagtgcctgacagtcacgtcttgtagagaaatgatactttgtgatctaaggtaaatcatagtaatgaaaactaatcttagagttattagcaaacatacatctctactgtagacatttaagggatctatggcagctctcctaatgacccatattacagtgttttaataggtttctttggagataactttgatttctgacatctcaagcagtgcacattctggtttggttttatttgtatgttattttttcgaaataaatcattccctacctactggatgcacaacctgcctacctctccagaaaatctaattaatctaaaaaacagcccccctttccctgcctttcttcttttcttcctctctctctctctctctctctctctctctctctctctctctctctctctctccccctctctctttcactcactcactcattcattcatttttccatgcctaaaattaccaggctgcaatagaaggcaaaggcaagtggccgaacgtcttctctgagttaagtacccacaaaaactcaccagctgttcttagactgaactgccctccagtgggctttgaattgaagggaattgtctgaaatagggtttctgaagtacattttatattttgttttacacagagaaaaggataatagaatacagaatacacttggatttttctaacagtagtttctatttaaaacaaagccagagaatgccccctgggtcataagaattgtgtctatcggctagttagagagagagagagagatccctataaaattgtgttcagatcttctgataagcatgaaggtgcagtattaactcctcatccagaactagacagatgtggtcatgaaaacagagggaagagcgcaggagccatgggaagagggatggtgagcgggctaactgggaactctcaagatctgaagatccatgtgcatatttgtttctttacagaaacccgggatggacgtggccgacgcctacgtgactttcgtccgccattctcaggatgtccttcgtgataaggtcaatgaggagatgtatatagaaaggttatttgatgtaagtaaatgccttcccctccttgcagcccaaggaggggagcttccaaaatgtgacaaaatgagagacaggaggataagtcacattttgagaaaattgattggtcctgattcaaagagaatctctcctctccctctgccttaggctcttgtgtctctgccgtgtctgttatcctgcatcctgcatcctggtgtggctgtgtctgcatcccagtctgtgtgatatgtggacggtacacagcctcccagcaagcaggcacattctgcacgaagctggagaggcagactccttgaactggcaaaagccttcttccatccccattctcctccttgcaatctggccgtttgtagaggacatgttcccactggtgatgctgagaccagcaccacctatcctgggggtagtgcctccttgatgccagctgtggtatgcagatgtgcaataaatgtcacattgttatgtcttccaacgtgttagaacttctgtagaacgagacaacttccatcctgggtgttgccaaaggcttatatgtgagtcacttggtcagttccttttgtaatccatggtgcttcctgtccatccacctacctcagtaagtccagtgaaaaccaaatgcacggcggggcaggggggcaggggagtgccatgtcaatgcaaaccaaaacacagaaaatgcaggcttccttgcacccacagaagtagctctcaggaagacttattgccactgcaaagtaagccactgagatcaaaaggcattgatctcaaactgtctgcccatctgaagccattgcagatagagttacctcatgtagccaggtacattgcttctaggttcccccaaatctacctgcaaagacctggccagagtgcactggagatgacgtcctcgtcctcgtctactccctccccctgaaccgtgggcctcctgtccaggctttcgtcattgtaatgccagccggaacattactgtttggctcaactgtggaacccttgtttctgtatttttcccgtaactgtgttcaccaattgacgctgcgttttgtatgtttttgtcccgtagctaaatgagctcattgttggcaccgctctctgattctgactttctatgctttgtcttccagctcattgactttcctggtgtgctcaaaaggcttctttctgtctcctcttctcttctcttctcttctcttctcttctcttctcttctcttctcttctcttctcttctcttctctcctctcctnnnnnnnnnnnnnnnnnnnnnnnnnnnnnnnnnnnnnnnnnnnnnnnnnnnnnnnnnnnnnnnnnnnnnnnnnnnnnnnnnnnnnnnnnnaaactcaccagtggggcctcccctcatacatgcaaaaagttcaccagtggggcctccccctctctgcatgcgtgcctctagcaaaggcctgagcccagttagtctgggggaactgttgcccatccaataggcattgaaaacagctgcagcagcaccctcaggtctatgcctagacgtgtagactctgcccatctccactgaatccaagtccaaactacaaattttcaagaagcttgtgggtggctcttttcaatgcctaggttgccttggttttctgtttttctttgatggtatcttctggtattcagctttatggtgtgtgtgtgtgtgtgtgtgtgtgtgtgtgtgtgtgtgtgtgtattcctctatgaatttgtgtgcaaataacctatgatccctgaaactttaaaacatctagtacagaatctgaagcttactctctgatttagcctggctcttcactgacaaatgatccacctttctactacttttttaaaagtataaatacaaggaggaatttttgtttgaaggtattcctgccgaaggctgtgaggcaaatggtcttttgagtggctctttgtatgggaattgcaatcaaatcttcacttggaagttaaaagggagccttatctggcacagatggggaaaatggacttcctaactaggagaacacaagcacattccagccctctgggctttagtgtgaaccgataattaaaagaaatattcctaatatactttgcagaagcaagttctgttttggggtgtttgtggtggggaggtagtggttttcaaaaattcacaagtagtaatagtccactgagccagcatctatggcagcagtaaatctctgagaaaccacacacacgcacacattacacatacagagtttaatttcagattgccccaattttcttttcccaatacaatctttactctcctcctctgagtggatgattttgccactctaaccatgataactcttctatgcatttcaccctaaccttatatagagaaaaaaaaatcactcttttaaaagcttattcagacttgaatttcttggccatttacttccttattctccaaataaccaggtcccctaatttacggattctatcggtgctaagcaacctaactgtgatacaaaaaaaaaaaaaaaaagttattgaatctgtcatggatttaaaacatttgtcatttaaaaacccagagcttctccaaagcttcattaccatgcagcttcggtaatttaattcagtacttactgtttttctataatctagcggcaaatcatcagattaccaacatgtttgattattttcggcttctgtttcctcaagcatggtgtttactcctttgcatacatgctctgttaaactcttgtgtccagtgagatgaactggtaacgggaatatcgaagcaaaaggggtctcatgaaagctgccagtccacagttcttattacagtgaactaacgctctctaccccgctctctaatgatagggtcctgggatggcttcctaaacaattggcagaaaactattgagaaatacttgttgatctgagatatttctcttccaaattgttgcattttgataaatggcagaaatgaataatagcaaattagcattttgaatgatgaaaaaatatagatctctgagattgtttgcggtttgggggttgttggttctgactgccgtgtctctccggttctcttcctgctggcatctgtcacttgagaagcatgttctgagactccttgttgtgtgtttccgtgtttccagtcttagctttgtttacctgataaatcccctgagatcttgttctttggtatctttttccaccctccctattactttgtgcacccttgcaggaaggctggatggcttttgatatatgtttgtgagaaaaatttggaattctagctggtcatgtattggcttgtttgatgttgtaacaaggttgcttgccggtgatttctgagctgggcttgttctttttttctcctctgcttcatcgctgtattttggctgggagcgggggtttgtgggagattgtcagagcagcagtgcgggctctgtgtgtgatgctctgaattgtgtatttactttattatataacttaagagcagactttccacattaatctctaccattttaaaaaatcaagcattctgtaggattttggagaaatgcatttagatatagtactgcctaaacagattttttttccagtgaaagtttccctgtttagtaacatagttgctttatatattctttctataaagtaccaacattatatattcaataatatatctttaagactgacttcatcaatttaaaataatagtctgatgaagacgaatcccaggaccattccccatggtacttttagatgccaaacaaacattcttatctgctttttttatttttcagggaaaaagaatgaagcacaattatactgttttcacttgctgaaaaataagattttaatatttagacacaaaatattcagacatttaaatgaagtgaatatcataataagtgtagcagtggattaaaatcatttcagaggagctaaatttttagaggaaaattgcattagtctaagattcgagaggaagctttgcctccttgtcaattatcgatgctttataaagaaaataaaaagcagagatcgcaataagctttgtgttctgaaagtagcagctaagggaggatgctcaggctggagtaatagcttgcctttcctccgcctttggtgattagttcagcatctccctcaaaacaaaacaaaacaaaacaaaacaaaggcgagagagagagagagagagagagagagagagagagagagagaaaggaagaaagggagaaaggaagaaagaaaggaagaaagaaagagagagaaggaaggaagagaaggaaggaagggagagagagagaaagaaagaaaggtgctttctgaaattagacatcagatcaagagaagcacctaagatttcaaggtctaagcaaaaattaatttattttctttcctccttgtacttcttgaagatacagactgagaagaaaatcgggattaaaagagatgtgcttagggtgaattcatctgcttaaacctcgcaggctcaaagatgaatgattaaaaagccatctcaaacttggccggagtccacgctgctggtaatgccgcatccgctccagctttctcctgccggccccgtgtcactgtgaaccagacccaggaacatttgactagagatgatacatggattatctaggtcaattatacacttaatctgccttctggaggattaagcatttacagatagactctgcatttggcttctccctggcagttatcagatcaggaaaaggccccttatcacacagccttgtgcgagcttaatcaggcagtgtggacagattcaggggctctgccgcctggcattctccgccttgcacagattcccatttgctgttccattttcaaatcgagtatttgttcactttacgtggcagcacaataattgggtgtgaatattttcctctaaaacggtaatttgaaacatgaaccctctgcctattaaaatatgcttcctggctttatatacgaatctactgatgaccttgttttaatagccgtattaaattataagggcctggtgcgtgaatgtatgtcaatcaaaataggaaccacgccgctgcaggaagtaaggactgaagatgggatccaaggagaacgttgtgttactaaatctgtaaggtaggccaccaacttccaggtgagggagctgctctgaaagcaggcagcagggaaaggtgagcaggtctccaggacagagtgtgccatcctaaaccctgggagcctgagttctctctgctttagcagtagccgccttgaatacccagtatctggacttccaatgtgatgatgacaggcactgctcctagaccatcagatcagatctgcatgacattagaggtttttaatctcttggagccttggctgattcatctaggtaacagggatgataataagaggaccttcctcggggcatttcgggcatttcgttgttaggagagtgagatgtcaccgccaggcgcagcatcggcaactaaggactcatccggtaagtgttagctacctccctccttattctcatcttaacactggaacgaaagccctttcaagactggtttgtcttgctaaatgaaactccatacctgttctgaggactgtgagcacctctctggtgcttaaggtggtaacctcaagcttgcttatattcctccttgtttggtagcctggttttctcttacttttgctaaaacatatttcagaagcagccagagcagtgttaagaatgatagttagaattaagccagaatggaatagaagcctctagttgcttctctaagctcagcctagtctgtcaggtccccttaccctcaacccctattcccaccccaaactccaccctttgcccccacccccacccctgggtaaacagacttgtaatagtttaaaattcaacttctggtggatgccagcctttgaactagagccttgtacgcactgggcaagtgccctaccgctgagctgcatccccaacctggagcaaactttatcattgtgtcgggagcaccatctggcaaatcttgttcactcaggtgattcagaaatgagctggcatcaagccctgacaaacctgtggccaattagaaaaacagaactcggcctccaggaaggttgttttaacagggacctgagaaagaggggtaatagataactcctaattgttagaactaattgttagaatacacgatgtgtatactgtaaacattttggaaacacagccaagcaaaactaagaacattgagatgtcatgttcccaaaacccaagaatggtgaactggatatttattcttttaattttttcctaattagattcattgtgtgtgtttttccaaaagaagtaagcaagaattgctgtttcagttgacagtctctgagttccatgccaataagtgttcacctaatatgctgtctgtattcagaccttcccacttgtcccctaatactctttgtaagaagtttgtgagaaccagggtcccatgccaagcaacatgtgtgggcaagggtgtgatgtcacatacatttcctctcagctagcactggccctctttccacgctcctgacttggtagagggaccaccgtgccaattgctttgcagactcgaggggtttattaccatctaaacatagaactcatttgttgagaagaaaaaaatcaagctgaattcaaccaagtagttcttttaagcataattagtaacttagcagaaaccaggtttttttaaaagctgttctctgcatataaggagaatctctgaagctagttttcaaagtgggggtgcagggtaggcaaactgaaagagaactgcaaaggccaccttccaagtcagccaggtaaggagaacagggctgttttatgggacacatacttacacctggcctggatgaatgaatctgtgcggaggggatcagcatgtgtatgtgcacatgtgtagagaccacgggtcagtatttgatatcttccacaatggctcacctcttactctttaagatgtggtctctgctgaccctgcagctctccagctcagccagactgttagccagtgagccttgagcctccgttatcctcaccccttttccctccccactattggaatcacacaaatcagtaacagcatacgtagccttttcatgtggcttctggggttgagctcacttgcataatagcaagcatgtgagtccccttcctgccctgtgttccggtatttcttaagttattgtgactgcttgactgaagcatgggcttggcaaatttgacatacatgtgcacatatataccattaggaagacttctgagttaattctcaggttgttgctgatgttatcaacctaaaatgaagtgtctgtgtcagtctgatgctgtacttttttatactttcagatcatatttaaattgaactgtaaccttatcgcttccatctctaggggactatatatgtacaaactggaaagtcgactaaccgcccagtcaaggaagggtacacagttgattctttcactacttggggctttgagccccaaaataaattctggtattaaaattttgatctgagacaggacttagaagagacagaaaggatacaggagtaggcagaggagaaggaatgagaagagagtttttatacatgcctctctccttaggaattaatttttcctgttacacagagacatacaacaggtaaatgtgtgactatgcatgtaatatgtgctatacaaaaaacagaacgtgacatatgcattctatctttaaaggaaatgagttataattgcttaaaaagaatactaactacacatatttaaattataaaccaatccagctcatcttcaaattatctaccctcccagccacccaaagactcagtggcttggagcttacctcccgttatggacttgtgctttgcacagatttggttgtattcacttcccttcttgccatgtgtgtagtctgggccaggtctttagccaatggaataagcttctgctggtagattttttttttaagatgatagaagtaagctttactaagatgggggtgaaaggagaagattggaggatgttttgatgcctctagtttcctgttgcaattaattgctatgcaaatataagtcacctcttactctgggacctccacaatagacaataacataaaataatagttattaattcctttgaaattggaatcttagctatagaaagttatttattttttgttctggggatggtgcccagagctttgtatgtgtgaggcaagtactttaccactacctacagcccagcctcacaggcacatttctatcccacctggacatgggcattcttttctctgtgctgggtggcttgaggtttaagcaggcttggacaaagaaaagataggagaccatttctagattcagattaattatataaaatgggagatctctcttcaaggggaattgagtggttttttttttccttgctagcacactgacagatttacactgcagtaacatatcttgaaataggttttctaggtccagctacttccttccaaggctatccatccatttaaataaatcttgcttactctagggcaaataaatcttctataaaaccaacctttctttttctctggagcccgtgtgctaccaagggtttaactgattgtctttatgagaacagctttctctattccaggagacatttggtaaagacagttaatttgttttcttttccagaggagaatgttctattaatcatcctaagaagttagaatgatttctctgttacattagggtcacagtatccgtgttaacctgacctgcacaatacttttgtgtcttagaaaaggtttctctaattttcttatggcagactagtgccatggaagctggaagttacattcctaagcatgttactcatgcacaactgtgcatgtacatacacacacacacacacacacacacacacacacatgttcatacacatgcacacacaaacacatggaatatccaaggtacattctgtggaacaaatatcatcacattctgttagagtagataagatatactgttaatatttctcattgattaaccagtaaactatttctgtctctgctccataaaggctaaggctactttttcaaggtttcaactactaggccctaagccagagtttttactcaaagcttgctgcattttgttattctttggggttttggggtggggcgggttgtttggtgttaccctagcagaaacttacatagaccaggctggcctctaagttgcagcaattcttctgtctctgccacagatatgaaccaccataccactctctaattttgtccttaatgataggttataaaatattatctccaagttcctggcactccgactatagtcagtggtccccagcatatcatcaatgagatattgtagaagctgcatggtattagccttagacttagctgcactcaaccaggatcctctggcatttcaaatataaaccaaagttcaaaagatactaagcaaacccagtgatttccaaacttacttggaagaagtaaaactaatatcagtgatagaatactcaactagcatgcatgaatcttacatacacattaagaaataatttttaaaaaagaacaaatgggggctagagagatgtctcagaggttaaaagcactgactgctcttccagaggtcctgagttcaattcccagcaactacatggtggctcacaaccatctgtaatgggatccaataccgtcttctgctatgagtgaagacagctacagtgtactcacatacacaaataaatagatcttaaaaaaaaaaaccaacgtaactgcagttcagtttaagcaccattaggacacactcacacacaatacacatactcacatgcacatacacacatacacatatgtatgtacaaatgcacacacacgcatacatacatactcacatacatacacacgtacacacagcttttaaaccaatatttaccattattgcatgtattggctctgatatgttccattccacctttcaaaaatattgatgataacaaaatttcacttgaacaggttacattcttcagtttctaagacattatttagaatgaagtttctcatacttgatcatattgacattttgagctatgtaattctttgttgtgggaactattctatattttaaaggatgaagtcacattggtgatttctgcttgagatgctagcagcaatcgccatcccccaaactgtgaaaacaaatgtctccaggtaggactacatttccaccggcagggcaaaataaatcactactgtttgtgagccactgatctggaaggaaagaggtcatacaggataacctcttagaggaaggtcaaccttccctctgcatccccacgatctcacatgagtttacgaggatgctttggtgatgacaacaatgatgagctgatttctcatcagaatccttactcaccaagcccattgtccaccagaagttatttcaactgtccgtgctgtgctacaagaaacactccacttgagggacttagagccatgctagggagagcttgtgagagagtttggactctgtgttccttctctcgcttgcttcctctagaatagtcttgtcagtagccaggagaagtcactgaggaagtatgttaagtcgccaaaatgcttttacccaatggtttctctttccattttgaagttatatagggaccttgtctaggaaaggaaagggaaagaaagaaaagaaaagaaaaatggccgggcagtggcacgcacctttaatgccagcactcagggggatgaggcaggtggatctctttgagttcaagaccagcatggtctacagaatgagttccagggtagccagggctacacagtaaaatcctatctcaaaagaaaaaattaaaaacaaacaaaaatggctatttctatcaggtagcattctggacattttcccatgcctaaaactccaaaaagaagtttcaactcacattcttcattcacaccaaattcccagttcagacgagaatgcttcttggccaactgttctgctaaacccctgccaagttgactcagagtccagttagtggaatctgcgggttcacccacagcaggaagattcccatgtcaatctccttcaagggcggtgtcgctcgccatcttgatttgccttgcctgcctttggcagaagttttactgtgactatgcttggactaaagccagtcatgccaacaaaattgtaggtctgatccaagacagggttattattaattaccaaatgtatgtgccaaccatgaaagagaaagacccctctcattaacttcatacagacaaaaaaaaaattaaataggatctcatatagctcagactggctttgaattcatcatgaagctgatgatgaccttaaacacagcttccatctcttgacaagcacccaaccaactgaatacatctcatctccaaaaacccattgaaaaaaaaaaaagaacaaataatatgtaaaatcagcaaagtcaaaaacctgtgagatggctcaactgataaaggtaactgttgcctgagtccaatcctcacatctcacatagcagaaggagaaacacacacacagacacacacattgtgtcaagttcacatgcatgaacacacctgcacacaataaatggaagatcatcaaagttaaactcatgtattgttttctattgaaattctctaaatctccctttagggaaatctcccttctttaggttgagaaaatatatctttgacctaggaagtcattctgagatggagaaattcttgctcttaaaggcatcttcttttgggaagtctaaataagcattttcttatggtatgagttagttcttcagagacattttctcctatctcaccttggagtttgggaatgtaatgatttggtatggccagaagttataggtcaaagatgcaactaaacatctgtgttgcctacagcccagcttcaccccacaatacaaagttaccctgtaaagtccacagtgcagagactgaaaaataaaataaaataaaataaaataaaataaaataaaataaaataaaagcctgctctaaattatgcctccactcacacaaatcctttgtcttaataatgtgggctgttgaagttttgagttcatataaatcattaccattgtccctggccatttcatcaccgaaggactttatctaaagactctgcccctgaagaatgctctacttggcagatagctcacacactcgtctccaaagtccttttgacaagcttcatcataaaccatctttctagagacaaaaaataaatggctaagaatcattagcacctaaccttctcagcttaaatttagtactcacccatgtgcagttcccatagagcactgagggttactcagaaactccctggttccaggctcactgcctctcccatccattacctctggaaggagctagtcccgttttatcacaaacacactgagagcacaagttttacagttagacagcccaaagttcagttctggtccttccccaggctcatttccttttctgtaaaagtatagtttgaataaatggacttctactctttgtattcagagagctgaacaagacaatatgtgttaagcacagattaatgggtataccacacagaaatagctcggtgagttgttcttggtgttgttgttattagcctaaaaccagcccatactcttatctgatgttaaggaggataggcagggataaattctatgttggatgggatctgaaaaaaacatgaaaaaaattgtcacaggacataacaggaagtaacaaagagcccagctgtgctgcaggaccccaccctcgtgctgaagggatagtcaagtagagcacttgtctatagtatatgggaagccttgggttcctctccagcaatgacaacaattccatttgcatgaaggaggctggagccacagaaggcccagaacctgagctggacctgtacacctatctatacatgcctaggacaggggcagaggataggtggaagactgtgctaaaacagtaaacatagaagcattgttcatttggggtgtctctgacccccccccccctgtaacttttcagttttcttgtttattttctgtcttgtgaaacaggacatcaccatttaggccagcctagccttgcctccatttctcaatggcaagtgtgtgccaccacacccagccccacactgcatcttaaaagccttataaactgggctttagagaaagtgtgtgtgtgtgtgtgtgtgtgtgtgtgtgtgtgtgtgtgtgtgtgtgtgtgtgtgtaagtgcatgtgcatgtgtgctcacatgcatattgaggtctaaggtcaaactgactttgagaatatccacaagctaatttcaccgagctatgatgactctgaccaaggttgtagatgtctgctttggtgtcactggctgttccattaacctctaggcctagcttttcagttcaaaggcattgttttatcttatgacttatacttcctgtccaggactgactgggcactagactgccttatatagcctcttgtcttagcaaagtcctcttcccagctctctaccgagcattctgtatccatggatcttaggccgatgtggggtcagggtgagtctgtctaagaagagttagctttgagaatcagttccccagcattgatgaccttgttgcctggcatgcactggatagtatggggtagggatgctactgccctctaatgggcagatggtaaaagtcttacaatgcacagtctccccatcccacctcctacctcacccccaccctggctccctaccacaccccagagaacatggtttatttcgcaaatattaagagttctagagctaatgggtccaggtttttatgacaaaagatactgaaaggcatatttatttctaattgttgttcataccaaccatacattgtattctataagtcaatttcttatctttttccccctgtagcagacattgggaagagatacagtgtaccatattttcattttgaagcaggaaatccaaagtccagaattagcttagccaaagacccagaagctgaaagctagaccccttgccttaaatcagggggtatttggtcctagctctggaaccaccatggtttcctgcctcgatcctgccatcttcaggtgccagaatatgtaatccttcagcactaattggttagacagggactcccaagtccccgcctaagccgtgcttccagaatcttgtgtcttctttcaaatatatgttctattctgtttccaaccctaacttgaaaatagtcattaagcctttcaaggatataagtattgatctgttctcacaatcatcacttgaattcaaaatacagtgttttagttaattttgtgtgaaataaattttcagcctttttttttgtttgtttgtttgttactgtgagagtgcacacatgtgacaatcagagaacagcttgtagatatcagttctctgtccatcaagttccaggacctataacatcaggtttagaagcaagacctttgccttctgagcggcctcaccagcccccacgtgattttcgttattaaaaggacccttggaaagttgttcctgctttgtgcactttcaaatcatgttctgaggtgtcttcgttctgttttctacctacctgtgcatttgaagcagggttggccaccttctctggctcaatcacttctgagtctgatttcctgatactcagcctgggtgtcactctccaattgtgacaagcagcaaactatgcaggcactggtgctaggaggccctggctctgaacacagtctctcacattctagacacctcagcaagaccaggatcaaaagcgaaaatcacactctcaatactcattcagtctccatcaggatgttgaggggggtaggtacaaatctgcaggcttttcctaaaagatcaagtgcaaacaagggaaagagtccaagtaagttacaatgaatgactgctttaatgacaataacatgatgtcatgaggtcttttcatgtacattttcttgatggtatgttggaaataaccatactatttgttaaagttttttttttttttcatttcttctaacagcccttagagggaggccccttcatgtactctctattttgggtaatttgattttattgaagatgatagccaagtgtttattgggtgctagctctgtaccaagccctaatctgagactttactacatttgattcccctgtggctcccttgtgcgataggtttttatagatagggatttggactcctgattggtgaactgactttaccaaacttaagacacttggcaagtgatctatcctagaccaaacaccttcctttctgacccaaagacccaaaggtgggatgagaaaaaaaaaaggacaagcaagttggttcagcaaggtttcctgacaagcctggcaacctgagattgctcctgaaagccatgtgaaggtggaggaggagaatcatctccacagcactgtcctctgcactccagcacatgcactgtagcctatatccacacactaataataataacaacaacagcaataagttatattttaaaaggaaaagctacacatcccactcgtgctcaccacttgccagttctttctcctgcattcatccgctagggttcttgtggtcactgatttttacatggtgtttcagcagagcacaaaaaaaaaaaaaaaaaaaagaaaaaaagaaaaagaaaaagaaatagcaattcagtgaccctctgggcagtcatggcttgttaatcatggtttgtccataacactaataagagctgtatagctaatcagagagactccccttaaagaattcactcccaccagggacggcttcctcacaaatatgatggcattgtccctaaggtcaagtctatgaacagaagtaaatccagtcctaaagataggtgattccataaaggaccactgtagtgagctgaaggaagattgagcactgtaagaaatctcacaccatatgtgctacaaaaccccttctacccaggcccagcagaggggtagatctcagctttcaatctgtatctccctctgcattctgtgtgagagcttttaaaacataagaataaggtcctgtgtgttactggggaaagagtgaaggtaacacaatatcattgcatcctagacagttgataagtggtttaccctagcagcttgagttccctacgcaaagcgtgacaccgtggtattattaagcaacaatacccaagattttcctacaaggccttgttgattcttttaacatacctacataactaagtgttcaatggtgagatgaggtttcacagattagcagtactttgcaggacaggaaaatgtaatccaaaattacagaatactatggttatacaatccctgcataatacaaatgaggttacaactaaatcattacatggccattatccaataatgcctacaatgtcagcagtgtgaaaatttgcgatcaggtgtcacccaagtcctgccttgatttatttctaaccaaagcttacagtaaacaatgtgacaaggtgatggaaggtgggggaggaagaaaggaggaaaatgagagagaaccagagagtgtgggatttgtcttgtagcttttatgagcttcccagatagatagctctcagccaacgcttgaatgtggcaaatccccctgccaggggaaagtggtctaaatacattgtttctaaagagtttgtttattcaaaatatgtctgctttgagcattcagtcttacaagtgagttgggggtgggggaagagacagctgaggtcaacactgcagttatgagctctctccttgctgtggcttcccaaggccaccaaataacactgactgcagagagggggatgtggcacagacaagagggaactctttcaaaggcttcccacttggctccgctgaattggagagatggagcctgtgtacatttgttggtgcacattagaaataaatttgggcattcatctaaagaactagctaagtagagatgtacaaagagacatcattatgtagttagcctggtctttgtaagcttggccaggcaaggaggtgtatgaaaagaaatatgtaaataacacgacctgctttataaaggaaaagagagccaaattaatccaagacatccatggcatagtgctagtttttgccctctgcttttctgtttataacttgagccatacaacgcaatagtctagcactaacaattacttacatgcttttaaaaaagaaaaaaggaaaaaaaagaaagaaagaaagaaagaaagaaagaaagcgaacacagaccatgatatccctcaatttctgattgtgaaacaaaacaaaaaaaaaaaaaaaaaaaaccaaaaaaaaaatgagtctttagccttgtgtacaatattattattaaatctaacattttttatagccaaattgttgactcgggttctctcctctccccacttccttttttcttggggtagggggaggaaaagctgcatgggagtgggcccgggaggaccaagccaatcaaagttaaaataaagtctctttctagcaagactactgtctataacatgttgttccttatagaaagtgggatatggtggcatttgcttgattaacttgctcgacaaaagtgacagctgctgcgggtgcatgcggataagctgcacggcgcggttccgcctttgtgcatctgtcagcaaaaagagaagaataaagagtgaaaagagacaaattggtcccaaaagacactccattcaacttaggaggcttgccccattcaggcgcttgtggtgcgcctcaagtactgagagcttattcaatttcattcactctttcgaatgaacccacaagtgtttaatttcttatgctgtcgcctctgggggggggggggagttgtaaagaagaaggggagagagactaggggagggacgccattgacaaccaggcagggtgatcctgggctgcatatattaactcatggctaatttatggtttaactctctgtgcctgtgtcctggacccatctgaacacttcaatggggaacctggcacaggcttcctacctcctggctgaggaatccaaaaccatctgtagatattgagggcaccctgaaaggttgaatgtttatcttacataaggacaatggtctgaggtttgtgccttagacagaaatagggatgactggcacccccagggtagagtttgggtaagaggtctggcaaacctgtttggtttgggttgggttttttttcccccttttcctccctcccagaaaggggcgggaggggggcggttagagtcacaggcagtgagaagaagcaagaacagaatatggtttcctgagattaaaaataaagcaagaggaaagagcgccattggaggcagagcccagctgtgtgcgctggtgaaagcacatgttaacttctaaaaagcactttgcacttccctgagctacagtggcagaacttgtttcctggattctttatgcaggcagcaccttagacacccaaaggtctcctcctggggctttatgccaaggaggacgtcggctgactcttccaagtaaatattcttctagccaggcttcttttctaaatcccagctctcccttgggctcggggaccaccctctcagccagctgcagttctggtcatcctttgtcaattgctgtttggaagccactgggctatctctgagatgagaaattacttccccaaagagtttgtgttcaccaagttgacattgatcttgttttaaaactgtgtcggactttggggaagtgttctggatccagttagagttgctgggtgctgatgcctttgaactcaggggtttggggaggtactttggatggtgtatccgtgtgctttcatcatttcgcttagaaactaactgtgtggtttgacctgaacgactatacttagccgagacctgacctcttcccatgtaatcgtatggaaattatgtcaatatgcaagctgtttcctcacagtgatgattaaaaccaccttagcccagacacacgactctttaaagttaatgtgaattttcctaagaactttggctttagctgacaaaatctagtgactcatgactatagaaagtttaatgtgcaaataatgaaattagccctaatgtgattaaccatccttgtttaaaaaggacaaaagttggcacccggctttatctttctgttctgtacatgagttacagtccttattttagagtatgatttctataatcattgctatatggtatgcaaattttcatttcagttgctgacgtcaatctgcctgcaaattaatgcagttaactctaaatgcagttcgtctccatacctaagaagcaatcagaggtgtgggcagacgttggtcgtgaataatctgaatttggtttctgcgctgagtcctaaatccttgtgtatgcatagcagagtagtgttcagataaattattcctacttctcacatggataaaaggcagcaggatgtgccaccaaaactagaatttcattctcgacataattgagcttcaaatgattgagactgaattcggattgtaactatacattctctcaaaacagtgggttcctttgagaggaaagaagctaaaagcatgggggtccattttctcaatacatagtgaggcctgtgactaaatccctaacatatccagagaaaaataggcctcagaaaaaaggtattgttcacagtggtcagtttgttaatgcccaaagtgcacacctgccctggaagacccaggtggcagataaggcctgggtagatgctgattgatgttaatcatgttgggctcattgtttatgtgtggtgaagtgggaagtggtctgaactgagaccactctccaggtacattagagaacagcccgttttctcatagataacaccgctccatggtctggtctgtttgccaaaagtgaggtgtcagcctctgacatttgctacaaaaacttgtctgagcagcacacgccccactggagtgtgtcctgatttctctgtgacaggtcttgttgatctgcttgggggatgggttagaacagctgggctggagccaatgttctgtcttgcattcagggttgttccaccattcagaatcttgctcaattcctaaggcgctcggctgtcttagaagtcatgtgctcacaggcaagtgcagagtggactgcggtagctcaaccggattcttttatttgggttgtagaacttggtcaccaatcagaagagacagtggaaaggttgggtagctggagttcaaaagctgggatgactgtgaaggagtctgccttactctctatatagcctatgttaaacaataccacaaaagtatagaaaaaaatatatcaacttagggaacccatgggctctgggttctctaagagtcagacacaggacaaatgtaataaaacttaaaagctaatttattacatatcacttattgtatttcctttcttcacagagaatgattacatgtaattatcacatactgtataaatacaaagagcagatttcaaacttgcctacttcttgaagctgttagaattcaaccagtttaatgtacatacgctgctttggagaggctccgtcacataagtaatcactaaatgtttgcttccactttgttagttttactctcaatgtagttaggatgtcaggatgtgccttctctccagggtggcttcatggccacacaaataccctgagatatggtaactagtaagtacttcatgaaaagtggccccttaggagaaacccatttgggaaaacacaaagctgaacggctttcttttctgtaggacttctcagaccatttggtatgctgcctcggtgagtctatatccctagcagcagtcagatggaaggtctgatgtgtgctgcacccgcaacacatacttccaacctgggaaacaggaaacaggaagtgcgtgctgatgttactttggttttattttatcaagctgacagttaaatctctctggtagtcattttgttctgtcttgcatttatttatacccaagaataggataaaaaatggtagcatttccccgggaatcagctcccataagcctcttgccagacctgggacactatagccagagacctaaagggaatcccaagggtcccagcagctgtgtggctctcgccttcgatgcacacatatttttttctctttatggggtattattctgtgtcttcacagaatgtgtcacacagtctcagatctatggaccccaaaccgccttagattcaaaaggcagacatttaccacaattggaaacaagttctcatctgaggcacaggaatagcttctgtttggaatgcttggtccaagtatataacatcgttgaaataaaaaagacacagtctttggattattagttcagctgggctgggagccctccgataagaggtcactggtgtgagttactatggtaattgagtagtatcagcaatagttttactctcgtgagcattaaagcacataataataggcaaacaacagtggttaaagcaagcaggtaggattactgtgttcttttgtcagaactatatgatgtcttgtagtcagttttaaagacttctcaagccccaaatccaccctactgtcacctgctgagtgattttgtatgcttaatctcctgccctcaactccaggctctttactaatttgaggcaaatgggtatttctgacattaaatatggcaacaaggaagctctgacctagaaaaagcacattctgaacactgaaatattcttttaacaatttcgttaaggctcctgttgaatgattggggagagggttcgtggatgtttcagccagctaaggaaaggagtagggtttggggtttgttgtttgttttggtttggttttgggttttttttgttgttgttgtttttcagaagaagaaaagagaaaagaaagaaagaaacttgcagcgcatccccactcccaacttcccccatgaaacttgtcacttcgcatcgccatccgctacccaacaataatcactgcgtgcctattgctaattgcaagcacagctgaggcccagcgggaagcctttgcacagtctcaggcctttatacgaggctcaatctgttgtatggcacttgttcacacacaaaaaaactaccagcaaaggcagaaagaggcagagtcacaggtttcttgtaatccttctgcctccctgctgacagcccagccctagaagcattcctggttttgtcctcttctttacaaaatctgaagtgaccttaagctacaagcacgtcagcttttgaatgttgagttgccggcttcttcaggtgcattagggagcaggggggctacatctggcttctgcgtgtctgtttgcagcacccctggggcgagctgtggcttcctgtaacatgtaaaatatgagtgtgaactcagggttcatggcaaggaacaggaggtcacgtctccattcagttctaagtaaagagactgagatttgcagatgttttctctatgtgtaatgacaccaccccctccccaagccaccgagcaactgagcgccgttctttgataaaatgtgccacaatcagtgtgctagttgcagatttattcatatcaatttttgcaatttatatattcagagacaagattgctatttcggcaactttatgttggatgtcataacgtttgcatctagaaagagagggaagaaagaggtatgggactgggagggtgagcagagaaagaaaagaaattaagtctgttcccgggccaccagctggagtgttgtcaaggagacagagtgtcacactgtggagggtctgtgtccccttttgcccagcagtcacttcctgcctaggctaggctctgggagcttgaggtccagaaggccagttgatggccatggtgaatgagtgtgggtttggaattttgagaacaatctctgtggtaaacgaggccaaacccatcttcctagggagcatgaactgggaggcccaagaaaatccctggtgtggccaacatttggactggcaaggcctttctgctctgccttaccacactctaagactcaatgaatgagaaataagtctcctgtaaaattcctgctggcagaaatgtgcatctccacctcagaaccttcctgaaggaagacattggtagaggggaggtacctctcctgtgcctggggagtaaattctcctcagagggtagtgctaactgccaagctgggtgcaaagaccaattggaggcatttaagaaatccatgatgtttattagtataaatgttccatgcagggttagttctcagtaaagggcaaaagctttgcctgcctctcattattagcctaattctacttaattgtttcctaaaataagggcttcctgagcacacattccaagccttaataagtctgttgtggtgagtgatgcttggtggggaggcactgcccttttgggtaaccagggtctcagtgctgaccgtgagccgcttgatcaaacctgtgctgggtagtgtaggacttggcaggcagaagtacaaggatgctgagattttccgaaaatctatgagatgacatggcacacactgcaaacgaagagaggaaaaaaaattcaaagggtccttttccgttgcttggttgccaatcctcaataaggatagccttagataaagagtctcagcctggacttcagttactgctgtttcacagacttagaaatgttggccctgtggcacgttttaaatagaccaaataaatgactgaacaaatgctatcagatttgttcttagtgattcaccatctcaaaattcaaccttgagaaactgtctccatcctgagagtaaatgccctgtatttctcttagatgcattattttccttttggcaaagcacaagaaggtgttccagctccaaacatgtacatgagtgtctagaaggcgactcagtgaataagagcacttgctgtacccaagtgaaaaggcaggcatggcagcccacaactgtagtaccagcgcttgggagagagggaaaggaagatttcctggagcttgctggctgccagcctagctgaaaacggaagctgcaggtcccgagtctcagggactgaggcagacactgacagaggaggacacctgatctcttctctcctcacaggcatgtgcacctgtacacacatatcatacacacgcacacaattattcaaaaacggttatgtacattgatatgtattgagttttcttaaccaagtctctgtgtgtgtgttttaatagtaaagtgcattacacagagtacactataataagtgttttgagctccatcatgtatagttccacagcatgatgtggatttggaactttgccttgattcctaggacccatttcatcttttacagctagaactctacacatactaatgagcctccagtcactgccttttctcggaccctgccaaccaccacactactcttggtttttagaccccctcatctaagtgaatcatacagtggcttttgtgactagtgactgatttgtttcactttgcataatgtcctaagggagcatccatctgtgacatctgacagggtctccctctccttcaaggctgcaggaatcaagcacacttggtatccccaccccaccccctgacccacagtaggctgcatcgacctctaggctattgtgaatgaagctcgctctatcacaggtgctcaaacatctctttgagacctagctgtcagatttttacatcactacccagaagtgtatttgctgagctgtctatcgatctgtaatagcgcttacccagcttggggggaagagtggaagagtggtatttgcattctatctgaagaagcatttgcaactgaaaatttcatttcgagcctctgctttcccatcataggtgtttttgtctttaaggagatatctaaaagttgatgtttgacatcattttctgattcaaaggtgacaaataatggccagcaatatcacatttattaggaaacaaaacctaatttcagagcagtcacatattcttacagatgaccacccatactaccttactgagatatagcagacagggaagacaagaaagaggttttgtgacatgttgtgttttattacattctggttgatttggcaacgacaaaatcattaatggtctagtgttgactcacttatatagtttactgaatctgacaacaggttaaccaaaccatgaccacacacacacacacacacacacacacacacacacacacacttgtattctcccctctccctctccctctccnnnnnnnnnnnnnnnnnnnnnnnnnnnnnnnnnnnnnnnnnnnnnnnnnnnnnnnnnnnnnnnnnnnnnnnnnnnnnnnnnnnnnnnnnnnnnnnnnnnnnnnnnnnnnnnnnnnnnnnnnnnnnnnnnnnnnnnnnnnnnnnnnnnnnnnnnnnnnnnnnnnnntctccctctccctctccctctccctctccctctccctctccctctccctctccatgagacaaacatttgcccacataagttgagctttgaactctcttgcttagttgcttccaggaagaattcctgtagactctgagctctctttgtgctctctctacacagctaacactgatgggtctgaggagtttgaagcaggcagtgaagttaagactgctaatttaaactcactcctccttttgatcagtccgttgtaatactgatgctaacaaactacctaaggtaggctatttctttatgcagtgagtataaacagttgaaatttattcttgaataaattgtaacatccctggctgacctggaactcacttgttcccaaactcaccgagatcctcctgcctctgcctcccaagtgctgaaatccaaggtgtgtgtcaccatgcttggcaccatgtaggtccctttaaagggagtcaaaataatattactcccaaatactagactccatgtgtaagattctatagaaaatacagtagcaatatacatttttagagaattatttattttgcatcaccccttcctcatggggagatactgatagcaaaccaggaaccagatcctctctgctcctctgcctgaagctgtaatgtcagccttctcagagagccccacggcaaagcctggtgaatacacggctaccttgaagagtcgtgataaactttgtaaagatgcaccaaggtaggtttttatgcatccaaacaatttcacaagtgaggaggaggaaaccacaacccaccttcggttacagaggacactgagcatctgaggtcatgccgctggtctgtaacctctaacttgggtgtccaattatagctttatgcttttagccaagcgtcccaaagccatggctgggaaatacccattctaagagcagttgtttgggaggattggatcttgaattacagcaacactcaagtgtggcaaaagactgcatctttcaacagtgtccccactcccgaaagtatttggatgatatgcccttttagaacgtgttgatttagcttttggggagctttgacaaatccaaaaacttgctatgaactacatgtagtcttttagtgttctccccacttggcagagatggcttgcacaagctggatttcttcctcctaccctctgaatctttgactaagatcctgaataacacccaaatcctaggactgttagacccaagcagcccactgtactgtggcttaacaaagccatggggacttgggtagaatttaaagaaagccaggatgatgtgtttcacaggttcttaaattacccaaattgtaaggaataaatatgcattgaaaacttcattgtaaaatattttattacagtatttcaatacagtaatttaaaaaggttgtgggggctttgttttgttctaactaataataactcacttttgtctcaaaaaaaacaaagcaaagagcttagtcacataggcgtggtcaggtatcatcttcctctttgactccttgccaacagaaaatgccatttcttcagtagacgagatgctaggctggtttctcttatgcatggctgtgcgtggctggagaaaggtactttccagataaaagttcaaaatcctccagattttcactgtgcctctcctgtccaaagacacgggttggttaccaactgatctgtttactcaggcattctcagaagaagggacccacttggggtgacttggtttcctatgtgtcaagcagggtaagacagcgcagctcacataagactgagcaaagcctagtctatctgggactgttgaaagctgcctccccagcactctgtaggttgtattctttctctgtttccaggatgaggaaactgaagctcggggagattaatgggaatttttctcagggcagatctgaagggttgggaccaagtgcgttctgtcagcagccaggttgcactaggcacctaggccactttatttcaccgagtctcacttcttgtcaccttgagggtgaagtgagtggcagtaacttaactaccatgctgttgacagttcagctctgatctgcccaagccttcggtggtttgcttgtctgcataaatgtctcaagtgtgcctattccaaaggatgtacatgcttaaagaaatgaatttacaccagagagctattcttattattactaagacagaatatactggatatatttgacaatatcacaagtatttattcaaaggaaatgtgggaagatgtgcttattaatcctgggccaaatactatcatttttctggcttcctttttatgatactgaactaaacattatcctcaattatagcacagagtggcatgtgtgtgtctgtatgaatacatatgtgcatgtgttttaataaaagccatgtactacagttaacagaggatacatcagtaaaatttccttcagaggaaaaaagcaagctggacctagtagtgtaaacctattatctcagctctttgggaagctgactatggaggaccctaagatcaaggcctgcgtaggccacagagagagcaggaaaagcaacagcagggctaggctttgtaccgagctggtcttacccaggctttgtaccgagctggtcttagcaggcttgggacttttgtgctgaaagtgaatctcctcagtgcattctggcaatgccttagcgctcatgaggaaaaataaagtccatctgatatgcaagagttctatttcgttctctctttccactgaaaactctatagtttgtgacatagcatttccagggctgaacgtttgtttagtgttataattttgccagctataaaactcctagcaaaattcaagactgtgtttttctagttatatttcatttgaaaacaaacttccctggatgaagagcttctccctgaataaaggaagttatgctcattcaggctaagaaatggcattcctcacaccacccagggttttctatttatttctcctgtgccaacagttgttcttccgaccaatgctctaaagccattgagtaacttgccatggcagtatccccaggtccccattatctgtgcagccactttctaagctcaagaaatggacattctttttactctcagccaagactgggcttcagtagaaacaggctcaacagcattgccctagccatgcacttctgagagagcttcaggactccacagcttgctgtaagacacctggaacctagaactgacactgactccatgtagccaatcctttccttcttaacagaattaaattgaataaaaacaactcattctgatttggtgggggaaaaaaaaacaccttcaaattacctcaacgtttactagttgtgcatccttttttcatatatatggggctgctattagttgtttaattcaacgattaaattgtatcatgcttgtatattctgtctaggatccacacagagtgggggaatccatgctccataaacattgattgtttttgctaactctgtgcatgctcatgggaatatctgtgtgcatgcctgaggttatatactcattattctgcacaaaattgtgctttgatggcaacaggtactaaagacaagtatctgtaagacatagactcatctggtttgttaaggtgtttgcataagttaaagagataaatgatctttgtgttatgtgagtgtgtaaatgctctttcagcctaggtacctggtttctgccaccattcatctgtgacatgtggctcattccagaaacaagtgtaccacaaacagcaaagtctctataggacagcaaatgaattccagaattgagatgagaattaagacttatagccaggcatgccagtgcttactatgtatcccagtatcctagcatcaggaggcagaggcaggaggatggctgcaagaaagagcatcctggtctagcaagtacagggcaatcagaagtacaagaagagactctgtctttaaaaaaattaaaaattggagctggagagatggctcagtaattaagagcactgactgctcttccagaggacctgtgttcaattcccagcaatcacatgacagctcacaactgtctgtaatcacaaaatctggtaccctcacaggcacacatgcaggccaaacaccaatgcacataaaataaaaataaatccgttttttaaaaaattaaaaatagcaaaatctgtgtggcagctacagtggcagcacctcagcagacaccactccaccatcagtctgtattactcaatgggattagccagctctgagagaaagcctggttccatgagctcagcagacaccactccaccatcagtctgtattactcaatgggattagccagctctgaggaaagcctggttccatgagctcagcagacaccactctaccatcagtctgtattactcaatgggattagccagctctaaggaaagcctggttccatgagctttaccttctcaggcatcaattattcatcttacctgtcaactcttcagttttttagggtatgaatttcctcttcagttttttagggtatgaatttcccatccatccatccaaccacaggagagacctagagagagatgttggagtctcttgtccttgtagagtatagacctagagagagatggtggagtctcttgtccttgtggagtggagtgaggggaactaacaatacactttaatatttgagacattcaaaaactcaaaattaaagtaacaaaatccttgatgaatatcatgtttttcaatgatgttagtatgtgattctggtctctcaggaccctgatcctggccataacagcccatgttgtagtgggtacaggctacatggtagaattgccctacagaagtcagtatgcttcagggcagcatatgtggcttgagagatctgagtaccagtgacctacacttctgctagaagtgaagcaagacaataactttgttctacacattaataaagtctctgtaagcgaatgccattttattgagcacttactatgtggcacttgctctggtgggcactgtgcataaattatctcctaatgctcacggcaaccttatgaagttggtactggcattaacccaaagagaaaactgaaggtcacagagttaagcagttaatttgaggctatccagctaacaagtggccaaaacaagctgatactgagtctatgcctacaaggtctgaaaaatcattcattctgggaggccttttaagtcaagacttcaacatgaatcaatgttggtttaaaatgtgctttgggaacaaaaggtagtttcctaagtttaagtagaatcacattgcttagagctccccatatgttgcttcaaggcttatgcacacaattccaggacctacggatcgtttcttccactgcacggctttcccaaataactaaccctctgcccctgtgttttgttatcttttaggttgagagacagagattgaacagttgggggtgaggtatagtaatgatcggtggtggcaggggctgaggtgaaggcagtggtggtaccagctttgctatctactaagtatatgcatgagtgtgtcacaagcattcttttagttactcatcagaagaatcctataaaagacaaatgaatccccactttcatcagtaaactgagtctctaaggatgaaagtgtccttactcaaggtctcgagttcagatgtgtcttaggaccagtactcttcaatactacatgctagaaagccatgaagccacatcatcgaaaaaacctgcagcccaggatttgggaggctgaggtgggaagatcacttgagcatgagatttaaggtcaaacaggccactttgagaagtgatgacacaaatcatggctgcgaagctgggtggggcaggcatgtggttcaggttactcagactacaagattgcaaattgggagtctgctggcgcgaaggagtgagttccagatcagcctggtccatttggtgagagcttggctcatatatagattggtagtgggtaggaaagaagaggaggaagaggaggcaggcaatatcctaatggtcttctagccccttaccaaatagagccttggactcagctgcaggtagcccacgggtcagagctgaaatgaatatctttttgtgttccagccttcccccaaatgactacatggcagatgtattttaaaagagtccagtctacaggcaattttccttctctggcatgtgtttaggattaaagtagccttgtttgggacgttccaaatcagtagccctaaattaagggacagcagatcatgactatattcaaaatagtgagtgttgtcaattcctaattctccttccttggacctaaagcatgttaccactagtgctcaggtgttaaaatagttccagaagagttctatatgtatgaaagacaaaacaaaaatagggaaaactccagctgttttataaattttctctttcaaagaatcattacaaatctgctgctgcattgggattgatataaaacacagctctggtgagagccctcctctgggacctgctttcctaattcatgtgctatctatcaccagctagagacttggagagggatgcagccactcacctctcatgacccacagataggggagactgcatctatttcagcacagttgccatgctggagattcccactgcctgtatgataccgaaaagtcactacccatctctgggcctttgtttcctcctttccaatgtctaggaagagtcccctcaccccctaacattttaatgttctaaaaggcaatacctacttctttctccctgatatctaaatgccttttgacgcccatgctggagaaccaagttagcactggctgggcctcatctaaaagtgcctctgattccatctactgagcataaggtttggaaagaactcattttctcccttttgcctctttgaatgtgtagccaatggggcatcatacatttttttacacttctcctgctagatgtgagattcaggagaagattggatgttgcagggtgttcttgcttctgggatgggaatgtgcttcgaagcattgatcgcttctgtatgcgcaccctccctcgccttcctcaaggtgcaggactgttgacctttttgtctgtatttttaattcttatttatttattttgctattttaaagccatttatgagagtgagaacttcctatgtaaaatggaagggggtgctatatttttccctgaaaggtggcacgtctctcagtgaagagaaaaaggcaggatgcaccaggcttgctggcagtgatagaagccagcgccggtttgcctgttgtcacagccaaagaaaaatgccacctctgcctagaagccagagtgccacacttcccttttgtgtcccagacatgtatccatcacagggctctcagcacgtgtatttggacatgtagtcacttgagctgtttgaaggtcaccctccaacccttggaaggacagataaggacaaattattcctgaagtaaagcggattacatgtcagatacagagagtgagtttaagttggaggcctaggcgaacccaggagagcccctagctgctgaagcagtttaaagccacatgctcacctgtgatccaattcttgtcccagagctgcttaacaaacccagatgcagtagcagcaaatgaagagtcccatggcaggaggtgccaaaaacaccctccacacacaaccaccactacccctccctaaaaacaaagtttcagaaaaaaaaaacgttctcacccctagagggaaaacctgtccatgcctgaagcagcttgaccctaccaatcaaataccctctagagactgaactgcccatctcagcaagaaatccccacccccagccgcctgctccccgcggagggacagaaggttcttacaactgacagtttctcctccatgatctttaaaagagcaggagctggctgtgaggctgcacgctgcctccgttggggtagcgtggtccctgttgcggctgggctccaaggagagccatgcttggctctgatgaggaaggagcctagataagaaagatgcaaagagggcttctatacgccatggctgcgactctgtagtttcttgcaaggtgcaacttggcagttctaccttgcaagtaaaaccccaaattaatttttttttaaagaaattaagtcagaaacaaggcttcagaaaaactgtgagtgttaggcataaactgattttggatgatctttaggtgagaaagggtggagttaccatcagaaacatgtttttatttatgctttttgaatccccactggtgtgcgatgtgtgtgtgcctgtgtgtgctggtgagtgtgagtgtatgcatcgcctccgttctctgccttctcctttatcttcatcttattttctgcatctttcctgtgcacagttcatatagatgtcacataaataagtgtataggtccatccacaccttttcattttatttgtaaattgtttggtataagcggcagagcgtaatgaaacctggtgaagtttaaaagattagatttttttttcatactgacacttcataacactgttcatatgtctctgagtgagatttatgaatatatgagcagtactgcaaaattatactgcaccagagacttcctgcaccacaggggtggcagtctaaagtgacacagcttcaagcatttttcacagacaagaagcaaaatttaacccccataaggggaagtatgatttcaacagcttgaaatgagctcatttgtagatagtttttttttcccctcttatattccatattttttctgctaagattaaaacagattgcacagctaatgcaagggcacttaaacgatgcccagaacagtttggcccttaaagagaaagcctcatttgctgtccatattaggaatgccccagtcagacaaatggttataaattccacccctcggttcctcagactctccacctggttctctgaattgcacatggtggtgggaggatcattctcaaaggttaggtgacaacgagggcatccctgtccctcttttggccctagagataatgcattagaaaatggacagagcctcaagtcacaccctagtgaagtggaccagttcagacaagaatcaggagcataagaaacagtcttcagacatggaccccacggacgctgtgtgtagcacaagagtcccaggttccatccccagtccacactgccctagtgtggactgagccagcacctcatttgtgtgagtggacagtctctgtgctctccagttctctttgaccctcttctctcctccggaaccaaataggtgctcagatgggacctgttccctccctgccctctagttgctccatgatgcagggcctggagaactcttgtctctttttcagcaatggtacaacagctccatgaacatcatctgcacgtggctgaccgacaggatggacctgcagctccacatttaccagctgaaaaccctgatcaggatggtaaaggtaagaggacaaggtagtcctctggtggcagtcctctgtgggcagtcctctggtggcagtcctctcgagagtagctaactgagacacatgccactggcaagctgcagaatgtccagatcacacaaacccctgtctgcatacacaacacgatgatttctaaggcagcattgcagttaatttcttactgagacattaactaacggcaagcttagactttaaagggaggggtgggcactggtatctttgtctataaaggaaaactattgtatacatttgccacacacaaaatgtcacagagactcttgtgccttcgaattgcacttttgaaagcttgctttgggcaccattatgttaactgcataaatcaccaatttcatttatggtttaattaaataaaattttgccacaattaatttcaaggaaatatttacccccagctatttctaaacatgctctgtgatcattatcagaatgcaaatcaatattgttctcatagttaattgaagtggtttctcttacaatgcctgtacacaatcaaacgtaaagaatcacaaaggtgagataacataccctgggaggagctctttcccctgttcttatgtgtgtgctgtggactaatgataattatttcagcgtgaaatcgcagtggtttacatgaaataataagatcgcagaagggggtaaatacgttttttgatcatttcagtttccatttgatgcctcaccatagagcgtttttaaaaatgttcgtatgcaaaactcctattcaacacacaaaaatctccattaaaatattttactaataagcatagctgaattctcttaacagtttgccaaaaatctcccctaccctgcttctaggcctcctttggattcgtcccatccccctgaaggtgccccgatatcccagtgctgactaaaacccaattaccatttcattgtgtgtaattaaggagttattatcatctgcatttgatcccacaaagcctccacccagcagaaggttatagccagtgtgtagctgcagctattgtaaaagaaatatctgcacttgaatggcacactcagcttaattttcttgttttttttttttaagtcagtttcttaaggcaagtttcactaagcactgccagaccctctgaattccttttcttggtataaatatttcctttcttcttttcttttcttaatgtgtgtagaatataggagatgatttctatttgacctttatcggaccaggtgcacataaaaagaaaaacatcacaatttagtattttcaggttatcttttcataactgctatttccagatctgtgtcaaaaactagcaatatttgaagataaaaatatgtaagagaggaggcttaatttttgccatctgccaaaaacaaacaaacatatacacagtcccgagccacagggcagtcccgagccacagaaagagttttcactttctccagaatgatgctcatctttactacatcctcccagtggactgagccagagtcctccagcaaccacgcagggcaaatcccatgggtttccaactttctttcctgcttcaatagacactccattcgttcattcattcatacatacatacattccgcatccagaaagctgtactccttcacccgaacctaggtagaggttaactgagctctcctgaatactaacaagggaaggattgaaatctgagtagccattcaaatccaagggcttcatagaaccacactgcattcactgataaactccccagtcactgcaacctgtgactttaaaagtggattgacctattgatcccgtaactgtattagatgagctattaaaaatacaactaatgtgatgttgaaatacattaccattctgctctcacctctttattaagtttcctgtatcaacaggtgaagcagagtggagacttggcctctgaaatgataggcagtgtgatgaagaagctcatagttagaaagaccataacaaaaacgaactagacaaagccagatgcttctgcgcatgctcagttcatgccaaggaggctccaggaaacagtccttagttacctgaggaaatccgagagaaatggcctggaggaacaacgaaggggcttgtgatgctgcaataccaaccgttattcttgaaaaggagccaggtttcttccctgagaacataaagttgtgaacgaaatggatacagatatttcccaaggagatgagatctgagtcacatgcctgcaacatattgatgaggcattagcgctccatcttgcccatcattgtggctgcttgtaataggtttcatataccaacatgcatatgtctatcttgtggatgagacagagggacgtggctcacacaattataacaggcaaaaatcctaaagatttgactgcaacagaaatcacaaaataccataatcacttgattcattcattatgtgtatgttagggccctttatcctgtcgatcatattgttataataacctaagagaaagaagtagaccgggggaggagacaaacaaccatggaacatttccctttgtggagctgaataaacacaagcttctgttctttgctttgtctcatctaatacagtttatcctgccacggtttctcattttctgtcatttggttgagtctcagttctcagtccaagagaaatctgaatgaagcggcttttacttttcagttcataaaatgtgacacttaaccaaaagccatgactctccctcgcacttgtgcttgctttgcatcctctccctcctcaccttggggatgagatcattcttacctctttatctttcgtttccatagaaaacctatagagatttccgattgcaaggggtcctggattccaccttaaacagcaagacctatgagaccatccgaaaccgtctcactgtggaggaagctacagcgtcagtgagtgagggtgggggcttacaaggtatcagcatgaaggacagtgatgaggaagatgaagaagatgattagaccattctctgggtccaagagtccattgggatggagtcctgtaatcaatgcatgtctttagtctgttagttaaccccattaggtaattttctgtcaaccaccatccccatgagatgtttaccaatacaattaccattttagctgcgtggtaccaagattagcaaatggtttcctgatttctgtgtctatatgtttacaagcaatatggaacaccattcttaaacactgttcatggaaagaatacatagttcagctgctaggtgtgtcccttttgttagcagaacaaaatgatgcttcatcctgtactacagatacacggattggaagtggacatggaagcaagtgtgtttccatgtctctgtttcatgtatgtgggtaccaggtatttaaattagtacataaattaatttaagtgcatagagctgcttggttttggtctctgttttgttcttgttttatgagaaggggaaaaggcatggtcccaacaaccaactttagcttttctcatcccctaaaactaaaagcaatggaccacttgtgtcccagcaaacccagctttgcatttatccatgtagtttagttccccctaccaaaaaagttacatatcaatggattaattattttcattgtcatagcaagggggccacgtgatcaggaagtagcatcaagtaagtttcagaccaactgtcttctgtgaaagtttatcctagtaaatgtcacattttgcttttctgtttcaataactgtatatgtaaaaaaaattattgaaatgaaaaccctagactataaatgtatttataataagatatggatatttccttcagtagactgtaaccataacttcaattattttgttccacactgttttttatatctgtcatgtacattgcactttgatctgtaactgagcgaccctggggtctgctatagagctgtttctttctgtggaaagtagtggatccatcttgctttttgccttatataaaagcctacagttgtaaaagtgtgggaaactgtggctcctcaat

SEQ ID NO: 2 - DNA, 5384 bp, Mus musculus
agcggctgcagatggcatccggctgcgggctccgggctcgcaattgattctcgcccttgcccacctcgggtgcacacacgcacctctcccttctcctcctcccctcgcgctcctgggtctgcgctcagctcgcgctcgccgggcggaggaagcagtcgcggcggccgaagctgagcagcagcgctcgctctccctgacctaggaagaagcgcctacccggacagccgacccttggctgcctccagcgccccccaccttttgcaccccaaggcgggggctccggggacccccctctcccaggcgctaccatgctggacccttcgtccagcgaagaggagtcagatgagatcctggaagaggagaggggcaaggatgtgctgggctcggccgcgtctggagcgcgcctgtctcccagccgcaccagcgagggctcggcaggcagcgccgggatggggggcagtggcgccggggccggggtgggcgccggcggcggtggggcccagcagccgcgccggcggcggccggccttccagccctagcccgtcggtggtgagcgagaaggagaaggaagagttggagaggctgcagaaggaggaggaagagaggaagaagaggctgcagctgtacgtgttcgtgatgcgctgcatcgcctaccccttcaacgccaagcagcccaccgacatggctcggcggcagcagaagatcagcaaacagcagctacagactgtcaaagaccggttccaggcttttctcaatggggagacccaaatcgtagctgatgaagcctttatgaatgctgtccagagctactatgaggtgtttctcaagagtgaccgtgtggcccgcatggtgcagagtgggggctgctcagccaatgactctcgggaggtcttcaagaaacacatcgagaagagggtgcgcagcctacctgagattgacggcctcagcaaggagacagtgctaagctcctggatggccaagtttgatgccatctaccgtggtgaggaggaccccaggaagcagcaagcccggatgacagccagtgcagcttctgagttgattctgagcaaggaacagctctatgagatgtttcagaacattcttgggatcaagaagtttgaacatcaactcctgtataatgcctgtcagcagctggacaatccagatgagcaggcagcccagatcagacgagagctggatggacgtctccaaatggcagatcaaatagccagggaacgcaaatttcctaagttcgtatccaaagaaatggaaaacatgtacattgaggagctgaagtcctccgtcaacctgctcatggccaacttggagagcatgccggtgtccaagggtggagagttcaagctacagaaactgaaacgcagtcacaatgcttccatcattgacatgggtgaggagagtgagaaccagctttctaagtcagatgtcctgctgtccttctccttggaggtggtgatcatggaagtccaaggccttaagtccttggctccaaatcgaattgtatactgcacaatggaggtggagggtggagagaaacttcagacagatcaagcagaggcttctaaaccaacctggggcactcaaggcgacttctccacaacccatgcgctgccagctgttaaagtaaagctattcacagagagcactggtgtcctggccttggaagacaaggaactcgggcgggtgatcctccatcccaccccaaatagccccaaacaatctgagtggcacaaaatgacagtctccaaaaactgccccgatcaagacctcaaaatcaaacttgctgtccgaatggataagcctcaaaacatgaagcactctgggtacttatggaccattggtaagaatgtgtggaagaggtggaagaagaggttctttgtgttggtgcaggtcagccagtacacttttgccatgtgcagctatcgagaaaagaaggcagagcctcaggaactcctacagctggacggctacaccgtggattacaccgaccctcagccaggtttggagggtggccgagccttcttcaatgcagtcaaagaaggagacacggtgatatttgcaagtgatgatgaacaagatcgaattttgtgggtccaagctatgtacagggccactggccagtcgcacaaacctgttccccctacccaggtgcagaagctcaacgccaagggcggaaatgtgcctcagctggatgcccccatctcacaattttacgcagatagagctcagaagcatggcatggatgaatttatctcttccaacccctgtaactttgaccacgcttccctctttgagatggtgcagcggctgactttggatcacagacttaatgattcctattcttgcctgggctggttcagtcctggccaggtgtttgtgttagatgagtattgcgccagaaatggagtccgaggatgtcaccggcatctctgctaccttagagacttgctggaacgagcagaaaatggcgcgatgattgaccccacgcttcttcactacagctttgccttctgcgcgtcccatgtccatggtaacaggcctgatggaatcggaactgtgactgttgaagaaaaagaacgctttgaagaaatcaaagagagactccgagttctgctggaaaatcaaattacacatttcaggtactgctttccatttggtcgacctgaaggtgctttgaaagctactctctcactcttggaacgggttttgatgaaagatattgtcactccagtaccacaagaagaggtcaaaactgtcatccgtaaatgcctagagcaggctgctctagtcaactactcacgcctatctgagtatgccaaaattgaagggaaaaagagagaaatgtatgagcatcctgtcttctgcttggcctcccaagtgatggatttaaccattcaaaatgtaggccgcttaatcactcccgccaaaaagctcgaagacacaatccgtcttgctgaactagtcatcgaagtactgcaacaaaacgaggagcaccacgccgaggcctttgcgtggtggtcagacttaatggtggagcatgcggagacgttcctgtcactctttgcagtggacatggatgcagccttagaggtgcaacccccagacacgtgggacagtttcccactcttccagctgctgaatgactttctccgtacagactataatttgtgcaatggaaagtttcacaaacacctgcaggacctgttcgccccacttgttgttagatatgtggatctgatggagtcctccattgcacaatctatccacaggggctttgagcgggagtcatgggagccagtcaagagtttaaccagtaacctacccaatgtgaacctacccaatgtgaacctacccaaagtaccaaatctaccagttaacatccctctaggcatcccacagatgcccactttttcggcaccgtcatggatggctgctatatatgatgctgataatggatcaggtacatcagaagatttgttctggaaacttgatgcccttcagactttcatccgtgacctacactggcctgaggaagagtttggaaaacacttagagcagcggctaaaactgatggcaagtgacatgattgagtcctgcgtcaaaagaaccaggattgcatttgaagttaagctgcaaaaaaccagtcgatcaacagattttcgagtcccacagtcaatatgcaccatgtttaatgttatggttgatgccaaagctcaatcaacaaaactttgcagcatggaaatgggccaagagcatcaataccattcaaaaatagatgaactaattgaagaaaccgttaaagaaatgatcacacttttggtggcaaagtttgtaactatattggaaggcgtactggcaaagttatccagatatgacgaggggactttgttttcttcgtttctgtcattcacggtgaaggcagcttccaagtatgtggacgtgcctaaacccgggatggacgtggccgacgcctacgtgactttcgtccgccattctcaggatgtccttcgtgataaggtcaatgaggagatgtatatagaaaggttatttgatcaatggtacaacagctccatgaacatcatctgcacgtggctgaccgacaggatggacctgcagctccacatttaccagctgaaaaccctgatcaggatggtaaagaaaacctatagagatttccgattgcaaggggtcctggattccaccttaaacagcaagacctatgagaccatccgaaaccgtctcactgtggaggaagctacagcgtcagtgagtgagggtgggggcttacaaggtatcagcatgaaggacagtgatgaggaagatgaagaagatgattagaccattctctgggtccaagagtccattgggatggagtcctgtaatcaatgcatgtctttagtctgttagttaaccccattaggtaattttctgtcaaccaccatccccatgagatgtttaccaatacaattaccattttagctgcgtggtaccaagattagcaaatggtttcctgatttctgtgtctatatgtttacaagcaatatggaacaccattcttaaacactgttcatggaaagaatacatagttcagctgctaggtgtgtcccttttgttagcagaacaaaatgatgcttcatcctgtactacagatacacggattggaagtggacatggaagcaagtgtgtttccatgtctctgtttcatgtatgtgggtaccaggtatttaaattagtacataaattaatttaagtgcatagagctgcttggttttggtctctgttttgttcttgttttatgagaaggggaaaaggcatggtcccaacaaccaactttagcttttctcatcccctaaaactaaaagcaatggaccacttgtgtcccagcaaacccagctttgcatttatccatgtagtttagttccccctaccaaaaaagttacatatcaatggattaattattttcattgtcatagcaagggggccacgtgatcaggaagtagcatcaagtaagtttcagaccaactgtcttctgtgaaagtttatcctagtaaatgtcacattttgcttttctgtttcaataactgtatatgtaaaaaaaattattgaaatgaaaaccctagactataaatgtatttataataagatatggatatttccttcagtagactgtaaccataacttcaattattttgttccacactgttttttatatctgtcatgtacattgcactttgatctgtaactgagcgaccctggggtctgctatagagctgtttctttctgtggaaagtagtggatccatcttgctttttgccttatataaaagcctacagttgtaaaagtgtgggaaactgtggctcctcaat

SEQ ID NO: 3 - protein, 1281 aa, Mus musculus
PSSRAGGGRPSSPSPSVVSEKEKEELERLQKEEEERKKRLQLYVFVMRCIAYPFNAKQPTDMARRQQKISKQQLQTVKDRFQAFLNGETQIVADEAFMNAVQSYYEVFLKSDRVARMVQSGGCSANDSREVFKKHIEKRVRSLPEIDGLSKETVLSSWMAKFDAIYRGEEDPRKQQARMTASAASELILSKEQLYEMFQNILGIKKFEHQLLYNACQQLDNPDEQAAQIRRELDGRLQMADQIARERKFPKFVSKEMENMYIEELKSSVNLLMANLESMPVSKGGEFKLQKLKRSHNASIIDMGEESENQLSKSDVLLSFSLEVVIMEVQGLKSLAPNRIVYCTMEVEGGEKLQTDQAEASKPTWGTQGDFSTTHALPAVKVKLFTESTGVLALEDKELGRVILHPTPNSPKQSEWHKMTVSKNCPDQDLKIKLAVRMDKPQNMKHSGYLWTIGKNVWKRWKKRFFVLVQVSQYTFAMCSYREKKAEPQELLQLDGYTVDYTDPQPGLEGGRAFFNAVKEGDTVIFASDDEQDRILWVQAMYRATGQSHKPVPPTQVQKLNAKGGNVPQLDAPISQFYADRAQKHGMDEFISSNPCNFDHASLFEMVQRLTLDHRLNDSYSCLGWFSPGQVFVLDEYCARNGVRGCHRHLCYLRDLLERAENGAMIDPTLLHYSFAFCASHVHGNRPDGIGTVTVEEKERFEEIKERLRVLLENQITHFRYCFPFGRPEGALKATLSLLERVLMKDIVTPVPQEEVKTVIRKCLEQAALVNYSRLSEYAKIEGKKREMYEHPVFCLASQVMDLTIQNVGRLITPAKKLEDTIRLAELVIEVLQQNEEHHAEAFAWWSDLMVEHAETFLSLFAVDMDAALEVQPPDTWDSFPLFQLLNDFLRTDYNLCNGKFHKHLQDLFAPLVVRYVDLMESSIAQSIHRGFERESWEPVKSLTSNLPNVNLPNVNLPKVPNLPVNIPLGIPQMPTFSAPSWMAAIYDADNGSGTSEDLFWKLDALQTFIRDLHWPEEEFGKHLEQRLKLMASDMIESCVKRTRIAFEVKLQKTSRSTDFRVPQSICTMFNVMVDAKAQSTKLCSMEMGQEHQYHSKIDELIEETVKEMITLLVAKFVTIGVLAKLSRYDEGTLFSSFLSFTVKAASKYVDVPKPGMDVADAYVTFVRHSQDVLRDKVNEEMYIERLFDQWYNSSMNIICTWLTDRMDLQLHIYQLKTLIRMVKKYDFRLQGVLDSTLNSKTYETIRNRLTVEEATASVSEGGGLQGISMKDSDEEDEEDD

SEQ ID NO: 4 - DNA, 477289 bp, Homo sapiens
  misc_feature (1)...(477289): n = A,T,C or G
agcgagaaggagaaggaagagttggagcggctgcagaaagaggaggaggagaggaagaagaggctgcagctgtatgtgttcgtgatgcgctgcatcgcctacccctttaatgccaagcagcccaccgacatggctcgccggcagcagaaggtaggtgcgcctgggaggcccagggagcagcacccggacgtcgccaggcgggcggggtgaacaatgggagctggcggcgcagctggcgaggaggagcaggagaggtggagaccgcgccctggggaaagggctacgaggccccctcccagcggccgggctcgcccaggcccagcccaacccagcctggagcgctcctggagctgactgggaccggcgagggccgcggagcgcagcgccgcttgctcgagcccccccagcccgggagcgttggtgagcgaggcaggcaggtcccgctttgtggaccgagaggctcggggagtgatttgctgcccgcggcgcccagagaggccttgctcgcttgcagggctcccagcgctctccagcggcgggcggctgcgctcaactccgggcccgccctcctgggcgtgcgttcggcgggcgggggcaacggcaggtgggggcgccgaggtggagggagaagagcgtcttggagcagcgctccgctcgctggggcagagagcaaccgcaggggcaggcgggagaaagcaagcccagaaggcgaagcttcccgtgactctgcgaagggcaccctcctctccctgcccgggtcagctgatcaccgactagcgtcgccaaagtgtcctcgggcactgcttccttatggctggagttctcaccagtccccctgacccttcctcactgaccccagagcaggggcacgccctctggtccttccgtccgggtcagcccctccgccgtcctgtctttgaccctattctcctcttcccaaggtgacttcgccgccaccttctggctcgcctgggtcctccaagccctgccactgctgccttgataaagtacagctgcaaaaagcttcgcaatctgaggcatcaaaagctttttctgtctgaggctggggcaaggctgacatagctctgggctgcctttgatgttaaaaaaaaaaaaaaaaaggcgcctatttctatcagctgttctttagctggagaaagggatgaggggtactgcaagatgaggggcagtggcggggggtggggacaaaagaaaagcaggcaggaacccagctggagtgagttagtgaagaaagtcagcgttctgttctcttttaaataaatttgcagcacttgagctatcaaaaaagccagtcaagccccacacagaggcagtgtgaggccagtcctaaccccatcaagactgtgagactagtgtctgaaaatagtgaatctttcagttgctgccatttaagaacaaattacatgttgctgtagtagcattaggttttccgtatttatccacccttaccttgagttagcacagatttctctgtttgttttgcttacatgtgtacacacaccacccagcactgatgatttatttcagccatcacgagcttggatatcagtttcattaaaagataaaactgatttccagggtgagagacaggaggtgggttacacacaagactctccatctttatctgtggccccttgttttttcaattcgtatttttgactgcagtagagcaaaagtatcctcagagaagtaaaagtttttgggatattattttaaggctggatgttgagtccacggggcctaatagttcacatttcagtttggaattcctattgtaattgtgcctttacagcataggaacttcaacctccaaaatctatcccagtaataacagcaccagccaaaaatattccattcctttgacaatgaaaactgtgactttaagtgttaggtcgaaaggggtgggggagatgtctagagacatttatcaaagtctctagaggtctgtcctttaaatagttgcttaagtccagagctagcatggagaaagaaatcccacagagacacagttcttctaaacagaaacttcagttactttagagattattataaggccagatttttctgatctgattgtatgctttacctgaatccactcaaagctgtggttttgaggggcatgctgtttgcatttttacacgggagcttaacctcagagagactccaggacagattgataacactgacatttggtcaaactattcttagttatcacagcaaactgttgctaaatacatatcccagtgaagctatcccagagcttttggctatactgggaagctaaatttaaacaacaacaaaatatatatatatatctccttattacaaaaagaagctttttcactgctatatctgtaagtttttaatgcctttctagaggtgtgttttgctccttcaagtagaaagcttagaactctgattttttaaaaataagcaatgattgagagtaattaaaaggtttgcataatcactgtggtaaagtttaaagccaacaaatagttgatgagctaaagttagtcttggagaaagataaactagttgtaaactaaacatgagtttgcagtagaatagaaaaggatgaactagaaaaagaggaaaaatgtagagaaagggataggatgatatggaggtcagagagagagagaacgagatctatgaaaaggaattgctgaattgtggagaaaagaccatattgtacagagtataatgcaccatatgaaaccaaataatctatatcacaatactcacaccactttttcaagtatctactatgtgcacggcacatagatcattttttgaagaatagattttatctttctgaacagctttcaattcactgaaaaattgatatacggtacagagagttcctatatactccatatctaatttcccttcttaatatcttacagtagtatgggacatgggttacaatgaactaatattgatacattattattaactaaagtctgtagtttattcagatttccttagtttttagccaaagttatttttttctgttcttaaatcattttttaaatctcctaactctaacaatgtacaaattgccatcctcgtttttaaaaaactgagacttggaaattttgttatttgcctaaagcaccacgtagatgggtaaaagatggcaattgaagtgtgaaacattctgattccaaatcctatctttttaatatgagatactggctagaaatagtctaggataaaaagagccctagaatcctaacaacatgtcaggtgtacttctttacccagagttatttctctctgaattgagagaggtcctcctttcttcccctgtacacccatcaaatatagtcactatgggcaaagtggatgcttaagtataacttcttaaagaatatgaaggagagggatgggcttttagtgggtaaatttaacactagactgtatcaactttactatgtcgtttaaactgaaaggaaaaagattttagctcggaagaacacttccgaaggaacagaaggagacagtaccatcatttggataattttggtaattactttggtttcacttttactgagaaaaagagcattccaacaatcttcctaattaaagaggggactttaaacagactatctgaaaaaacattttattatttaccgatatattatgttacattactgtgaattgaaatataacatggcgaaataatttatgaccaaaacaaaaatctccccaccagaatgtaacaatgtatgtttcagtagctcagaaatgacagtttggaaagcagttctttgctttttcttcttcttttgtcagaatggtaaagtgaatacctagaagttggcatggcaaagctataccatatgtttctaaactatgtagtaacggtgatgggtggctaccttgtgtgaactagctacttatagtgagggaatgtaaaagcaggcactgttagcaattcatgtaatatttagattgacatgaccattttttaaatgatgtaggaattattctaatagtttaaaatgagcattgtgtctacatacataggtatagtgtacatgtgtgtctgtgcatgatgggggaaaagggtaatccttaaaactgtctattacacagcaattcctatttcattcaagaggacaaatgtcttgtaagttcaagctactcatttctgtatgattcagcttgtatctgcccatgaaatgatggctaatgttgagtcatagccatagaaattctttccttattcatttacttgggcttatttgggcaagactaaaaagccataccttacataaaaagacctagtgctagctaactatatatgtgtgtgagagagagcgcaagtatgtgtgtgttttgaatcaataataaagttgtctactcagatatattttgaggcactttggtctactcaaaattcttaaggtttgctttgttagtgcaatatatgacttgcagtctaaaaaaaaattctaccttttgagagaacaaagtgacgattaaaccaatttttctttaaacagaattgtttctcttcatcaggggaagaactgaattatttaaatgggcttgttggcattctcccctccccattttccttggtacattgggaagccgctgttatgcactgatagcagagactttctgaagatgcggaataccatgaaaggttcttgcctcattacacccctagcataggcttatgattccctaaaactggaccgaagaacaaaggaaattaaatgtttcattcctgaagaattgcactgagtaaaatgataaaagtcaaatgacttagggatcttcccactgcaaaagcaaatttaataaacaatcgtaagctatcatgttgaaatataaccagcatctgtgatttggggacaggtgtctataaaacttaagctggaatgatgagagttctaacctagaaataagttctaaataactgaccagttactcattgcaccaagcgctcacccaggcttgatggcagaagaaattggtacttgtgagatgtggttcctgaactgggggagcttctagtttggaagataacatatatgtcaaataagctgaataagaaagttttagttgtaagacgctgattagaagtactaaagtggggaaggaagaaagaagagtgcatgcacacacaggattggatacagtagtagaaaaaaatcttcatagagaaagtagactagggttaggtctttaaaagttaatttcatttgagtaagcataggaaaaacaggtattgcagtctggagaagaacactaggtagcagaaatgtggaaaagagtcactgttaggcaatgtcagtcagattctgttggttctaagtgacagaaacccagcacaagtggctaaatcaaaaaagaggttgagtgacttactggttcatgtaagtgaagagactggtacagaagtgactgcaggaatggctggatctaggaggctaaatgacttccatatcagaatgaaaaaagctagatgatgaagggaaaggatatacagatttagcttccataatccaaaaacataatatctgaaatgctctaaaatctttttgatcatgacatgatgctcaatagaaatgctcattgaagcactttggatttcagatttttggattagggatgctcaaccagtatgacataaatattctaaaatcctttaaaaattcaaaacacttctgctctcaagcactgaggataaggaatactcaacctatattttgaaacctgtgttttagctcaaaccctgccactaatgaacaactgattgtaggcaagactctgggataatttctaaatctctcatgtggagatggggatggacaagctttggataatttctaatgtcctctccagatataggagttgatagttctttctggacaatgagattactttttaccaagacttacaaattcattcaaagttgtatttggtatgtttttacattacaaaataagacagtgtcttaaagaatccaagatggttagagatgaagttagatttcattagtccagctctctaaatcttcacataaggtgaaatttcaaaaggttataagacagcagactacatgagagattgcaaactgtggcctgtgggctgaaactgatctacgaatgcattttgtccacaaagcgcttttcaaattgtgaattagttctcaacatttaaaactatcaaaatatttcacataaaaaatctggatttctggcttctcttacaagtggaagatatgacaacactgggcctgagtttttatggatttgcaaaaagggatggaaataagactacccaaccatcatttaaataatagaatgttaatcacttttaactaaattggtccaagatacccatccaccatataaatctggatggtaggatataagctgtctggttcttgccaacaccatctccttttacaattgcttaacaagtatcactgatctgaccctggcccctgtaaagcatccaagagaaggacctgaaatttagaactgtgtgttccctgtctttggcaactgcagtacttttcttgttttatagtttttgccaaattggagggccgatgatcaaaattattactttttcatttgtcagtctaggcatgtgatatgatttctgtttttaacagatgaggaaagggggatgaattcagccaatgcattgagtctagcccttgctattgatatattgatggacagtgaaggacagtggttaagggtatacactgtgaaattagaatgcctgggtttgctttcttgctgtacccttatctcgctctgtgatcttagacaattaacctctctgaggctcagtttactcatgaatgaaatgggaattgtagtggtaccttgatcattgggtttttgtgaaaattaattgagataatatagtaaagctgttaaaataatatctggaatgtgtaagtgcaatacaagtgtcagctcttgttattgctaagttgatatgtgcagtgtttttatctgaaaggactgggcaagttaatatatatgaagtactagccatcacaagccttatattcattattgctattatcatcatgaaacagtatggaggagtttggtgaactaaaatgcaagaataccagaaggcaggtagttatcattagagtgttacctataaaccagatgggggtccaggctacaatacatctctgttctttcacttttgttgagacatttcacttgtatttctttgaacaaaaaacagggacccatttgtctggcttcaaaagctcactttgaacaaaagtaacatggatagaattcataggagatattttaaatggctaatgccaagcacatgtacatgggaagatttgccacaagcttatcagaagactcagataaaggggtcttgggtcactcaattggtaaatgatgggatcctcagagttccttattttcttcatagccactatgaggaaaggcactatgctcgttatcattgaataggtcacctgcctttttcaagtcctaatatttttgtcctcaatccaaatagctcttttaaaaatgttggtttacactaatgatactgactatgatattgactattaccatattgattgttaccattaaaaatgaactcataaaatgcttttatgtttgtgtagagagtaaattctaagcatatatatatatgttcaaaactttatatatctagatagagtaagactcgcataagtaggtaatatgcaatagcgtacagagactaagacctctaactctgtggactatcagtccctggttcaaattcctggtcagctctgtgacatgttgactttgtgaccctggggacattatccatgtctttacttcttagtttcctgatctgtaaaatggggaaaaattattaagcattgtaagagaaaaaacatgttagttgcttaaaatctttaatatggggtacatggacaaatattatcagtaacagtaaaaatagtattcttgcattttagttcaccaaactcctccacagtatttcagactacaatatctttgctcatactgtttcttattgcaaaatgtcgtcctcacctttcttcatgcgattcactcttgttcatcctttaattattataactcaagtgttatctcctttaggaaaccttactcaaagctttgtagtgggctaagtattgccataagtccttagtcaatcttttcttttacctcctgtagtttatatttaaattaccctttttacacatgcctatcactcactagactgtaagattcccatctcccaaaacagtacctgacatgtagtaggtgttcagtaagtgttctactgttgagacttcacactgatgctttatttcctagagagcttctaaagagaggaaatagtctaaaatacagtcacctttattacagagacgttgtctctataatttttacttttataaaagcttctcagagtgaaccaattaccaaatggcttcaaaataagttatgttacagaaacatgctatctattacctttgactttgtttgttaataccaaaaagtgacaaatttctagatccattgtagagaaaagccttctttatgaatcccttgcaatgggtgaatcctagttgaacttgaatcaccatagtgtgtgtttaagtgatcaaacattaaaatcagcagaagccaaagaaataagttttcatattgggtgtgcattttttagtgcatttcatttgggttagtgaaaattaggctgtttaatttaccatcagccacaatgttgccaaagttgtatcacagaacctgtaagttctacatattttaggcataaataaatgtgctcattttctctacttttattctcttacaggattttggcattattttctgttattttattgtaagctgcctaaagtcctttctgggtgtagttaaggtataaataaataataactacagagctactgcatattggatatggtaataagaatatgctatgtagaaaacatcaataaaaagtaaaactgcttcttagatatggacttttctgatacatttcactagtcaaagaaaattatttttgctgtgttattccttttattttaacaagtgggaaaaaggtttgaaaataaattgaattatcaagccctcaagtgttcccatctgctgtctgccattctaaaattgagagatatgaaataaattgataatatattgatgtcttttcaacagcccatgggaggaaaatattaattcatcacgtgcttctcagaattacttctgtgcagtaaaaaagttctgggataattagaagttaacttttttttttttttttttttttttaatccttaagtgttccaggagcacatgctaagttacaaaccctaaggaagtggtgatgcttttaaaaagacaatgggattttggcaaacatgccaagtggtccagagaatctactatgcctcttaagaaagcaaagggaaaatactgaaaattcctgcaaataattatgccttctgttgcccatgtagaaaaacagctttttggtgaggatggtaggcatagagttgtttaagcaaatgagttgaagtatatcctgaacatctacattggcgatttttctgacaagtatagcaactgttgtctataaggcagtgtgtcataacatactgtgttcaaaacatttcttgggggttcttccatattcaagttttgtttgttatacatcatcagacaatgttgtttgagccacttctatgtatgagaaactcactagatcctgtagaaaaagtatgtaaagtcattttagatggccttcctgatctctaggaacctagcaatctggttgagaagttgagatacactgacgtagactaagtcaggatagtgtgagtgtctgaattgtaaatattggtgttttctagatttccattcttggctcttgttatgggtttattatgttccccccaaatttatatgtcaaattcctaacccccactgcctcagaatatgactttatttggaagattaagatgaggtcattagggtgggctataatccattatgactgatgtccttataaaatggggaaatctggacccagagatatgcacacacggagaaggccacgtgaaaaggaagacagattggggtgatgcttctacaagcaaggaacaccaaagattgtcagcaaattaccagaaactaggggagaggcatggaacagattcttacgcctcagaaggagcctactctgatgacaccttgatcatcacctagcctctgacaatatctgttgctcaagctacccagttggtgattcttggttattgcagtcctaacaaagacagccctcttcttctgtccataccatctgtctcagcaacttcatccctaatcatgactttagctactaacatctctacacttaaaatttgcaaatcttttgtctccagcataggcctcttgccagactgccagacccatacatttagccatttgcatcagtgctgctaaaggtgtggccacagacaggtgcaggtcagtgaatgctttgtaaagagcttggactagaatgtaaatcaactcattaccttcttctgctaggaaagtcttcctataaaagttgtcagctgtattgagtagtatgcatagtgactaaattgatgtaatttctggtataagcactttatctcagtgagggccaataagaagtagttcacagatgacacaggtctacagagcacacttggaggagcattgacctccatggcatctcctttcaatgtcctcacaccattcaatgatacaatttttcttctcatccagattctttccccttattttctaactctgtgaatggccacccagtggcgctaccatataactgagctggccaaggcacaaatgtgcaactcatcttaaaatcttttattgttcatcctcaccaccaaagaatgcatgtgtttgcaagttgtttgataccattgtttcaaacaatggctgagaattcttctgtagctttctgttgcctgcacaggataaaatcgaaacttacttccatggcgtaagtagatctttgctccccatccatgcttaactacttcagttttcctgcacacacccttcacttcagcccattaagccacttaacatccctgtgctgtccattgctctttgtgagcctcagtatcattgcactcctgcttgaaaagccctcccttgcctttcattactttcctaggtagaaggtaacactcagttataaagtataggaataaatagttagcattcattggccctttaccctgtgtagtcactgttctatatatttacaagccttatctcatttaatctttataacaaccttataagataggtgctaatcatcccaatcctacagaagaggaaaccaagaggaaaagcagataagaaatttgtcttaggtcacagatatagcacatgggttggggccaaggcagtctgactccagccttcacacttaaccatgtgctatgttaactacattgaggcattcatcacaccttacttcaatgtataactgttctttttctttctcctgactgcagagatcatttagtctccccaggtgtctgacagattgtatgtatatataataggtgttcaataaataggtgatacatgagttcatgattgttggttcataactattcagaatagtaatatatattctctacaatttgtagcctatccactgagattatctcattgcttcattaaaacagccctttgagtatatgtgagacgagttataaattcctgttttgtaacaagtaaaagttaggtccagagaagtcccactggttggaatgggctacagagcaccaacctgggccacttaactgcaactagggcttcctcccattgcactgtcagacttgaatttacagtaagaatggcctgggccattttagactttttaaaaaattgcttcattttatgtaatctttattttattgcagaattgtgaaagtcatagtgattcacgcttttagagggtccaccccacctcataaaacatttaaatgtatgtcacatttcacatctacttggttattgaaaaaactggaatgtatgtttttcaatcttgcttttgaagctatttgtctatataataaatgactatgatttctcaggaatcatggtgcattcagaggaatccctgaaaacttaaaccttggcagggcacagtggctcacacctgtaatcccaggtctttgggaggccgaggtgagtagatcacaagagattgagaccatcctggccaacgtggtgaaaccctgtctctactaaaaatataaaaattagctggacatggtggtgcgtgcctgtaaccccagctactcgggaagttgaggcagaagaatcacttgaacccgggaggcggaggttgcagtgagccgagatagcatcacagcaccccagactggcgacagagcaagactctgtctaaaaaaaaaaaaaaaaaaaccactgttttcaatgctatcaatatttttatgaggactaaatttaacaattaatggagtcaatatgtgtttggaagtcacttaattgaatatttagatttttcatgtttattcctacattttgaagactatatttaggatcttggatttttttttttagcgccttggagagttccaaggctccagtccctatgtctctcctgcctaatgaatgaaatagcctttggccaggctgggtggaagaagtggtatttgaactaagcctcaagctgactgagatcaagtgatagcagtgtgatacattttgagaggagggaaggatactttcaactctctttagagatgagataatgcaaagcaagtttgaggacatatgaacagacaaatataattgtataagattccagtattggatagaaaataagaacaaaggttggttcatgatggtagatgcccttcaccaaggtaaggggattaaggagtgggagacttcacactgtaggcaatggagaactgctgaagaattctgagcaggacaacgacatgaccattgtagcattttaagaagattaagtgaaatgtgtggaagctatggggaaaggagagaaaagaagaatataaatgtcttcacactgtgagaaaaggtcatgaattaggcttgaatgttttatccagcacagatcagttttataattttgtggggagatttgtacaaaaatcttagaaaatcaatgcctatatgtagaagtatcttgaatcaatagttcaaaggcatttccctacagcaattgttgatctttgtcttcattttattagagtaactttatgtacttgtcacaatgtgtgggctatgaatgttcatttttttttacaaattctaaaaatgtaaagcaaggtgcctgccctttaagttatatttaatttcagtgaccgatattctgatatgcccctgcaggtgcaaaaactcttctgcataacattgtgaaccacataatgacacttggacaaagctcatatggttgaacctagcataatttcagaaaatgtacatgtgattccatctggcttccagctgacctaaaggatgcagatggagtttaatttagccccaagaaagcataaaccccacaataaacccaggtttatgtcaagcccatagaaggagagaggaggaggcatgacttctggtgttggtttggaatctggggagaaaactttcagtgtgcccaagcacactaaaatagaatcttggatttgtcctttctccaacatgatttcatcccccaaaccaacctaaatttgcataggcacccagagaataaggaacgttcaagctccctgccctttctcactcctccccaagtggaaagagtcttatcttagtggtaagattacagaaaagttattgtatggaccacatgtagtggttagagttatttgcataaataggaagcataagattcctgatcctctgtctcttcttgcacattctttggtaccatcttttctatcttttatgtgttaatagaggtggtaagatttggatctgggcataggagtagagaaagactccagcccagtctttgaaagttttaatatagtgattttacagctggcccttgaccaacgtgggtttgaactgtgcaagtccaaggattgaaaatataatattagcaggatgtgaaacccacacatagggagggctgacttcctatgcaggttccacagggccaacggtgagacttgagcatatgcagatttggagattttagtgtatgccagaatgggatggtcctagaaccaatctcctgcagatactgagggatgatggtattttccatttgtcatcatcatctgtcattatagctctcttaagagaataggagattttggtttacggtaagattcagatattcctgggtcaccaggtcattacatcatctgaaaggcttcagaacactacactgtttaccaaaggcttacagcctgcttcctggaggaggctgcatttgcagctgaggaacaaataggatttgaacctgggtaggaaggaaaacagatatgctagggacagcatgagcaaagacagaagccaagcaaaactacagtaaaaagcatataaaagccacatgatcggaaaggtagcttaggatcaggtagcggtaaacactgaatgttactagactgtcagttgtcctttatttggtaggcagtggggagcctttgaaaatgatctgtacctctgagtagctccagtggaaataacactaaaccaaggcagagggcccatcaaagataatgtagacttctgggtgattggcaaatagagagtgattggccttgaccttgtcttgaagtgatgtgttttcctataaggcactttgaggctttattttctgaagaatattgtcaacacaaaccaatatctcatttgcaaaggacatgatttgctccagcatttttccatggccagattagaaacaactccctatgagttttgacaaaagccccacataatttgtcagccttcctgtttgcctggcagtggagaaaagaaaaggatttctttctactgtcttctttccacaggcagcctatgtactgctgttattatgattcagcagtatagaccttcaaagtaaacagacactggttaagatgtgcacttgtttcaattaatcagaagcacgtctccccccgaagcagcagttctagacaattgtagatttgccatttagtccaaagagcttttcagttttctttctatgtggagagcccaaagctatctttcagtcaatattcaattagtatttgagtcggaaggccatgctgagctcttaaagaggggcgtaatgtgtcacttgttcccgcctccatttgcttgtgtgtggaaaacaatccattacttatcactaaagaaatacaagtctgctgcagcataagttaaatattagaccaaattaataatatgtgtttacttccttatgacctggcaataaataaattatagtgtaagaatcactggaaaggacaaaccaaattcaacattatatatattgtatatgcccaaatttagggagatttgtgatgcagaacatttaccctttccctaatcgcagcaagaactctgtgcatttctgtcttgtgtactcatccaaatgcttttatataaagctttctctaattactatcctttggcatagtcttttgtttccagcacaatctactactcaatactatctttgtcattgagctatggtttcagaacaataaaaattcactcctaagtttttttaaaaatccaaacattttctataaatatgatagcaacaaaggtatctagaatacagtaatttttttatttgcaaattaacctgcctatcataaagcagatttttaaggaaaatagtgatatgagacatttacgttggatgagaatttacacttgtttcataaccttgaactcaagcaacacatatcattaaagtaatgtggataaactacaaatttacgcagtgtgtttaatcagcatgaacagccaattgaagttcaaatgaagcttttgattgtacattttaaatataatatctacatatcccatttttagtagacacaattggttacctaattgttattcattccccaattccaaacagacttgtaattttttcaggtatgaaaaattataccccattcccagctttagaagtagatacagctgagttcagacccatcaacacacagcactatactggaatacagctggctcacaggtgcccaggtgatccaagttgatccaatcagaccaaagtggaggacttgtattccatgcttaggggagaagttttggggctcctctcctgatggactatggaaggaagcatgtatcataattggtactggcagccatcttagaaccatgaggagactcaatttaggctgaagccaaggctgaatatagtgaagttgctgaactatggaaataatttgagttcctgatgacaataatgggccacatacaccattaagccagatctggagcccacctttcatctggacttccaataaaatagtaaattttcttgttgtgtaagtcagtttgagctgtagtttttcttatttacagtaaaaatttgttgacctcctgctgtatttctctttagaacaggaattctgggatttattaatcttaactctttattttgaatatgtttagacaaaagtggaaatcatatttgtaggaagcagcttcttatttcttcctaactccctagatataatttagttaaaaccaaaaagcaaaaacttcattgtagatgtaaatcatgttttagcataaagtaacttttattataactgaagagataagcaaaatgaattcattaaaatattaaattttacagtttctataaacaaaaataaacatttttatagaaaagtatatggaaatacataaaataaaaattttaaaaagtcacctaattttaccacccaaagacatccattatgcacataatatatatttatacatctgcatggatatatagaggttaatattatatatgcttttatataaaagtaatatttctacatatattgctttgcaacctacttttttgcacaacattatatataggaaatgtttccatgtcagtaaatatgaaaaaccatgtcattcttctaaatgactttgtagcaatccattttatggatgtaacattatttaactggttgtattgatttctctttctttttttactactctatacattctgcagtaagcatctttgtgtacttacctttctacacttcttcaaatatatgtgtctttaatattaagaatatataaatttaaaatgctgttaccaatttccaaagcatctgtagaaatttacactcccactagtggagcatgagtgagtctcatttcccatgttaaaactagacattattttctgctttgccaactcgatgcgttatttttaaaattctgtatttgcatttcttttttacatatttattgtctctttatattctttgtttcacaaattctgttaccttccatccattgttatgcttatttgtttttaagagctatttctattttagtggtattaacattgtcatatttgtgaaatttaagttttgtcatttgtgatggaccgtttttatgtttgttatgttgttcgacatatttatgtctagctgaacagaatttttgaatgcagtaaaatctatctacttttcctctttataattcctgggtttcatgcaatgaaagaccttctctatccaaagattataaaactgctcatacctatcttcttctactacttatagtgttttttttttttacctttatattttttactcatttgaaatttgtattggtgtaatgaatgacgtatgaatgacctttcagttgactagccagttcaatatcatagattaaatctatttgctctctagttgtgttaaatgcataatgcaaatgtcaaatgcactaaatttttattgtattaatattattaatatttgaatttatttttgagctcctggtagaaagccattgatctaattttctcttcctgtaccataactatggtgattcaatcattgtaggtttatgacagtttggctacattgataaagttccttttattatacttttcagaatatccatgactcttcttgcatttttttattctttggaaaaataatttttaatgattttatcagttttaaaataaaagattgcttggattttcacctaaattccatggtctctgtagattaacataaagaaagctgatatctttatgacattgaaaccccatccaggaactaggaatatctctgcattgattcaaaaggttttgatgtgcctcaatttatttttgtagttttcaacatacatggcctatacatttattgttaaatttattcctaagtaaattgtaacatttactagttgatcttccttcactgacttcttgcattaaccaaagctctctattccctctgcaaaacatgggagctcagggctaatggactactctctaatacacctgagcacttctgtccctatcagctgaggtatatgctcaccaagaataattatactttccaagtgtgttccagctagtttctgtttctgttgttactgaaattccataattaaatattatataacttaatgacatattattgtgaaaacaaagaatagtctttgtttatattaaataagttgattactttgggaagattcaattctgtctaaaaatatattaaattgcagttgggcaaaactacaataaaatttttagggaaaaagtataaaaatctaaaggagttttttatcatattgccccttaagcaccttaatttttttctcttcttttaagaaacaaaaactggaaatcatagccagatatgctgtgtgttaaggaggatatgaaacttcaatcagcgaacccatgcataaaggcaaagttgaaatcctatacccccaaaattggcaaataattataaattataagcaaaactagacatttgacaacttacgttttgtgacttgctacttcagctaaatatttttaagttaaccataattttaaaaaatatttattgcttggcattctaaatagttttaagctactcttggtgcttcctgataatcatttatggtaaatgaaattaataactttgcttggtttctaatatgtttttaccttttcttctaattcctttggctaatatttacttgtctattactactaatcatggcatgataacatagtacgtaaactttaaaaaatttaaaatcaggataattttattatggggtgttttaaaaaataatcagaacttacatttagtgaaaatcaaggatgtcttaagagagaggaatccaacttccatgctgagatatatattttgttttgaatagagctcattctaaataatccattttaggccaagcacagtgcctcatgcctgtaatcccagcactttgggaggccgaagtgggcagattgcctgaggtcaggagttccagatcagcctgggcaacatggtgaaatggtgaaaccccatctctactaaaagacaaaaaaaaaaaaaaaaaattagccgggcatgatggcacgtgcctgtagtcccagctactggggaggctgaggcatgggaattgcttgaacccaggaggtggaggttgtagtgagccaagatcatgccactgtactccagcctgggtgacagtgagactctgtttccaaaaataaataacacatctcagactaaaatattttgtattgaatacatatttccatgtttgagtctttgaaataaaaatatatgaaatataaaggacagtcaactttttaaaaaagtttagaaaactagcactccatctctattttaattttactctttgcctttttaaataaagaatttatcaagtacaaacaggaaatatttttcaggctcaatgtagatgttttacattgggaagaagatcagaaaaatagaacttcttgttacttacgactacacaatcccagccaaccagaagataacatgcaatcttttgcaacctagatttttctccacccagtgatagttctcacccacatcacataggaaagcaactataaagcccttaagataggcattagtactttcctcattgtaatatggagatattccttgacagcagagaatacccaatcctatagtcatttcccaacattgttttgtctttaataggagtgtctttcttcagagaatgatttgaagcttaaaattacactctttatatttgaaacgatagagcaaaattgactgcaccaaaaaagatgaatgttcctgccaccagatacattgattgcttgccatgaccttcacaaagcaaaactacgaaaggaatgcatagagagaaagttacttttttaacggggaggttcataattttagtctatcaattccaaccacacaaattctctcttaatttatataacttagcaagtgttaagcttgtgagttggagttgatggcaagcaaataactttaaaaaccttctgaggtgacatttctgcattttagttcattccaaatatatattttttaatggccttgaaaatgctcagatgtagggaatggagcggcagtaggttcagcatgaaatgacaccaacatgagagaattcaatctttctttttacttactttgtcatgtattatttatttatttatttattttaatgtgacaggcttactgtctgtcgcccaggctggagtgctgtggaaagatcacaggtcactggagcctcaacctcccaggctgaagcgatcctcccacctcagccccccaagtaactgggaatacaggcacgcaccaccacacctggctaagtactttttgtagagacagggttttgccatgttgcccaggctggtctcaaactcctgggttcaagtgatctgcctgcctcaggctcccaaagggctgggattataggcgtgagccactgggcctggctgtcatgtatgttttagatgctttcttttcttttcttttcttttttttttttttttagtggagttttgctctggttgctcaggctggagtgcaatgacacgatgcgggctcactgcaacctccgcctcaaaggttcaagtgattcccctgcctcagcctcccgagtagctgggattacaggcacctgccaccatgcccacctaattctttgtatttttagtagagaggggtttcaccatgttggccaggcttgtcttgaactcttgacctcaggtgacccatccacctcagcctcccaaagtgctgggattacaggtgtgagccaccacacctggccctagatggtttctcacaagaatatcactatattcttgaccataggccataaagactgaaaacaatgtgattaaatatgatagaactcattctgacttgacctggtagaattatattttattttctggaagttctttctttttcttttcttctgcttccagaaagacatgataaaagtggtattgatcacagtgacatttcctgtttgtcctactgttcacttaggaattcagctcattttctttgtgcaatattaatatgtcaagtgcaagataaagcatttgagccactgcttagatgggctttctaggggctgtagctcatttacatctcactggagaattgggaaacagtgccagaaaatgttattagtcaagtatcttttaaacattttttaaaataaaggagtaattgaatattggaaataacagtaacatatctctgatctgagttattttatgtttctagttattcattcaatgctacatagacatgtaaatagataactcagatatgaagtgttgagggaaaaatgtcagaagaaaaaagcaaacaaggatggttcatggcctgtaaaactcctggagggaggtggcttttgaactgaggcctgataatgttcctggaattttcagaagtggaaattatggatcatcttcaacaaagtcatgaaggtagagacaggtgtcaggaaattcagagtaaactggggaccacctgggccagcttttttttttttctttttttgataagtctctctggtgtgggtaaggagaaaagattttaaaaggggaccaagtaaaggaggaactgttaacagtctcatgatggggccattatgaattgaacttgacaccgggcaaaggaaaatgaaagaagagacggatgcaaaagtaatctcaaagaaaatgctgatgggggaggagccaagatggccgaataggaacagctccggtctacagctcccagtgtgagcgacacagaagacgggtgatttctgcatttccatctgaggaacgcagttcctcaccagcaacggaacaaagctggatggagaatgattttgacgagctgagagaagaaggcttcagacgatcaaattactctgagctacgggaggacattcaaatcaaaggcaaagaagttgaaaactttgaaaaaaatttagaagaatgtataactagaataaccaatacagagaagtgcttaaaggagctgatggagctgaaaaccaaggctcgagaactacgtgaagaatgcagaagcctcaggagccgatgcgatcaactggaagaaagggtatcagcaatggaagatgaaatgaatgaaatgaagcgagaagggaagtttagagaaaaaagaataaaaagaaatgagcaaagcctccaagaaatatggaactatgtgaaaagaccaaatctacgtctgatttgtgtacctgaaagtgatgcggagaatggaaccaagttggaaaacactctgcaggatgttatccaggagaacttccccaatctagcaaggcaggccaacgttcagattcaggaaatacagagaatgccacaaagatactcctcgagaagaacaactccaagacacataattgtcagattcaccaaagttgaaatgaaggaaaaaatgttaagggcagccagagagaaaggtcgggttaccctcaaagggaagcccatcagactaacagcggatctctcggcagaaaccctacaagccagaagagagtgggggccaatattcaacattcttaaagaaaagaattttcaacccagaatttcatatccagccaaactaagcttcataagtgaaggagaaatacaatactttacagacaagcaaaggctgagagattttgtcaccacaaggcctgccctaaaagagctcctgaaggaagcgctaaacatggaaaggaacaaccggtaccagccgctgcaaaatcatgccaaaatgtaacgaccatcgagactaggaagaaactgcatcaactaacgagcaaaatcaccagctaacatcataatgacaggatcaaattcacacataacaatattaactttaaatgtaaatggactaaattctccaattaaaagacacagactggcaagttggataaagagtcaagacccatcaatgtgctgtattcaggaaacccatctcacgtgcagagacacacataggctcaaaataaaaggatggaggaagatctaccaagcaaatggaaaacaaaaaaaggcaggggttgcaatcctagtctctgataaaacagactttaaaccaacaaagatcaaaagagacaaagaaggccattacataatggtaaagggatcaattcaacaagaggagctaactatcctaaatatatatgcacccaatacaggagcacccagattcataaagcaagtcctgagtgacctccaaagagacttagactcccacacattaataatgggagactgtaacaccccactgtcaacattagacagatcaacgagacagaaagtcaacaaggatacccaggaattgaactcagctctgcaccaagaggacctaatagacatctacagaactctccaccccaaatcaacagaatatacatttttttcagcaccacaccacacctattccaaaattgaccacatagttggaagttaaactctcctcagcaaatgtaaaagaacagaaattataacaaactatctctcagaccacagtgcaatcaaactagaactcaggattaagaatctcactcaaagccgctcaactacatagaaactgaacaacctgctcctgaatgactactgggtacataacgaaatgaaggcagaaataaagatgttctttgaaaccaacgagaacaaagacacaacataccagaatctctgggacgcattcaaagcagtgtgtagagggaaatttatagcactaaatgcccacaagagaaagcaggaaagatccaaaattgacaccctaacatcacaattaaaagaactagaaaagcaagagcaaacacattcaaaagctagcagaaggcaagaaataactaaaatcagagcagaactgaaggaaatagagacacaaaaaacccttcaaaaaatgaatgaatccaggagctggttttttgaaaggatcaacaaaattgatagaccgctagcaagactaataaaaaaagagagaagaatcaaatagacacgataaaaaatgataaaggggatatcaccaccggtcccacagaaatacaaactaccatcagagaatactacaaacacctctacacaaataaactagaaaatctagaagaaatggatacattcctcgacacatacactctcccaagactaaaccaggaagaagttgaatctctgaatagaccaataacaggatctgaaattgtggcaataatcaatagtttagcaaccaaaaagagtccaggaccagatggattcacagccgaattctaccagaggtacaaggaggaactggtaccattccttctgaaactattccaatcaatagaaaaagagggaatcctccctaactcattttatgaggccagcatcattctgataccaaagccgggcagagacacaaccaaaaaagagaattttagaccaatatccttgatgaacattgatgcaaaaatcctcaataaaatactggcaaaccgaatccagcagcacatcaaaaagcttatccaccatgatcaagtggccttcatccctgggatgcaaggctggttcaatatacgcaaatcaataaatgtaatccagcatataaacacagccaaagacaaaaaccacatgattatctcaatagatgcagaaaaagcctttgacaaaattcaacaacccttcatgctaaactctcaataaattaggtattgatgggacgtatttcaaaataataagagctatctatgacaaacccacagccaatatcatactgaatgggcaaaaactggaagcattccctttgaaaactggcacaagacagggatgccctctctcaccactcctattcaacatagtgttggaagttctggccagggcaatcaggcaggagaaggaaataaagggcattcaattaggaaaagaggaagtcaaattgtctctgtttgcagacgacatgattgtttatctagaaaaccccattgtctcagcccaaaatctccttaagctgataagcaacttcagcaaagtctcaggatacaaaatcaatgtacagaaatcacaagcattcttatacaccaacaacagacaaacagccaaatcatgagtgaactcccattcacaattgcttcaaagagaataaaatacctaggaatccaacttacaagggatgtgaaggacctcttcaaggagaactacaaaccactgctcaaggaaataaaagaggatacaaagaaatggaagaacattccatgctcatgggtaggaagaatcaatatcgtgaaaatggccatactgcccaaggtaatttacagatttaatgccatccccatcaagctaccaatgactttcttcacagaattggaaaaaactactttaaagttcatatggaaccaaaaaagagcccgcattgccaagtcaatcctaagccaaaagaacaaagctggaggcatcacactacctgacttcaaactatactacaaggctacagtaaccaaaacagcatggtactggtaccaaaacagagatatagatcaatggaacagaacagagccctcagaaataacgctgcatacctacaactatctgatctttgacaaacctgagaaaaacaagcaatggggaaaggattccctatttaataaatggtgcttggaaaactggctagccatatgtagaaagctgaaactggatcccttccttacaccttatacaaaaatcaattcaagatggattaaagatttaaacgttagacctaaaaccataaaaaccctagaagaaaacctaggcattaccattcaggacataggcgtgggcaaggacttcatgtccaaaacaccaaaagcaatggcaacaaaagccaaaattgacaaatgggatctaattaaactaaagagcttctgcacagcaaaagaaactaccatcagagtgaacaggcaacctacaacatgggagaaaattttcgcaacttactcatctgacaaagggctaatatccagaatctacaatgaactcaaacaaatttacaagaaaaaaacaaacaaccccatcaaaaagtgggcgaaggacatgaacagacacttctctaaagaagacatttatgcagccaaaaaacacatgaaaaaatgctcatcatcactggccatcagagaaatgcaaatcaaaaccactatgagatatcatctcacaccagttagaatggcgatcattaaaaagtcaggaaacaacaggtgctggagaggatgtggagaaataggaacacttttacactgttggtgggactgtaaactagttcaaccattgtggaagtcagtgtggcgattcctcagggatctagaactagaaataccatttgacccagccatcccattactgggtatatacccaaaggactataaatcatgctgctataaagacacatgcacacgtatgtttattgcggcagtattcacaatagcaaagacttggaaccaacccaaatgtccaacaatgatagactggattaagaaaatgtggcacatatacaccatggaatactatgcagccataaaaaatgatgagttcatgtcctttgtagggacatggatgaaattggaaaccatcattctcagtaaactatcgcaagaacaaaaaaccaaacaccgcatattctcactcataggtgggaattgaacaatgagatcacatggacacaggaaggggaatatcacactctggggactgtggtggggtgggggggggggagggatagcattgggagatatacctaatgctagatgacgagttagtgggtgcagcgcaccagcatggcacatgtatacatatgtaactaacctgcacaatgtgcacatgtaccctaaaacttaaagtataaaaaaaacaaagttaaaaaaaaaaaaaaaaagaaaatgctgctgggatttggtaactggaggtggcgggtaggaacattttggcatgtcaaaaagcaaagtttattctctcaggttgataagaaaaaagtcaaaaaattaacaaagtcatcaaaactactaacgtcctgtcaaaaggacttaggaggctactagaaaaggctctcactgcccaaagaaggcacagacagtttgagcattagtcaggataatgactaaagtggtttaaaacacatcaaatatattcaaattcaaatgtttttaatactaactaaaagacccacctccagccgggcgagtggctcatgcctgtaatcccagcactttgggaggccgaggcaggtggatcacttgaggtcaggagtttgagaatagcctgaccaacatggcgaaaccctgtctctactaaaaatacaaaaatttttagtagaggcgtggtggcagtcacctgtaataccagctactctggaggctgaatcaaaagaattgctcgaactctggaggtggaagttgtaatgaaccaagatcgtgccactgcactcctaggtgacacagcaagactccgtctcaaaaaacaaaaagcaaaacaaaaaaataccaaaaaacaaacaaaaaaagacccaatctttggtcacttttggagaatgacagaaaaccaacatattttgcaaattgattaatcacgggaaagaatcaagcatttatcatgtatttcctcatgactgtacttcagaccaaccagataaggagaagtttcttcttgtaagagcacttcaagtaacacatgaagaaggaatgatagaattggaatattaccatttgcaagccctaaagaacgaataggtctaggcaacgattataatcagtgacatcataaaaagagaaataactaaacattatacatttatacattacacatggaagcacaacacgttgcttatggagtagtcttcccagaaaattgaacctgaatctgatcacttactgtattagtccgttctcacactgctataaataactacctgagactgggtaatttatttttaaaagaggctgaagtgactcacagttccacgggttgtacaggaggcaaggctggggaggctgcaggaaacttacaatcatggtagaagggagaatgggaagcaaaaatgtcttcacatggtggcaggagagagagagagagagagagagagcaaagggggaaatgatatacactttcaaacggccagatcttgtgagaactcactatcatgagaacaggaagggggaaatctacccccctaaaccaatcacctcccactaggtccctccttcaacattagggattacaattcaacatcagatttaggtggggacacagagtgaaaccatatcactcatctagatataactatcaaagcacaggaaatacagggagagaagcatgccacatgtcaaatggggaagaaatcaataaaatcttggctatcggaaattgttcaaaataaaataccaggtttcttcaacaataacaatatcacaggaagagatagatgatagtgggaggtgggaggggaacagaaagataaattgatagattaaaagaaatttaagggacatatcaacaaatcacatgccaaaaccttcagggcaacagagaataaatggaatttggaatttaatccaaatcctccaaatcccctctataattatgataaaggctctttcttcacaactgcactttaggccaatatattgaatacttgctgtgggcctcataactttatttatataatcttatttcatcttcaaaatgacctaatgagagatgtattatcccctttttagaggtagtggaactgagacacagagttaaagtaacttgttcaaatcacacatctggtaagtggtagattctatgtgaagggctccatttttggctgttcaacaccttaacacttctatctggggaaaatcgtgatgatgtgagccttgggatatgcagctcggtcttccaatacagaagctcaagaagccaagttcttgttctctcagactctgacagagcctgaaaatctgacctaaaattggccaacctgacagatatgtccttctgagatgaaaagtgtggaatagttgaaacaaaggagcaggaaccacttagaacttactctacccacagtgatagcatcctgtgtccagtggagctaaaggtagagctaaaagtaccaccctgtgatgacgagtttccgtgacagtttctagttataatatggctcttagcagcctagctttggttcctggctgctttccaaacctttctgccttcttgaagaccctgtggtctagccaatattttttcaacaagctccttttcctgtttaattaaccagaattagtttctcttgtttggaaccaagaaccctaattagcttagccagagtttgaccacaactttctctgaaaatgggcctgtcactttgtctcaccattaaaaaagtagtgactgctttctctagtttacacattatactaagaatcgattttcccaatcgcattagtgtgttgaataacctactgcactgagatctttaagtctctagttttggtcttcaaatagttcacaggtcatgataactatagaccccgatacctacgcttaaatttgcattcaagcttagattatttgtttttcctcaccaagcttggatgttgtgtgtccttggctttcacaggcattcatgagggttggggagtggtggtttgctcctcagtaaagtgtaaaaggaaaggaagaaagaacagcagaatgtacatgtgagttgatcgtgaaaaaatgtgaactaagccatgggaacaggcaattatgtcaaaaagtaggtgtgtcaacctcagattttcctttggttgtttattccagcctgaattcttgttctcaaccagatggttttactgtttcccatttccccttcccttagagtttagtcaagtctaagatttctgctgtttgtcagctcgatgttgtaaactaaatgaactagtttgtgctgatgggagatgttgatgccggtaaacttcaccagaagagctcttaccttacaactgtgatttgtctctgctttttcccccatcctttcctagacattggtggtagaggctcaacaaaagaccatttttaaacagcataacaataataatcactcctctagagaaaagcctatctttagttctggattatgcaatttggattaaggtttcaaattttatatacttgccaagggactagattttggggtaaggatacctacagagccttagggtaatgtctcactttaaagtattgatctttttacatttttaagccctggtagtcttttaattgctttctaatgattcattttcctcttctttttactgatttttttttttaagctggcaaaacttcagtcctactcttgtagttggatattgcattgggactaggttctggtcaatgggataaagcagaagtatctgagtgacttccaggaaatgtcatttaaggaagtggcctctgcctccttcctccttctagctggctagaaagcaggactgactggctggagcttcagtggctgtcttgtactataaggcaggagttttgttttgaaaatggagcaacataatggaagtaacttggcacccagatgaggttgagtccaacgttatgctgctttcctccagctttagttttcatgtgtacacacatagacacacacacacacacacacacacaccccaactgccatcttgtatatatcactattatttgggggtattttgtaattcagttatatttctattacaaaaacacacaagataattgtctttaacatagaaatctcagatatttctgtttcatagcctcgaatcttcaatatttagtaacttcactaataatgcagaaatacttgtggctttagttataaacaaagaataagaaaatatcattaaatcttgtttctgtttaatattattaaccttcactgaaatgtttgaatatttgcctacagtatttggaagattatttcattttgactttaaactgcatcatttctgtcatagggaagatcattcttcataaaatcacctgttaatgttttcacaggtcaggaaaaaaattggaagttaattatccagtgaaacatacatgaaaaaaaaattataccagagcttgatagtgccactaaatttgataatgaatcatcatttttattttaaacacatttgttatgtgctttacaaaataccatgctttccagagactagaaagaaaatgaactctcaattatgttcagggttaggtctgtgaaccttcagggaaaaccttggttacgcagtacagatatgtttgcataagtaccattaatcatatatatcatgaaaatgattataaaacttttatcataatttgaagcatcattcagcatgtctagagagtgagataggggcagtgcattctaatcagagggcatgggtcataaagcccggattctggctctctatcaccttgtatttgactttaggaaagacaataaaacttcctctctgcctcaattcttctctctgcaaatttctgccttcatggaatttttaagggattcagctaaatgagatgatcaaggcaatgtgcctattatagtgcaaggcacatcactgacatgcaataaaaacactttgattatcgttattgttaatatggtgattaaatggataattgaggcaatcatgaagaaaattaaacacatagtcttgctgtgaaattgaaaacaagattatcttgattggctgcatattggacagattactgaagaaaatcctcactccataatggttaggggtacagattctggaacttgacaacctgaattccaatcctatccctaccatttatcatctatgtgactttggatgagttacttaacttccctttacctcagtttcctcatctgaaaaacagggatgatagcgcctacctcactgggttcttctgaaaattagatgagataatatacgtaaagcgttggcactggtaactgttgttagtgttcttgttcttgccaaatggatacatgagcactctaccctcttgacccataatgaatgaggtccatgtagatttgtcttctgtataaaacttcccaaatatcttggtttatttcaaatagaattatttgctgcttagatgtggtttcaataatttttaatgtttagttttagtttgaggatgtatgtggctaaatctacattcgtgtctaagatccacaaatagaactgtcatggaaacattttcagtatgtgaacaatagctttcacttgaagaaaatcttctttttaaccctcattttttagcgagagagaaccataagccagagggaaataatatattgacaaacttggcaaacagaattgtagttggcagacatagttccaaggtgccttcttagggaggtaccagtattacaaggggatgtcatgtggccataggattttccatcttattccctcttgatatgaaatacatatttttgagacaggttctcactttgtcacccaggctgaagtgcagtggtgccatcagggctcgctgcagcctcgacctcttcctgcctcaccctcctgagcggctgggactacaggcacatgccaccacgcccagctaatttttgtatttttttgtagagacaaggttttgccatgttgcctagactggtcttgaactcctggcctcaaatgatccacccaccttagcctcccaaagtgctgggattacaggcatgagccatcatgcccagctttaatatgaaatactttgtattttgcagactcaagtgccaaaataagtacctgatagtaaagaatttttccctctctaaggggaaaatacccatgcactgtgtgaatgtgcacatgtcctctgcacatatcactgtgaggaatatacagtgagaatctgacctagtggacttctgttgtttgttttagactaaagagttttcttctcttacttactagtcagtaatttttctctcaacatttctagctctggttggtgtctaacaatggatttagatgagactcagaggacatatttgccaatgatgaggactgttaaagaataaaacgtgttacagggagaaatttaggaatctctgcctggaaatggggaatggagtaaatgaggtcccatttgctctaacaaaaatggacttttagatgaatgaatacaagaactgtctgatttttggaggcaccaagattattagtacgacaagacaggattccaactaactgtttctattgtgatttcctaatcggtatatcacaagagattagcagtaattcaaaaaattagatatgcaaacaagaatctgtatcatttgggacccaaatggatttctccaaatactttgaataattgtcagtgcttaattatgatttttgattatttcctatgacacagttctgctgctccaggatatcaatggtttatattaaagtctgaaaacattttataaaaagtattactgcctcagctttattatagcaaccaactccagggactcaggcttttgactaaattgtttatttcccatctgtacatatgaaagtttgcacaattttaagcccaaacacacacacttttttatatatacatatataaaaaagtatacacatacaaaaatatacacaacattttgtcttctggaaaagagtcctcaaaaatagacatatgtcagttcaaaaaactaagttttcatttatatgattgaaagtatcatggtgatctggttcttgtgttaaaccatgtatttcagagctataactgtcttctcattattaaacattgtgtaaatcattgttgtaaactgtctcatctctttgaatttaatgccgtttaatagtatgatgtcggatttgtatatctttcccagaaagaatgtgatgtttcatagacaatttcattttatatccatgcatacttatgaattagaattggaaagtgattattatccccattgaagtagatggaaaatttaagggtgagagaggttaaataagaacttgcgaggcccatactgtaagctaatggcaataataatgaagataattagcttttttgtagtttatgaagcagtccatgaacatgatcaaatttaatctttgttagagacatattctggattcactcaatatgtcttactcagtttaattcaactcagtatgtccccgactgagctcatcattccctgcccatcccctaaacacacacttcagctctccctcccagatggtgaaatcaccatgcatctggtcatccaagctagagatctcagcaattctatttgaatgtgtctccctctcatctcatgtttaatcaatcaccaagtcattccatgtttatctcttaactgtttgatgcatctgccttccttcttggaatgaaccctgagccatgaatccagttgatgctttggccctggttcttgccgttttccatcctctatttgtcgacttcacagatctcactcaattagtttccttccctcccatcctggccttcgccaacccattcttcacactctctgccagagtcattcctctacgtaaaccctacaggtgagtcttagctcctcaccaaggcattcaggcccttcgtggtctagcctcaccctactgctcacttctcaccactcctgatcccatattctgaactccagtgacagggatccactatggcccttcacacttacaggggtgtttcacgtctcttgacctttgcatatactttctgcttgaaagtccctgaccatggagttcaagaccagcctggccaaatggtgaaaccccgtttctactaaaaatacaaaaaatagccaggcgtggtggcttgcatctgtagtcccagctactctcctgaggcaggataatcgcttaaacccgggaggcagaggttgcagtgagctaagatggtgccactgcactccaacctgggtgaccgagcaagactctgtctcaaaaaaacaacaacaaaatagtccctgaccatttcctcccctagaaatacaacttaaagcaaagcttttctggacaaatgttgaaggtcatcatccccacaactgaataagcatcttcatgtgtatccccataatcctctgaataaatctgtcattggacttaccagttaattataattatctgtgtttattttacacttatctgcctgacccaggccatgagttccttcagggaaagaacattctcttattcacctttatctttagaaggactgcccagagcctggagcaaagcagtgttcaaatgtatttgagctgggaggcatttcattttatatattggacatctgatgctcagattcctcaaatgatttgctcattaattttagggcaagatttgtccagcatccagtaatctgggacctaagcaattccttctatattcaagattataatgattattaataaacactgactatatctcaggtacttttctaagtgccttagaaatattaactcatttatcattacagtcgtatggaatacgttttactattttttccagagaggttacaaactaacaattacacagttagaaattagcaaagtcaggatttgaatttggaatctgtgttcttaacccttttgaaaatctagagaagtagagtttctgccccaaaaccacacatacccacatactgtttcacacagttttagggatttcacagattccctaaaaactgtgtaagaatcctttgagaactccagctaaatgacctcaacgctagattttcctacctctgtcttagagttctttgaccttgagaatatcatatggcttatactcattccctcctgcctcctgactttgactgctaaagttaccttctataaatcaagtgttgtctctccataacactttcaattgtgtagcccacctgtcaaatcaggagacatgcatttctgacctatctccaagcctcatcatgtcattacccattcattagtgaggtcagtaatatatgcgccgaatgaaatcagcccctgggctgatcttgggggtgccccacaagtagccacatcttttccagtgtggacacatgtagagatctcagaattcactcctgatggcatacttgaagagcgtatggatggatttcttgcctgtatcagagaatgacatttgttttcctaaaagctaacccattcatgtaaagccagttccctctgtcagcatgtgcattttgagggctgtttcactaatgcttaattaatccatctttaatcacattagagaaggaaattctatatttgttgagggctcattgtgtggcagtacttggacttgcatgcattatgtcttatagttacaattttccttcatttttacagaagaagaaacaatcagaatgggtaaatcttttaccccaagtcaactcagctagtaagtgatgcaacagagatttaaatctgtattgacttacagttcatactctttgctctatgataggatgtgctgtgaccttctaatgttgatatctattgcttggcaatatcttcatatactggcacagggtcaccagataattcattgtgaaacatgacatagggcagcactgtatcaaaacgaaacagctgtagaaagaggggagggaggaacactgagtgccccagccatgaatcaggggccattcaccattgcttctggaagaggtgcccagtccacggctatgctttctccatctttcttttttggactgactttcgtagggctattaagtgccctggcacattgctgatgctgtagttctctcaacttaacccgtcctgtgaggtcagtgggagcaaagggtgttctccatgcgggttggggaactgagcagtgtaagatgaaagagccctaactttgcagtcagataggagctttcatcacagctcagtcacatacaagctgtgcgattttggggaagttacttgacttcactgagcttcagtttccttatgtaagatgggaatacaaacatcaccttaacaaaagttagtgtaaggattaagtgtatgttaattccttggcacatagaatgtgatagaagttatcaatattaacatatttattaacgtattattactattattacctgcaagaggagctttaatgtctttcagttactaagaaaaggtgtaaagcctctcccttcattgggaagagttacctacaaaaatattgaataaattcaggctgagcaagcaaggcatctatattggtagaaagatgggctgagggagctatattccagaaaacttaattactatagacatcctggcagagaggaatgtgttcctgattctttcttttatcaaaagaagattccagtcacttttctgatgacaacggggggtgggcgaaaggaaagttccaggattggtctcaaagcccaatcttattggtttaaaattcttcagaagcttctccacagccttcaggatgaagcttcacctcccaggcatggtacagtgtactttaaaaataacctgtatctaccttctccagcttagcttccaaagacaccttttactacagccccattgattaacctgtggctcaagagatgcacatgctttctcacctttatgcttttgtagagacacacacacacgggttaacttcaactcaaccttgaaaatttccatctcacattacctccttaggggcacttttcccttaacttgcatcctggctggccaaggagccttccttttgtggtccttttgcatctagtgcgtatttttctccctgtcttatttttattgcctggtcctcaccagaccaagtgctattggaggacagggacactgtcttggttgcctctttttctggcttagaatagaaggaaggcagaaatggttccaggaatattttagcttaggtttttgtttatttgggtctggattagtttgataatttaaaaagttccctgagaacaagagagatgccttatttctcttcaaagttcatattagaccagtgagtctcaaccttagctgcatgtcggattcactcaggggctctaaaagcccaggcatcagtaagggttaacatttttcccaagtgatttcaacatgcacatccaaggttaggaaacactggattaaccagagggtgctcaacaaaactagtgattcagtcatttgatcaatacatctcacttgggcaatatgcctaaacacatgcagttgtagataaataagggaaggagaagcatgaagagaaaaagagaagggagctgcattagctttagatgaagtcatctaatgtgtttgactcccccagtaacaaaaatatttttcaaaaataatttaatgtaaacagtttcagtttctgttttctctttcaattctgctgggcattgtcaagtctgggctcagaatagggaagctgtgtttccctgaaatgttgtgagtatatcttaagaaacatcacagtatacaggagaatgtctgacactttttcctggcaatactacgcagctcaatttttgccccttctgtgatttgccacgtcccctctttgaggttcatgtagctgctctctctctcataataagacagccagtactggcctgcataattcatgattacaaggtgtatacacatgatgataaagggaactgatgtttaatttacaaggccccatgttttctcataaaagagctaagcacacccaatcacaggctcaattatgaaaaataacaagaatgtgtttgagtatcattttgcagacacatcgtgaaagagaattgaatttgaagattatatgaatacctggatgaaaataggttttttgataatttgactgaagtgtggcactttacaagaattttctagatttaacccaccaatctccctgttgttccctgattgttttaatttgctgcaaggtagcctgcaatatcagttctttattttttattttgagatagtacttaatgggaaaaggtaattttatcttatacatcttcatttatttgcatgaaactaaaaaaagtgatctaatttacatttttccaattcaaaagctattactgggacagtttcttcataaagtgaatttatattttgcaaagatttagaaaattttccatttaaattatattaaagtctgttttcttatacttcatattccaaacaatgaatctgctcctttaaatattatcccatcttccaaacccatggaaaatggaagtaaaattccatatttgaactctgataacaggccagattatgatactactcaatgttaccagtgcatatttgtgtaagaattgtaattgggagaacattacagtttcttgccttagttttcccaaaagccaagtaagtcctttactgtagcattagatcatcctcttcacttggctggacctagaattaaatacaattttgatgcctccagggaaagcagacagaaaggaggagcaaataaaatttgataatgataataatacttatactactgaatacttggtgagcctggactaggtccatcatatgttagcagacatatgtaggaatattgtatctaagcctcacaggaactctctacagtaatagtatgaccttgatgtttctgatgaggaaggataaggtgtggagagagtaagtgacttacccatggttcagctggttagggtaaggctctgtctaacaaacgtctaaatccaaagttgatgtccttaccactacgttcttgcctcagtttatcactgatgaagtgctagtacccacttgatttacaggaactcagaggaccaagggtctagttctaattttctataagcagtgaggagttccccatctagttggaaatgaaggtcagtcattctagggatggtagatggggccagttgaaagccaccagcttgtcccacttatggaaatgtaagcttggaggtgccccaaagcaggtgcttccaggcctgaagtagggtattatcctcaactggcatgtctagaagagcacctcttcatgttgtatggggtctgaacagcaccccacctttacttcactgaggagttctcaaaggtccacatttgttgaaaacatgacttttactgatacgcatgattttctttttcttacaaagacccatgacagagaacttacaaaatacaaatgtgcaaaacagcaaaaatatgaatcattataatcacatcaggaagagatcatttggtgcacatgtttctagtgcccctttttctgtgtgttataaatgcacatgtatgtgtacctattttgaaaaatgagattgtactatacacatggtttataatttgatttttcccaattagtattttttagtaaccagagtagttttctcaaaaacaatcttgtacagaaccccagcagataaacagataaagatggagacactctgttttggggcaaggggtgtggagggagagcagtgagcccaggttcagcaccagcttctctgtctccctcatgccccctaatggaggatttgaaagcactgcagtattttgcagaaacccagtttgaaaactcttgttctttaatatcagttaagatcccattctatattataccagtgtaaaccccagaacattgataatgaatgtctcctccaggataaaaatagtattaaaaggtaccagtagccataagagttgaaactatcatttgttaaaaatctaagaataagctggccgtgcctcagcttcatcctcctccctcctcagcctcccaaagtggcttccacctgtaatcctagcactttgggaggctgaggcaggaggattgcttgaggccaggaattcaagaccagcctgggcaacatagtcagacctcatctctattacaatttttttaaaaaataagttagccaggcatggtgctgtgtgctgttgtcccaactattcaagaggctaaggttggaggatcctggggaggttgaggctgcagtaagctatgatcatgccactgtaatccagcccgggcaatagagcaaaatcttgtctcaaatcaatcaatcaaagaatagtagaaaagtatgtgccatatagtctcccagtctagaaaagtggactggactttctctaaagccagtcattaaaagagaactggggccaaaaagaaggcaccgtgtggctttcttaccctttcctaatttcagacatacaactgtgtttaaaacattccatacctagaggaggcaattcctccaaaaatgaacaagaagttgttggttgttgttgttttctaaaggagtggaggggttcttcattccatccaagcggagctaaatctgtagccagcatgaagcagatggcccccttcttctctgccttttagttttatgactgcgagattgggagatttttcagcagttgcaatagttggcttcatccatcacgtgaggcaacgcctcagcggcagcagcttgtgttcttacatttaggatctatagatatggactaagcaaagctttgtgttttcacatcagaagctgatgatgagcaatgtgaggagaggcagcgttaaatagattcttctctgctctccgtttcttagtcctactggtaacaagtgtgcatcaagctgaaatttatggtgctaggtgaaaactctgctccacaggtcaaatgtattctctacaatttcctctggtggaatgaaactaccttcctggtcacgttttatgctgtctaatgcagtggtagtgtctttatctcacaaatgttccctaagatctaggcataagatttctggattctactttaactttgacattattattctgtgtggccttggggcaagccctttaagctctctattcctctgagatcataatgccactttatcccttaaagcttaacataaacacttctcaaagagatttgcatggattggtggctctcaaccttaactgtacaataggatcacctggagtatttttaaaactagtagtaccaagccccagtgattctaaaatgcagccaagatttagaaacaccagccctgacaaacccattcagaattactctcaccctcctgtgttggttctgtttttcttgtataactcttaacccaataggtctcagtttgttatttccatgcatgcttacctatcaacaatgaaatgtaagcttcttaaggaaagagacagatacataatttatctttgtctgcttagcatcttgaccagagggaagctgggttcaaaaattagctttgatacttgttagccaagagatcttggtcaagactcttaactagtctgtatccctgttttctcacctgttccaaatgagcaagaattcaaatacattgcgtggtgtggtactacggtttaatacaaagatttagttaggcttatagcactgtgtaagtggtcaattcagatcagctgtgcaagttttgctgaatttactgctttttatgtagtgatttttcctttgttggatcactcatttattcagcaaatattttttagcacttcctactatagttttaggtatgtaggatactgtagagaatatactgatggaatttacattctaaaatgctacatctgtgactctatttaatttttacaaatacctgtgtttccttatactgaatcaaatgagatcctgaaggttaaaaagagattgagtgatttagccaagacctcgcagtaatttggtaatggaaccatgccagcagtccaggttttagtgctcattccagaggacaaacccatcatcctgattccctaatcagtgactgtgacaatggaactgttgttacagaagcagcctcatgcaggggataaaagcacggtttctgaagttggtctgcctagatatgatagtgtctctgccagttattagctgtatgactttggaaaagttatttcacctctctctattagtttcctcatctggaaaatgaagataatgtttacttcgaagagttttcatgagattaagtatatgtaaagtgttgcacagcaactggcatacagcacacaagagatgttagctattataatacttatctatggttagaagtgagtagtctgttttaagacttcccaggactttaaagaggtccatgcactcctccccttaaagtggtggtgatttattatcaagcaaatttcctgggttataatctttgaaatgtacatatttgtctataactctatgtctaggaaatggaataattttgacatttgtgagtatgatggaataaatcctccccagcagattggaattgttccatggctgacagttggcaaagtccacaatttgcatgaggatatgtgaggatgttacatatccacttgtaaaaagactgactggataatagaaatatcctatagtgtctgtagcccagaatttgatgagaaggtaagaataatctaatcaagtctccacaaaacgtatcaggtcttagaaatgtctgggcccagcacaccccatcagtcagtgtgacagttttaacatcattgaaaaggccgtgtattgaaagatttcttaagtcaggtctgtacagctagctataaagctccaattttctgtagggagactttgtttatgactgagtggcattgtggggtttctaattactttagcttctagcacctgtagccattatcccctcaacttgcttttcttgtatttattcttctagagaaaaacaaggagaacaaagacacagcacaagtattttcagcatttttctcacctggtgtaccaatttggctgataagtatatcccagagggaaaaagattgtcagcagctgattgctattaaagtggactaggagaaagcttttaactcagatgggggtaaattttctctttaatgttgaagaagatcctgatttgtaaaaatgtcaaaacccggaaaagcaactttgattacttgctttgctgtgggctaggggagggggagaattattttcaaagatgagcactagttggatctttcaacagatttcaaaggtgaagatccactaggcgccagacctccatctaagacatatattacctgaagatgcttgtgttctcctgtaatggaacaatttcaaaatgaggtgataggagtcttcatagagctaagcacaggatggcatgggcagtgggggtggaaaccaatcacccactcagccacccacctaactacccacccacttacccacatggtggtggtagacagaagacagggaagaaatctcagcagaagagatgcccctgtttattgacaacaagttggctgttggtcagggataggtcctgaatgttacagtcaagtaggaggtggaaatgcagcatatcctctgacttctcttgtctccattttgcattcttctcagtagttccttctcagtaggaactattttttggctctgtatcaaagtgatggctgtcagaaatgagtattcattaacattgaatataaagccagagagccaataatagcccaacaaaagcttgacctgtttattatttttggcccagaacccagagagtgtctagtaaatggtagatcattggtgggtagggtgaatgctgcactttgatactacacctggaagagtgtctagtaaatggtaggaaccatgaataggtagacaaatgctgtgcgttgagctttatcaggatgtttttacctttattcatacaatattcactataacctgtgacatagatgaaattatagtcatctcttggtatccatggaggatatagcttccaggaccctccgcagatactaaaatctataaatgctcaagtctcttatataaaatggcatagtatttgcatgtatcctacacatagcctctcatataatttaaattatttctagattacttataatacctaatacagtgtcaatgctatataaatagttgttacactctatttttaaattttgtatttttgattgttatgttttatttttaaaaatatttttgatccatggttggttgaatctgcaaatgcagattccaccaatacaaaggcccaactccatgagcctcattttttatgctgggaaaccaaggtgtcagaaggtgaaaagctggcatgcttttaaaccattagtcatcaggtccctaagatgttgatatgccaccatttttattaatcctgaaacttcttttcttggataattagccctagactaagcatgtccacaggccatcaaattcagtacagggactacccatgtaaggtaagagtaaggtacactgaatgtaacacagttggaagtggtatgaaatggagtgtgcttatgtccactaaagaaaaccaaaatcaaattattaaagagaaaacacaggtaggccaaagtaagcatcccatttattggtagaattgggtccataagcagtcaatttgcaacttcataagcaaaattgaaatttaaaataagtcctaagcagaataagtcgaagataatttttttaaatctgctggtatatatttacatgttattaaaagcatatttaaataagtatgctttttttaaataagtatgcttttgataacatcaaatttggccctcaactgtgaatatataattaaatagaatattaaaatgttctgatgtgcaagataaacctaggcataacccttgtgttatacaaggctcttctgtgtttgtttgccctttggtgcagattctggtaacatgtttttttctttttcaagccgttatggcaaaagctattatctcagttactaattggccatttgcccagttccttgtcagtagttccacgtttttgcccaattactttaaaagaatttctctgatgattgaaacaatgggaacagttttgtgaagaccaccccaaccctggttaggctactgcacatttgatagcttaaaatagtgccatggtgggaagagtgctggaattgccatctggagccctggctccacgacttagaagaagcgtgacacccaaaccctcttacctgcaccatgtgtcagtagatctccatggggaatggagggtttaactcccagagggcacaattattaaaaatgttgaatgaccatgactgggcagagctcttggcatttaatggttgggaacccaccattgctaccgaccccacaaggcataggacagtcccacacaatgaagcagtgtcctggccaaaatacagaagttctctttctgagacacagtgctgtaggcaatttatttgccttctgtgaaccacattttccttatttgtaaaatgttctactgagtttataggatcatgatgaagatcaaatgatatatgtgaaagtgctttgtaagccctaaaacactgtatgcatgggaggtattacaatgattacactaagtggcaaagagagacaaagctctttacaacaaattgtgaactgtacagatctgtaatctccctcttttaaaaaaaatatggcttaatctggaccatctgtaacaagatggttgttttgattcattaagggcttctggttctcccaactctggaaacccctcagtgtatgtgattgtatatcaaagctatttgaaagatcagtttcctgattattcatagagtcttagaaatctaggcttggaaaatctgcagaacatacacagcataactgctaggagtatgaatttagagaccaaaggcatctcatttgaaacctgacttcaccccttccttactggctttgggaccctgggcaaattaattaacttttcaaatcctcagttatctatgaaatgggtattaaagtatgtgcctcatgggggttataagggttaaatgatagtctttggcatagtgagtgttctcaatgaaaatacactttcatcttgttcatcccccataaggtattaggtgtcccccagtatccaaccatctttacaacttttgcttgaaaagtggccatcctgacttgtttttcacacttcactaccaatggaaacatcccattttcagacttcttggaaagatctagttagggattatattgtatttccagctatgggatagatttctttacacacctgggtggggggaatcaagaaatagcacccccacaccctctgcagtacattgtctgatcttgtctgcaatcaaattatctactgggatgtggtgtttcatatcaagccttccatcaaaaccattaacaggcagttaacagttgatgtgaaattcttggctcccagcagcagcttaggtgtatttttaaatattccgtctggcagctcagaaggggaaaaaaagctaaaaaggcagcaaccagcagattttcttccaacaaagatcttttccccacaacctgtccacccctttcaaggaaggaataggttagagatgctgcacctaaatagcagagtgaccatgttacctagcaaccaaacctaaggatgggtgctagacctgcccactaattaccagagcaaggagaccctccctcagagtgtcacttaaactgtaagagcgttatgttccagtgacttccatgaaaggttaagaatgatgtgaaagccccctgtgtcatgagtttcctttcagttgctcaggagctatggagacttgaagacccatcaaggatgatatttaaagatatgaaatagcaaggttacaagttacttttcccagaccactttctgcccttcttaccatcacaccaacttctaaaaaaccttttattttgaaataaatgtacatttacatacagttgtaagacataagacagagatcctatatcccctttccccatttttccccaacaataacatgttgcatagctatcatacaatatcacaaccaggaaatggacattgatacagtccatcaacctgattcagagtgtgccagttttatgtgtagcatgacaccaattttcaggaaaacataatctcctgatctctactgaaacaaacccctctcctaacttctaggaggatctcctttctctttttgataagtctgatcaactgaatagatgaccaaagcaaaagtccttatgtctcagaaattctcaatagttccacaagaaactgactgtcatctgcctccactgcatcttctaccacctgcctcagaattcttgggataaggcaaaagctatgtcccaaggtcacattaggatttaggatcaggcacagcagcccatttttcagttatttataagtccatggcctgtgcatagaaagactggcaaagtctacattctttgaggtcaaggaatttgaagatcttattgtcaccctcgcttctcccctgatgccttaagtgctgcgaaaatctcccagctcaagtgtgtgattccgtgtctcagaatgaatgatggctgagggtaggagagaaagcttgacttggaggtgtagtcagaggaaggactattgtacctccatgcataggaagctgctttgctttcggacaaggctatgaagagctgttttcaaagtttaaagttattttctatggccagcagtgatgatatgaaaggttgcatggaaaagggcttaaggctagaagccggaacaattggagtttaaatctcagccccattatttaccatctatgtgacaaatggccttaccttttgagcctcactttcctcaccaacaagggattggagatggagataacagtgcctactccataaggtattctgaggtttacctgatagaagacggtggttttcaaacttgagcatgcattggaattacctggggggcttgctgtacctccacgcccggagtttcagagttagtaggtctgatgtaaggcctgatcatttgcctttctgacaagctcccaggtgctgcattgtagctgctggtttgcataccacactttgagagcctttgggatcccgtttatgattacactttgggaacccctaaaataaggacattaagtgcctaataacatatctgactttgggtattcacccaagggaagctagttcccctccaagctaataaggaaaaggtgcccctcccacccataaaataaactgagttctctgactttctagaaactgacggaacttcctggttgacagaaagccatgtctaaacaagcaatgtagaacaaaaggctgtgaaattatcaagcatatatgacaagtgtccatagccaattttcttatttcccagtatgacagtgattttcttttacaaaataaagcaaatttagggttaggggctttgtcctggatatacgtgcctgtgtatgtgtgtgttggtatgtaaagctgacttcatctctgacacgtaatattttaaccaagcagaaatgtaatacacagttttgtagcatgtgtatgtgggagagaatgtgggagaaggaagcttgggaaaacaagcgttcttagaagaactgcaaagaacctctcattagagaggcaaattaaaatatttcagtccctgggctattctttttaaatacaccaaattacacagcagttcgtaatggaagaataaactgcagactttatagaattaccttttttttaaaaagtggtgatatgcttcacttgtgctgtgagcaatataaagaaaattactcaaaatattttctttaccactgtggatttttgtttgtttgttttgtttttgtaagggtggatccccaggtataaacctgaaggattattttaataatttctggtgccctaaatttcttgacactgcatgcaacccttgatttctttttattagttcgctcccctgcagtctccttacattctctgacttctaacattggagggaatactctcacaactgatgataaagcttacatttgttcccatagcctaaaacatgacttccagattcaaggtgctattaaatctgttgctgccacaaagtttaattgactccattttttagctgatgataactgttgaatattcttacatcaaacaaacatcactaactctaattttctatcaaatatctgggctgtgctttgaaatgtgtctatgaagacattctttttctttctttctttcttttttctttttttttttttttgaagttatagcaacaggtaccaaaacacaagctgagaagtatttcagaagagtagttgaatgacagtggcaatctcagccttggattatcaatttgaatttgtttttttgtccaaatcctcttgatgtgagattatttcaggctgtttttccccttgcacattatgtaatgcctgcaaagaggagaagtcagatggaggatcagagcaggagccgtggcagaaaaacatgggccgtgttaacttaggctgtcatgcaacttgtaaacctgcagccccctaaggtccagcaagatgcaactgacaggacttctgatccccagtcagtttattcccaggaaaggcaaccagcaggaattgaaatagtaattgctttcctttattcaaagacatcatggatgagacgattaaagagattaaggcttacctcattcagtgcaccggaataaatgtagtctgcttttctgataggactgtaactgtcaatcaaaggattaggcctttgggaggtagaaaaaggaggtggccttaaaatgtatttgaatttgcaaactacagctgtgtattttaatcctggagatacgcattgatctttccccctctttgaagtctgctgttagctacaggctctctggccccaaccacttttcttatatttttttaaaaagaatattttaaaaactcatttaaaaatcgtactgcattgaatcacccaaagggaaaatataattaaagtaaccatttgtattgccctcaatgaggaaaaactttggaagtgtgcttaactttggaatatacaagtctgattgtttcatcagaaattgcagcactgtatgcctaaaaatatatttttccagcaggtttgggattttgtacttataaggaggctgtttatccatttagcaatttagctgagggcctagtataggtttttaatcttagcagcacaagtattcctgttggtttaagtcttaccacctgagttagtgctgccacaacacacacattctgttttctcattagctgtcacacaattgtctgcatctattaatttttgaaaagataatagatattcttggagaaaccaagacaaagtggcagaataaatggcaggtcatttctcatgtggtggcagaacttaagcatttgcaattttctgactattgtcagtcaaggttctgggttcattatctcaaccttgacatctaggttccttatctgcaaactcaatttctttccatcatttccctgcctgaaatgtccgatcagccaagacgtgtctcttttatttttttaatttaatttttatttttatttttatttttttgagatggagtctcactctgtcgcacaggctggaatgcagtggtgcgatcttggctcactgcaacctccacctcccaggttcaagccgttctcctacttcagcctcttcagtagcagggattacaggcatgcgctaccacgcccagctaatttttgtattttcagtagagatggggtttcaccgtgtaggccaggctggtctcgaactcctgacctcaagtgatccacccgtctcggcctcccaaagtgttgggattacaggcgtgagccactatgcctggctgaccttgtctcttaatgtttctatatcaaatgagcaagctaataggtctgttagaatatttaggagaaatccatccgttttcccatctattcatccatccatccattgattcatttattcaggtgcctactctgcctcatgcctggtgctcaagacaccagctgtgaataacatgcatttattctctaccctcatggagtgtataatctaacatggaaagaaaatgtttaataagtaattaggcatttgagggaaggtgaaaaagatcaagggtgatgtggtaggcagaattataagaatgcccgcagtgacacttgcccttaaataatcccctctgctttgtgtgtgagtagaacctgttaatatgatagcattcccttgataatgctaagttctatggcaaaagggaaattatctcagttgtcctaatctaattataggatccctttcaaagaagagcattttctccagcctttagctgagagaaagagagactccaagaatgggaaggatttgatgcaccaacactggcttgaggatggatggtcatgagatgaagcatgttgatggcctttagaagcttagagcagccgccagctgacagccagcaaggaggcagagacctcattcctagaaccacagagaactaaactctgctaacaaactgagtttgggaatgaattcttcactacagcttccacataagagtccaggtcttatgataccttgagttcagccttgggagactgttatgggttgaattgtgtccagcaaaaattgaactgtgtcacccaatgtttatgttgaaaccctaacccctgatacctatgactgtgtcatcatttggagacagggtctttgtagagttaatcaagttaagatgagatcattagggtggaccttaatccagcatgactctgactggtgtctttatcagatgaggtaaattttgacacagacacagaaacacaggaagaatgccatgtaaagacacagacatagagggaagacagccatgagaagatggaggcagagactggagatgtgctactgcaagccaagaaattcttggagctaccaaaagctgaaagaggcaaagaacattcttccctagagcctttggaggaagcttgtacctgccaagaccttgagtctggatttctagactccagaattgcaaaataatatatttctgttgttttaagccacccagtttgtgatattttgttaaggcagcctagaaaaccaacacagagactctaaagcagagaacccaggtgagcctgcccagacttttgacctacagaactatgagtataataagtggtgttttaagcccctaaatttgaagctatttgttatgtaacaatagcaaacaaatacagactagtatgaaaagagtgtctaatctacctaatctgagggtggttttccaagagggatgtttaagatgaggaagaaggccaggcatagtggcttacgcctgtaatcccagcactttgggcggccaaggtgggtagatcagaaggtcaagagattgagattagcctggccaacatggtgaaaccccatctgtactaaaaatacaaaaattagctgggcatggtggcacgtgcctgtagtcccagctactcaggaggctgaggcaggagaatggcttgaacctgggaggcagaggtcacagtgagccaagatcgcaccactgcactccagcctggtgacagagcaagactctgactcgaaaagacagaaaaaaaaaaaaaacaaaaaaaaagaggaagaaagagtaagtaggaattgtctagtaaagaggagaaagggaagattggtccaaacaaagggaatggtatatgcaaatgccttgaagctgaaaagtgccagctgcattcaaggaactcaactgttcaggctttcacccttcagatagtattgttattaatgccaggcctaaactaggtgctagagacaaaataaggacctgcaacttcttccttgtccttaccgagctcatatttcagtaagagaggttaaaaacacataaccagcctaagaaataataattccacttcatacagtaggctctgaaggataaaatataggactgagggagaaaaccccagagtattggatataatattgaaaatgagagggagagtcatgtaccatgaatctggaggggtaggcaattccagatcaaggagggtgttgtgaatgtctgtttctctatttgtggaatatttcagaaaagtgctatctcccttactgaaaattcacagtagctatcctgctgtgatcatctcggcaccttgtatggtatacacctgtacattttcagattgagcccagtgtaccaaattctagaccattcccctaacccaacacaggattatacccctggggttgaaattatggcttgttcaggatcattgggcttttatgaaaactcactgctcccatttgcattgcatctttttattgcttctttaatttcaatttatttgtatcgtgtgtgcatgtgtgtgtgtgtgtgcacacatgcatatgtgtgaggtccccaactatcctcagttcaatgatgcactagaaagactcaaagatatcagaaaagctgttatactcatggttacagtttatttcagaagagatacagattaaaatcagcaaaggaaaaagtgcacagggcagagttcatgggagaccaggcacaagcttccagttttcctctccaagtgagatcacaggacagtacttattgttcccaggaacaatgtatgacaacgtgtacagaatgctgccaaccagggaagctcactcaagacttgatgtccaggatttttaaaattaggaattggttacatagggatggagtgcccatatgactgaccttagttacatagtctccaacccaagaaccccatcgttaatcacatcattagcataaaccatctgccatggcccaatgccccaggtatacaaagacactgttatcaggcaggatattccaagagtttagaagttatctctcataagcggatgaagggggggccatgcctttctttggaatgtgtagaatttggacatcatagacctgctgaatccaccctttactgtaatacacacacacacacacacacacacacacacacacacacgcacacagattgtcattgctttaaaccttaccccaaaatttggtcttccaacatgttgtgagcatcatcactaaaaccttgggattgtagcaaaaaataaaaatcattttgcagtgtttttttaatattccttgatgtagtggtttacaaacatagattcacattgtaaatatgtaactatgcttggggacattttttcatttaattttactttattgaagaataatttacatccattcaaacaaacagatcttaagtgtacagttcactgagttttgacaaatacacacataacccacacttcttttaaaatattgaccattttcatcactctagaaagttccctcatgccccctacagtcaatccctgcccacccacctccaccaccatcccctggagccagtaactgttcttatctcttactaaacattagttttgcctattatcataaaagtggaaacatacaatgtatgatcttttgtgtttgggtttttttcccactcagaataatactactgaagttcaactatgttgtgtgtatcagtagattgtccgttttaactgctgggtacttttacattgtttggctataacacaatttacgtatctattctccttttgatggacattttggctgtctccagtttttagctattaggaataaaattgctatgctcattctcatatacgtttttctgtgcacatatgtttccatgtctcaggtaaatagctagcagagaagttgccatcttgtaggtatatgtttatctcatctgccaaaccgttatgcaaagtaaagtggttgtgctatttacacatctcccagcaatgcatgagagttacggttgcttcacatcctttccaacactggtctgtctttttaattttagctgttcaaacaggtgtggagtggtatcttatggtagtttcatttgcattttcctgatacctattgatgtggagcactttttcatgtgcttattagccactcgtgcacctgcctttctgaggtgtctggtcaagtcttttgtctattttacaaattcggtgattggactttttgctattgagttgtaggaacgctgtccctgattttgcctcccctgagattttgatacagtagatgtagtgtgggtccctgaaggactctgacatacagataagtttaaggactaatggattaatgggtctgatgtcagtttgctaagacttcaactgtatctggcagccataacttgaaatttccccatccaaagacttgcttggtgattattataaattgttaaggaagcattaaaaaaacaattctcagtaggtggtttctgtctcactctggacttggcgctgaattttaacatcaacctaaagctagaaaattcctagaattggagaaagtcacttaaaccaaatgtgggctccacacaggtattactataattattaaagggcccttgagttgatttgtagcagcatcctaaaccacatcctgtttttcttccctcaaagggaaatgtggtaatatagacatttgaacttggaaggccacatgcaatctgcattcttttctaaataaaattgatttggaaactacttgaaccttgtgttaatgttcacattgtaccaatttatctagcagacaacctccctgacccaaaatgttggcttctttctactaggtaatttcttgaattttcatactgatttacacagtacaccgaataagctacctgcttaaagacagaagagattaaacaaataattttatccaattactgagtaaaccatggacgttttctctttaaaggaaactccagatttggaagttgttttgactcatagctcatggttctaagggattaaaggactaaaaaatcagagaattaaagaatcaaaaagtttctacaaacttaaacatccaaactgtgcagtagattttttccttttccagggagccctgctgccttaattaaggcaatacaaagatggcatgtagattgtatctcatatgacagtgttgaatggtgtgacaacctgaaaaatcatgcagagacccttccctcttcctcaggaaagtgtgctgaaattgatttgcgatgctcaccatcattcagcaaaaatatacctttctcaatactgtgtatctgacctttcaagatatgaggttctgaagttagccagagagtaaactcaaacaaatggtgcagtgtctatcaaatattctgttatcgtgatgtttacaaaggctcttcagtcaacttttgattcttcatgtaatagagaggagatattttaaatcctagtgatgtaaggtgttcaaatccttagagactccaggtaacctctgctctagggacttcatatgcctttgctcttacttcctggccttggactattttatctgattcctcctaggttgaggtggagaaaggccaaaaaaaattttaactagatccttcacttcattcacaactctggttagaacattttgatgaggaggaggaggaaaacctgggcttcagcgtagcttctggatcactagtagatctttgtcactgtggactaaagagatttgaaaactagggggattagcacaagatactgaaatgtgaaaagagtgatgactacatgtcagctctgtttggtttgctctaagagaaattgcatttttaaagctctcctgtgaaaaatgtgaggctttctgaatacacaacttcttacagttctgcactaaggtaggttcctgcaaaggtagtgaggtcatgtttatctagtagtgctgggaaggcttcatttagccatggctgctttaaatatatacatagatatttaaagttaccatcaaggggaaattttcttcctttttctcaccatggagtaatgtgttttctctaaatggctgtcctaagctgcacattgatttttttgttgttgttaagtcatctcctgtaatttctctatgatatttgcaaatgaagttgttttaacacaagttactttcctgggtgggggagaataataacatacccacctttgtaaacaaatttatttgaggatcagtgggggtggtgagtgagagacaacctctaagcccacaagtagtcaattccttggggactgcctccaaagccttcagttagctaaaccttttcctaaagagacaccagttcagaaacagttaaaatgggaaaggattttttcccattacatataggctttggtatgcataacacattctgtcttccttttggccataacaatatttcttataaatatgctaagtattcatagcaagagcaggtcagagtatcatgaaactgttaatttaaagctttactaaaatatatgcatcccccacagccatactctacaggaatttgatctctcttacagcacaaattggagaatgaaatgagaaatcaacaataaatattttaaccattcaagttcttcatatcatcataaaaagaacaatttgaagatttcagatatatccccaagctgttctaatccaatcagaaaagtatagttattactcatctttccttcttttaagtaaatttgcttgaagaagagaaagacctggacctagggagtgcaggaaggcatgggaaagagaagggagagtgagagagaaggaaagacacacacacagagaaaaacatgccttttacttaaaagccctatcagttgttttgccttgatttagttagaaactcaaaaaggtagaagcaggaagcagcacaatatgaccaatttttaacagaaacacatggggcaggagtgtatgatagcaagcttctgcctttctcatgtgtctgattatttttatggaagtggtattgaagcataatgaatgtcagagaattctataaatcctacatgcacacacccatgtaatctgcacccagatcaaggaacagaatgttatctgtcccccaggagacccatcctgccccctgccagtcacttctcccccacccctggtcaccattatcctgatttctcggatcatagattaatttttcctagttttgaactttatataaatgaaatcattgtgtgatgtctaggggactggcctcttcactcactaatttgtgagttttttttttatgtagcagtagatgatgttcattatgtgtagaattccattgactatcacacaatatttcacccattctactgctgatgggcattttggttgtttccagtacagggctattataatctgtattgccatgattaatcttgaacttaccttgttagtgaatatttacctacatattttatcttcatttattttaagaacagcagtctctcagaatactaagaagttgaaatttaatttgttttacaaaactatatacatgtaaaaaggacagaacaatttcaaaagaattgactagctctgttaagagagggaccaaaaagaagacggaagtcccgcaaaacctgtcctgtgaagtttgtgtcaaaatggagttaacttttaaaatgttatagtttgtttagtgattcatttcattgactaattgctttgatctttaacgtaataaaaacagctgaaagaggaaaagagtgggtactccctgtgcttaacaattaagtttcatggaggtaattcgtaaggatggcggagcataaagcataccctagcttcatttgaaacatggtcttgcagcaacaaatttgtgttatattttcagaatatggcttgacagtttttaaggaattgtaagtttgagaaccactataatccaggttctctcatagagtaacttcttcccaggattgaattagaggtgtggaaatttataaacccataccaagatgcaccgtacatgtgaaacacacagatttagaagagattatatattaaaaaagtaaaatatcgcatgaataggtaaaagaaatttttatatgaaccgcttcacgaatttatgtcatccttgcctaggggctatgttaatcttctttgtaatctttccaattttagtatatgtgctgcccaagtgagcgagcatgtgtactgattatgtttttaaatgataatgttgtggctatattgagttaaacatattatgaaaatttcacctgtttttattttattaagggagctataaaaatttaaagttacatgtgtggcttctgttacatttttactgtgtttttagatcttcacatcacctttcaaagactggtggtttggcccagaaaacaatgagtttgacaggattggggaaatgagtttctcaggtgatatattacaagtgcttactttcagcatctaccaatagatttcagggcctatgtagatttagtgcagttgcaactatcttttaccttattatttcgaagtttctatggtatcattaatatacatttagtaagtgctgtgtgcagagataagagagatatatggccactgtctgtcgttgaaaagttccacatatttcattcattcatttgttcgttcaataaaaatttattgagcttctactctgtgttggaaacaaggcaaacatgtgagatttggtagtaaataaagcacagcctctgctgtttgttggccacttgtatgttttcttttgagaagtgtctgttcatgtcctttgcccacttttcaagggggttatttgttttttgcttgctcaattgcttaagttccttatagattctggacgttagacctttgtcaaatgagtagttcacaaataccttatcttattctgtaggttgtttgttgatagttttctttgctatgcagaagctctttagtttaattaggtcccattaccaatttttttttcttgtagcaagtgcttttgaggacttagtcataaattatttcccaaggctgatgttcagaatggtatttcctaggttttcttctatgattttaataattttaggacttacagttaagtctttaatacatctcgagtttatttttatatatgtaaaatgtaggggtccagtttggttcttctgcatatggttagccagctatctcagcaccacttattgtacaaggagtcctttccccattgcttatttttgtcaactttgttgaagatcagatgcttgtaggtgtgtggctttatttctgggtcctctattctgttctactggattatgtgtctgtgtttgtagcagtaccatgctgtttaggttactgtgggcttgtagtatagtgtgaggtcaggtaatgtgattcatccaaatttactctttttgcttagtattgctttggctatttgggcccttttttgattccaaatagattttaaaatagtttttttttaattctgtaaaaaatggctttggtaatttgatagaaatagcattgagtctgtagattgttgtgggcaatatgaccattttaatgatattcttctaatccgtgagtatggaatatttttccatttgtgtttaaacgtttttgtccagtgcccttctactcctgtgctttatccatcaaccgccatccacagcctcagaaaacagctcatttaatttccaccagaaagtcagagaatcaggagggtcactaactaaaagggtcttacacatatataaataaatcatttgcctggagaggcatgcccttggtctgatgctctctcttatggagagatgcataatccactcacttgtaattcagaaaggggtccaacatcaatttcctaaaagagctttctttcagaagatagagaggatgcattttgaaccatttaattgctcctatgagtgacttgcataatgcctgtagaactatctagacagcacatgttgcctgaagcagcacatgccagttgttttctttgctgcctttaaaatgaaattgcatgcacatctgaagctgaatgactcttgatgtgtgattgtacctttaccccgattctaaatagaaaagatggcttttttattaactcattttctagcaggaagggatcatttctaaggaatgacagtttctgttttcagatttcagctctagtactcactaactgatgaaacttggacatattagctagacagcttgaccagtgtcacctcacttgaaggccaccttatgtattaaggcaaaaggactttttaaaaagtggcattttcttgattatatagtaaaattatgcacattgtataaaatgtacacatgcaggaaagtatataaaagtaacttaacaatcacctgtctttccaccaccaaaaataaatatcatatgttaatatttttgtgtatctccttccagttgtttttgaatatttttaatagtggaagccataccgtatataattatgtattttgcctcttttacttggcattactgtgtaaatactttgcctcataatgaaaatctttttaatgtaatttgattttatatataccattacataagataaacatattatttagtcttaggaggaaatatacatagataaaagacatttaagccattaaaaaacactgaggtagataaaagcagtcttaccatattaaagccaaataaatactagtatctgtaaagtttaattcatactcccacataatgtcctttttgttgttttaagtttataaattaatttgcttaaattacgacatttagagacaatggatgtcctcattttgagaagatactttctaacaaaaatcagctgatgaggatttaatacgcaccagcccttgccctgtatgaaagaattgtgaattaccaattacagcattgatgccattgttcagctgcctgagcaaaacattaggtggcacacctgtcagagaaggaagagaagtaactgctggagaaggtcttaggaagccttaagctgggctttgaatgatgggataggattgagataagactttataatgcacggcttttaacagtcatatgccatattccttaatctacaaatggtaggtttgcaattatttctaaacaacaaatataaatccatagtgccaaatgcatgcattttcttgaggcttctggtgtggatggtgtgtgcttctgagagatggaaatgacaagcagataactctagaggtgattatgcaatgagcagctctgaaggagtgcaggagaatgttggcttacagatttttttttttataagattggctggtaggaggagtgggtggaatatgtggaaaaaagaggagagagcaattaagtaaaaatgttaggctactctcttagttaaatattaacaatcttgtggagcatttgacttgatttattcaaatgtgctttccctccaactccttttgcaatttacatcactgattcagcttttgttggggcatcaacctctaagaaagcttgatgaaagctaagaaccacgggtcccagtttaagaagggctggtttataaacagagtctggttacataaactactattcctctattctgggtttgtttccccaccaccagtaccagttcctttggattttgtatcaggttcatttgaattggaaggggaaaagaaagctcagcttaactgatagcctcctttgtgctttgtgcacagctctgtgctaggcaccaaacacacgtaagagccctgcgccctcacaatcgccctaatgggcagcatttctacttgtggaccgggagtggaaaagcaaagaaatgacagtgggatattcagcagaggaggctcacagggaacaaagacactcaagagtgaagctatggttttaggatacagctattcagttttctatgacttagcatgcaaagacatggattaattctgctacagaactgtatgttaactggataatggaagtcattttgttctctcaatgattatcagaaattcatgctctggaaaagaacagacaacagaccatttgtaaaaacaaatccgagtaataaagaaattaatcagatactttcatgagaatttccccaatgattttaatatttagtgggcatgtacttgaaaagctgcttctcagaaattgatactcatgaatgatgatgatgattatattaataataataatatatgaccactactactaatatgctttgagtgctcattataaactggtagttatattgggtgattatgtgaataaaattgctcatttatttggccatagataacattatcgtctttaccttttagaggaaaaactgaggcccatgttctcctacacagaaaatagtttttagttcaagtccatctggtaccaaaaccatgcttttgaggactactctccattgcttgtttagagctgaaagggatcttagggaaggtcatttcccagattaggggcccgtaatggtagtggcttgaccagcatcacataggtccttagcagcagagttagaattgcatcctggcctgtggttctaattagattcagaaaatatgcaggccagtgtggaccacttgaaaataatcctggtattcaaagattatttgtgagtgatatggctatattgtggcaattgcagcaaaattaaaaggcaatgttttatgttaagacgtaattgtatgtgttcagaatgatgggggtgagagtctattaaataaacacctacagtgtctttatattctgatgtgtatggtattaccatacacatattcatttcatggatattatgcatcatctactgtatgacaggcactgtgccagaggatgaaaatacagcaataggcaagacaaacctcatccctcctcttgtggacctgacgttctagtggaataagacagaagactgttcaagtaattaataagaaaaccaccagagagtgataagtgctttgtataatgttaaagctgggtgatgcaacagagacttcctgggagctactttagactgggcagtctggggagatgacaattaggctgaaacctgaacaacaaaaggaaacagtcacatgagataagaggaatgagtattcctggcaaatgtaaggatgattgctgtggaaaagctctgagaaaggacaaaccctgagattggcttgcttgaggaagagaaagaaggcctgtggcactggcatccagtaaaagagggcaaaggtagtgacatcacagaggtgcccaggggtttgctcttgtgggtatttttgagccagaggaaacagtttgaatgctattctaagtgcaatggaaagccattggaagtttcaggcaggaggagcaacgtgattcaatatatttttttttaaagatcactaacatctagaaagtatgaaaagcaacagtgggagctgggatttcaatgaggaaacatgacaattgatcagcaaaggactgtggcaaggattcaagtggcagcagtgcagatgtacagaggtagtaggatctgagctatatctggcaatagactcaacagaacttgacgatggattaagtgaaggaaaaagaaagaaaaagctaaatcaagaataatgtctacaatttttggtttgtgcagttgagtacatggtggtattgtttattgagttggaggaggaagagttggaggaggaagaggtttaggatggaaaagtccggaattctgtttgggttgtgttaggtttgaaatgcatattgtactccaccatccaggtagaggcatccgttaagcattggatctaagagtctagtgcttagtggaaggtcaagcctagagatacagttttgagtggtatttgcatagaaggtggcactgaaggccaccttttagatgataacatcgaaagagaaaggacactgaggaaaggacacccaggacagggccctggcactccccaacatttgacatcaaacagaggaggaggaataaaccatggattctgggaaggaaggtcagggagtcagaaggaaaaccaggagaatggtaccttgcaacctaagagaaattatacaaataagatacagctgggtgccactaaggaaaataaagaatgatgatgacaaatagcaatcaacctgggcctgaagcaggactttttgaccgcaccctttgaccctgaagactttaagaataggtaaccagaccaccaggagagcttcaggctctctctctttgtccacttttactttttttctcccattctctgcctcttgacctctctaagtctcatttttctggagagtcagactcaaaatcttgtacctcagttttctcataaggctagcaatcttttatctcatttattatttttattccatttagatatattcagcatttcattccatttagaaacattcagcgtttagaaatatcaaattgaggctgggtgcagtggctcatacctgtaatcccagcactttgggaggctgaggctggcggatcatgaggtcaggagttcaagaccagtctggccaacatagtgaaaccccatctctactaaaaatacaaaaaattagctgggtgtggtgatgtgcgcccgtagtcccagctactcgggaggctgaggcaggagaatcgcgtgaacccgggaggtggagtttgcagttagctgagattacaccattgcactccaacctgggcaacagtgcaagactctgtctcaaaaaaaagaaagaaagaaagaaaaaagaaataccaagttggtagtacctaaaaattgatgggaaatagcaccctcttgacaaaatctagatatataacagttgacccaggaaaatgaacctcagtagaaataatggccaatgaaaaaaatcactgtggcaatatatatttgaaatcattgtgaataaaaactggcagatgaagtaaatatgtattaaagattttcaaaagaaatgagctcacccctatgaaaataattgataaaataaaaatattgaaaaattggaaatgagtttatcgtgttggatagaaacttgattgaagaatcatggccaggctcggtggctcatacctgtaatcccagcactttgggaggccgaggcaggtgaagtacttgaactcctgagtgtgagaccagcttggccaacatgatgaaacctcatctctactaaaaatgcaaaaattagctgggtgtaatggtgggcacctgtaatcccagctacttgggaatctgaggcaggagaatcacttgtacccaggaggcggaggttgcagtgagctgagatcacgccagtgccctccagcctgggcgacaagagcaaaactacgtctcaaaaaaaaaaaaaaaggaaatttgatgaaagaattaaattggcttactgatatttgtccaagaaacaactgccttgatgaagattccccagtgttgatttaagtctgattaatgtttgtaatcaagacatttagacatttgtggcattgaaatggcagggtcaaacccttgggtcaaaatgtcttattccctgatagacccgttttgtgcaataatatatcatgaaaacaaactatctttaaaatacaggaattaaagactcattgaagtcatctttaatttcaaagcccttgattttaaaaagcgatctcttttggactgtagccttcactgtcccaagactataaatgttagagaggaaataattattccagaatcttattcaggaagagttgcagattccttgcctgagcaaggacaatttctaaattagtgtcatttgaattagtgccttttcaactgcagacagttctttcaaaaatacttgcttgttcttatgcttgtttccttttttaaaaaaatcacattggtttgcaattgaggttaatattagttaaactctactttgatcattaaattcagtaacatactctgccaattactagctgtatgtccttaaatacgttacctaatttctctaatcctgtttcctcaaccataaaggggaccagtaacacacaccccacagggttattgtcaggactaagtgagagaaagactttaatgccctgtttctttttatttatttggagacagggttttgctctgttgtccagactggagtgcagtggagatcacagctctctgcagccttgatctcccatactcaagcaatcttcctgcctcagccttctgagtaactaggaatacagttgcatgccaccacacccggctaattttttttttttttttttttaactaaagacgaggtcttgctatgttgcccaggctgaatgccctggtttaaagtagatgttcaatgaaagtctttactattgctactattgttagtatactgtacattttctatgtacacaacgtaattactttagctatttggtctgaacaatttgtctcccaaatagtttgaaaattttcccagggaagggttaggctctcatcctttattagtgtctttcattcctctgtatcagtcatagcagaacacagctggcagaacacagctgcctcgcccagactgggtaattgaggggtacattatgaagggattatttaaagaaggttggacagagcaaggaaaagccataagggatggagaaacaccctagggctagcaacagcagggagcccatagtttgtagaggcaggggaggaggttactggtgacagcttggggcacaaaagacaggccactgaacaagaactgtggttttagatagagaagtgccaaaatgctctctgggaggaaggagccagtatattaaatactccaacctctctctcttcccaccctgatctcctgctggtgcctctcattagctgagctcaacagaaaagcatcaggcaaggaagctggttacagcagtctatagaaatcagcatccctgaacacagagcagaggggaaaagggaagagaatggatctagggaagtaaaatgagattaggcagcagagcctctccagccttcagttagcacagctgctttacatatagttagtgctgatacatgtttgtggaaggaagggaaaggaaaattgattgaaggcagttcataaactatagatgactcatctttaaatgaagattgagaaaaacactacgtaatagcatagtagtttcgaggtaagatttgaagtcagaccaaccccagtgtgaaatcagaccaatcccttagtgcttcctaatggagtgatcaaaggcagttactaaatgacttagcttcagtttcttcctcagacaaagggagataaggttaatacctacttcataggttgcctttgaggcgtaactgagaggatggatacagtacactgggcacagaaagcagcgcttgagaaatgttagcaaatgaattctcaataacagtgagcggttctcaactgggggcaattttgacccctaaccccattccagggaacattctgcagtgtcaggaggtatttttggttgtaacaactggggagtgctataggcatgtagttagtagaagccatgaatcctacttaaatatcccaccatgcctaggactgccacccacaacaaagaattatctggtcctaaatgtcaatagctccgaggtgagaaatccttccctgtactgatttcatctctgtgattccatccttgggcctctatatttcttgatactggttcttaaaatccttgattatttatactttgttcactctcagtaaatttgagatttttgtcctcctcttcccattataaggtcaggacatactgtgtctatggcacttcaacactatgtgattttgtcttttcaccatttgaagtaaataaacaaatatataaataaataaagataaaatataaatcactgtgatacgttgtaatctgaactacagcctcccaatattaaagcacttatgtcaaatacgtgctatagatttgcaaggcaacaacaatacacaatacagagctatttctcggggtgtttcaaatcgccagggagcaacatattgaaacatgttgttactgcagctctcatctctgatgaacctcttcccaaaagaaaaaaaacaagccaaaaataaattcataaagctagtgagtctaaactaggtcagtggaattaaacattaatataaataagggctgtccttcaacataatgggaatgtatttcctctctctctcagtcactcacccctctcacccaactcagccctattctacccagaatcgcccctggcaacagtggcctttcctcttgagaaagctattaaaatagaatacccttggcctcaagatggctctgagtcctcactatgtgtttcatctcctccagcctcaaagggggagtggttttcccagctccccagtttcttcatttatctgtccattcattcatccgtcaagtatttattgtggtccttgaattaagcagtacagacataatggtccctgtccacatgtagcatgtaatcaactgggggatggagacattcatcaagtaagcaagcaaattaatacgtcctgattgtgaccagggctgttcaaggagcagggaggcaccagagaaaataaaatcagagtcctactgaggcagtgtggtcaggaaaggtccttttgaggtaatgacgtttccagtgacattagaaggccttccaaaagaaaggtgggaaagggtacctaggaagaaggaccagcctgtgcaaaggccccacggatggaaaagtgggatctgttgagggactagaaattggcaaatgaggcttcactggtgagaggatgtaggacaagatcagcaggagaagaacttgaagttaccctgaaaattatcctctcgtatcctgggaaaacgagaggatttttaagctacacggtgacttactatctgttaacatttagagtgctttttctatgggccaaaaacactttacagatgacaatgctaacactcacattcaccttgtgagataagaatgattgttatacccacttttacagatgaaaagtggaggcacaaggagggtaaggaacccaggatcatatagttatatatcagggtttctcatctccccactgttgacacgtggggcaagggccatcacgttcattttgagatgtttggcagcaacacagccttctacccactagatgccagtagcagtctccccctcacctccagttgtgacagctaaaaaatatgtccagacttttccaaatagccctgaggaagaggtgagcaaaatcctctctggttgagaatccctgctatatagaaaaaaaaaaaaaaaggaagcatctcaaatgccattattcagtaatgcccctaccttaatgtcttacaggctctttaataagctttctctgtgttttcaaggatcattcgtctcagatcaaggcttctctccttccccagctagtggatacttgatcttgtggatctacccactcagtaaatcacccagcaggtgtagcaatgtggagttgcatggttcagctctcctatgcattaaaacacatcttgaaggcagaatagtggaggttgctaagaggaggcaaagcatagaagaggccagtgttctgtgcctcagccctgtcctttcctaagtgttcttcttgctcatctcagaagcctactcagcactactaggtgactgccttctaagtctgaaaactagtgcctcttaacagtgtggacgtattgctggaaatgacctatttggggacacagaaaaatgcctcttttctctggatcaacattctgaaccagaccagagaatagtaggaaagagcaggatggctgggaattgcttagttgacccttgggaaagattgtacaccataatgaactaacttcagtttcctgatttgaaaaactatgaaggtgtcaagcattatgaatgtccactggataagtaatctatcagtgtttgtttattcattcaattcattcaatacctgggattttaaaggtagattttgagctcttttcactttgaaaccaccaccttcatccagggtctctaaatcgaccctcatcgaaatccatcagccagagattcactgattcattcaattaaaatgttttaggtgcctatcactttgaagatgctgggcacctgttagagagattaggagaggttgacctaatcttgaagaggggtgagtgggaggtggctcagtgaatatgaaggctgtttagagatttgaagaatgagtagaagtgaattaggtaaagaaagtggtaagaaggaaaacattccgggcaaagagtacaacatttacaaagagccagcagacaagctggttttgtaggtgcagaatttttggacaatatttcaagaaactcatgagagtgtgttttacaggtatgtaggtttgtgtgtgtgcacatgtgtgcatgtgtgtcttaatttggcatcattatgcactgtccacactccataatactaggttatagtcaaaatttggcttggccttatgtgtcctgtggcttaatcatgttccactgatatatattatttgcttacacagaacagacttttgctgtgtaggtcagctttgggaggcaaagctgccaatctgaatctttctcctcacaaagacttcactggatagaaaccacaaagcaatgtttaaaacaagcaaagtgtgctaaaacaaagagtgatgtctgcacaattgtgtccaacaaaataactataaagaaaaaaattaagattcaggaaaatctagacaggctcaatgattacaacagtagaaagaacatacattttgaggtcagaaccacctgggtgtaaatctcaccttcacctccctcatgtgtgaccctgaacaaagtagcttcactcagctgggcctttttttttaatccgtaaaacggggtaatgacacctgcttcacaggtcaatttaggagtagagatgatttgtgaacaacacctggcacatattggcgttaaataagtggtagctactattatggttattaatatcaaattaaaatcaaacattaatatctaatttgctggatttaaaacatggaaccacagatttcatttacagcttcctgatagccacagcacaacaggaaagtcacatatttttcctgaataaaagcataaaaattccttaaggaaagacaagattatctgggaccttatgcatgaaataatgtttttcctgggttttcattgaggtctcactgagaaacataggagatgatatctttaacatcatccctatggcaaataaatataaattctatgtgcttatttctttttttaatctttcagagtaagccaaagtcataaaaccaaagaacagttgtggggcagagattatttctaattcaactttaaatctgccaaaaaattcttgcatcaatggcatttatggagtagatcatctgttctttcttttcttatattataagcacatatttaactagtgttcttgaagcactatctgttagttaagcctctcagtaattcttcaaggtttgtggtataatgcccactctacagatgaagaaacaggttcacagtccaaggttagtcaccacactagcaagtggggaaaccaggacttaaatcaagatccatttgactgacttgactctactcttaccatctaccccagcctaccaccttaacaaatgtagctaagctctgttttcccctgatgggaaaataagggttttgtataaaaatagaaagaaggaaaattaaactgggggctctaggtgtaaaattgttttattactaagacatcgagaaagaatgttttgtaaacgcgttttctgggaaagatgttttaatctttttgttgttgttttggtttattccaaaccatttaactaaaatgacatagataaaaagcatattaagaaacacatttaacaaaatcatggcactacaatatacataccaaattgcatgggtggctctgattttgaattctgtgccttcaaaacccagcagaaataaatgaacatgtttatattaacaaggataacgcaaatctgtaatctgtaatttaaacatatttctatatttaataagtcatgttaactcacattcagtaaacacacagtaaactcacatttaaaatatcttcccagtaaatttagttttcattttttctacatgattctggaaaagcatataataaattagtcatagtctgtatataaaagtgaaatgattagtaccttcaaagggagtggtacccctgaatcataaaaggagtttcacttaggatgatgaccttaatatttgctttcaacatttttttcacccaaaagaatgatgatgatgatgatgatggtgataatgatgatgactatcattttaaagaactgagaagggtgtacaattttactccactgagcttcctaaatgctggcagatgacacgaaactcctgtgaaagtgacaaaggactgtcctactcacagcacagcagagggcatgtgctttctgttggcacccatttcccctgttccccaagtcctggggggtaatttggaggagcccaggcagatcccacaaacagtgtgggtctatgtgacagctaaggaaccctgagcttaggaaagcccaatcttataaggtactgctagcaaacctgctcaggagagaaacattatccttattatcctagtcaggaaacaaatcttccctctgccctgcagagaagctctatctctactttccaagactgtttgacatgtaaatatccttgaaaggacagccaagaatgaaagtggtcaaagaaatgtagaaatatcatggataatcactttccaactgtgatggtggtggtggtggtaacagtggctaacatttattgagctcccatttcccaggcataatcaagccctttgcatacataatctcattcaaccccattataaaccccaaattatacagtttgtctacacttatacattaaaaatagctgaggctcagagaggttaagcaactgccccagggccatatacacagaaactggaagagccaacacttgagtgcaggttgatttgactctagaatttgtgcctgtaatcctaacattatcttgctgcttgacaaaatgtatttagacctgaatgtattccatagaggaaacaagttatttaaaaatagagataaatttaggatcagtctgtgaaggtataatttttctcaccaagatatcaaggaagagtgtttcataggtgaacttgttgagcaagtaggtgacagagccgatttgaatctaggtagtctgcctccagagttagagcacaccaacaggctacatggctaacactggacagaggcaccctcggctacaaaagccagaatctagagttagctctgaaccagtaaccccctcatttgggtcttaacccttttgtttaagaaatgcacagttcctcagagcacccaagtaaagtgctgtcaacagtggtggacaatctgtgaagcacagtctgtgaagcattactcttctcctggagaacatgggcaagttaggcacacatgacacacatatgctgtctagaggagggtcaccacaacagggtgctagaggatgaccatcaggtaaagcttggacaagcagctctatagggtaatactaggaatggctgctgaagttcatgccaaaatatctgctgatgtctagagagactcatggcagtgggttctccatcagtacttgggagcttctgttgctttaagagccaatacaggtcattcattctttactcaacaatttcttaatgaatgtctcctatatgtgagatccttgttcataatctggtatgaatactgacaagcctgttactgggatacaaagtgaaacattgtgtaaagaagctatgtagaaagattaatgagaggaagcaggaaaaagtacctaacacatcctagggatattgagggaagcttcacaggggtaacatttgggctgaactttaaaagatgagtagaaaattcatctccctgtttgtattagtattctctagagggacagaactaataggatagatgtgaatctgaaggggagtttattaaggattattgactcacacaatcacaaggtgaagtcctacaataggccatctgcaagctgaggagaaaggaagccagtccaagtcccaaaaacctcaaaagtagataagccaacagtgcaggcttcactggtgtaagcccaagagtccaaaagctgaataatttagagtctgatgttcaagagcaggaagcatacagcttcctgctagaaggaggatgaaggctggaagattcagcaaatcaagtccttccacgttcttctgcctgctttatcttagccacactggcagctgattagatggtgcccacccagattaaggatgggtctgtctctcccagtcgactgactccagtgttaatctcctttggcaccaccctcacagacacacccaggagcaatccaatcaagttgacactcagtattagccatcacattgtttatctgcttcattgcgtttatctcagtctggaatgtttatttaatgcttacttgtatattgtctgtctgccatgtctttcatactcacttttgtatccacagctccaaatgtagtgcctagaacacagcagatgctcagtatttgttgaacgaatgaatgaatgaatgtcaaacattaagttttgcatttattagttttcatggtcgtttctaaaaaatatatatgttacatttttcagtctcaaaagatttttttgttatagattactttcaggaaaccttttatttttctttttttctttttttaacttttcagttcaggggtgcaagtgcaggtttgttacataggtaagcttgtgtcctgggggtcagttacacagattattttatctcctaggtatgaagcctagtacccgttagttatttttcctgatcctctctctcctcccacctttcaccctccaacaggccccattgtgtgttgttcttctctatgtgtccatgtgttctcatcatttagctcccacttataagtgagaacatgtggtgtttggttttctgctcctgcattcgtttgctaaggctaatggcctccagctccatccatgtctctgcaaaggacatgatcaggaaaccttttaaatttgcctttctggaaatatctatcttctctatcaaacaggagatgaagtggagtgagagttgattggataattcgttcattattcattaaatattttatgggcgtctactgcatgcaaagtgctgggaggggagcagtcacacagaaggcaagacttgatctctacccatgaggaaaccaaacacagtcacaggacacaatttatgggccccctatataagaaagaacaaaacaaagaaatgtaactgccattcctcaagaaaagaatggggttaaagggctatttcatggacactccctgaggaaaaaaaacaaaaaacaaaaaccatacagtaactcaaactgattttccaggagaaaacttttgggttggataatacaggttaactctgtgcattaatttctccagactgtctcaatgcatctcacttctctttttctcttagaataaaggaaaaaatatgcagttggtaaaattgtaaatataagcatgcttacagttttaagaaaaataaggacttaagcttcgcaatattctagcatttatttaattagtaggtgattactaaatactaaattatgggaagcagtgttttcatagcaatgatttgtttacccaaagaatttctgtcacacattttttgattccaacatttcctacaattattcaatttttttcctctctgcagcgctaaaacacacattttattaagtagtctggcttatctgcaaatatgctgatcctgaatggttataaaatatttatgcaggtcatttaagttgaatcagaaatggtttccaatcagagtgaaatcatctcttagtttaagcaaatgatgcccatataaataagagttgcaattatgcccatgcctagactctctctgctataggccttctccagaaaaatttttaatgtctttttaagacatcatttgtcttcttatgtaactccttcacggatttcatcatcctttttcttaacttgaccaggtgcaaattgctgccattcatgagctcaagaaaaggaagttgtaagcatgcttcttaaaaattcaaataagccacagcatggtagcttgtgactgtggtccaaactactccagaggctaaggcaggagtatcacttgagcccaagatctctgggctgtagtgcactatgccagttggtgtctgtgctgaatccagcatcaatgtggttatctcctgctagcagggaccaccaggttgcctaaggagggatgaattgacccagatcagaaacagaacaggtcaaactcttatgctgttcataatggaactgcacctgtgaatagccactgcactccagcctgggcaatgtagtgagaccctgtctcttacgaaaaaatccaatgacataataccttcattttcctgaataaaaccttcatagctcctggttcttacaggatcaaattcaagctttttagcacatgattcaagactttccatgacctggcccatgccatcccttcctcacacttaaacatctaacatttaatcatgtagagtgtccccaccatcatgatttctgtacccctgttgatgttgttccctccacctggaatatggtcccagtcttctctactctgttacctcccattgatccttcagcaatcagctcctttttcatgtcttgcaggaggccttcccctactatccaagtctggttaggagcccttctgtggtccataataccagtagtagacagaaggttctgtggaaatcatctgtccacatgtggcttgcccaagagactcaaagttcttcaagggccagaatgtgttttattcctctttgacctccaatgtctggcactttgtgggcactcaatgaatatttattgagtgaatgaatgaatgagggcctatgaagaagaacctgaaacagaaagttggtaaagcgagatggaccttaaaaatacaagccttagtaaacaagaacggtctgaagaatccagctaatgtaaggagaagcaaatttatgtatttgttgatttaatgtttattgagtgtcacatgctaagatagaatgtgcagtgacgaacaagaaaaacaagggccctacctcatggagcttacatctagggcatatgctaacaagagtatttttttaatggtaagtactctggggaaatagaaaatgtgagggtgatgaaagggttgtagtggaagagatttagattaggaagagcaagcctcttagagatggtgatttcaaaaatgataccagaagggtgaggttttgccaagagctggtgggagagtattctagtgtgtgcaaaggccctgcagtgagacaagagatcaagattttgaggaagaggaggtctattcgtatatagagatctttaattatatggccattttccgtcaagagagatggagagtctgagttcttaggaagatgtcagtaaacatgagtggcttgtgggtagctctgagaccaaaagcactcagcagcctgcagagaaaggccccctgagaacccatagcgctctggcaaagagacagtgatctgaatgagagcccgccacaggataattactggcatccacattctccaaactgatgtgcaagacaagggagaaattagatttttaaaaattctttacctagactactgagaccagaatattcatcaggaagagctcttgcattttttttttttttttttttttaccaccttgcgtctgtcttgtaaacatgaacaacagattctctagcccacagaaacgtatccgcggggccctcccatccttagggaaaaaagatgatggaatgagggacattagcaatagtttttgttatagttttcattaccatctaccataaatacaataacaagaatagctaatatttactgattatgattatttactaaatacctgtaactatatcaaacatcttatgcagaatggtttacatgtgggctctggagtctggcctcctgagttcgaacactacctgctccacttaccagctctgttgtttttctgcaagttactaaatatatgtgtatttatatcctcatctgtatagtggagacagggagcagataactgcacatcctgtggaccactgtgaggagtaactagggaatatacaaaaagtgcttaaaggagcagttcatacatgctgatgtaaatacaagcttccatcactacttacttaattattataacaaatgtatctagttgacacagttgttatccgcattctacacacagggaaacttcagaggctttatatcatgtgccaaggtttcatggttagtagtcactggcagagctgggaactgaacccagactgattttagagcccaagctgttactcatcattccatcatattttttatttaaattagagttatcgctggattccactagtccatttattcacatgtgtatcttggcagattttgagtgtatattttatttgcttgttcatttgagagggtgagggataattgagttggaagcccaaggatctttagttttgcctggacttcttggctctaggacaccccagggagttccacagaccccaacaacaaattggatgttaattggaactctttctcttctagggattttccacagtgttatctgtaatttataacaatgattttgaggaacaaaatcatcaaacaaatatgcatgcacgcacacatgtgcacgcacgtacacacacgcacgtgcgcacacacacattcataccatatgctcaggatggtttcaatttttaaaaaaattgtatgtgaaagtccatgaatctaactattagctctcttaaaaaacagattaattaccctccaaaagtaagcccatccctaatcaatatgagataactggttttctgtagctggggtcaggatgagtcagaggaaagaacccagttacttggtacagtcattttccagcagtggtttatatcaaaaggtccacattctggtttaactgtgatgcggcaaaatgagaaatgatgcttaatggagtgatctgctgcacatattagctcaaatgctgaatgtcttcctccaaactcttctataatttttaattcaattcatggataaatttggtcaacagcaccgctgaaactgattgtgtataattcaggtctgttttggattcctttgaagaagacccagttacaaagaataccaaaaggaccatattttaaataaatagtgatgccacattctacaccatattaaattttgtttgttaatgtttcacaagcattataaatacttgttgtcacttggcattcataagttcttgcagcatttggtctgaaagctgagcaaagtaggggtagtactaatttgtgaagaaaagtacttccaaacacttcttatgctgacaacttttaggcagttttttaaacagtcattcattactgtagttttcccattttacagatgaagatattaaggtacagaaaagatttaaaatgtgctgctaggtggcagaactgggcttctgatccaagtagtctgactgcagaatccatccttaaaccttctcccaaaactaagttatcaataaatatttgttagctgtgtgcagtgacttatgcctgtaatcccagtactttgggaagttaaggtaggaggatcacctgaggccaggagtttgagaccagcctgagaaacatagtgagaccctgtccctacaaaaaataaaaaacaaattgccaagcatgatggcatgcatttgtagtgctagctacttgggaagctaatgcagggggattgtttgagcctaggagttcaaggttgtagtgagctatgattttgccactgcactccagcctaggtgacagagtgtgactttgtctctaaaaaataaaaaataagttttttaagtaaattaattataatgcgagctttcattcagaaaatataccaagatcctgtggcagaggacatgacatttaaaagttaaacaaggctgggcacaatggctcatatctgtaatcccaacactgtgggaggctgaggcgggagcattacctgagcccaggagtttgagactagcctggcaacttagtaagaccctgtctctacaaaataatttaaaaattagccaggcatgggggtgcatgcctgtagtccaagctgctcaggaggctaaggtgagaggatcacttgagcctgagaggtcaaggtcaaggttgcagtgagctgtgatcacaccattgcactccagcctgggcaacagagcaagaccctatctcaaaaaaaaaaaaaaagttaaacaccttcattagtcacatgaattgactctcttttgacattttatttaatgaacaatatgtccgtactgaagtgttttatcttcctacatgctgatattgattagagtggtgcattcttggagaatgaagccacataagattcagcatcttttcagcatgggctgtagttaatacccacatgttccacaaaggtccagctggtttaaggatgtgaatctcctgcagcttcattataagagccttgataagtaaaacaacagcaaaatgacaatttattgggtacatgctatatgccaggcatgtgctaagcacttaaagtacattatctaatttaatcttcacaaactgttcctgtttaaaggatggggaaacagagaggtaaactatcttgcttaacgtgacacatttaggaaagggcattgccagaacagtttgaaaggtaattatctgccatgctgtactgcatagtgcacattcctatatcttttccgttttcctgccgtgacttatccggtgcctggtgccatgagcagatactggtacctgctgacttattgagagatcatttggttgcttgattgactgatgcaatgaaatggaaagttgagcaattttctctagagcaatgcttctcatacatgagttttcatatgaatcaacctggagatcttgttaagatgcagattctgattcagtaggttacaatagggaatgagattctgcatttctaacaattctgcatttctagtaattcccagataatgctgatgctgctggtccatgagacatattctatatagcaaggctgtaacctgagctgcacaatatggtagtcactagccacaggtagctatttcaattaattgaaattaaattcagttcttcgttcacactagtcatattgcaagcactaactaaccacatgtagctattgtctaccatattgtacagtgcagatatagagcacttctaccattccaaaaagtcccattgcactatactgctatagaatattcagtgtgtataggaaaagaatctgctttaagattcccagttacattcatatctcatttaatggacctggaattttgtctcccctcttgttttgtcctagtcatatgtaagtcacttgaacatttgatgggaaacggaaatattgcacaaagaatactgataaatacgtatttttttttttttacttaggagccaacacatgtgcttgaggataaaaaaaaaagtcaccatttttaaaataacacagaattatcatgacggtaacaaaagcatcagaactttattgaaaatattctaattagactcagaaaatatatgagggtgtatctgcaaatagacactctctggtccctttgaatcacaatgtgacttttctccatgtgtagctttgttaagagctggacttccatgaatgcccaaaggtctagaagccatagtcgttgtcaatagagcaaggaaaataacttttgatcattgacaatatccttaaaaatcactttttccaatcctttcattttatagatgggtaaaggaaggctcaaacaggagatgtaatctgaagttcttggtagttagaactggtcctaggtgcaaaatgatatttgctgaactagtatgaatctagttctgtgactccccactgtactatttgcctctaaatgacagtaatcactgaaatatagcactgtttacttccatttcttatactctttcaaaatatatatggagacattagattcagaaacaaatatacatggagacataagattcagaacaaatggtctggaatagaaatgaatagggctacaatatttataaagtaatttctcttgtatcagtagtacttattcatcataggaatttagaaaaaacaaataaaaatgcataaaatgtaaatcacccacaacccagttattcagagatactactataaagttggtgattatgtagccttcttattttttctgtgtccataatttataaaaatatatgttgcatactctttatgaacattttcctgcatcatttcataaaattctaaatcatttctagtgtctgaagtattatttcattatatgataatatcaaaaatcacatattttaaagaattttaagccttctgatgaaaatttgcaaattttcctccaaaaagcttgtattcatgtacctaaaagacaatatataaaagtaaactccctgagagcatggactatggctatttttttcaaggctctatttcacagagtttagaataggaccaaacacatagtgggccctcaataaaagtttgttgaagggagtgagagcaggaaaaactatgttaagggcttggctgagagcctagcacataataaggcttgatacacgttaattataattattactttctttggagttattattcacattctcactgcactgcaatattttgataggtttatttgaaactgtgtctaagaataaacataaaacttctgaaagactccagctactccctttgttttctcatatggattacttctgttgttgaatatctctggaacgtgttcagtgtgaagctggcttctgcacccctcccagcttctttgccagcctattggtaaaacttcttccttgctgtcaattgatagttactgagtctcaaagaacaacatactggggcaaagtagcctgagcaaaatactgttaaatttatgaaaaacaaggaaaatgctaacaggcctgccattttcaataaaatgctttaagtgtgctgattagactcacatactcctactccccttttggggtgactatataatgggtttattaagaacattggctttaggttggaacttggagtcttactccattctggctgtgtgactttggatatgttcctcagtctccttaagtcttggtttcctcacttgtaatagcagtgcttatttctccgtattgtcaagaagaacccctaggatagtacatataaagctcttggcaccaactctagctcagatagtggccattgatactagaacttcataaacaccagtgattgagaatgaatatgtgtcagttttacgttgccacagttctgctcagtgctttgaaccaccacaatctggccaataaaatcaatcattcagaaactaatatctgctctcagcaaaagtcagggagaacatatttttgtgatcattgaatgaatgtcttcgaaatcaccagcattgaatatggagccagattaatattggagcctcaactctgtttcctatttgcagtcctacttaagacgagtcacaggtaccctaagcccttagtacttcaaatttaaagttcagtggagtttatttttaaaatcctcttggaaaaatatatgggcaaaatcctgctttccttcataaggagagatttattttgcccatatttgttagctctctggtagagtacaaaaagaggggcaagacagcagtttattcaaacagaagtcaactgattgaaaatacactaataattccattatttaagaaagaccctgtctgcaggaaatccctaccaacaaggaatatcatcacatcaaaagctaaaacaggactaaagtacacatacaatagctttgcaaattttacaaatacagctgtgtcgggtcccaagatcattctgatacgtcttcaaaacacatggattgaaggcatggatcttgtttaagatcatttaagaccttatttacgatcttgtttaagatctagacattgagaagtgtgtagctttccatgggtcaccgacttcgtggtgaagtgcgtgcttttctcaacctcttcttaactcagttggtttttatctgagaaaacctagggattcagccacacaagcagaactctagaggaaattgaagtaacaatacgtatggttataagtacttggcctatgtcctgcccgatttcttccaagaccctcttatttttcattcatgcactttgtaaataattaagggaggtatctaatgagaaaaggcattgcattcactgcctgtccttcagttatttcagatttaactgtgtggtgtgttcatatcacatcattcaagcgggccttgagggacatctgacctagttgagcagctgtacctttaataaaactgccaaaataagtatgacattttttatacaactgtgagaaacacattaaagacacattgaagattacttatattttattattatatttagaacatgaatgactgtgactagacagcttgatttcatgatgaggatgatgatgacaaggatgagggcaatgataatgattatcgtaatagtacctaacattttggcatacttaccatgtgccaaagacagagctacaacatcacatattatctcatttaatctttataatagtcatgcagttactattagtatacttgtcttacagacaaactgaggcttagacaagccaagctattgtccaaagttcacaatagattcaaaattcaaacttaagcagtctgattccaaaatgaagacccttaatcactatatccatggtttccaagctattttgaacacacatcctatcagtaaaacattttgaggataccctcttctttgtactcatttattaataattagtattatgctaatatactatggaaaatatagataaaagtgtacatttaaaagggcgagtcatagacaaaataatgttttggttgtatttatcaatggtatgataaatacattgatttatttatgttttcactcatgaaaataaagtaaaataatattttaatcaaaaatatgcttgaatatgcttcagtatttttgaaaatttttgtttcacgctttctgaattagtaacttaaaggaaaagttctggggcttttggttttttgcatgtgtgtgtgagacaggatcttgctctgtcacccaggctggagtgcagtggtgcgatcttggctcactacaacctccgcctcctggactcaagtgatcctcctgcctcagcctcccacgtaggtgggaccacaggtgcatgcaaccatgcccggctaattttttatatttttggtagagacaggttttcgccatattgctcagactagtctctaactccggagatcaagcgatcctcctgcctcagcctcccaaagtgttgagattacagacatgagccactatgcccggcttgaggttttttaaaaaaatacttgatcataactgaaaaagatgcctcagaaatatccttagattcaaatgaaagacaggcattgcttggctgcaccaagatatctgtgtttcaattctacccaccaactactccaggattttttaaaaatctgctagcaaattgctgtcttttctagtgttgatctcttgttattattcaataaatgtttcatctttacatttttttgaaaatttctttaaaacttactaaaattcttagttcaaaacctctgagagcagattaatcaagtttataagatgatttacaatactttaggaagatgtttgtgtgtgtgtgtgcacatgtgcatgtgtgtgtgtttggtagggacaggttctcactctgtcacccaggctgaagtgcagtggcatgatcatagctcactttaacctcgaactcctgagttcaagctcttatcctactttagcctcctacttcagtagctgggactacaggcatgtgacaccatacctagctaatgtatttatttttttagagatagggtcttgctatgttgccctggctgctcttgaactcctgaccttaagcaatctccctgcctcagcctcccaaaatgctggaattaccattagagatttttataagcatgtcaaatatatgggtacatcctcacatcacacactaaaagagtcatttccaaaaagagtttctactttcaaattgctttctgcataacatcctttttttcactgattaacaagaaaataactttatttttatttatttttattttattttgagcagagtcttgctctgtcccccaggctggaatgcagtggcacaatctcggctcactgcaacctctgcctcccacgttcaagcgattcttgtgcctcagcctcctgagtagctgggaatacaggcatgcaccaccatgcccagctaatttttgtatttttagtagagacggggtttcaccacgatggccagtctggttttgaactcctggcctcaaatgatccgcctgtctcagcctcccaaaatgctggaattacaggcttgagtcaccattcctggccctttttttttttttttctttttgaaaagagtttttctttgtgtcctagatgcttggttttttatgtcttactaattatgatggtttcaagctatcattagctaacatctcaagacacagtatgcacaggtcatggttcagtgttgataaagatccgtatatcaaatatttttcctatttgcactgggaaaggctgatcttgagagatttgaagaactcatctgttgtaacctcctaatatggccagtgagaaataagcagtgttgattctgccattttgctactcactgtgcttactttcttatcatcagcttactcaccttgagcaggtatgggagcagggaagctgatgggtctttaacagtatcacattacattctttcagtcttgggaatgaccagagatctcaccattatgtactgggtgagtaatgcagttctataagaaggttactttggtatcaacaacaacaacaaaaacgatggatggcaaagcaaggctcaaggtgtatgacattcaaaaagcagcttttcaaaatgtttgcagtgtggcacaaacaaatgaaactctcacagtggtaggaggttgagatgaaacatgatcatggtgggaaagttacattgctataaatagacctggtcactggcattccctgcctttgaccccgccaccactcccaccagagttatatcactcactaacttttaaaaacactctaaattatgaaaatatcaaacatatatacatataaacaggtagagaggttagtttaactaaccctcttgtacccatcatccaacttgttaatgatcacttcatggttaatctctttcatgtgtgctccctatgctcctgaaatgaattattttaaagcatgttccaggcataacattatatttatagatattataatatgaatctccaaaatataaagatctgtttttcaaacataacccaccgtaccattattacacctgaaaccctaacagtaactctttaatatcctcaaatattcagtcagtttacaacttccttaaagatctcacaaatattttctagttcactcattcaaatcaggttccaaatgagctgcatacattgcaatggattgatatggcccttgtgtatcttttaatctatagaatttctctctccctatttttttttttttttgcttgcattctttacttgaagatactagatcatttttcttggagagtttcccacaatgtggattttgctggttacacccgttggtattatttaacatagttctctccattccccataaattggtaataggatccagtgattatcacattaatatttgattcttctacaagaatacttcagaggcagtatttgtacttccatcagtagacacataataaatagttctctctctttggggactgttaatatccatcagtgacaattgcctacatctgttattttattgggagttgcaacagggtgaagagtatcattctatttttcatgtattagctggaaaaagcctataaagagaaaatttttctcatgaattatttatttagtctgagatgcaattcatatggtatgcacaaacacacacaaaaagcttgatacttatgttatcaaaataatgtattggtaccttaacatccttggaaggtgatcatttatatatttggttttatgagtaatgttacgatttaaataatttgacatcacatactgtgtagccattatttttatacattcttaaaccatctatggccagtgagagcctcctttaattggtttctgtgtcctttttaaatagaatccccgcagtctttgatagcttccttaatttccggtaagataagcgtcatcatgtacatttcatgcttaagacaggaaatcagccattgctccaaggaaccctggttaagtttcataggaaatggtattcagaggtcacactctagacatcatttcattttaagctttgctttgttttccatttttgtaatgtaagtgtgcatgtgtgcattcacacgtgtatgcatttgtgtgtatttctctccttctctcttagataaataataccatgctatacatgtgtttctccacctcatatttttaaattaacaatatccaatggagttcattctataacagtatctaaagctattctcaactccttttatacttgtacagtacttgagcgtgtggagacaaaattgttatttaaccagtccccagtaacagacatttgctattataagtaatactttaacaaacagtcttacatatatatcttttttaacttgcctcccctaactttataattgtgtctaacaggttaagaaaattgcttaaggtctcacaactaataaatgctgagccggaattcaagtcccacatagttgtctagctccagaccccaggaaccccaatatatatttgctgtctttcaattttcccaggaccgctaacacatcagacctggaattagttcagtgtagaggtactgctaacctgaggctcagattaataaaaataagaaatagtcttggtttaccattacttgataaatacagagttttaggaagttgtctttcagaacttgggtctgtagaaggaaacaatagcagttcttagtggttcaaaaaaaaaaaaaagttgaggtgcaccattcccacctgtgcttgaaactagagtttgccgtttactaggaaacagagagaacacacatcactgacattgcttgcccaggtctcagactgatgacttaggtcacctttgtgcgagtaaagccacacatttttagcgtttgttttctttttggaaccataacaattttctggaggaatgtaagatgctatattaaaaaatgctagactaggccaggtgcaatggctcacgcctgtaatcccagcactttcggaagctgaggcaggtggataacctgaggtcaggagtttgagaccagcctggccaacatggcaaaaccccatctctactaaaaatacaaaaattagccaggcatggtggcgggcacctgtaatcccagctacttgagaggctaaggtaggagactcgtttgaacccaggaggcagaggttgcagtgagatgagatcgggtcactgcactccagcctgggcaacagagcaagactccgtctcaaaaaaaaaaaaaaaagaaagaaatgctacactatatgcaaaactcctaaaatcccatgcttatgcaccaaagataattttcgaggccacttttctctgatccagggtttagcccccatgtaatctaatatttctgctctttcaatgctgtacatctttttagagaaagaaatgtgaccatcattcatggccaaatctgactcatgaagccattttgccctttggtgtcttcatgaaaaaatgtgagtccaaatttacctcttttaatgacacattaagtaaagtgttgggcgtgaactcatgtcatccattgggcctcatgatcgtcaactagaatggtagctccaaaagggcaagatcgtttgctttttaaattattactgacttttcaatgcctagaacagtgcttggcacatagtgatgcttaataaatagttgaacaggtgggtggatgtgtgcatgagtggctcgctggctggctggctggatggatgaattaggccttctgaaatttgaacagtaagtcctgatgttaaactttagagaggcttcattaatgcccaccttgtacaaaaattaccagaagggggaaatgtcttttttcccccctggtatttcttttctgtctcccacctttgaatatcttctcctttccacatatgtttttaaccaacattccagaatgatgcgtctgtccttccaaaccttcaccaaaaatccagatctctcaggagagcagatgtcaactgagtgtggtaaagggagacattaggaaatgagtgactagaaattgatatttagcttttcatagaagcttcttagaactcaaaagtctcagtcaaattgtgagggctctggggaccaaatacaaatgaagaatttcagtgaagcgaaggctgtaaggcctgctgtggtcctttatttttatttttattttttcataatcaaagagacaagcttccaaaggtggtctttgaggtgcaaagacttggaatgtgcagcttttgtatctcccctaccatcttgccgtctgcttggctttgagtactggcttccatggggcgtctcagatcacctcagctgccatgtgcccccacacacaatcgtgggtgtgttctcgctcccaggattagttttctctctagccctttggcccctcccaacagaacgtaacttgctcttttcagaatacttgtcccacattgctcccctgtccatttctgcttctggagtcttggctgcccatgctgggagtcacgtgtgtcattgtcccttctctgctgatgtgtcagaggcccaggaggctgattcagcgtatctactcttctctgggcttcacacccaacttcaaatccacttactctttgaaaggagaggtttgaaaggaggagtgacttttgtatttctaaatgggagtgtatccatggagtatgcattctgacatggcctcaagttcttcctgctagtagattcactgctcttatatttggcagcagccaactcagctgctaaagggctggtggctttgtctgctgtatgccttcagggtagcaaacattcctgagagagattgtggagtctgccctaggacaagtctcctggttatgttttatgtgaatatagcagtacgtgtcctcttaccccagaaaaacacacctcctgcaacacaagtttggttgcttatctgagtatatctcattcatattagcagacagaatcacagataatgaagcaaattgtaccctaatagtatcagccctaatagtatctttttaaaaaataaatgtacgagtcctaagatatagataacgactaacatttattggatagcactttactgccaagccctatgataagtcccttatatattgtcaaagtatatttttcacaaagttaaaaacatgactcatataaatatctaatgagctgttatcaaagatttatttaactgattaatgaaggaactagcaagatggaaaagctggttcaaagagcaataaatgatgagagatttttataggcagccagcaaaggaatggaaaaataagtttgctgagttatattcaaaattggttaatgttcattagatcaataatgctataatttgggggatcatcttttttccactagacagaaatcatttgcaacttatcagtattctacaagttaatgaatgtctagcttcatagagtctggacctaatcagtagaaaaaagtaattcaaacaaacttaagagtttttctggagaatgagaggacctcattctccaagcttgttacacaatgctcttcatcacaaactaggtgacacatttatcttttatttttattttcaagtttaatttataattttatttatttttttgaaatgtgtctctgtcacccaggctggagttcagtggtgctgtcataggtcactgcagcctcaagcttccaggctcaaacaattctcccatctcagcctccgaagtagctgggaccacagtcatgcaccactatgcctggctaattttttgaaaaagttttgaggtatgggatcttgctatgttgcccaggctgtattttcaagttttagatcatttttctatttggaaaatacccctgaggccaggcacagtggctcacgcctgtaatcccagcattttgggaggccaaggtggaaacattgcctgagcccaggagtttgagaccagcctggaagaaaaaaaaaccctatgaaataaagtaccataaactctatgtacaaggggctgtggtagccactagccctcagttcaatgatgaatcccttctaaacaagcaaatactctcaatgatgagaaactgcatcaaatgacaacctaattcatttttaaagagttccaaataacagaactttatccttatgttatccctaaatctgcttcactgtaccatctactgtctcccagtttagtcttctaaaactgcattgaaaaatctagtttccttctcactgaatgccactgacattgtgttgaggagcttcgtggaggttggccaggtaacctacatcttccttggaccttaggctggaaaactggtcacaactgtagatgttattgatcagaatggggctttggtcggtggaccttgcactcaggtaaggagacagcctatgcctttaaaatgcatgcagctcactgatttcatcctcaagtttccacacagtgcccagcagaattatgtcccataagcctggcagagggcagacaatacaaaatgggcagccacatgatgggccaagaagattgaagccagagaagggaaagccaagatggcagattttgatcattttaaagtcatgaaggcaaaatgaggaacagaataatcaagaatgaaattaagaagcttcaaaaggcagctctcctgaaagtgtctcccaaaaaagcacctgctattaagagtgctgctgctaaagttccagaaaaaaagatgaccactgcgggaaagaaggctgcaacccagaagtttcctgcccagaaagcaaaaggccagaaggcagtacctcctttggaagctcagaagggtcaaaacactccagcccaaaaagcaccagctccaaaggcatctagcaagaaagcataagaggttattataatcccagcactttgggggccgaggtaggcggatcacctgaggtcagaagtttgagacgaggctggccaacatggcgaaaccccatctctactaaaaatataaacattagccaggcatggtggcatgtgcttgtaatcccagctactcaagaggctgagacagaattgcttgaacccggcaggtggaggttgcagtgagctgagatcgtgccactgggtgacagagcaagactccatcttaaaaaaaaaaaagtaaatgttctttctggaaaagaaaaatctagtttccatttcacatgcagttacagaatatttaactcatactaaagagaataggaaatacctttcatcctttataaaaatataccatagttgagttcgttcagcaagtgtttcttgcaatggctcttaactttggcttatgtcagaaatgctcgtgaagtttctaaacttgtacatacctgggtttctattcccagccattctgagtgagtgggtctgtggtgggtgtataggcatcaatattttctgtaagcttcatgggtaatgctgatgcaagacagacattaaagttcatgctgtatatcaatcatataataaataccaagagtcagggatgagggagttcagactaaagaggtatcattcagaggctggaaggagccatcagagagaagtgatctgaagtagcattttaatagacaaataagattttgccaagtgaagaaagtgaagggaaaatgcagaaaggcttttaaatagcattaatagcttaaaaatgcatcagcggagttactaaaaaatagacttactaaaaaatgaaatttgaacaattgttaactaaccacagggacaatgatctcgacatttcttgcaacaaaatattataaggggaaaaaggagctatctccaaagtgattgcagtagtattccatggagtatccccatgtgtttaccaatacgtgaaatatatagtttgtccattgataagacaagtggcgtcactcaacctgaggaaagttcaacctctccactgcttccaaaaggaaccaaagctatttctctgtcagatggagcaagagtcattaaatcactgatgcctttaaattatcaataatataaagtcacagagggagaatcgagccaatgataaatagcattgtaataagccagaactcatttgtgagtggagaaaagtctctgaaacctcagtacaattcagccggctcatattgccgtaagacatgagatgatgaaactcagaaatactgatggctttttactctttcctgcttctgaatatcaggacaggcttgagtgatagaattttctgttcttccctgggcatgcttaggcctgcatcatgtgtgctgctgtattcggatccctttgtagaaggtctccatgtgcacatgtgtgtgtctctttaactaatacactttattttttagaggagttttaggtttataaaaaaattgagcagaaaatacagaagagttcccgtatactccgtatccccctacctccaacagtttcccccatcattcacatcttgcattagcatgctctatttgttacagttgatgagccaatacagatacattattattaactaaagttcctagtttgcattagggtgtgcacttgtgtttttcatatttcctaatttcagatcaccttcactctttgtcctgttttttctctctgctattctggatcctgaatggcgattgttagaacaaccagccaaggtctccacattcctccacatcccccagcagcctgaaaagcgactgccaatcacttgtaccttctctctctattcatgctgacaggataatgttcttatctaaatcaatttcagtgaagctcatggtcacagtttgtgaatgttacattagcgtcacatataacctgtacatagactgcattcagatattttcagctttttctctggaaataattgctactgatgagttcactattaaaccttataagacccaagatggtgtgtggtgatttagtgatttcatatgttgctgtgctagtattttaatctgagctccagccaaatggaacaatctgtcgtttcatttttaatagttgtgactttgtttttggactcctctgttgtgcatactcacacagccgcccctaatccttgttttttgagtcggcagggtctagattgtaactgacaaaagagattcttgctgtgtcctccaagaaggtcccacagtttctcatcttgtctttcctcacccattttgtaccctcaacctggaatgccctcctcatctctctctcgccttttctccctacggccttcctcttttcccagctatccctgcctctgcaaactgagattctagatactattcagggccctcctctcttcaaatatcacagcaagcctgaaacattctcctgattctatgctaacccccagaactcattcctattccctgattctgcatgcttttgttgttgttgttgttgttgttttgagatggagtctctctctgttgtccatgctggagtgcagtggcgcaatctccactcactgcaagctccgcctcccgggttcacgccattctcctgcctcagcctcccaagtagctgagactacaggcgcccgccaccatgcccggctaattttttgtatttttagtagagacggggtttcaccgtgttagccaggatggtcttgatctcctgacctcgtgatccgcctgcttcggcccgccgaagtgctgggattacaggcatgagccaccgtgcccggccaattctgcatgttcttaaaccatgtcactctcctatgcaaaacatttcaatgctttcccaccattctttgaattaaagcccaactcttcagtttggcatgcaagcccctgtactgtgttctgttctctgcctattatattctcatgctatattctccaagactataccctagcactctcctcctgactactaccttgctggtagtagattcactactagcagattcattgattcactacagcagtggttctggaagcatagtccacatgaccctggaagtctgcaaggtgattttcctagtaatgccaagacattatatgcttttttctcactatgttaacattatcaataatgatgcaaaagcaatgatgaggaagactgctggtactttcgcacaaaccaaggcagtggtgccaaactgtactagtaatcattatatctgtcatggccatgtacttcctgcttaaaaacggccaacttcacggaatactttccttgatgaaaccatagaaagtgttaattttattaaatgttgatccttgggcacacacctttttaatattctatacagtgaaatggtaactatgcataaagcactcaggcagcacgaggaaggacaacagttgtctcatgggaagggacttgtctgattgagttgccaacttaacaaggctttttaaaaaatggaatatcatttttacttggaaaaacaatcaacagacaaatgtaggtatttcatagatgttttctagaaagtaaatggagggagcctgttacttcaagaaaaacaactgacaatattttttgctaataataaaatttgagatttcaatcaccaccataatctggacagtttcttaatacctaaagatttttttgatatcagtggcaatattaagtcatatgattttttatgtattgtgtgatgaaatgtgtgaacatttggaaaattaacataactcactgaattcatttttgatatgaccaatgtatgatttttaaaaaataaaaccacttatgggccaggcgcagtggctaatgcctgtaatcccagcactctcagaggccgaggcaggcagattgtttgaggccaggagtttgaaaccagcctggccaacatggtgaaaacccatctctactaaaaaaaaaaatacaaaaatacaaaaattggctgggcttggtggtgcatgcctgtaatcccagctacttgggaggctaaagtatgagaatcgcttgaacctgggaggcagaggttgcagtgagccaagatcacacctatgcactccagcctgagtgacagagtgagagactctgtctcaaaaacaaaacaaaacaaaaattaaaaaaaaaacacttatgggtaaaagattcattcaaatagcaagacagatcaatgggttttaatgtaattgagtataaaaagctcactgacatggtgtctgattttacagtgcatctaactttcaagaaaataccaccacttgggctttggtatagtatcaggaagactatcccatttgtctgaaaaggctattacaatatctctcagttttccaacaacctatctgtaggaggccagattctcttcatatacttcaaccaaaacggcatttcacaacagattgaatgcagaaaaagaaatgaggatctaactgtcctctactcatctctaaaagatatttcttcactattattttgttttggaaaatattattttcataaaagggtattatttcagtttaacatatgatgggtttgttatttttaatgagttaatattttaaactcctcagttttagtatcactatagtatttgttaatagctgtaaaacaacttacataaacaaaacctccttgcagtcctcagtgatttttaagaggggaaagagacttgacattaaaaagtatgagaatgatggcaactagccaactaactcttaatgagatctttggctctagaagtccttatttgaccacatgccagaagaatccatgtgagtactgcctgagtacctccaagttggaaaagtacgtttttttttttaactgagtgcctccaagttggaaaaatgttctttttttttaatgttatcgggttcaagggtggaacatttgtcctactaaagaacaccttttaagagctttgtggccggaagggtgaaaagtagacctccttctccttctcttcttttcgtcccctttgatccttttcctcttctcttttgatcttcaatccaatctttagccccaactcaccttctagatgcatttttcctatttttttcctcttctgctagataattgttggttgggacaatcccatcttaatcaatgttcaaattatgtctccatgttcatttccctgtaggtcatagaactctttgttagagtatcatgtggccaatttataggtctttattctttctcttctgcccaaaaatagatctttaggaatagcatgctgattggtctattattaaataattttaaaattgacctcattttttaaaagtagtaattaacttatattcagctgctaccctaaattttttaaaaatgagcaagaattgttatatatagaagaattttacattttttctaaagaaacactttgtaaaatgtggtagaggtatgcaagaggatagaacatatctaatttaacaatagctactacataaaactacataaagcttatggttttggatattattgcttagaagaaagtgatttgatgtaagtttaatgcaaaaacaaaaagtaaatagtacagttagtacatggggaggacatactcatgggagtattacttaaataattgaattattatttgagtagttgaattttgggaaaccatgttccaaagggaagtctaggataacagcctcatcgtaattctccccaccttcaatatgtttttcccccttcaacttgcatttcagaattactcatttatattttgccgtgataaagtctgtcagattttttcttcaagctaaataaaagtcacttaaaatgcctttttcagagtatgttacataaatatacatatataatataaaaggtgagaagaactttatgtaaataagtaaatatttggttaagatgatgtgatttctaaattttctaaaagcaggacttcctttagagtagaaaatatttagtctggttgtagaaagggcatattttatttattaataaaattcatggcccaatataaatttttgaagtcttcaaaaaaaagaaattaaataaacattgccctaatctctctagattagctgatgatttttaaacacttgttgagttgactttttttccagttatctataataaagaaaagctttaaaaacctgtcccttttttcccagataatgatttcttttttaaaaagaaaaagcatggcttatattaaaaattgcaatatacaatgctgacattatactttaagtagaaaaggacctaatttatgtgtataactggaacatctctatacacccaaagatatttttctactcactgctgcctatgcttagaatgctgctatttgaggttccttcttttacaataagcattgcttctcccttctttctgatacagttgctgttgcaataggacacatattaaccaataagcatcttagtaagtatgccttcttccatgactattgtaaaccaagtgtatccattaggaatgcatctggctgccagtaagagaaaacatacagtgacttgaacaagtagaaatatatttattttttctcacataatgaaaaaaccagagatgggtgtttacaaacatttgttcagccacccaaaaaatgtaaggaccacatttctgcgatgctcttagcctttcctggatggtcatgagatagataccatggctatagacaatagatttgtattctcagcagaagaaggggcagcaggaaagaaaaggattataccaccaagtatgttcattttcatgaggatttcgaatatttctccagaagatgcccccagtagttttctgcatctgttacatggccacccataatagcaagcgaaactgggaggggagtaattggctttccagcctctaaactagaagggccaagaaagaatgaggtaaggaataccacatcagtgataccttcaaaaggctgagtaaataaaaaaagcattgaaagaagataaaagataaatgatagggaaaaaaataatacttcctgtattgtttttattattgagtccttactctatgccagatactatgctatatattattacatgtattataaatatatatattatacgtatattatcccacctagttttcacaaagactctgtaaagtagatattgctttcccctatttacagaggaaaaacccaaaaccagttacttgaccaaggtctcatagcaaagctagcatgtgacttgagcttgctctgacttcagcattgcctctcctgagaccgacacttagaacatgccgttttctcctcactgcagatcacatttcacacttctccagaatgcttcagtaaattacaaactgcctgaaatgcagtgggaattttcaggccttggttaatgaggtagacggaaccaagaatgcttgaatagttctagcaaacgctgctgcagcactttcttctacaataatcaccttccatcttttcaggttttctgcttggaattcattactgcaattctgaattctgaccttgatgtacaagtggtttctatgcatattaaatgcttttagatggacttctattttaggaggattctctctctaagcggctcatcaaagcccatttgtttgtttagagttgtactgtcagctactctgggccaattatttcagtttattcgtgcaaggtcaccttttgggttcaatcctatataagtcagttaacttttaaccagatacaaactctgtcccacagttgattcttagactggcttttgcaagcttctaagtaagattttcattcactcatgcagttggcaaagggtgttaagaagtcaaagatgagtatgcgatttctgactcaattgtgagaaattcgagagctaagattgtgccttgatactgttatatcgccagagcctaacactgtgcctggtatacattaagcccttaataggctcatgtattcactcagcaaacattcgttgagagctcactgtgtgcacagcagcaaatgagacatatgtgtatagctataaacaagaagtacaacagtaaacaagacagatatggtccttgtacttgtgaaacatatattcttgtagagagatagataatgaaaagtaggtataattttaaaataaagaaggccctaatatgcatcataggaaaatggataaattgtggtatacctgtaaaatgggatactacccagcagtgagaagggaccagctattgctactcctaaccacagggatgaatctcatcatgtatgatcgtattgacaccaagttcaaaaacaggcaacactcatctgtgataatagaagtcaggctggtggtcacttttggagggagcaatgactttgggaatatccaggagcttctggggtctgggtaatgttgtttatcttgatacgaaagtttgttatctggaaaagtttactttgtgagaatctcttataccgattgggcatgacggctcacgcttataatcccagcactttgggaggccaaggcaggtggatcacttgaggccaggagttcaagaccagcctgatcaacatggcaaaaccccatctttactaaaaatacaaaaattagctgggcgtgctggtgcttgcctgtaatcccagctactcaggaggctgagacaggagaatcacttgaacctaggaggcggagtttgcagtgggctgacatggcaccactgcactccagcctgggcaacagagcaagactctgtctcaaaaaacaaacaaacaaacaaaaaaggaattcctcatattctgtgctgataaagtatatttttctgggtacatgttataattaaataattttaccttagagaagataagggctaactgtgataatgactgtgcaggaaatgctcaggttgcagggcactgtgacagagattatctgggagaactttactgtagatggaatggtcagggaagagcttcccaggagatgctggcttggctgaatcctaaggggccaaccatggggaaaaccagaagagcatccctggtaaagggaacagcaagagcaaaggctctcaggcaagaaaagtcggggcacagctgagaagtaaaaaagacaccagtgtgctggagaccagagtaagtaaagagcaaagtggagcaagtcaaagtcagggtacatcatgcagagccttggagcccattgagtttatcatttggctcttttatgccaggccatgtgctaagatcttgaggtatgttaccccatttccttttcatctttttagcaactttgggaagtcagttttatcatccaaattttttaatgaggaaccaaggcttagggaaagtaggttgcctaaggtcatgcagcctggaagtgagtggtatcaccaggacttgaacctgtgtctcttggaccccaagcctgtgcgctcaactcctgactcatgattctgcccctgagcacttgagtttaaataaataactacttcgccacataaaacatgcacccataggactgtgaacaaaatgctgagaaaacagcgacctccacctggggagtctggaagggagcacatgcactaaatttaaagatgtgtacatgtgaaatgtccccagaggcaggcattctcaagggaatagtatgtgcaaacactcaaagatgagaattagggtggccacagtggttcacgcctgtaattccagcactttgggaggccgaggcaggtggatcacctgaagtcaggagttcgagaccagcctggccaacatggtgaaacctcatctctactaaaaatacaaaaattagccagctgtagaggcacacacccatagtcccagctacttgggaagctgaggcacgagaatcacttgaacccaggaggtggaggttgcagtgagccgagatcacaccactgcactccagcctgggcaacagtgagactctgtttttttgtttgttttaaaaaaaaaaaaagatgagaattaatcatcacagtagctaagatgtattgagcattcatcctgtgctaagttctgcagtgagtattttgcttatcttaatcctcacaacaaccctatgaggtcagtattggccccattttacaaatgagaaaactgagctttagagaggttagtcatttgcccagggagacatggctagtgagttgagtaaataaacactaggcttgttgaattagcggtgagaaaagtagtgaattgtaaaccagtaggtggcaaaacccagacataagcaaagttctgccgctgaagtccatgcccccaactctccttctgagagcttaatgtgactaggaaagcaagggatgctttgtgtggctttgcggtgtgtgttctctgaacttgattaaaattaatgttcctgaagttccttagctcctttctcctttgagagttttatattctgtaatttctcttctctgaaatcctgaatcataatttaatgtgcttttttgtttgccttttcctctccacctagactataagatccctgaagaaaagcccttatttcttttgattccttagtgcccagccctaagaagtaacaggtgagatcaggggttgagtgtgttgaccactgaacccgtagtgtctggtgcagggctgggcagagtgtgggtgatctataaatatttcttaactaaatgagcaccatgcttatttaaggaaaggttagacagataatagatttggcctgggtcaacaatcaatcttgatcattcatatggtatgtgcataattttatttcaattaatcatttaagacaaaagcgaggtctataggcctccattcctctcctgccccatcatcccaccccactcccaaaatcacgcaaagctggtattcacactgttttagaaggaattctgagcaagaaatcctgtgagatgccttggttggtcctatactgttaggatttgtgaactagattaaagctggcctgcttaaaataaatgtatgttacgggtatcatttttatgagcaaatcaactgctacctaatatttcagttcaaatggtttcaagcacataaaaaataactgtgattttctcttcaatttcacatatcaatatgtgctctgctccatgggtcagagcaggaaagcttaagcaacttagaagtgagtttattccatgctttaggtctgaactggtccagtgcaatagccactagccacatgtggctgttgaactcctgcagtttggttactctgaattgagatatgttgtacgggtaaactacaccagattccaaaggcatagcattttttaaacgtaaactgtctcattaataatttaaatactgattacatgttgaaacgttattttggctatattgggttaagtaaagtatatcaaaattcatttcacttgtttctatttttttaatgtggctactataaaacttaaaattatacatgtggctaacattgaatagtggtgccctagaatgtaacaaatatgagtctgataaatttctaaccccttttaatctacccttgacttcactattccccaacttcttccaaagatacaaaaattaatgaaagcacccagcttccatctgtgtcacaaacaaaattctgttttgtttttgtttcttgactgagtcaaaactcatgctggctttgtgtctcctaaagctttaaactttattttctaattatattgactctaacagtaaaatcacttggatttatataaaaacttttaattttttaaaagaactcgttatgttattgaatagctataactatcccaggacaatgggtaattagaattaccaccattttccaagtgagaaaactaaggacgagataaaatttatttaaacccagccctgatccagaaaggctggctcttcactctcaggtcaatgcagaatataagtcgctttttccagatgacacagtggccaacagaactgctactggactggtcttactttttccactagaacagtggttcacagaggtagtttctcatgatctattataaagcataactttttacaaaaagtttaacttttcacaaaaatttaacttttttaagttaaaagtttttaacttttaaaacagcaaagttttggctgacttgttaatatacatattttatataaattagaaccaatgaaaagatacctgaaaataacatgtcttgcatacactccattcattcattcatgtaatcagccctgagtgtctggcacatataaggcagttagctatgccctgggaaaacttcgatgaataagatagcaagaaaagacaccgcatgtaacaaatttaatcatcatcaagcagttaaacaaacactgtgctgtggaatcacatagcaggaagacctgcccctaacctaggggctgggaaggacttcataaattagtgctgcctgcattgatacctgatggatggcatgatagagccagataaggggtgaggaggaagaatgagtaggaatcttttaggaatgttttcctaagaaagaaaggtgggattgataggcaaggaattgtacataacctagtacccaaattctctatgccacatcccagaagtatatcctgtacccaaacatcatctgtcatgtgatcatggatgtaccaacaacaataaagtttgaaaacccctgcatatggtcatactgcattcatcaaggtatttcagaccaccagaggggcatgtgcagtgctgtgtttgctgttacatgtttaacaaccatttctcaggaggggaaaaaaaaactgttttgtagcatttgccaatttccatggtctaaatattcccaccttggctgacatgaagctgccactgagacaacactgaatgtggagctgggaagagatgggtggtagcactcccttatatagaatttccctcatgcaaataccataggtgtaagtaacctcaaaagcactgatgaaagtgaaatgtggtaaaataactaggaggcaatgaattttaagtattaaaagtgtattaactttgtttttaatataatttatttatatattattttaaaataatggctgtgtttaacactggctcacagaagtttccacagattcactaatcagctgtcacacacctatacaagccagctccaatacaccaatgggtctggcatcttcagcataaagtatccatgatccttgtctaggacaagttctcacatttccctctttttctgtttcttacagatcagcaaacagcagctgcagacagtcaaggaccggtttcaggctttcctcaatggggaaacccagatcatggctgacgaagccttcatgaacgctgtgcagagttactatgaggtgagaatcactgttcagaagaatgccaagaccactcaagccctatgcctggggagtctgagctgcagggcaatggggacagtcgttttggtttactacagtatcatccttcctaaggcaaatgggttggtgattcgttacaatgttaagaaataacagtattttgttttagggaaaactaaatgtaagctactatttaacaacggaattttataccaggcaatatactgagtgtttttcatacaacatataacagtcttatgaattaggtctgattgtatttccattttactgatgaagaggctgaggctcagataggttaaattaattactcaaggtcacacagctatgaaaaatcacaacctgtgactttgagtcaggagcatttttctcaccacttacaccattttaaaaggatgttagcacctcccaaggatggtggcttcatgaacttccttattctttttttaaaaatgctgctttcttttctggagctggaaccactgtccaaaatgcagtgctgttctctagagaaaatctacaaaagagagaatatgttctgagtatgtattacaggtaaattttcaccaccagacctcagaagcttatcagtaaagtggatttgtatttctgcaaatatttttaaattttgttaagtgttctatctcagtgtgcatattggctattatttctacatgattatgaagtggacatgccataccttcctattggcaatgctttcctcatatgcacattttcaaatatgattatttggtcactgagtgacattttactttatattaatctattttaatgtgaaccaggtaaatactctctgtgtttggaatcctatgccccaaatgtcttatgcattgtcaaggttagatgacaaccattagagaccagctcctaggcactgaaagcttatgatatgctgctatatacaattcacagtaataatggtaaacttgaagataggtataagaaaaatgtaacaaaatctgattttcccctgggattgtttcattgatttccttccttccttgtttcctttatttattagatagaaaattatttcaaaacaaaaatgttggtgtgcctgctttgctggtgctctaagcacgtacttagtctgcccatctgattcagcccacaacagatgctttcaatatgttaattgattgaagcctcggtagaggcaaaatcctgatatggcaaaactcttcttcccacttgctaaagcacttgactccttccttcatggagagagtaagactgcaattagatcttgtgaaaatattattgattggtttgctaattagcatttaatagtaaacaatctttgtgatgttcgctgggaccaaccacagactccttttacaccattttcttcaagaaatttttatttggatctattttagaagtcaaatttgtttttatagttgtccaaatttaaatcttttaaaattttacaagtatcattcattatcgccaatgagtgtcaaacttgctgctttatcttatgtggtacagttttttggctgaatttcatggggagtagaaatgagatttggaatcacagtgatatatgatagtgaataacttgaatatatttaactaaggttttgtttagaaactgcctgggaatgaaattaattttccctctttgttcaagttctggaagccaatgggagagtaatggcagaacccttgtcaggccaagcagacccctatccatagttctccatatttagagtcattcaccagagtttataaatttataggttgcaaatcttaattagaaagctcatttgactaatggcataaattaaaagaaagtgtcatttctatctattaattaaatgtgaaaattaatagtcatcaaggtgctaatgagtctctggaaattaccattacatctacagtgatcccaatgttttcctctgtagtggctagtttattggaaacagtttcattttttgtctggtaagaatacaggcattgagaaattactgaatatttaatgttagcatttgagtaacataagaaaggatgtggggtattaatgatctaactgctgtcttcattagtaaatactttggagagtcttagattcacttttccagggaagtctaatcctctaaagtgaagtttctgtatcaggagatcagggttaacactttacttgggagctctccaagttgattacaccttcctttctcctttccccttcatccttgggctatggagaagctgatgtctcttcctgtacccaactctgggttccaattgcttctctgttggcccctgtcttagtcaggactctatggattataagtgaccgatacctaggtcatactggataaccctaaaaaagagatttatttcctcaattaacttaaaagtccaggagtaggcctggcttcagccatggctggatccagaggctccaaagttaccagcgggatgggtatcttccccccacctctcgactgtactcatccctgtgttgacttccttcttggtcagcttctctccatgtggaagaccttgacagccccagggcacatcctaccagtttagcacctccaggagcaaagagaacacccctgctgagctccctagcaaagacatggggtgactttgttggactgacatggatcatatgtcccttcttgagtcagtcacagtggatgggggtgaaatagactggggggttaaggcttaggacagccaccatctctggcacctgagtacaggctcagctgcactggaaccattttcaggaagaatgtaatggtttcttaataaaccgttaggctgctttttaccaaaacggggaatatatgctcagcagacaaaaccaacagatatcctccttccaaattccctctctttcacattcacacacactccaccctaccatgccacaacttcacactccagtttaccaacagcaataacgttaaaaaatagtgtaacagcaataatctcaaaatgttctgggatttctgtactttaaaaagtcagttttagatatcggtcttgttttgctaatgcatatattcattactcagtatccgcagagcattagttccagggcttcctcaaatacaaaatcctcagacgctcaagtccctgatataaaatagcatagtgtttgcatataacctatgcacatcctcccatataccttttttttttttttttttttgagtccgggtttcctttctgttacccaggctggagtgcagtcatataatcacagctcactgcagcctcaacctccctggctaaagtgatcctccctcctcagcctcccatatagttggactgcaggtgcatgccaccatgccagactaatttttgtattttttgtagagagagggttttgctatgttgcccaggctgctcttgaactcctgggctcaagtgatccacccgcattggccccccaaaatgctgggattaccagcatgagccaccacacctggccttctcccatatacattaaatcatctctagattactcataaaaactaatacaatgtaaatgttatgttaattgttgtcatactatattggttttatttatattactttttattgttatttcttattttttatattttgtatctgtagttggctgaatgcatgaatgtggaacctgtggatacagagggccaactgctgaattgatctctcagcatgctagagtagtaaagatcatcttttaataaatgaaaggagagaggaggtgctattccttttccatctgtgcccatccagcccagtctgaaccaagctagtcaccattaacaacaagttggtgaggcctgggccatgagtggggatgggagaaaggagaccaaggtccccatggttctcaagagcacacaggtttatttttgtcctttcctgatggccctgattgtcagagcggatcaagcagggcaacagattaatccattaatctcttcaattctggctttcagggccaagggctgggggctgggatgggtgctctgagatctggcccagcaattctgtctggttctcacacccctggtcctgagatatggcatcagagagccatttctctgtgttcctcacaccttttctaactatttttaagaaaaatgtccaaaatataagccctcccttgctctctccctccctcctcacactcacctcctcatgctcacctcctcacctccctgcttgattttagtttcttcacatgctggtcctggcatcagagaaaataggtggataaaaaagttttacaaaactcaaattcttcctggaagtgaacatgggggtatttgcaagaaaatgggagtgtcatatgtggcagaagacataaaaattcatttcagaacactgcatctgatgtctgaacttcagccagtgaagctcctataattgagctttgtttggggtgtgtgagtgttgtttttttgttgttgttgttatttttttgtttgtttgtattgttttggttttgttttttaataaatgcctagttcatttttgtcacactagctttgaatgttgcaacagacagacttctttagttgctagcaacagaaaccgactgtgattaaattaagccctaatcatcatcatcatcataacaacagcagaagcaacaacaacaacaatagtttgctgttgttgccagtattgttgttgttatcagaagaaacagctaagcttcagaaaagaaggaaaccagaccagtttaacttcaggaagccagatagtaagatataacagacacttaataattgggataaacctactctagcccagtccattctcatgccaacccactcggaatgtgaactcaagaagtggcagtcttactgaccaagctcagatcccaacccaccacttggctaaagaaggacaaagtcctacaattgacaatcccactgcaactatgtaatgagaaaggggttcttggaagaaagactgaggtactattatcagaagaggaagaacagttggcaggctaaaactgcaggtttcatctatgcaagaagacgtttagttattatggttgaactttttttatttaagaggagtataaatcaggtcacactggctatttttctaaaatgaagcaatatattttctaataagtagaatggctacaactattccatggtacctgagataccatgataaacaggtacatccataggggaagaataactacccactctaaagcattgattcttgcagggaaagcccagcaaggaggaggcaggaggtggcaggcagagtgattaagaggatgagtttagtgtccaaggccaggtgcagttcacatctgtaatcccagtactttatgaggctgaggaacctcagcctcttggggccagaggttcaaggctgcagtgagctgcaccactgcactccagcctgggtgacagaatgagaccctgtctctaaataaattaaaaataaaaattgtgtccgacagaggtgggttgagttctagtcctgttacacactgactctgggacctcagctatgtctgagccttagttgcttcatctttaataggaccttccttgcctaattgctctcaagactaaatgagaatatatatacctggacagttccattattaatatattaaggttagaatatattaatatattaaggttagaaatgagcatggtggtatggtgtccatatgctgcatagaaatagaagaagagagttgaaagttgatagaatcaattcactccctgggcatggaggaagggaggtgcaagatggagcaggggaaaagggcatagaaaagaaaagggaaagtacttttgctcctaatctagcaccacctaccacaaggtcatggcccaagatctgcttctgaaactttgcccagaatcctttactttttggtgaagaagatttttaagatttgaaaatacattttattttagaaatgaaaatgcaccttgcctcaaagaaggtaaaatttgtatttttccaggtagaaaagatgtgtttcaaatgaccgtgaaagtaaaacatgcccactataaaaataaaacagacaatgtagaaaaatctctgcatttacatggttaaaaaatacttgcaatcccatcatcctagataaccaaaattaaactttggtttctatctttccaggtactttcaatgtatctatgcatgtcaagataactatttggcttgcatattaaggtgggaaattaccacaaactattaaggacccacttcttttatttaacacagttgttttcagtctccttcctacctttccaaaggtcacacaaatggcatactctcatcagtaaactgtcttatttcctatggtattctaaatccagagccatgttcctatcctccaatcccacctcacccctgccattggaaggctctggtccattataaccatatatcatggacatctttggatggtaatgaaaaaatatatatcttttttcatggctgcatgatattctatttaaaaataacagctaacttgtattacattcttagccgaatagtaggcaacaggctaaccaacttgcaggcataatatcactgaatcaggattcagggatcaccaaaatcctacaaaggaaggttgttataactcccatcttaaaggtgaggaaattaaagcccaggaagattaagtaacttgctcaggtggcaaagctagcaagcaacagagccaggatttgaacccaggtgttctaataccagggcccatcctcctaaccatgatgtctacccctttcattatttatgtgcccatttattaatagcaacgaggtgtgtgtttcttgcaaaccttacttactccaacatctagatgtttttcttatttatattgaaaggatatgctttttcagaacaggaatgaatctgctgtggcttctcagcttatcagctagcaaatgggagctaggccaacctcatctgtaatgtgaacagtcactaagtactgatgtgtttgtatgtttctaaaatgaccttgaggttgcttggctctggtgatggagggaaggactgatggatgaggtcgagttgctgaattgactgtccttcacaattccatatttatttgtttatcttccatctctcattatgacctgtctggaagttggcagaaaagcagggaggatttatggatgtgcccagatagaactgggcttggggttaaagtctcttgtggcagccactaaaaagcaaaaacagaaacaaacacggatacaaaatacagacagagctcccagcacaattgagtttgaatagttgttttagagacacacaggcacatcagtacttagtgtttgtattcattatagggtgaggctggcccaggccccacttcctctttgacagactgagaagccaagacagatgatgtgcctgtagaaatagtttcctgctgccaccttctctcctcatggctgtcttgtctccattgggcaattcatctttactgtctccccagtctttggcctctttcctccatgttcttatcattccactcatctctcctctttctgggatctggcagttgtatcttaacacaggacagatagatccctccacttttcaaagtcttctcagtttgatcctcagcaaagaagaaaggctggattccttcattgtttaccatgaaggagagtgagactgatggaggttaggtgacttgtcttccactggtaattcagaagtatttattgagtagctactatgtacaaaggaaggggctagtgaagcagatgctatgcccaggattcagggttcacctgatatggtttggctttgtccccactcaaatctcatcttgaattgtagctcccataattcccacgtgtcatgggggtacccagtgagaggtaattgaatcatgggagcaggtctttcccatgctgttctcttgatagtgaataagtctcaagatatctgatggttttataaaggcgagttcccatgcacatgctctcttgcctgctgccatgccacataagacgtgcctttgctcctcccttgacttccaccatgattgtgaggcctccccagccatgtggaactgtgaatccattaaatctctttccttcacaaattacccagtcttgggtatgtctttattagctgcgtgagaacagactaatacatcactcaaccagttacaccagctgggacccaagtgccaacatctttatttcttaccccttgttatcaggccccatggaaaatctagcctaagtctcttgttttaagagaccaatataccgtgtgctggtttccccttgaccttctcgccccaatccagacatagtctcgctccatatttttcctgctagaggagtctgctttgctcttatagttcattcactcattccacaaatatttactgagcaccagctacatgccaggcactgtctcaggcactaagaagcagtaatagaaacaaacaacgactaccctgcctccctggaacttatagtctagctggagatcagatatttaccaaacagtcacaaaaacagtggcagatggcagctgtggaagggctttaggaaaaaagaatctggggctgagagcttataactgaggcccatttcgggtttgtgggatactaatgtgcatagatgtagaggagaatatagcttcattgttgattgaatgttttcaagtcaccccttatgtttattagcactgacaacaaaggcttaaccccttagtgtccccactgccatcacactcacccggtctcgtacaagcacctctcaactggcctccctgcctattttcttggctcccttcatcagtctcttttccacattaaagccaaagaatgtgaactggtttgtgccgtgtcccagcttaaaactttcaatggctttccaatgcccttaaaatgaagaccaacaaccctaatcccctcctcctcctgaatacctcctccttctcaatgcctccctggactctctggcccctccctgcccatcttacatctgtcacccccagccctcattgccacagccacactgactcctccttatttcttcaggcacttggggtcttcacacgtattgttccttctctctaaaataaattacagctctccattcacctatccatctttcatgcatcatctcaaaggtgttttctttcaggaaggctttcttgaccacatattagaatagattcctagctataggttcttgtggacccttgtcttgatagcacttgttccagatcgtaatcatatttgcatggcattattaggattatgtcagttggactccatgagagctaaatctgtgtcttcctcaccgttgtattcctgacacctggtacagtgtcttccacctagagagtaaccaaagaaaggatgaatgggttcatggaaaagtttataatcattacagttaaaaggatagccccaaaccttattgttcaattcctttggtgtatggataagaaattggagaatcaggccaggcatggtggctcacgcctgtaatcccaactctttgggaagcccaggcgggtgtatcacttgaggtcaggaattggagaccagcctggcctacatggagaaaccccgtcactactactaaaaacataataatgatacaaaaattagctggggatggtggcagatgcctgtaatcccatctacttgggagtctgaggcaggagaatcgcttgaacccaggaggcagaggttgagtgagccaagatcgcaccactgtacttcagcctgggcaacaaagtgagattctgtctcaaaaaaaaaaaaaagaaaaagaaaaagaaattagagaatcagagaggggagatgatttactcaaggtcacacagcaagttagaggcagacctggcctgagatcatgagttacagctcctgccacaatgctccattgcctttccagagacttcctccactagcctcaaaacactggtatttgagatctataatgtgttggttagatggagaaaccatccccattaagtgttacaggtttgcagatgaattatttagctcattaaggctcataaggcctgaggattcatttgaaactattttgtctataattaattttcaaattaactctaaggtctcatctgagtaccagttcccactcataaggaagcaggccatggcctctaccctgtgaggcaaaccctcagccatcctttctaaattagttcattaaagtcaacaataaaccggagcctttttaaaaaaaaacatctctccaccccagaaacgctttgtgatgaagcatgaggcaatgagatgcccccaggcagtgctgtctcatggccaacaagtgcatttcctgaaatctgacaggggaatgaacatttgctctgcctcttgaaggatatttatgcaccttctgaagtgtgaccaggacgcagctcaaacgtgtcagatgcttcctctccgtgaatatgaagcggcggcttcactgccttgtattacaccccagaaccatgtagctcatgtaagcttccgaatggtgggcagtggagcgaaaataagactttcttaatagaagaagtcttggtcccaggactcaaccaggtagcaccagcagaccaaccagggattttccaccaggcgggagaggttttcatcaagcaggagaaccctgcagggaaggaaggaacccgggtgaagtaaaaagactacccattggtagtcagacaatttgagctaccaaaaggaagtcccttcccctctctgaagtctcagtttttcatctacaaaataaacttaacctaacacctatattcattgttaattcacttttaaagtgtcaggtgctgaagacattctaggacctgaagacattgtgaggaacaagaaggacacgttccttgcccaagtagagtttacatttcaggaaggaagagagaaaattaaatatatgtttacctgatacttgtatactttcaattaaaagtatcattgaagggataaaaggaggtacaaatagtggttaatgtttaatgctatgtgcctgatatcatgccaggcactttacatataataataataacagcaacaagtgtaacatgggccaggcactattttatgtgtgttttacacattaacacatttaatcctcattttaaaatacatactggcctaggcaacacagcaagaccctgtctctacaaaaagtttaaaaaattatcgaggcatattggcacacacctatagtcccagttacttgaggggctgaggcaggaggatggcttgagcccaggagtttgaggctgcagtgcatcgtgatcactactgaagtctggcttacataacagagcaaagtcctgcctctatttaaaataaaaaattaaattctgggtgcattgactcatgcctgtaatcccagcacttttggaggccgaggtggatgggttgcttgagcccaagagtttgagaccagcctgggcaacatggtgaaaccctgtatgtaccaaaaatacaaaataaataaataaataaataaatagccaggtgtggtggcatgcacttagtcccagctactcaggaggctgaagctggaggtcgcttgagcctgggaggtggaggttacagtgagctgtgattgtcactatagtccagcctaggtgacagagcaagactatctcaaaaagaaattaaacattaaataaatactattatccccattttataaatggaaacactgaggtacaaagaggttaacttgcccaaagtcccacagccactaaggggcagagaacctatgcagcccgggcacaggtctgtataccatgtgctgcctctcatgatagtatcatctcatttaatccttgcaccaacctggtaagtacaattgttattctcatcttacagatgtggacacagaagcagaatgtgtaagagactactctgagtttgcacagccaggaggtggtggggcagggtgagacccacagtggttcctcctgggatgcacgtgaggtggactggcccagtgtccagccccagggaactggtacctctgtggtaaactctcctactgtctttcctggccttgttcttgctcaggtgttcctgaagagcgaccgtgtggcccgcatggttcagagtggaggctgttccgccaacgactcccgggaggtcttcaagaagcacattgagaagagagtgcgcagcctgcctgagattgacggcctcagcaaggagactgtgctgagctcctggatggccaaatttgatgccatctaccgtggagaagaggacccgcggaagcagcaggcccggatgacagccagcgcagcctccgagctgattctgagcaaggagcaactctatgagatgttccagaacattcttgggatcaagaagttcgaacatcagctcctttacaatgcctgccaggtaaggtgtttctcgcctgggcccagagctgtgggtaagcagagctgcattccaacttctatgagatacttcttgatttttttaaaaaaaggattaaaacttatattttattactctactggtaaaaagttgaatacagtttaggctggagtatattcatgcttttcttctgatttaaaaaataaataaataaaacatttttatgagcccttaaaagtctcaggggccctaggcattgagctcattgtgtctaatgggtaagttggccctatgagtaaggcttgttttccacgtgtcaaaagtgctaaaaatcaattttttaaaaaatatggttctgcctttggtgtttgccagttgaagggcttgtgcttcctcagctgggaagactactgaacttagcacctgcctgtcaagaataattttttaaaatggaaagcttgcaaaaggcccgatacctgtatattagtcacatcatgaatttctgagtggttctgatggcgagagctgaggctttgcttgggtccaccccaaaatgggcctgtatttcctctagatggaggattagggaagcgaggtatctcatatcttgatatcctgcctaagcttagcattatattcatttattcaacaaatatttattacgtgcctattttgcagtctgaaattcttactggatgtctcttaggagcagtttaaaaatgcacattcccagctgctagccctagagattctcattctgcagcctcagagcatggcccaggaatctgcattttaaacaaggaccttccttcctggtaattatgttgcccttcaccttcaaagaactatcagagagattcatctttgccttgtttgctaatattcccagtatataaaatcttggcacagagtgaatgctcagtaaatgtttatcgaattaataaatggataatggaaaattattttaactagtaggtagggtcttatcaactatgatatatcaccttgaattttctggatgttttagtaagagtctgtttagcatttcataatacaacacatgcatcacattcaaagatattgctggtatctactttcatctcatccaactttaattgaaaacattgattacaaatctggagatgaaaggttttttgtgatgggtcaaaaagtattttgaaatttcacatatcaatataaaattaaatttaatcattattttatttaaaatattactacatcccaccatgtagcagttttagaatgggataagcaggtggcgttagcctccaccaccactatcacctccaccagcatttccaccacaagaaggtgtcatagcttcaatattgaaaaatcatccacctgagttataagcaagattcagaattacagagagagtcaagtgttcctaaaccttctaggtacaaaattattctagggattaatttttcttcttattgcaacagcttatgcatattttctgtgcttgctcaaactcagcttcattggagtgaatccattgttatgccatttcttgtcttatctcagtgtttttgcacttgttgaattgagtggcaggatcatattttactgttttctcctaaaaaatgaattaatccgactcattttaccctcaaaatcttttttgcgaaatagaaaaaagtacagtaatattaaagaatatcttctctctccagaataaagattgtactcttagccaaaaaagaattacaagataggccaggcacggtggctcatgcctgtaatctcagcactttgggaggctaagacgggtggattacctgaggtcaggagttcaagaccagcctggccaacatggtgaaactgtctctactaaaaatacaaaaattagccaggcatgatggaggatgcctgtaatcccagctactagggaggctgaggcaggagaattgcttgaacctgagatcacaccactgcattccaccctgggcaacagagcgagactccatctccaacaaaaaaaaattacaagataaagtacttcttcttgggacagggatacttaagacatttagtattttactctctattcatatctaaatctgattattgtttcagggtttcatatcaatagaaattagggcaaaagaacatatgaaagtaatttatacatacaaaaatacacatgaattctaaatatatggttttttgatttctatgtctttagtaatctaagtttcaggagtgtattggcaaacaaaagtattttaaaagaaagaaaatattggtcatgataatatttcacaacatataatacccatttctatgacaatatagagatggctattctctaaacttactgtggcaataaattcttagtgtagcctttctgcaatctgttagtttgcagcagaaaaccttcataatgggaaaaccttttgacctaggagctctacctttaggaattcattacaagtagatacgcagaagtgtgtgcaagagtgttaagtccaaagatgttcactgcagccttttatatgatagtgaaaaaatggaagcatgcttaattcccagcagtataggattaattaattagattttgatttaaccatacaagggaattttctttatccaatagaacagcaataaaagagttgttaaagaagaaggcttgccatgtgggaaaatgttccttagatattgctaagtggagaatctggctatgaagcacaatatgcaggcacagtcccatttctatgggaacaaaggatggaaaaaggtactggacaggcaaagaacaaaatgttaactgtgcttatctctaaaggataggattatggttgatttttatgattttcatttgtgcttttttatgtctccaaatttctaccttaaacacagttattctgtaaatgaaaacaaataccaaaagtctcaacaaagaaaccatcaaaacaatgggatatgaagaaagttatcttctgaattgttttctagacttcaggcgttaacataccaccttcataatctttgccatttccgagtactacctggatgattatttaatgtttcttattaaactaactctcaaattcacctttttttttttttttttttttttttggagcttaagagtctcactctgtcactcagggtagagtgcagtggcacaagcttagctcactgcaacctccacctcccaggttcaagcaattctcatgcctcagcctcctgagtagctgggattacaggcacgtgccaccatgcctggctaatttttgtatttttagtagaggtgggtttttccatgttggccaggctggtttcaaactctggacctcaggtgacccacccacctcggcctcccaaagtgctgggattataggcatgagccaccgtgcctggccccaagttcactttttaaacctgtctttatcttaggtaatgtacataaaatcacagctttgatatattctttttacaaaaaaataatatgcattaaagtgaaacctaactattaaaatagaaactcttcattggctggccctcttagatcatctcacaccacagtgatgcagaagacacggtggcagtagacagtgccctgacgcactgaggctggtgggacagagctctctgactccatccctgaaaatagcctcagactgaccacagcagctttcatatgaagtctgcataggcaggtagcaaagcagagatttaatttacctccctcctctttccttgctggcaggctgtatgtagacaggcagcaaagatagtatacctgtcatgccttaccatcaggtgtctgaaattatacatttactcactttctggcagactacactcagctctgcacaactcttatcaactcacagtagcaagaatacagaaatgatattgtatcactttcatcctcactctgctgaaattgtttcctgtttaattttgtattttctggaccttcttctccttaccaaacaaagcaatttctaggtgcttcccaaacccaaaatgtgcttaatgttttcctcttacgcatatcgtatcctaggggaagctgtaatctgatttctgctgctgctttgtgaaagttcccatgctctctctttatgaggttctgccagtaactgccatttttatctcaaatgagaaatgacatttatcaaagagcgattatgtcagttacatatcagttatctgttgtaacatgaaccatgtctatcaaaagataagagaaaagcaagagagtttaacaaatgtctctgaatttgcccacggagtttcttaacatctattctgtttgtttgagaattagtggataaatctcataaaagaaattcatactcaacataatatccaaagtaaaatggcaaattttattatgaatcagtgttggttttatttttcatagacccttgggaagatgcagtcaattatgtagctatttgagttgaattctaaaggtaactcaaaaaaagtaaggtaggctgagcacacagctccattccagcactttgggacaccaagatgggaaggtcatgtgagtccaagggttttagaccagcctaggctccatctctacaagaaatttaaaaactagctgggtgtggtggcatgcacccatagtcccagctactcaggaggctgaggtgggaggatcacttgagcctgggaagtcagggctacagtgagccatgatctcaccactgcaccctagcctgggtgacagagtgagactctgtctcaaaaaaaatttttaagtgagataatttgagaataggttttattatctgagaaatgaggctaagacagacctgctttccatcttcatgaaatgcaaagctgacagcgatgatgatgatgacgatatgatatttaaaaacattttcaagatgcaccatctctcccctttccctttagtaaccttcaaatttggcgtaaatttgattctcagttgtaccagctgtctgctactttctactcctctgcttaactttataagttatccttaactatctcattcaaaactgtgcggatattttcccttgaaaaatacctcaaatgtgcattttagaaggagtaaggtctacatcttaattttttttttttttttttttttttttttgagacggagtctcgcttctcgcccaggctggagtgcagtggcgcgatctcggctcactgcaagctccgcctcccgggttcacgccattctcctgcctcagcctcctgagtagctgggactacaggtgcctgccaccatgcccggctaatttttttttttttttttttttttttgtaattttagtagagacggggtttcaccgagttagccaggatggatggtctcaatctcctgaccttgtgatccgcccgcctcagcctcccaaagtactgggattataggtgtaagccaccacgcccggccatcttcatgtatttttaaaggcaaatagactcttcttagtgaagcaatccagctaattttgaagatgtggtgaatatgagctaaggatgtcagttgtatctcgatgtttccattctgctctttgaaaatgccatttctggtttttctcttactgatcacactcttcccttctaaactaagtgcagcatgactctaaacttctccttggccattacatgtgcccaactggcagcagggataacatccacactccaactaataggataagacgataatctgttcatttattctctctgaatttctagaggtttttcagataagtctggaaggaagaagaaagaaatcagaaaacttgatttctcaatttataaacacctttgcattttcaatattggattctctatcattattgaactgctaattttcttaacattcaatttcctttcctccaaaccatcatcagcatggcctttgatgatgtggttatcttattacagcactatcttccttgaacttgatgaacacatggcagcttttcagatagtttattagactctgaagagaaacctcaaattatcaggccttcagctgtgacccagattgctgggttgtatccatacctcattacagagcccttaatctccatataactacatagctttttccttgtccagaagtttctggtaggtctgttgactgaacatttgctttgggggccagactctatttcttcatctcttttcttgatcctgtaacaacaatatagttcttcgcatgagtgatctttcactgaatatctacagaagaaatgttttaaaatctggagatgggaagtagtgacggaaggctaatattaaacccttttatttagaagcatactttcatcattcattcaacagattttagcatctactgtgcactaggcatcatgtgttgtatgctgaggatacagcctaaactttcttactttgtcatacaatggcccatgatgtggctcctgactaattgtcctctttgttcactacacacctctcaatgactttatagttgtcctgcttagattattgtttttgttgtcttggccgtgtaacagattgccacaaatttagcagcttaaaagaatgcccacttattatctcaatttttctaggtcagaagtccaggcatgacttagccaggtcgtctgttaagggtctcacaaagctggaattaaggtgctggcaaggctgtgctcacatctggaggctcaacagggaaggatccacttctaagctccttcatgttgttggcaaaactcctttccttgcagctgtagaatctccagatccagcaacagggagagagagagtctctggtgcatcaaattttttatttatagatgcactgttaaaaggatcacctggttgggcacagtggctcacatctgaaatcccaacactttgggaaactgtggagggaggattgcttgaggccagaagttcgagaacagcctgagaaacatagggagactctatctctacaaaacatttaaaaaattagccaggcatggtggcatgtacctgtggtcccagcttacttgaggggccaaggtgggagaatcgcttgagaccaggaggtgaaggctgaagtgagccatgataacacccaccactgcactccagcctggctgagagagcgagactctgtctcaatcaatcaatcaatggattgcctgattaagtctggcccttgaagttagtctccctttagattaatttagagtcaactgattaagaattttacatctgtaaaatctcttcattcttgtcatatactattgattagaagtgtatactcttgatagaagttatacactattgattaggttcctcccacactcaagggtgggaccaaagtagggcataactcactgtgggaggcatccaaacattgtttgcccacaggctttcataaggctggctccttcaggtatcattttaaatgtaacctttgtagagaagttctcccttaccattctgcctaaaatgggctcctcagtgtttgctgttttccttcctgaaacaataccctgtttatacagcacttaatgcagtctgaaattgctttgcacacttattttctgttattgtctatctcttcttctagatttcattgagcaaagagtgatgtctattgcgttcaccactatacagccaacacttagcacaatgctcagcacaaaatagatgcacaattaaatattgactaaatcagtaaatgcagagtccaaggcagttatggcctcaaggagcttaaatgcccacattacacaaggtgcatgtttggtcatttttttctggttcaacaaagtgcagcagtgtcacaggtcttcagtattcagcctgaattcacctgctggtactcctgttttataatgtggatgttacctgagggtcacagtaatctttcaggcataaactttccttctgaccacactcaatctgtctgttccaagacaaggttgatcaaagagggacagaaattaaccatgtcttttcaaagtcatacactgcccctagaagtcattagatattcaagggactgccagttttaagtgactttgcttgccagatgtaccttaatttcagcaatcttccaatgtgaaaatacatcaatacatatatactggccagatgtagtggctcacgtctgtaatgccagcactttgggagcctgaggagtgtggatcacttgagacgaggagttcaagaccaggctgggcaacatggtgaaatgccgtctctacaaaaaataatacaaaataatttagctgggcgtggtagctcacacttgggaggctgggatgggaggattacttgagcctgggaagccaaggctgcagtgagctgtaattgtgccactgcactccagcctgggtgacagagcaagaccctgtctcaaaaaaaagaaagcaaaaagatgcatatactcagttactagggacaaatttagaggcattaaagatgtggttggtacagggccagagggcaatatttaatttcccagagccacaattttctgaagaccccatcgtggtttttcttacttctctatcacttgtttctagaacacatggccagatatttctatctgactgcacctgctgttaccaagatgctaacagcaatggaaagtagaaattgagagacagtgggtatcctgcatctaaggagcagggaattgggcattttctatgcagccttcaaaactgctatagacatttcagcaatctctttcctttgttgccaaaatggattcataagtatgctcatttattcaaagtcttttcatatgcattgagccacaaaattgtaatcagagatgttaaagaggtatactttcagaaagatacatacagaaataatattttctgcttttttctaccttttgccaaacgacaaaatctatgataagccatctagcacagccttgcaaatagagatattttactagcctttgaacacgtttcaccagtccagattccccatgctaataatttgaatttttcttcttccaacatgcagcctttttgtttcctcagtgattcagacctaaaattagcagaagcttgggtagtggagtatagtgtattgattaaattttgttgttagccctttgtgtttcaatcctttttttttttgaaaatatgaataaaatacattaattccctttccttgatggctagtgaatgattctacatcattcttttagagtgaactgttagtggaggcttcataatctacgtcctgacctccagtttggacatcaattatacctaccaagtattaaatacttactatgtgccagacagtaagcctaatactttatatgcgtcatcaaatttaatcctcataacaagcctttaaagcagacatttgtacctacattttagtaaagaagctaaaaggggggttgtacaatttttttccaaggtcatacagccagtcagcaacaaagcttggatttgaactcaacatttcaagacttcaaagcaagctcctaagtagtcatcttttccatagagaagattttggagattaagtagaaagtttattgatcctgtctagactctaggaaggtggtagatatgtatgtattttgctaagtcttttatgaatctcttttatttggtctgctcttttttcccctaaaatttgttggaggaaaagaaagcttagttgaagactcaattctgtatattggctaagaattattttaatggacgcatctattcaatggagactacttaggtttgtttgcttcgctcatttacgttctattgtagcaatccaagtgtttcctgatttaatttttaaaaacatagttaacaaagccctgcagtcttcagaggatggttgaaggatagggaatgcttgtttttcttatcttgtcatgcttttgtgtgatctggccaattggatgacctgaaaagtgtagctatttcatgttgtttcctagctgggcaaaatttttaaaaagttgttctttggaggaagaacatacaacatcatacataaaattccaaattgcaaagcttttcagttaataaataaactaggagttggtaaatattttaggctttgtgaaccctgtggtctttgtaacaactgcttaattctgtcattgtagcgaaagcagccacatataatacataaggtatatgggcatggctgtgttcttgttaaactttatttacaaaagcaggcagctggcgtatttgactcaagggctgcagtttgttaacccctaaattaaataattatcacatcataacagcaataattatttactttcaaaaaattattccatggatgtaagatgttaccttttccacccaaaagcattcctttttcttaacagcctttctaacatctgttattttttgactttttaataatagccgttatgactcgtgtgagatggtatctcattgtggttttgatttccatttctgtaatgatcggtgatgttgagcttttcttcatgtgattgttggctgcatgtatgtcttcttttgagaagtgttcatgtcctttgcctactttttaattgggttgtttgtttcttataaatttgtttaagttccttatagatgcatgatattagaccttgtcagatgcatagtttgcaaaaattctccccattctgtcagttttctgttttctcttttctctgttgatagtttgttttgctatgcagaagctttttagtttaattagatcccatttgtcaatttttgcttttgttgcaattgcttttggtgtcttcatcatgaaatctttgccgtgcctacgtcctgaatggtattgcctaggttgtcttccagggtttttatagttttgagttttatatttaagtctttaatctatcttgagttaatttttgtgtatggtgtaaggaaggtgtccagtttcaatcttctgcatatggctagccagttatcccagcaccatttgttgaatagggaatcctttgccattgcttctttttgtcgggtttgtggaagatcagatatttgtaggtgtaaagtcttatttttgggttctctattctgttccattcatctttgtgtctgtttttctacaagtacaatgctgttttggttactgtagccctgtagtatagtttgaagtcaggtagaatgatgccttcagctttgttctttttttggtaggatttccttggctatccaggctcttttttgattccgtatgaattttttaatatttttttctagttctgtgaaaaatctcaatgatagtttaataggaatagcattgaatctataaattgctttgggcagtatgaccattttaacaatattgattctttctatccatgagcattggatgtttttccatttgtttgtgtcatctctgatttctttgagcagtgatttgtggttctccttgtagagatctttcaccccctagttagctatattcctgggtattttattcttttttgtggcaattgtgaatgggaattctttcctgatttggctgtcaccttcactgttgttgttgtaagaaatgctagtgatttttgcacattgatttttgtatcctgagactttgctgaagttgtttaccagcttaagaaacttctgggctgagactgtgtgggatttatagatataggatcatgtcatctgcaaacagggatagtttgacttcctctcttcctatttggatgctctttttttctttctcttgcttcattgccctggccaagacttccgatacagtgttgaatagaagtggcgagagagggcatccttgtcttgtactggttttcaaggggaatgcctccagcttttgcctgttcagtatgatgttggctgtgggtttgtcatagacagctcttattattttgaggtatgttccttcaatacctagtttattgagagtttttaacatgaatggatgttggattttattaaaagccttttctgcatctattgagatagtcatgtggtttttgcctttaattctgcttatgtgatgaatcacatttatcgatttgtatatgttgaaccaaacttgcatcccaggttgaagtcctacttgatcataatggattagctttttgatgtgctgctggactcagtttgccagtattttgctgaggattttacatcaacgttcatcaagaaaattgccctgaagttttctttttttgctacatctctgctaggttttggtgtcaagatgatgctggccttataaaatcagttaggcaggagtccctcctcctcaattttttggaatagtttcagtagaaatggtaccagctcttccttgtacagctgggatagtacccatttaataaggtggttggtgctagttattattagctaccattaattaatcaaattctcacatcttaagaaagttcctttctaatgaataatgaagtatagggtgggctggttctctggaatcagttattgcaacaattcatcaaattgtgccagggaacaatctgaagaagtgccttcaataagtatacaatgcaatttgaaggaataaaatccatccacaataaattctaactgttaaaaagtcaatatgtaaaatagtagacaattgtaatatatagtggcagtgtgaatccaggcttagctatttattatctatgtaacctttagcaagttaattaacttttctataaaacagatattaataactatcagatagaaataaggtatgtaaggagcccatcacatgataggaactcagtaaatgatagcctgggttggtgatggtagttagtggcatggtgataggggtagtagggggcatggcagagtggtataagtttcaacagctggagcactttagagctatcagataacaatggggtttgattggtcagctgctgcttcacagagaaggtattaggtgagctgggtttgaatgatgaagaaattgtttaggctgaataaagagagatgatctgagatgtctggtatcttcttttacccaattatagaccaaagtagagacaaaattgtatcataagtgtaatgtggttgaatgaaataattgcctcaattctttgctactgtgtattaaaattaaacaccctaccatggctcatggggcattaagtgagcttctcaaccccttaactttggtaccagccatcatgcttgctttgtgagtgggccgtcagcagagtaaatgagcagaggtcttgagatgtgcttgtgcacatggttttgctgccattgcactttggggatcttccaagagaagaccatgccctatgcagttgttactcctgtagcctgggcctctgcatgatacaaatgaaacaaatctaactgaactcacaacctggagccaagcccagctaagccaactccgaagcaacccatagtctaaaacctacagccatgctcagtctaggtcaacagaaccccaatcagttcacagacccatgaacatggcaatcaacatatattagtgtaagtcactgatttcaagggttgttggctatccagcattattgtgtaaaatagcttatgaacacaaacagcatttaaaataagtaagcattatgagtagtagatgactagtaagatacaggcataactacagtggggttctagtattaactaccaacctctctttactgtggcaactgtcctaatcggaaatctcttcctttgtctctttcattcactgtcttcaacctaaattgtccacttttctaaactatactggtgtgtttgctttctggcatcaatgctgatatgctagctttaaaagactgcttctttgaaattggaagtgaggagatgataagttggctgaggtaaaggaactcaagctaagtagagttcctcattattcaagagtaagggtggaatctgagtagattttggagctggacaagagataagaagtgtgaaatccttatgtatagggaggccaaaaagatttaacaaggatcattagaaagcggcaaagcccttacctttataagggatgtgtttattttactattgtgagaatacctgtatgggttagctgttgctgcataacaaacaatccttaaactcaattgcttaaaacaagaaacatgtgttattgctaacaagcctatacatgagctgggtagttcttatggtcttggctgggctcacttattgagtttgttgtgtttgttgtcagctgtgggtttggtaggaagctttgttctattagaaggccagatgactatggattgatctaggataacttcagttggaatgattccacaccctggactttttcacatggccattggacagggttctaagtaaaagtgtgaaagtacaaggactctggaagtcttagttcagaactgtcatactgttgcttccactgtattctattggcaaaggaagtcacaaggccagctaaaattcaagcgaggagaaacagactccatctcttgatgggaggagctataaattcatattgcaaaaggtgtcgttataatcagagtggaagattatggccacttttgaatctaccataatttctcaaactatgattattgctgacatgccctggcataaaattgtttaaagccaatatatgcccaacttattttaccaatttattttagtaaacagtcaatgttttattataaaataatgttttctattgctacagtaaataaaaccactacatataacatggaattaagacctgaaggtaattgacctctcctaatgaaaaaacaatcattttttaaaattttattttattttattttttgagacggagtttcactcttgttgcccaggctagagtgcaatgctacaatcttggctcactgcaacctccgcctcccagtttcaagcaattctcctgcctcaggctcccgagtagctaggattacaggtccctgccaccacgctcagttaatttttttgtacttttagtagagacggggtttcaccatgttggccaggctgatcttgatctcctgacctcagatgatccacccgcctcggcctcccaaagtgctgggattacaggcatgagacaccacacaaggcatcaattttttttttaatgtgtaagtatttttgttgttcagagattgttagcaaaagtagaaacataagtccaatcatgcttttaattggcagttttgagagtcactagtttgttatttcacatatctttcagaggaaagaacatattttctctctgatccttttgtcatcaagaagtactagctacttcattatgtcactctgaaatgggcaggcactgcttttccatcttaaaatgttgttttgattaccataaaatcagcaaaacctcatagaaacgtgagttgagagtgaaaataggtgtgtaagactggatgcaccattaatgataaaacaacattcaattgtgcacttattcaatgtgaattgagtgtctatcatacaccagacactgttccaggaactgaggatatagcagcaaatgtaacagatgagatttctgctctcaaaaaactgatgtttaatgggcaaaacaagaaaaaaaaagtatattatgtcatataaacagagatatgggctataaagaaaaacaaatcagaatgaggagacagaggataatggtggtatttgagattatgtagacagagaagtctctgtagggtttgtgacccttcagcagaggcctgatggaaatgaaggaacagcctggggaagatcatacctggaaaaggaagtgcttttgatgaaacaaagcaataagcttggttcaaaggataccaagacataagatcagtgtggatggagcacagagaccaaacagaaacggaaaggaagtacattcagaaggctgggctatcttaggccatacctcagagcttggatttactccaaggattataagaagctcttaggtgtttacgagtgagagactgacagatctgatttgcccagtggaaggaaagatgagaatctatagaatcttgatatgactcttctgtttacgttttcttttttttgctttttttttttgctgtaagagacagggtctcactctgttgcccaggctagattacagtggtgcaatctcagctcactgcagcctctacctcctgggctcagcaatcctcctgcctcagcctcctgagtagctgggactacaggcatgtgccaccacacctggctactatgtttttgtttttgtttttgtttttaatttttgtagacagtggatggcactatgttacccaggctggtctcgaactcctggcctcaagtgatcttcccaccttggcttcctgtatgacttatttacttagattgtgggggttatttttgtgtgtgtgtttgtttgttttgtttatttttttagatggagtctctctctgttgcccaggctggagtgcagtggcgtgatcttggctcactgcaacctctgcctccagggttcaagtgattattttgccgcagcctcccgagtagctgggactatagcatgtgccaccatgcccagctaatttttttgtattttaatagagatggggtttcatcatgttggccacgctgctcttgatctcctaacctcgcgattaacctgcctcagcctcccaaagcactgggattacaggcgtgagccactgtgcccagctacttagattttttaagtttaataaatctgtagttcggaaatagaattgttcaccatggtatctggatttctgcaagttgtacatgtatgcaggatatagtaagaaatccactagaaagaaataaggacttcttttcatattctagcattgtttcctcagtctttctatctaattcagtctaacttcttttaaagaaacaaccaacataaaggtggaaatttaatttttcctatataatgactcaacactttccttaggtttattctaagtatttgtttctttctggagtaagatagaaagttgtagaatttatgggtcaagaatgtttattcaagaaattataaaaaatgcttatttaaaaatttgcctactaggagaattgcatgcaaactgccccagatgattgtttaagtgtccaagatttgctctgtggatgtctcacctataaatcatattttaaataatatgttcatgtggttaattctttatgaacctactggaattaactgagtttttaatttgtttaaaaaataatgttttggggaaatggtatcaggtcgtgcagtatctttctcttcatgctaatttagattttataccaagttaggcagttggcattattttatttggtcttcacagctctacaacaaagcaaggagaacatcttcctatttccccttaaagatgaggaaaatgatacctggacaggtgaaggactggctcaaggtaacacaggtatccttggaacttgaacccaacctgtcaacctccacatgtgaatctttgcagtcttgtggtacttctcatgcctcatctctaaaactgattcccccttatggtaatcagggagatcagttgtatcagttagatcccactggtctagctgactgtattataatagctggatatagtataaactgctataacctaagagacccggagagctttattcttctgtgatgtaaaagcctgagctagtagttcttcaatttcattacactatcatctcctacagtatcatctgtgtgcatgcaaccaaagctgtctcaccaccaacacattcatattcagcccaaagaaaagaaaaggtggtagggataggcaagatgcttccttttaaggatataacccagaggctgcactcacctctgctcagatcccattggcaagagctcagtcacatgaccgcatttctttacaacaaacctgagaagtgtagttctagctgggcagctatgtactgggttgaactcttgtaggggttgagggattcaagcattgaaaagggagttaaaatggatactagcacaggcttagcagtctccaccactttctggattccttattattatataatatttaagacatgcaaaatgatacctaatatagtatcaatacctgtgtacctgttacacaggttaatgaataaatgtagtggtgcagttgaagtctccttccctcaatctcccccaagcgcagagtaaccatttattgctttgctgttaatccctttcttacatttcttaatactttcattactgaaatacatacacttaacagatctatagtagtgttttgactattttaaatctttatatacatcatattgaactgcaattttctgccactgcttttttgactcatcattaaagtggagagattgatttatatttatgcatgtagctctatttttctgggtgatatctcaatatgaatataccgtcatttacttaatgaaataagtatttttttgctattacaaaaaaatgcgttataaatacttcttgtgcacatatataagaatttctccagggaacatacctagaagtataattactgggacataaggtaattgcatcttagttattggatattatccataatgtttcaattagttgtacattcccttgaatagaatataagtaactattttactctttacaaatagccatgtttcaaatgtaaaattttattacaatgaagcaactggatgttttctacattgctatggggaggataaagctcagtagttccatctcttggtaaatacccaagagaaatgagcgtatttgaccaccaaaagatatgcacaagaatatttgtagcagttttatttctaaagttagaataaaactaaatatctatcagtagtagaatggacaaactatggcatagccatacaatagaatacagtaacaataaattttaaaaagaaggacagctgctgccacattcaacagaaaagataaatctcatagacattgtattgagagtaaatgtccaaacccaaggagtatgtattctattatttcatttatataaaactcaagatcaggaaaaactaatctatggcaatagaaatcagaatagtggctacttcagagggaaaaggagggggcactgggtaagtactgatttaaaagtacaccagggagcttctgagatgatggaaatgttctatgtctgtaatgtccaaaatggtagccactacctcagtaaataaatttcaaattcagtttttcaatcacactagccacatatctactactcaggagccacatgtgacttgcggctgctaaaatggacagcacagacatagaacatttccaccatcacagaaagctcttttgtgcagcattggtctatatctgcagttgggtggtatttatgaatgggtacataggtaaaaattcgtcaaactgtgcccataaagctcgcccttttaggagtcattatatgaaaaagacacatgcatatgcatatttatagcagcaaaattcacaactgcaaaaattatggaaccaacctaaatgtccatcaaccaacaagtagataaagaaaatgttgtacatatacaccatggaatactactcaccgtaaaacggaatgaaagaagtaactcaggaatggaaaactattacatgttttcacttttacgtgggagttaagctgtgaggatgcaaaggcataaaaatgatataatgagctttggggactctggaggaagggtaggagttggggtaagggaccaaagactacatattgggtatcgcgtatactgctcgggtgacaggagcaccagcatctcagaaatcaccactaaaggacttatccacgtaaccaaaaaccaccttttcctcaaaaactacccaaattaaaatgtaaaaattaaaaaaattttgcctcatatgtatgcctcataaacaaaatatgcttcacaataaatatgcctcataaaatgggaaggaaactaagacaagaaagataaaaaaggaaaggaataaaacaaaatatttcagtgccttttaaatttgaattttgaatgtaatatatttcatgacctcaggagaaaaatgtacaagagctctgtacaaaagtatcaattattaagacttttaaaatggagattatttctcattaactttaattagactccttctaggtttgcagatttggcaaattattaaaacaaaatgaaaacattaggctcatctctcaggcaagtttcttcaaattctgaagcatccatagacgctcttctggcatctttgccttcattacatttctatgtaactaatttctgttgctaatttgattccatcatgaggtatcatttcaatcattttctctccgacaccagcatatttgcctgtgtagagatgggtgaccccaactgtgatcaaacgcatacagagtaatgagttaggttagagtggcctgatttctggtttatgaaagttaattggaagtatgcttaatctttgtcacagaactctgattaacccattgcctagtttacatttgcaagaaataatgcatttcagcatatagtctctagattatcagggagcataagagaaaagccatcgactattgtaggtcaaaatagtcttgcactggaaatagacacacaccctccatcacaactgaacagagcagaatgtgtcggaggagctcggtgacccttggcaacttcttaccctctctgaacctcagtctcctcacttcctgccttctctgactgcctgacagagtattatctcccttatatttgtttccaccataagacattacaaccacaggaaaagtacagagtacacatgtcctgtcatttagtaccaggtgcagcattccctctatgagtttatgagagtgcaaggtgcatgtttatttccttaggccattgcctggcctgcaggaaattgcaaaagaggtttgttgaataagtgaatcagtgaataagtgcatgaatgctatattgtctcttgtcgtgtaactttcccttgaaacatagtggtttgaaacaacacatgtttcttatcttacaatttttgagggtcaggaatctgggcgcagcttagctgagtccacttcttcagggtctctcacaggctgcaacgaaggtgttggctggagtcactgtcctcccaactagggctggatctatagccaagctctctcagtggttgttggaaggattcagttccttgtgggctgttggactgaggtcttcacttccttgccatgtgacactttccaacttgacagcttgtaccagcaagagagagtctgtttgcagtacagcagtcacaggcttttctaacctaatcactgaagtgacattccacggcttttgctgtatctgatttgttaggagcaagtcactaggtccagacctcatgcaagaagaagaggttacacaagggcatgaataccaaggcagagaaaattaggagcctgttagaagctacctaccacaaatgcctacttcacaagactatgaggaagttcaaaatgagacaatgtttgtgaaagttctgataggtctgccgtttgctctttctagattgttctttcccccttgaatgcactgcccctacatccttctcatctgttatgtttcagcttacatggctccacctctaaggggccttcatgatcccggagccatgcttttagcccagcgcccttttgttttcagcacgaattaccctttctttcctttctttcctttcttccttctttactttttttttttttttttttttttttgcatatgatcagtttctttcaccaggaagtcagctccatgagggcaggagctagcctgtctgattcactcctcattcaccagtgccttacatataatacacctcaagaaatatgtgttggcaaattgtattcctacctcacattgcaatttatttgctttgtaaaattattgccagttggagagctagtacttgtgatggcttttcagaagtttagaaccagagctgcaccagtataggggactctttcttgttctgggattagagagtatacatgccaacaaagcaaactaatttggggtacaagttattaaccacaatgacaaatgtggactacctcagtttggaaggtgagacaccattcacacacatgatactgaatttgagatttttgccatctccttaccttgccttctccagacttctttatacctccaaagtaggcagcagccttacacctctatgccatccctctcagctccaccctccactgcagaagtaaggactaaatttcacaatgctgtaatagccaccatttagtgagtgacagctacatgccaggcattgactaaagattttatacatgtccttcacaattctcatcacaacttttatacaggagactgaaatacagataaagtaaaatcaaaacttcagggccatcagaattggaaggccaaactaattcctctatgcactgtatttaacacccactcaccaagacctctctcctctccaacatagatttacaaagactaaagatgagggaatgagcatgtcttgtttctggtcatagttatatctctaatcatgtcaccttggacatgtcatttttaaacctgtgctaatcaatgtctttgaaagaggtctattagaatttcaactcaaactgctaacagttattggactgtcagaagcctgggcccaaatggccatctcatacatatgccaaattcctcttccattccaagccttcacactaaaatgtttcatgatctagaatatggtctttgtgcaattttgccagaagacgtcaggaaagtatgcaactcattggcaaaagtaacagctttgcaatggaagaacagaaagagacttctgcaggagaaagcagttttatttctcctgcagtgtctggtctcccagtctggtgcaaccctgaaggtaccctttgaaggagtggcctgcagaatattcatggcagaatgtttattggccccatcttagctcacagtgacccaagtcaccaagcttagaagcttagtaagaaatgagcatgtccctgcagtgtacctgccactccagctatattatccaaacataggaagtgagatagggtgaggagtatgaggggctgagaggagctcagtatttgactagaatactacccaaatctttcagctggataattcgatgttttaggggctgtgctgtgcattgtaggatgtttggcagcatccctaacttctactcactagataccagtagcataaccttctattggtgacaaccaaaatgtccccaggcattgtcacacatccccaggagatgtgggaggggctaaatcaccaccagttgggaagcactggaccggggtaggaatgtgacgtcagtcaggataggccagatatgccatagcaacaaccccatcatctcaatggctacaaagaagaccgtcatgaagtgacagaaggactctacttcacggatacttcacagattcacagtctacttcagagactctggctgatagagcagccaatgtatccaatatcatgaattgccatgccagagggaatagagtgctctgaaaggtctcaaaccagaaattaaatgctttatgccaaaagtttggtatcacttgctctcacaacccactggccagaactagactcactcaatacaaggagagctgagagtatagccttaccacatgcccagcagagacgagaaccagaaatacttggcaggcagcactaatggccaccacagatgcaaagaaggtctcccttccttgttgatgtagaatgagaaagtgttaaaggcaggatatacaaggttacccagcacttggcagaaaacaacaacaataataacattgaggtgatagtgactacaatttggattatgcttattatgtatcagacaacttaattctcactcaacaacccaataaggtaaatacttttattcttttcattttaaagattgtgaaattgagatgcaaaatgcttaagtaacttgcctaaaaccactctagtgagtagcagacctgagatttcatccaaggtctctctgatattaaagactgagctcttagaccccactttataaatcagtttggctggtgtgcaaaccaccttctctcattatggggctgaattagcaagtcatctcccctgtaacctgctctgcacctttgtggtttcagttaagggcatttgcaaatgccttctatccttccactccctgacaatttttcttaatggattccaccattcctggagcatttggaagaagcccttagtcattccattatgagggtgatcatgctcagagaaacaagtaaaatctgtctgcaaacattgagagagagcaatggctccgcatcaatttgggtcctaagaaaactgacacactaaatcaggtagtggagtcagcaatgtgaaccttttggatgctgtcaccaccccacttgaagtagatccagatgctaaggccaaggggttaaatacaaaagcatgtaatgatagaaaggattagcatttatgccaggtattagtataagtgtgcataatcttaagtagatagtgttaataccaccattttatagatgagaaaagttgtgaaaagtgaactaacgaaggtcacccagcaggttttttgagggattccggatttcattccaaattgcaagcagttatccaccctagtggacacaagaagctgcttaaggttttaaacacacttgctcatctctttctagttttccgccgcccccaagtcaagcttacaatatttattttaaagataatagagaataaaacacagatatgtttcactttcttcttcctttggttgaaggggttatctgagaatattaaacacaagcagtcaggctttgccaagaagcctccagaatgagataactcagtcacttatgttattatcattaagagaacatttacatttggaaatgaaacaacaatgaatccaaaatctccctcaagctccagctctagttttcaatgccatatttgaggtgggtgctgaagacctttggtaacaattatttgtgaaggggaaagttaaggaaatgaagatatagtcagaaaaaggaaaactgagatttggctcagtatcttccagaaaaattaaatgaatttattttaggaaaaagtgaggtgagtgttagatatagaaaaaattttcctaattaggttgtaaacagattgttaaaggtagtaaggaacatataacatccacctccctgcagatgttcgagaggaggacaatctttgctgggagaaacagcccagatggtagaaagaacatggactttgcaaacagacccttttggatttgagtttcagctctgtcatttattagattggtgcaaaagtaattgcggttttgcccttataattgcaaaaaccgcaattacttttgcagcagcctaaatattagctgtttgacctgggacagcgacttcgtgttgataagcctcaatttccccacttgaaaaataacagtaccatatgctctattggccttgtagagttataaacataatcaaagggtgcaatgtatatatggccatttctaatctgataagagctaagcaaacacaagtagaaccaaaattgagtttgtgtcatttcttaaaacctactcttgctcctgaacttacagaaaaagaacaagactatcagccagaacattttcattttagtgtcactctgggtataagtgagctaagtatttgaggggaagcttcatcagaatttccatttcctttatccaattcccatcagatgaatcacaaactctcagaatggaaatgttagcttctaagtgaatggtagttctgtccctcaagacaatggttataagaggcctcccatggttttctcatctagtgttgtattagtattattgtttgcaaaataattcctctaaatgaggaaaagccctacatctccgcaggtgcctccttaaaagggcattgcacactttcacagacagctgttgagaatgacagtttcttttgttgaagaggctacccattttagagtctgtgactattgctatggagacaactgcaaaatcagagaaaaggtgggtattgggcctgtaaaatcaacaatgctccacagatttctcaccaactaaacctgttcttacaaattagttttgcctattttgaacttcatataaatgaaattgtaaaatatctaccctcttgtgtctgccttctcttgattgacttcacatctatgagctttatttatattgttgcaggtaacagtagtttgttctccttcactgctgtgcagtattctggtttgtagtttgaagcttctagtttgaagctactatgaataaagttgttctgaaatactcctatacatgctcttcggtgtatgctagcactcaattctctttcttttgggtagaagcacaggaatggaattctggagatagatatctagatatctataaatagatactcagctttagtaaatagtgccaagaagttttccaaggtgtttttactaataagcacagctaccagcaatctaagacagtctaggtgcttcctgttttcacttccaaaatacaccttacccgtgtgatcttaaagcaatgacttctttttaaagagatgcgtgcaaaaacctgtacaagtccatgtaactcccaaatgcctaccaataccagatggaaacttgaatagagcaagaacttgactctgttgtggaaagttttactagtcttactgtgccattaagaaagaagaatttttgtctgagggtttattggttggtaggaagcagaagggttaattacttttggtaaatagtgtttttgcttcctttggctggaatcctttattattattagcaattgatcaatacacttaatgggtcactcaaagctatcgcatatcccctgcataaccagacactgagcaatcttggattcctgtaattaaagataaagcaaattaggtttcctagtagagataattccatgtctcctctagtgaggactgagtccatggcccctgacagaaggaggtagatactcaatccacctgatatttgtggctaaggcctgatctactgaggaactcagggttgttttcattcagtccaaggggtatgactctttagtctggaaccaaagttttattacaaatttgaatataggaaagtcaaggaggtacaaatccattacttatgctatgaggagaaatgaaggaaattcttccaaccagatgaattcaaaagctcttccatggacctaaagtggacatctttgtgcctgtcatccttcccaaggtggatttatgccaggccagagttaccaacaatagctgcagacagtgactgcccagaggctactcatccctccatccttcaattacccaaggatggagcttcaaaaatatctactgtgttcctccttcaccctgttgatcccctcatcttttccttctatgctctgcctttggtcagagtagcattcttaaccataggccgtcagcctcctcccttctcagtggtcagggagcaggcggtttgccaccatgtgatgagcctagtgtccaaagccagactctggcaggttctagcaatgtgaccttgggcaaactgcttatgactcaatgcctcagttaccctgtgtttgaaatggagagtggtgataatgcctgctagtaaggcactgagtgtcaagtgtgatcctgtagaatgccatgataaatgtttcccttggccactgctgccatgagttagggtgactcctctaaaacattgatttaggagcaagacctaacatatttttcttcagcggttagtacagacttgcttgtgagcttcccacatagtatgaactaagtaaataataataatagcaaatgtaccggtgtttcctgtataccagcaatgtctaaatattttgcacataataattcattttatcatcatacgaccccatgaggtgggtgctattatcattcttgcttcaatggttgaggaaactgagttgttaaataaactgttcacaatcacagagctaattcgtgcaagagccagggttcaaacccagagggtctagccctgctatactaacttttcctttgaacatttatgggataattgatccgggctgaagactattgttaggatttaaatgtacagagaaatgtctaaacctgcactgtccagtaccataatcattagtcatgtgtcactaatccaactttaattaaaatttactcaaaatagaaagtaattcctctatcacactggccacatttcagatgctcactagctgcttagggctgttaactaccatcttggacagtgcaggtgtggactattcccatcattcgagacagttctactagattttagatttttgataaaggaagcaagagagagaagttgaggttgggttttgaggagaagattgggaattccgaggctggtagtccagaagtatgggaaagaagcaaaggcagaaaactggaagtcttccaacaggcagacaggctggccaggccacctggggagcctggggctcactggcacagagcactctcactacagtcagacatgcctggggttcaaacccaggctctgtcaagaattagccgtgaaattcaagcagatcattttgcatctatttccccaagtgtgtttaagcttatcctgagaatagctgaggggccattggagggttttcagcagtggagaggtatgatcagatttgtctttttcggaagctatcttttgaaggtttcgtggagagcaacagagaaatatgagttggggaaatgaggatgctggttctcatgtgtgggcccttgggctggtgacagttcttggcagagttttcactgatgcattgctaaatgaggaaggtaaagactgtgtgtgtgtgacgcataacaccacatatatgagaataccaacagtcccagttgtactttcttgagaatgctttattatttggaaactaccgcttttctacttttttttggcactaaaattccttttgtttatgaaataatgttcacagtaggatagtaaatagtaggaatttttttatgtcattaccagacaaaattaaatgtatgtctgtgccttgattcatttgtttttaaactgttattgtttcttagtccatgaaatccccaaacctgggaacttctgagctgcatgccattgcaattgtgctcaggtgagagctgatgagttcatcagtaaaagggaggcaggtttgagagtgactgagataaaagctcgtagacatgtggatgaggaaaaaatcagggaggagggaatacaggaaaggtggtggtctccaaagagcccatggtgaatgaaagtgcagcagaggcagtcagtgaggaccttgagccctgctgcagcatcatccctgtttctattttgcacctgttttggaggagctcctgagcattcttcctgagtgcagatacatcaaggttaagtgcttgcagggaaacagctggcgcccatctcactgcaccagcaagccacaagtgcagctcccttggacacagaagtgcccacataaggccacctgaactgtgacaccctccacccagtgctcttcctccaccctgccttgggcatgtggccctgagacaaagcctctccaaggcctcccactgaattctgacctctctgagaacgtggctacctcagtgcctctccagacagagcccgcagaggcaggagaggaagccagcaaagtgtcagcgtgcagggagctgccaggctcagagcagcaggcttctcgcattttaagcagcatatgcaaattaaattagcaagggttccacttcatctcctgagcggctcagacacactccccaataattcccaagccaaactgacccagtttgaaattaaaatcaggtttatttttagagggatatatttccccttgcctcagtctcagtggatttttttttcctatttagcctgataaacatctgagtacattattcccagacctgtgtagtcctctgacagctacttgatagatcaaatgcatagtagagtctagctcatgtatattcagacagcagaggtgagccccacatgccctcttacgtgaaaggaaggctgtctacactgtgtccattttcctctacccgtctgcaaccttaaggctggcatcagggtccgctgaactggaaaagctttagagtttaagatgatttagagcctggtcacactcgggttcagcagtatctactggcgttcatcggagacctacaacatcttctcttgacaaaaatctagtcgatttgaattacctcctcgcagctgggtttaagaatgtttttcatcttagctaaaggcactgtacttttcccttgtagcactttctacaagaagttattcccataattgtgtggttaacatctgctcctttttcttaaaactgggagctttctgatggccccagcttgcaccctttaccatcctcaaagcctagtactatattaagtcctcaactaatgaataaaattagctgctagatcagtggttctcaactgggggcaattttgacaccaccaccttcctctcccagacatgtgtgagttttttattcagctgggggtaagggggtttttctactggcatctagtagaggccaaaggccagcatgctgcaaaatgtctcacagagcacaggaccctcacggcccccaccacgcacacagacacacccccacaaaaaacaattacccaacctcaaatgtcagtagtgatgaggttgagaaactatacgctggatcaatctgttcatgtgtggttatgcctaagcagggcaggtttgctctttcaattatggaaactattgggtcatacttttttggtcatggttggagagacaattgccagaaaagaagctgtttatcttagattttcctcagtggagcaaagatagaagttgatttactcaaaggcaaatgagcctgtgaaagcattgcagcaactcactttctggctccagcctccacctgtgtgacacaggatctcagccagtccctgagtctcccttagttacttctgagatgttcatgagatgttcatgagatgttcacttgggcttatatccttgtttatgaagccacttgagggtggtcttcaccacaccactgtggccactgtcctccataaaggttctggctcccttccgggatcctgtctgaagggacttccaaagctgcaaagccttgaggtgccctgcagcctttgcctcaccaagtcggcatggccgtcttccacagagaggtaggaagaagcccctctccctaattctgtgtgaaatctttgctcaacacaggccacagtgagcattctagagccagacaacctaagtgaaaattcagaggctgccccttgctgcttctgtgattttgcacaagatacttaactcttccaagcctgcatttcctcaactataatgacagtgccaaccccatcaggtggttatgagcactgaatgaggagatgcatgcatccttagtggagtttctagcacctgacagctaatatttgttgcgtgctttctattactgtggtgatgttcttatgtggttgtcattagcatcatgttttgaacccagactgggattcacaaccaggatctgacactagtggctgcatgacttgggcgattacttaaacttcccctgcctctgtttcctcatttgcaaaatgcggatttaaaatagtacctacttcacaaggttgatgtgaacattaaataaattaaattaaataatgtgcataaagcctttagcatagtgcctggcaatagtaataataattattgtcatataaattatttaaatgattattaactgaaaatagttaatgttttgtttggcttttttgttgaatctaagttggaaagatctgtcaaactagatactgacaatgttgtaaagcagcagaatagtctggaagttgtctgtttcaggaagcgtcacagcagtccaattaaagtgttttctgaatctcttagaaggcggtgatacggtggtctccaaatctgtgtgcttacctacccacagcttagagcactgaacttcaattttccaactttcctactgttgtctgggttcaaggacaaactctcctccacggtaaagtaatttcctccataaaatctgctcctgagtaaacctggctaaaatgcccccctggtgaacagtattgttaggcacatgcagttaggggtcctggcggttttctcaccaacaaaaatctcttgtgggagaatggtcccactatcctgagatcccagccgctctgatgagcagaagcactttatgccttctttcctcacacagagacctgaatgtctatttttactttttcttttttcttcttttttttttttaaaaaaaaaaaaaaacctgccgggcacggtggctcacacctgtaatttcagcactttgggaggccaaggtaggcagatcacgaggtcaggagattgataccatcctggctaatgcagtgaaaccccgtctctactaaaaatacaaaaaattagccgggcgtggtggtggacacctgtagtcccagctactcaggaggctgaggcaggagaatggggtgaacctgggaggcggagcttgcagtgagccaagatcgcaccatggcactccagtctgggtgacagagcgagactctgcctcaaaaagaaaaaaaaaaaaaaaaactaacaatataatggacaatatggaaagaatggtgattaacaatatgtgggctttgaagtaaagcagaatcaggccccatctcttacaaacaagctgattttgcataatttgcttggcttccttgagcctaatttctccatctgtatactgaaattaaaaatgtttttccctagggccaggtgcagtggctcatgcctgtaatcccagcactttgggaggctgaggcaggagggtcacttgaggccaggtgtttgagaccagactggacaacataacaagaccccatttctacaaaaaataattttctaaaaattagctgagtgtggtacatgcatgtctgtagtcctagctactcaggagactaaagtgggaggattgcttgaggctagaagtcccaggagttcaatgttatgatcttaccactgcactgcagtctgagtgacagagcgataccgtgtttcaaaaaaaaaaaaacaaacaaacaaacaaaagcaaaaatgcccccctgataccattcctgcattcttgtgaagttgaaatgaaatagataattcctataaagcctatatctgacacatgttaacttttcaacaagtttttatgattgttattattgttgttgctatctatggttactttttgattaaggaagtttggattcagctcttccatgagtcagggtaagctacattgtactgtggttacagttcaaactctcagtaccttaaaagagaagtgtttatttctttgttgtgttttgtgtccatcatcagttgacagagactctgttatcctatgtcccaggctgatggtgcagccccgttttcaaatgatgctcccgctgtgccagagcaaaagaaagctctggagggtctttcaccagaaaatacagctttcagcctaaaagggacacagagcacttctgttcacaactcataggccagaagtagtcgtgtaaccccaccaaatcccaaggttaaaagtagtcaaatcctaccgtgctcccagaaggtggagagctggaaatgttttcctaacaactgaatgatgaatgaccatcacggccatttagttggtgtaatggtaggatgagcctttccttaggcaatggctacatttttcaggatgtatattttccagggatgcattacccttatttgcagattacccaattatttatatgtaacaaatccttgctaaaggtgggcactgtgcttggcactgagaatctaatggtaagcaaacacaggtaaagtccttgcactgcataccatacagatcattgaggaagacacaagttaatttaaatatcacaccagggagtttatagttgtacactgagattaaaactctgaaggaaagaaacagagctctgtgacggaatctgatatagtctgtggggtcaggggtactttctcctaactggtgcttgagtatggtatgtaaaggatgagtaggttttcactaagtgaagtagggagggcaggagaaacatttaggacagaaggaacagcatgtgccaaggccctgggccaggagagtgtctagatgtcacaggggttgaaagaaagtctgtatggctagaacagggcccaggagggctatgataaaagacagtgccagaaaggcaggcaggggctaggccatgcagatcccagcttaggtctcttcaggatctgagtcattatctctactgatctgaagcctttgagggactcagctcatttaagggattgatatataaacccagacggcatcaccaggacctctgaatgcacaaaggagtccctgtgtttggaaggccttctgattccttcccctcacgaaaaatgttctatagtcacaggtccatactttacctgtgacattttaaagcaaatatcttcagcctgtctccaaacccaaagcccggagccagcttctgtacaacaaatgtgtccctctctgtttgcacttctcacattcaaggaggcctcccacggactctgggaaggaaatgtgatatccacgcacagcagtgccactgcctgcagagagcaaaatgctcctgatgcggctgacaatatgttccctcctgggaatgtgggttgcactctgtctttcagaaatgtaggattagaatgtgtcatctccttaaccttagaggactggagtttatagatctgctgccaaactgactcaacctactgagcccaccccagtctcatgtctacacatgaatgagaataactgagcaatagttactcaactaggaaacatctaggattctccaactggcattctaggaataccacctggctatgctatagaagacaagaagcttagattttgccctttggacctgtacagaaaaacagcaagttctctggtcatttctctttgagttcaaagataacagtctagaaactctttacaggtagaaattgtttgacctacgtagcttcagaagaaagttcctggttcatagtggtctctcaaacatttacatgagtagatttttttaaaaaaatgtattcattcattcattcattcaccaagacatcatgtactgagcacctacaatgagtcagacatggtgctggaaaggtgataaatgggttcttggcactagggagctttcattctgctaagaaagcacagataataaacatgtgactaatgaaataagattgcagatggtagtaagggctatgaaataagtaaaagaagacaatagatagaatgtcaagaaaagggaggagtgatttctttagctagagtggtcaagagaaaaaaaaaattactctaagatgtgacttatggcccaagaaataaacattgagaaggaggcagccgtgagctagatgggaaataagtttccaggtagagggaacagcaagaagaaactgagtgtgatgtgttgtgggaacacatgcgacagggaggatggtggtaaatgatgaagtcagaaaggtgagtaggatctaatggggtcaatcaggtagttaatgatggtgagtttggatgcaacaggacaccattggtgaattttaggcagaatggtaataggatttcatttatgccttgagaagatcaccctggctattttaaggaaactggtctgaaatgtggatgtagggagaccaggtaggaatctgatgcagtgagagatgatggtgtcttgtgatattgagaagctgtcaaattcagcagaacaatatggaaacaaggccaataagaatgctcaactagatatggaatgtgaggggaaaaaggaaataagcatgattcccaggtttttaaatataagcaatgggttgaatgtaggtgttattttcgaagatgagaaaggaaccggtttggaggagggcggagtcaaaatttctcttttgtgcaagttatctttgatattttgattagatatctaagtggacaattaaatatacacggagctcaggaccaaagatatgattgggttattgggttgtgtaataaatgctaaacaccacaggactcatttgtgttgttaccagaccatttggcatttatctttcattcaacaaagatgtgtttaatacaacagcatgtgattctgtactgagccctagcagatgtgatttcatcttggctggtgatgagctagtaatccaactctttgttggttgttttatctgtctagtcttcaatgtagtgggtgtagtgagtgagaggtgaatgatatggagatatttgcatatagaggaaaattacaaaatcaatctattccagtatgtagattttctgtggctgttgctgacagagaaaactgccctgccaccaagaagttatgaaataaccaaaaattaaaagggtggcttgaatggtctacatcgtgagcttcactagtcttttaattatctctgccttcctaacgttgatcttatgaaccattaacatttggagaatctgcaggtgtaccaccaggaaagtagaaaaactgttccatttgggataggaacactagcttttcaagatcttgtgatgtctccaaagtatctactaattcaaccaaaaaaaatcagtcaaactacatgataggcgttagtcacaatgagcagatgatggaggaccgatatactcttcagttaattggtctgataccccataaatgtgatgtaaggacaaagatcatgtcattgctctgtcccaattctgtcatttttttaaaggtttggttttgatatagacagtaaagtcatcttgtttgggtgacagtatctaatgtaatgccaccttcagaaaagggcaaagtgctttgatctgtcagaccatgtagcaagcaaatgatatggaacattctgagtttgcataaaggtctgactttacatttttaaaaacaaaaccaagccaaaactatcatttaggtctgaaccctaagctttctagatttttccagaaacttttctaccattctctactaaatctagatttattatcataggccaggcacaatggctcacacgtgtaatctcagcactttgggaggccgagatggacggatcacttgaggccaggagtttgagaccaacctggccaacgtggcgaaaccttgtgtctaccaaaaatacagaaattagctggtggcaagtgcctgtagtcccagctacttgggaggctgatgcacgagaatcacttgaacccaagaggcaaaggttgcaatgagccaagatcatgccactacattccagcctggacgacagagcaaaactctgtctcaaaaaaaaagtgttttttaaaaaatagatttatggtcggatgcagtggctcactcctgtgatcccagcactttgggaggctgaggcgggtggatcatgaggtcaggagatcgagaccatcctggctaacatgatgaaaccccgtctcttctaaaaatacaaaaaattagccaggtgtggtggcgggtgcctgtagttccagctactcaggaggctgaggcatgaacccgggaggcggagcttgcagtgagctgagatcgcgccactgcactccagcctgggcgacacagcaagactccatctcaaaaaaaaaaaaaaaaaaaaagatttataatcattataaattgaaatgtggtaccacatattacaatctattattttcttgtccacaagcaagggataaacgtgaattagcatagtctgatggtattccaaatgtcatatgtggtattttaaataactaagggaaatgtcttaaatattatttaaggactttatctgcaagtattatagtatttatgatatttaatgtgcatatgttaatatgtggcaatgttttctaaggttcatgtaaaacattttttaccaaaatatggtatcttttgtgactcaagcaaatgtaatataatgtttaattccccagcaaaaatatatataaatatatatttatatataatacagatagatagatagatagatagataggtagatagatagatagatagggctggccaacatggcaaaacctcatctctaccggaaatataaaattagctgggagtggtggtgggcacctctagtcctggctaaatacctcacatgtgctaaaataaagagaatagtataataagccccatgtaggtatcatccagcttttatcacctaacaagtcatggtcattcttgtttcatctttgcaccccccattcttccatcctcagatgattttgaagcagatttcaaacatcatgtcatctgtatttatttcagcatgtatcttgaaaagacagcacttttacaagaacaaccacccatagtcataggcaggaaaccgttatgatgcctataacaaatttacaaacatttcttatcatctgctatcaaatatggtcacatttccatgtttttgtatatatctggaaattttttgaaactttgtttaaatttaaattgttctctgaatgagcttcatacatagtgaattgggtactatctctctcgagcctcttttagtctataggtagaaacttaattttttttaaataaaacttttactgaccccagaaaaaatttgtgtcatatgtggcaggagatcatcatcaataatattaaaatgacagtaatattttgctcctaggcatcttttctttaggagtctaacccaatcatattttgtttatatctgtgaattttgccaaatagtgtttcttgtttagctaactttttctgcccttctaagtgagtaccttatgttttgaaccacctgatactttgcaggcaggcttctttctatgtcttgctttacaccaaatgaccttcctcccttcacccacactgctccccaccctcatgtcttccctttgcctttggaatcacagccgtgtggtaattggctttcccatgatctttctggcctccatttaccaaagctaaacagcagttccaaaacagtaagtggaagggaagagtattcttctaatgtgatctctccacattagaaacatgtacagtacccagtcacaaaaatgaagaaaatgagcaatgaattaaccatgatgcaaagttatgtaatgtatatataattcctttattatgaaaatgactttttaattcaactgctttgtaacagagaaattaatagaaactaccaacatgttttgcttgcttgtctgcttgcttgcttttcttttgtaccaactagctgtgaccttgtttacattacctgcatttaagagtttcttggtattgaacagatgttttgtagttcccagctccttaatttataagttggatgagcctcaatggcctcatctataaaatggggctaataatactatataaatactgaggttgattgaaccaaaggtcgaggtattggaataatataaagaatatagagaaatttttttaaaaagctgcatatgaggttcagaaaaggcagaaattcaggtggctataaggctataagtagcaggaatgaatgatctcagggcacaacccctgagaaacatcagctccaacaggaaagattccaagtccctggagagtgacactgaccagggctgggttacagtatcactccttgacaaggctccttaatggacaggtcccactgatgcagggcaggcgagccccaaaactgaggcttagcccaggaggggtcttggcttcacccagaaaagaattcaatggcaagccagtggtgttaaacagcaactttaatggaagcggcagggtacagcagcagcagagcagggctaacgcacaggcagtatgcccagaatagcagcccaggggcagttctgcagtcatatttacacctacttttaattacatgccaaataaggtgtggatcatgcagagatttctagaaaaagttggccacttccaggtcattgccctgaaaaggggtgataactgccaggtgttgtcatggcaatggtaaattgacaaggccttggtgggcatgtcttatggagaggtggttttgtctcttccttgtttcagccagtcttcaatctggtctggaccctgagccccacctcctacctcaccgacacaaataaatacagtgaggaagaggtcatccccctgaaagaaatggtagtcctttaccaggagaaggagaaatggtctgggcaacaaaaaaaccaaaccaaaacaaactcccatcacattatctcacagagttttaatgaggattaaagaagttaatacataatgttcacaatatctggcatttggtaaaagctcagcaaattgtagtcagtattattattacagtataaaagagaaaatgagcaacaattcagccatgctgcaaggctatataatcattagcaattccttcaccatgagaaagtcctgatgtggttactctagaattctcagaattggccaggtttgaggctggctcatttgcatccattaactatatggccttcagtcttaacctttctggcctgttcctcctctcacaaaaggtggtaataataccaagctaagtcagaggactgccctagagcacaatttatgaccagttgtcaaagtctcagggaaatccacagattttagtgccaaacatctccagtggaatcaaagggaagaactgaggcaagttacacacaaccatgtttcacatatttttaaaagtgcattttatttataaccctgcctcattccaaaaggatttttggctgctcatattttatataaatagcaaatgtttcaactcttagctaatcaaattaaggatgcaagctggagaaacgacattaagaggtgaacaacaaggcttcatttttaattcatcatttaagaaacgcatctataacctaaatagaaaatgagcaaagggcataaacattgaataagtacaaacatgcaacaagcatatgaaaaaagtttcaacattgtgagtacacaaagaaatgaatatttgacagcagtatcagatttttcgccttattggaaggatttaaaataaagactaccaatatccgtgttagcaagggtgcaggggacttgtaccctcacaccttgctggggggaatagaaacaggcagtctttctggagaacaaataagatgggatctatcaaaattaaattaaaaaataccatttgacccaagaatttcacttctagtagtcttctttaaagaaatattcatatgtgtgatcaaagaaatatatacacaaatatacattatttttaatagcaaaaaaatttaaaacaattaaaatgccatcaattaagttgtttaaaattttcatacaataccgttgaaattttgtgtagtcattaaagaagtgtatatatctcctgaaatagaaagatgtcaaaatatatattttaaagtgtaaatactaagttgcagaaaattggcagtatgatcccattttataaatatgtatttctagatgttttagaaggactgaaaagcttttactcaggattgtgttggttttttaagttgctgttgagtagccacgatgggattagtgaggtaacagaaggatactaaattgttcagtcatgcatatagctcttagaatataaagcaataccatagatgaatgaatcaataaacaaacaaatgaaatgagcaaacctgctacaacccaaaagatcagatcataaccaagctgctaggagtgttgacctgaggggagacttgggattcagttttacctaccagtttcagctaccagtggacaatcacttcagccttcctatctcagctcccttgcagggaaaatcaccaagctggccaagctaatcactctcactagctaaggctcataatccagaaaaatagcaattagacaagaacttgaaactatcttacacaaagaattcaggggtattttggaggagtctatgaattatatttaggaggtccatgaattcaactgaaaatcaaattgcatctttatttttactaacctttacctgaaatgtaacatttcattcagttatgaatgtaggcaacaaaccaaaataatactagcagaaacatttatatcgtgttaacaattgctgctgataccttgaaacactgtttacacttatcactataccagattaccatagatattaggtttgttgctagatcttgtaatttaatgaataaataaatacctattattaaaaatgatgtttaaaattattctgatatatgtatatcaatagaattggatgcctttataatatcatatattttatgcattttaaaaccttacactgaaaagaggtctataagctaaataggactgtactgaggaattcttggccccaaagaaattacaaatcccaatgctttgctttttattgtttgctttcctgttacagaagcaacagtgactggcttctgggggaggggcacaaacctcacaaaggtagcaattcactgggggatcctgaaggaataggcacagaggaagtcataagacaggaattaaaagaaatgataagcacggggaggaggcagcgataataagctccggttagcctgagtgtttaatttcctctttgctctgataattaatttaattaagattaatcttactatttcctattctttatcacctcatgaagaaattgcccaaagacaagttcacaaatgtggtgggaggtggcagaggtgggaagtccaatgttctagaatctaaattggtgactcggagccctagctgtgcatcagaatcacctggggagcttttaaaactctctcagtgggagggaatagggataatgtatattactgactgagagaggcatgagggggccttctagaaggctgaacatattacacatcttgatctggcctgtggttaaatgtgtggatccatatataaaaattcattgacctatatatttaagatttgagcttatgaggaacgtgaagcatggagaggttcggtaactttcccaaggtttatctcagattttttttttaattatatctcaactttttaaaaaaatagcagttttctggccccacctctgaagagtctaatttaattgtctgggccagggcccaggaatcagtatttgtttaaaaacacctgcccctcccccaccccagttgaggccagcgtgcatccaggattgagaaccacctagacgcttcatgagatggaatcattcactcagtcaacaagttcacggagatttcagtgctaagtagtgaggacagagagaaaaataatctctgttctcaagacttttaattaacggaataaagtaataattactttattagatattaacatagatattaacatagaacctggccaggcacggtgactcatgcctgtaatcccagcaatttgggaggccgaggtgggcagatcacttgagttcaagtgatccagtctggccaacatggtgaaaccctgtctctactaaaatacaaaaaaaattagccaggtgtggtggcaggcacctgtaatcccagccactcgggaggctgagggatgagaattgcttgaacccaggaggtggaggttgcagtgagccgagattacaccactgcactccagcctgggtgacagaatgagactctgtctcaaaaaaaataataaatacataaataaaataaaaataaaacccagtggtcctccatcttcagtgtccatcctcagaatcacttggggagcgtgttgaaattatggcttccaggctccacccagagattctgattcaataggtctggactgaggcctcaggaatctgcttaagggaacagtaaataagctaggtcgggcatatgcctaacgcatagtaggagagcaacaaatagctactgaaggtaggagttgctgggccaagtgctttgtatacagtatctaagtgaatgataaacaacaacccaataagggtatgtactaaagaaaactcacaggaggaaactgtagattggagacattaaacaaaacaaaacaaaaatattgtccaaggtccaacagttaataaaatcagggagtggagatttaagcacatgtctctttaattctccaaaagtaaagccctgcaccctgaaccagagctttgccacacattttctacaattctaagagtctacataaacttttcaaagtctgatcacgcatgaagaaatgtggttttgttctgcttgaccctgaggaaagttagtgttaggggaagagaagagggagtgacccaatttgtcagattattgcttgccacaccctttgtttgagccagagctggaggtaccctaaatgaagccagtattaactgtcagatgttgggacagggaatctagaagctgttgttagaattaggctcttataagtaccttcaaatgcctttgcagtgaaaaggaaggtgttccagcatgggagctcattttttcacattgcacagagcctcctcccagggtggagcccttgcaaagagagaggctccagtagctaattgtgttctgtgtctgcacttgctttctgcttgacttccagtcccaaggcttccctgaaagtcgaaatgctcttactccgcccctacccctttctttatcctgttcagctactgcagatgtcacagctgctcagcatttggcttcctcattgatcccacagtggaggcaattatagcagggtcacaagcgacttggctcagcttctttgttatgtctgctttggctctctcctaataaagactgggaaggagataggattctcctacagatttctacattccccaactcagcccatcttcgtgttttaccctctccacagagatagctctctcatgaaaatgaagcagggagtgtaggagagggctcaggggacaggatgcctgagttttcatctctacatatagtaaccttgggcaagttacccaacctcttggtgtttcacttttctcatctgtgaaatgaggataagaataataatattaacacatcagatcataaaaattaagggtttgcatatacttagcacaatgttggatatgtactaaaatatatatccacacatatatatacatcaacagtactatatacacgtgcatactgttacacacacaaatacatataatacatatacaaataacatcattgttatttcctggcttttttttttctctccactttaacacttccttgtgctaggccaggcacagtggctcatgcctgtcatcccagcactttgagaggctgaggcaagcagatcacttgagctcaggagttcaagaccagcctgggtaacaggtgagacttcacctctagagacaatttagaaattagctggccatggtgtttgtgcctatggtcccagatactcagaaggctgaggtgggaggattacttgagcccagggggcagaggttgaagtgagccaagatcatgccactgcactccagtctggacaatagagtagagactctgtctccaaacaaaaacaaaaacagtactgtgtctgtgctccaaactctccttataccaacactgttcaatacaaatataatgcaagccatacatgtcattttcaatttcctagtagctccattagagaaaaaaataagcaggtaaaattaattttagtaacatatttaacatatctaaaatattacttcaaatggtcagtagaaaaattaagaaattttacattgtgttttcttatgttgatgttttttaaagtctaaactctgctatatattttgcaataacaactcaacttagattagccatatttcaagtgctcagtagctacagtgaaccattgactacataatggaaaacacaaccttattctatcacccaactttatgaaaacttgccaatccagtattttcccttcaggtcccactatcagcttttgattcattcattcagaaagggtttattcagtacttactatgtgttaggcatcgtgttgagtgttatggatataatggtgatgtagtcctatgaattttgtccccctaaaacagtgctccccaacctttttgggatcacggactggttttatggaagacaatgttttcacagacccggggttgcaggggatggctttgggatgaaactgcttcaccccagatcatcaggcattagttagattctcataaggagcatacaatggagatccctcacatgtgcagttcacaatagggttcgcgctcctataagaatgtaatgtcaccactgatctgttgggaggtggagctcaggaggtaatgctcagtcactgctgcagcccggtttctaacaggccaaggaccggtagtgggtccgtggccagagggttggggacctctgctctaaaattcatatgttgaagtcctaacttccggtaatagaatataactttacttggagatagaatcctttttttgtataaatgtaaggggtagaaatgcagttttgttacatggatatattacatagtgaggaagtctgggcttttagtgtagccatttcctgagtggtgtacattgtacccattaagtagtttctcatccctcaccccgcttccacccttctgagtcttcagtaattattccactcttggatattgtcttttcagaggtaaacaagttaaatgaggccagtagggtcagccctaatccattatgatgatattcttataaaaaggggaaatctggatacagacacacagagaaaacaccatatgaagacagaggcaaagatgagggtgttaattctgcaagccaagtaacaccaagggtggctgccaaagcatcagaagctagggagaggcccggaacagactctcccttgtggcctcagaggcaaccctgccaacaccttgatcttggacttccagcccagtattgggagacaatacatttctgctgtttaagccacccggtcagtggtacttgtgacagcagtttcagcaaacccatatagttcttttctctcctatttcaagatagggaggcctccaccttcacgagtggtaaagggccctactgcaaagtccgtgatcaaattaatgaggaaagtaaaggtaattgcaagctaatagggacaaaggcaatacatgtataaagaaagaaatatacaatcacaaattatgttaataaggtgtagtgactgagaataatattggggtggcagaaaatttactatgatgaggacatcatggtaggcttcattagagaggtgccgttcaagtctttatctaaaggaagcaatgttctggggaatcccaagcaaaaggaatgcctaccaaagtccctaaagtggaaaagcagctgccacactctagaagctgtcagaagccatgtaaccccgagggtggcagcccagatagtgacaacattacttgagggtgggtgagaagccaggagccacaaagcagggccttggacgccatcactaaccatgtgggttttattaagtgcagcagaatagctttaaaggaggcaaatgacatgatgtgatatatgttttcaaaagaccaccatggctgctgagagcagaaaggaatggaggagaatcccagtgtattagtcagtgttctctagagggacagaactaataggatagatgtatatataaaagggagtttattaaggagtattgactcacacaatcacaaaggtgaggtcccacaataggccatctgcaagctgaggaagaaggaagccagtctgagtcccaaagctgaagaacttagggtccaaagtttgaggccaggaagcattcagcacaggagaaagatgtaggcttggagattaagccagtctagtttttctatgttcttctgcctgcttttattctggctgcactggcagctgattctattgtgcccacccagattgcatgtgggtctgcctttcccagcccactgactcaaatgttaatctcctttggcaacaccctcacagacacacccaggaacaatactttgcatccttcagtccaatcaagttgacactcaatattaaccatcgcacctgggatatcccttgttatgcctgtctgctaggaaatgaggagcaactgaggaaagatgctggaagagatggatatctgtgggcaaaggaggattcctcagtttgtcttttgtgggagctacctataggataaggacacttactgcctcgaaagggagagaagaatctcaaatgacctcaccccagacactgtttggtttcttcaattagagcacaggacacaaatggtgagagagttactcaaagtctatcatcaagtgagggcacagcaaatgaaaccagttccattagtgtctcccagagcccctcctctgtcttacttgaaggaatgttacttttaacccaggttacttttaaggctaagctggaatcccaaacatcatcaaggtgcaggtatggtgggcttggttcactgatgaggggtgttcctgtgcacttgatctttccactttgttgactccattgggggcattctcccatatggtgctttccaggtgtgatacaacaaagagagggaaagagatctttccatgctgtgattcgttaattgatttggaaagttgtcagaaaatagtctacacaatgcctacgaattctgaaaaagcagaaattatcaggtgctgtttgatactggatccttccatacctgataaaatttgatggcacctttttatacttccagtaatgctatggctggctgatgttatttaccttatacaagaggaataaaccatcccaaataatccctagcatttgtcagtgatgataacttcaacttcagtgtagcaaatccatcatcatgacaaagtccaatgcagagtgggcagaagaaaggaagccagccaggtaaaaggtagaccaaattagggattctagttgggggcacaaaaagtaaataaataaaatggtagttgaagtaaatagagccccattggataccaccaaatttccttagatatcattaaattgtatgtgagcaacagggtgaatcaaatcaaagtcaaatttatactcacatgattatagcacagacaagcatctcacagctataatttaccaggagtgattggtggaacagattcagagagcagggaaggaatattctgtgagggtaatgaagaatgaagttaccttctgtcattcaggccaggagaaatgcccctgtgcaattaaactactgtctcaaaccctattttattttctgcaacacaagtgtaattatctgaaattttcttcttggtctaatgttcttgtttattgcctttttccccctactagaatgtaagctccaagtaagcacagaccttgtttgacgcattcattgctatgtccccagtacctaaaatcttgcctgacatggagtacttaatatccctggtggtaggaaggaatgaagtcagagttaagtcctgcagcatggtgagttgacattgcttgactaaaaattccctacattccaggaattcatttgtggacaccctattacagatgagggaactttcagaggaacatgctttgctatgaagataagtcaactggattgaacattgttttttatgtgccgactgctgcattggggatctttactcttctttcaaaattacacctttttcaactaaaggaaaatacaaccaggcatttcatctcagcatgatttgccttcttttcatcctgaagtaacacatcatgtgacctttgctggtctcctgtagctgtgccacattaccctaggagccactggttcaaatctattttagagctcatgattcattctaactccctcctcagggcatgtcacttctaagatttttctcttcaacttgccactaatcccactgaagaaaaaactggcgttagaattcaattttagcttcctggcaggacaggccaaatgtcagcaatatttgaggactgtagacagacgttcccagaagcattctcaaatccacacaacagagtccctggctgtgagctctaatgccaattccctacactagaagtcaaaaaatacccactgattttccttaaattaactaaggaccattctccattcctaccaagagctccctccctggattaagtgacttctggtagaaaagcatctggagttcccagaatttattcattcattgggtcgttcagctagagatgtgaactgtctcaagtaaatgttcatagatttctcaaagagttgaagggcgtacacacatgaatttatttaaagagtaaactgcattaatagcttgtaaataattctagttccaaaatctcacaagtttttaataatatatttgttttataatggtgcttatatctgtaaaaagatgcttatgaacagaattctgacataattatgaaacagtcgagaacatgggctccggcaccaggatatctcagctaaaatcccacttactggctatgtcatcctgggcaagagacttcacctctctgtgcctcagcttcctcttccatgaaatggggctaatggtgatacctaactgcatgggatcattgtgaggattaaatgaagtaattcatgtaaagtgcttaactatagaactctgctgtccaacatggtagcccctacccatacagaactgatttaaacttaaattaattaaaattatatgcaagtttaattcctcagttgcactagccacatttcaactgttccatagtcatgtgtgactagtagctgtcataatgaagaaggcagataaaacatgtctaccattgcagaaagttctactggacagagattgccagaacagacttaaaaccatcccagtaactccaacatttcctttgtttccatgcagtcagtgacccggtactatcgagtccttaacatttcacgtttgttcccttctctgtgttcccatcatcaccaatctatttattccttgatgatactgctcaactggtcttctgacatctctcctcctctgtggcaccctgcagagtctcccaggcctgaactccactatcattcttcccccgacaggctcagttcctagaattggaactggcaacttaagccttggtcttcatgctccttgaaggcagaggccacattttatttatatctgtatctcccacaatctttggcttataataagcattcaaatgtttgcatgaatcaatgaatctgtaaagcaaaagtatctgagacaggcctgaatttatttagaagtttatttggccaaggttaaggacatgccctggaagaggtttgtgactttctccaaagatgattttgagggcttcagtatttaaaagggaaaagcagactagaggggaaaaggcgaggatatggtagcattactgaatccacatgttgcaggataaaagaagcaggtagggaaatagtcaattaggtatacatctggcactcggtaaataagcattttacataaggtaagctgaacatagagtagctacctgtggagatatttaacttttaatctatagctatctgcttaggaataaaaggaaaagcagtttcttgcatgactcaacattcagcttaaccttttccttttgacatagtgagttggggtcctgagtttttgttttcctttcacagatctatggataaatgagcaaaccatgctcttccagggaatagaaggctctacctggttcatagtcattctacaaggcatctttctctgaaccacatctgtgccctgaggcagtgcctacaggtgtgagcctgcaggtgctttgaaatcagagggcaaacagggcatcttttcttttcttttcctttctttctttcttttttttttttttttttagactgagtcttgttctgtcaccaggctggagtgcagttgtgcaatctcggctcactgcaacctctgcctcccgtgttcaaacaattctcctgcctcagcctcccgagtagctgggactacagggcatcttttctaagcatcactttgcccttgggctttggaaagagactcctcagtggtcacagagttccctgtcatagtccagaagcagtgctcttatccacattccattcatacctgtaccttaagtggggtggctttcagcccatgtattgggatcttcagtcctgcagccccaatccccacaaccactgacatcagcagtaatgatggttccccaaaattgcttccctctttttcttgtcctaaaagagtaatgtgggtgtaacggcagtttctgggatccaactaagggtttctgttttagactgaatgtttgtgtccctccccccaaattcatatgttgaaatcgtaacgtccagtgtgatagtattatgaggtggggcctttgggagataattaggtcataagaatagagccctcatgaatgggattggtgcccttctgagagaccccagagagcagagagctctcttgctctttccaccatcttgtgaagataaaagaacttggccatctgcaagcctgaagggggcactcaccagatcctgaccatgctggcagcctggactgagacttccagcctccacaactgtgagaaataaatttctgttgtttataagccacccaggctatggtattttgtgatagcagcccaaactgactgagacagttcccatgctgtttctactactaactgtgcagccttcagttcagttaaaaatcctgtgctcagttttcccagccctaaactgagaataagaatgggatgtccttcatagagtcgctgtgacaattaagggagacaaagcacgtgaagtgcaagtgcatttcttgaggtatggcaagaggtaaacagaggttagggtgtcagctctagagttctcactttaatgtcaccaatgagtcataagattaggtccccaattcctccctataaaatgtacatatcatctctagtaggatgactcactattagggattttgttaagaccattgtaataatgagaactaagattttacttaaggaacacttactattaccaaacacaatgctaaatgtccgacctgcattatctaacttaataacctgagtaatccaagagatagctaccaagatgaaaaccaaaatgcctctttatgaccaagttttcagtgtcacaaaccatcacttctgctgaagaattacaatccttagaagcatgtcgccaggtccagcccatactaagaagaattaagctccacctcttgaagggaagaccatcaaagactttgtagacatgtgttttaaaccactacagatgtaagatatatttcttaccataggtcgtagcctaaaaagtttgaaagccactcctctgggtggtttatattatttaatttatcagataggaatcttagatccatagcatggtagagatagaggacccatagagttcatacagacttgtagaataggggttggcaaacattttctgtaaaggagcaattagtgaatatttgaggctttgcaggccacgtggtctgtgttgcaactactcagctctgcttttatagcacaaaagcagccatagacaatatgtaaacaaataggtgtgtctgtgttccgatacaactttacaaaaacaggccaggcacggtgtactcccagcactttgggaggccgacgtgggtgaatcacttgaggccaggagtttgagatcagcctggtcaacgtagcaaaaccccatttctactaaaaatacaaaaattagccgggtgtggtggcagatgcctgtaatcccagctactcaggaagctgaggcaggaaaatcactagaacctggaaggcggaggatgtagtaagccgagatgacaccactgcactccagcctgggcaacaaagcaaatctctgtctcaaaacaactttacaaaaacaggtcatcagccagatttgacccaggggcacattaatgaacaatgtttattaattctgactttacagtagactccaagggttttttacttaatgaccacgtctaggtcacacctcagttcacttagattagaatctctgggggtgagaacccaaatatcaatatttgttttaaagaaagttccttagtgatactaaagtgcagccagagctaagaagaaccacggacaccaggcacagtggctcacgccggtaatcccagcactttgggagactgaggcaggaggatcaattgagcccaggggttcaagatcagcctgggcaacatagtgagaccctgactctacaaaacagatttttaaaaagttagctggggaagctaagctatgaggatgcaaaggcatgagaatgatacgatggactttggggactcgggatagggtgggagaggggtgagggataaaagactacacatccggtacagtgtacaatgcttgggtgatgggtgtgccaaaatttcagaaatccccatgaaagaacttgttattcatgtaaccaaacaccacctgttccccaaaaacctactgaagtaaaaataaagtgcttgagccgtagtgacaaaaaacaaaattattatcagtcagaaattttttaaaaaatagctgggcatggtggtatgtgactgtagtcccagctacatgggaggctgaggcaggaggattgcttgagcccagaaagccaaggctgcagtgagcaatgatcatactactgcactccagcctgggtgacaaagcaagaccctgtctggaaaaaaaaaaaaaaaaaaaaaaaaaaaggaagtggggaggaaaggaaaggagaggaagaaggagaagaaggtgaaggagaaggaggaggaggaaaagaataagaaagagaagaaggagaagaacaagaagaagaataagaaccaccactaatgtgggagatgatgactctacttaaggaaattgaggtcccacagggcaaaagacgagccctgagtcacacccacattggtgtgcctggaccagctgatgtttaccagaaagatgcacctgagcaggtatttgcagacagaaactaagtgtaaagtgttgcctacacaaaacatcgtacctgggcaggccagggtcctgcacccctcatagaggggcttccagaagaactgtgtcacacatgaaacagtgggaagtaacttgagtgcaaagagacaagtgcaagtcctggatgcctcatgtagtaactttgggcaagtatattcagctcttcagttccctcttttctcattcatgaaacagtagcaaacattttagagcatttattgcatgaggcaatatgctaagtgctttatgatctctctctgaatgatactttctgtctctcaaccattacaagagacctaaggtgggtgatgctacagcatccattttaaagaagagggaagtaaggatcaaaatatttaagtaaaaggaacagtcagcagagtaaacagacagcccacagagagggagaaaatctttaccatctatacatctgacaaaggactaatatccagaatctacaaggaactcaaattagcaagaaagaaacaaccccatcaaaaagtgggctaaggatatgaatagacatttctcaaaagaagatatacaaatggccaacaaacatgaaaaaatactcgacatcactaatgattagagaaatgcaaatcaaaaccacaatgtgataccaccttattgctgcaagaatggccataatttaaaaattaaaaaaatagatgttggcatggatgtggtgaaaagagaagacttctacactactggtaggaatgtaaactagtgcaaccactacggaagccagtgtgcagattccttaaagaactaaaagtagatttagcatttgatccagcaatcccattcctggatatctatccagaggaaaagaaaccattatacaaaaaagacgcttgcacacgtatgtttatagcagcatgatccacaactgcaaaaatatggaaccagcccaaaagtccatcaatcaacaagtggataaataaattgtggtatatatatgatagaatgctactcagccataaaaaagaatgaattaatggcattctcagtaacctggatggaactggagactaagttactgaagtaacttaggaatggaaaaccaaacatcatatgctctcactcataagtgggagctaagctgtgaggatgcaaaggcataagaattacacaatggattttggggactcgggaaaggatggggagggggtgagggataaaagattatgaattgggttcagagtatactactcggctgaagggtacaccaaaattttacaaatcaccactaaagaacttactcatgtaaccaaacaccacgtgttccccaaaacctatggaaataggaaatgtaaaaactatatttaagtaatttgcccaagatcccatgagtgggttgattgaggcaagatttgcgctcaagtctttgtgtctccaaagccgatatatttgactgccttgctacatctctcagggttcttctaaggattgattcagataatttgtgaatatgtgttataaatattagggtactgtacatatgtcagcctttatcacagaaggtcaattttcacattccaggatatcaaggaggggtgctctagatatgctattgatcagaacatcctcatgtgcaaatgatcctattctggtcagccaatcctgtgtcccctaattgatgaggatgccttactggatcagtaagggccagtcaagaaacagaagccagtctgttatgtgaacagaggatcgaacatcaagaattgttagcaatatataaagtagttaactgggtaactacaaaggtaaaaggataactttaagatatcatataggcagcaatgacgggcagcagcccccatcccctagagttgaggaaacaaagggaataggttggaattatttaaacttagtttaagggagggtagaggcacacaaagaaaaaccagccctcagaggagagatgctgggcactgatgctggtgcctctgagctcagaggcagggccctatgggtctaatatgcagacttctgaggcagggatgcaatgaggtgcaaagagggtgtatctgcaagtattgacaatgtggcaaactggagttcactgctgctggggaaggcactgtggctgccagtggcagggggtttgcaggaatgtaaaagaagaaaccaggaaggagcaagtacctgttccctctcccaccctgcagctttccccatagcatcacttattggcagaacccagcaaggagcagctggcagagcagaagcctggtttgcagagtcctggccccaatgtcacccagccaaatacagggtttgtagctgagggagagtaacttaattagcggcccaggtcacctctttgactactgggcatccagacccacacttttatatgtaggggtcaaggcccttggccccctgaagtttccctgataactgacaaaaggcagattaatcgaagaaaagacatacaaatttatttaacgtgtatacgtgggagcgttcagaataaagacccaaccccctaaaagaggttcagaagcttatatactaacttgaagttgcagaaataatatgggctcagagcatggccaaaaacaggtttgggggccaggctggtggctcatgcctatagtcacagtggctcatgcctatagtcccagctactggagaggttgaggcaggatcattggagcccaggaggtcaaggatgtggtgagccatgatcatgccactgcattccagcctgggtgatagagtgagaccctgtctcaaaaacaaaacaaaacaaaaaagcaaccaaaacagttatggtggcaaattaggttttagtgacaagacaacttacaggaaggagaaaggaggaggcttggctagcaaaggtattcttgttatgtatcatagctgaaatttcacaggtaccaacccttagagaggatagtcaggtaaatgtttctttcagatctttaaggtgtcagactcagtttatctttcctagatatggataaagcctggccgtattaatgcagattctctatagatgcaaatttcccctacaacagacagctttgcagggccacttctgtttgctggctctctgtcagcgatctcaaaatatgtcaaataaatatatttgggggtaaaatatttttatttccttcatatgcatatttgaatttccatacaacagcaaaacaactgtcttctccttgtaagatgcaactatcctttgtacaattgagaaaacattctttccctaatcccaaaatcaggtcaaaaaatctcagcaatcatcacatctatctttgtgttctgttaattccttaaaagctgagttttctgttatctaaagactaaactgtaaatttaatctccaataaaactcatataatataatgagtggaaggaaaaactaagatgtggaaaccagcagagctcaaagttgcaggatgggaagacaatattctgtgaatgtcttaacagtgagagcagaccttcccacttccacccttgattgctgggcccgtgaattctgtggtgctggagaaaacagcaccatataattatctgattgatggcatctacttcattctgtaagacagagtcccatttttttagggtggtgtctcctaaccagcaatataactgagtcttcagtaaaccattctacctttaagttgggccatttcctttcagatactggggtatgggtaaggacctgttaattctatgggcagaagcctgttgctgcacttactttgctgtgaaataagttcctggatcagacataatgctgtcaaaatgctttgtcagtggatcaggcattctgtgagtccataaggtagtgctggtagaagcattgtacaccaagaaggcaaattcatttccagaatattacaatgaggactgatttctgtcccttctatgatggaaggggtctaatgtaattgatctgcccccaggtaactggctactcctccagggtatggtgccatattaaggactcagtgttggtctctgggtttgcctaactgtgctaactgaagtacaaagacaattaaaaagtttaaagtaaacaacattgacagtgatagaattagttaggacacccttaaataaatgcaccaataagataaataccttagagcatgatcaaaccaattatggcacagaattcagttaaacatagatttatctatgacctgatccaatggactttgataatcaaaataatgttattttcaccaggttattgttatcttaatattattgccatagagattttctaagagtgtcactaggcagtcagcagtggccttagctaggccagccttcgtgagaggaagtctgggttaagcccatgtgtagcttctatccctgccaccatggccactgagtacctaggcccattgagcgagcactggggtgaccagataaagaggcttattgacatcaacagaacatgtcactttgtcctcctgtcttgtgatatcctttgtgactgtggttgtcctttggtgagccttcatgcagaacacaaatgaaatgggttagaactgatgaacataaacttagcagataggatcatgaaacagaaagtgaagaaactcagagtttttattgttagctcatcctggtgatagacatgaaggaaaatagaattttttttttttttttttaagatggagtcccattctgtcacccaggctgtagtgcagtgatgcaatctcggctcactacaacctctgcctcctgggttcaagtgatcctcctgcctcagcctcctgagtagctgggactacgagcatgcgccagcatgcttggctaattttttttgtatttttggtacagacagagtttcaccatattgcccaggttggtctcgaactcctgacctcaagtgatccgcctgtctcagcctcccaaattacagatgtgagccactgctgggattacagatgtgagccactgcacctggcaaaaacaaaatttaaaatatgttcccatcaatttattcatcaaatatgtatcgagaacctgctctgtgtctggcttgaggctgggttctgtatacacaattgataagcatgacagatgctgtccctgtccttgtcatgtgtagcttacaacccagggtgagaagcaggccatttaaaagtgaaaaagtgaatacgcaaaataatcgtggctcatcagaaggactgtgaaggaaatgaacagagggagttacaaagagcaatgaggtgggggtgatgagcacttctggggatgaaatggtcagggaggacccctctaagaaagtggactgaagcagaggcctgaagggaggggcaggaacttgagtggaaattgggagggaccgaatgttcctgagagagggacgagaaattgtaagcagggctctgggatggggaaaaacttgacgccaagaaattggtaaacgattgaagaaaaaacaaccagtgaaggagagagtgcctcaagatgagaggtgatattagcgagctttgtagaggtcacatcatctactaagaggccatgatcattctagatacagatgagaagagacctggatggttttgaagtatgggcatgacatgaccttctttacataacaaagatgtcagctgtccctaaattaatctaaaattcaaactgatcctaatttaaaagcaccagcagtttctatttcattgctttaaaaacctaatttgggctgtgtattacaggagtgaagcatcaaagcagagagaccaggtagatggtattgttaccatcctggcaggtaatggtggtagcttggactaggttgatggcagtgagagttgaaaggaatggcatctttctaaaatatggctatagcggcagatttatgtttgtgataggccagtgagatgtaggcttatggatttccaaaagactggaataatatatgcataagttttatctcctgggccaacaaataggtttacctcctaagccaactgtcttcaaatggtagttgtggtgagcaattctgaggttcatgggaaagaatgcagatgaattagtgatgtctgctgctatgcaggaaaaaaaccgtactcataagtgtgcaaggcatttgctttctctggactaaatggttcctttcacctcagtgattcttatcctttgttgagcagaattaccttggaagtggggttaaaatgcagggactggcacttcatccttttgaaattttaatcaaaagctttggggtgagttctgggtagctatatatatctatatatatgtatatagatatatttttttaaacaaactccaaggcagttcagatgttgaccagtttgaggactgatctaaaataccatcatccatatttcaagagtttttgtaaagacagtggtgttgaaaatttcagatgatggatgctaagtgacaatgtttctgtaagaaaatcacatgcatctggagttataaatttatttcataagataagaccatattattatcaaaaaatcctatcttttttttcttcaacttttatttttagttcaggggtacatgtgcaggatgtgcaggtttgttccacaggtaaatgtgtgccatggtaatttgctgcacatcaacccatcaccaaggtattaagcccagcatcttttagctattctttctggtactcttcctcccctgaccatacaccgacaggccccagtgtgtgttgccctgctatgtgtccatgtgttctcatcattcagctcctgcttatgagtaagaacatgcaatgtttggttttctgttcctgctttagtttgctgaggataatggcttccaactccatccatgtccctgcaaatgacatgatctagttcctttttatggctgcctactatctctttattcactattttaactcaggaacctccaggaaaggaagcaccattactgactgctgttgaaagaatttttttttaagtaaaccttatttttcagagaagttttaggctacagcaaaattgagcagaaagtagagatcttctatattcctccttcccctacacagacacagcctcccctactaccaacatcccccaacagaatgatgcatttgtaacagttgatgagcctacactgatatatcattatcccccaaagtccatggtttacattagggttcgctcttggtttacattagggttctataggttttggcaaatacataatgacatgtctctaccatcatgacatgatatagagcagtttcgctgtcctaaaaaatcctctgttctctgccttttcatcactccctccccctcaatcactgacaaccaccgatcttttcagtctccgtaggtgcactttccagagtgtcatatagttgaaattacacagtgtgtagccttttcagattggctttcctcactcagcaacatgtaactaagcttcctcgacatcttttcaaggtttgatagctcacttctttttcatgctgaataatattctattgtctaaatgtaccacagtttgcccattctcctactaaggaatgtcttgtttgcttctaagttttagcaattacaaataaagctgctatgaatatctgtgtacaggtttgtgtgtggacataagctttgactcctttgggtaaataccaaggagtaaaaggaaacattgttgacatgtgttttcctttgtgtacaggtggatggacctttaagaaattctgtgagtaggcaggtgggttctctccctcacccctctgttagactcatgcagtaatccagcttaagcattaatttaggtttctggacagcaatcttaagatccaggacccagcaaggttggtgggtaccaagcagaatttggtgggcaggagtgtgcttcctaccatgccgcatggacacagggacagtccgggttctctttttaacttaacacagatgagaatggacctgctgcattgtattgacaagtcaggcactgacttccctgtggccttggaaagttacttagcctttccctatctagagcagggctcatgatctctaatgctgaaaaagttcacacaaacgagtgaagtgaacttgatataagaaaagtcaactgtattttccgtgacctacagcataagaacaaaacaatatgaccatgcatcatcttggagattatgatactctgtcataagaaaaacttgacaataagtcgcaacttttgttttccctctcagtatattgggaatggtggggactatggccaactggacagttaacatcccacttaacaggggcagctgccaatcagctccagctccagcattgttgacagatcttccagaaagggaagagaagccaaaaatttccattaaaaaaaatgtagattgcccagtacagtcaaacacacctttactccaaacatggtcgacatggtagctgcttgggactctagtccagagaagaatcagtacctctcacagctaaaatgcttattactcctttccagctttgcccagtgtccaacccaaactagtaatcattctgctgaacttgccatgggatctcctcaaacatactttgcttttcctgttttctcctgctagaacgccgccccccctcatctctcattgtcaccttttgaaatcttacccatcctcccatctcaggagctacttctttctagaagcttttccacttgcctcaaggagctattaacacattgtgtgaattgatttaacaaccagaaggaaaacctaaggctttgaaagattaggacaagggtctgataaatttcggttacttggcaggaagaaattctataatgtcaggtacatttgcatccaaagggttatacaaacatgtcgtccaaatacaatctaattttttatgccctacaacccccctccagagaatggtataaaaaaagactacattttataaagcagtgattcagttatcattcggggagccccaggacactggcattcaagtgaaagtcttggctaacacccaacctgtatttctagacatcagtttgcttctccttgcacacttttacagcagttggaggtcataacctcaagatggcatcctattctcttggcattatctcttgattatgtttacattacaattttaaagttcattgtgtatggtctctttagattcacatttcctcttataaggaaaatgtttataagccacctaaggtcataacaggaaaataaatggaatggaggaatgcattttttttttcagctcaggtacagcatggaaaaattaattgtgctgttctgcctagagaaaaacactttagtgcttgaaggaaatcaaatgtcagccattccttattcaacatgtgttcactgttagaactaagaaatttttctacgaataaatatcactaaaactcttgaaagctgtcaaatcacagcctagtaacaaaggaagtgaaaagaaacatcatttatcacgctgttattcctattcacacgctggaaagattttttttctgggactcatctggagaaaattgctgtcaatgtcaacttgaattgtcctcttcctcccttcccacattacccattgctgtaccatggatgccctgtggaaagtgggttacagtcttctgaatcccttctgccacccagacactctgagggctttatgatccattgtgagggttattagtgagaagggagagcaaggtgacactgagtgtctgaggatggcaagttcttagaggtcagcctgagaaaagccttttcaaaacttgaacatttccttataactttggcaacaagagatgatgacagactaggacaggaaggtatttaaagatggcaagagcaagaataaaatgaggctcttaactagctgggtgccttagaagagttggcaactggcagagcagatggaacactctatgtggaagttaagacctgagtttaaagcctgagtcttcctccaccttcctgtttgcagtggcacatagtaggcaccttaaaaatatctgatgacctgggtagtaatagcaaaacagtaacaacatctcctacttattgaccacttccagacaattcactagctataacaatgctattagagactgctattcccatcttagagatgagtaacaaaggctcacaaaactcacttagctccatggttctcagtagagaatattttgcccctaggggacatttgccaatgtctaggaatatttttggttagcatgacaggggaaagaaagctactggtttacattgggtagtggccaagtaggctgctaaacatcctacaatgaataggacaggccctgcaacgcagaactattcattccaaaatgctagtagtgctgcaatggaaaaagcttgattctcgattaactgatggaagcatattcttctaaccacagtgccttaccacctgaccagtataatatgattgagcacctagcaaagcacatgctcaataaatacttgttgaataaatgatgaaagggatttgaagaattgttttactttaggaatttttctttacctttctgggtctcaatttcctcagctgtaaaatgggttagtgacttttttcacttgcacctgcttcacagtattattacgcagtttaggtggtctaatatatttgaaagttctttattagttgtagaaaaagactgcataataagagctttttaccatagaagcaagcgttaagatagaagcaaaaaaaaaaaaaaaaaatgcgaagggaaccccggaagtagcaatgaaaactcaatacacaatgtttaaatttaaggataagatttcagtatacacaatagataatattagcagaaagaaaaagtactcatgataatcacccctgaaaactgaaaatcttcaagccaattcatcctggccctaagtccctggtaccctggggtctcacaaccttccctttctgattatttacttcctagtcatttaattaaaaacaacaaagtcctttcattggcagcagttaagtgctttttcttaggtcttattaacgttcactcaataaaatgcccctggctgttgatagaaattatttctacttgaatcaaatggcattttgcagtatttcttgccccatttgggactgtttcacaaattccctgaggtggtcatcgtgaacttacaaacctatgatctgatgttgaaggcagttttctttccttgattcgagtggtgaattttagccattttaaattgctgagtgacatcagccctccagaaaaacaagaacagatgggagggatttgccacccccgtgttgggccccctcaaccctgatctaagcaaacaagactgttgatccctcttgtcttccataacaaatctcctttcggtgttttgcccttggccataaaggaagaaacccatgcttgtggctgttcccaggctgttgctacagctgctgcagatgtgctacttggtggcagcccacagctgtcaccatcattgcaatcattttagtaagaactagcatgaggccagcaccttttgagcattactatgtggggaggaacaaaggatacatgtaataatgacaaattctctagtccctgatggcttaaaatacatttctgcctaactacccaatgcattctgggaaggctctgtaagcaaaagatgctatcaaaatgcataatgttaaataaaaggtcattttaaaatcctactgaaataaaaatgagttgggctttacttattatgagtcaccaatacaagacagacaaggtacattacgaaatatattccataaacaggacattcaaaaaggcaaaatcagaaagaatgggaatgacacacccttaagtacatgctattatgaaatatggggattatgttagcctttgcttgtctgcagatctgcagattgacaatatttttatcttatatcatcacttgtagtgtacattagctccatttctcccctctagccacaggacaaaaaagagaaaaacttcagaaattcaaggaaaataactttctagttcacatttagcatttaaatgtatttctattatttgggggccaaagacgcctttctgtccactgatgtcagctgacccattgacttcctcccctacctgactttctgaaagaactttaaatagatggggtttttaaattgttgttttccctctgcaggaagacatagatattttatgcctctgaagtgttataatacatagagaaaacgaaaatgttcttctgtttgctaaaacatgcagggttttttgtttgtttgtttgctcactggaatatagttaacttattttcttagcctcattcttcgtaattgtcttgcttaaaaatttgtttaattgacacataataatcgtacatatttatgggttacatagtgacgttttgatatatgcaatgtatggtggtcagatcaaggtaattagtatgtccatcatctcagattttatttctttgtgttgggaaacatttattatcctcctcctagctatttgaaactatataatatattgttaattatagccatcctatagtgctataaaacaggggtccctaacccccaggccacagtcaggtaccaggcattactgcctgagctccacctcctgtcagatcagtggcagaattagattctcataggagcgcaaaccctactgtgaaccgcacatgcgagggatctaggttgtgtgttccttatgagaatctaatgcctgatgatgtgaggtggannnnnnnnnnnnnnnnnnnnatgaaagatgctctactatgtcataaatgaagtacaaattaaaacaatgaaataacaccacatatacattagaatggccattatttggaacactaacaccacaaaatgctggtaagaatgtagagcaacaggaactcttattgctgatggaaatgtaaaatgacatatagtcactttgcggaagagttttctcttttgttttttgttattttgttttacaaaactaaacacactcttactatataatccagcaattgggatccttgttgtttacccaaggagttaaaatcttatgttcatacaataacatgcacacagatgtttagagcagctttatttataatttccaaaatttggaaacaatgaaggcatcactcagtaggtaaattaatagataaactttggtatatccagacaagaaaacattactaaacactaaaaaaaaaaaaactcaagccgtgaaaaacataaaggcaccataattgtatattagaaagtacaaaagccaatctgaaaaggcttcatactgtaagattctgactatgatattctagaaaagctacggagacagtaaaaatattagtggtttacagtaatttaggggagggagaaatcaataggtaaaccaccaaggagttttagagcagtgaacatattctatgtgatactataatcatgaatacattaatttaaaaacattatacattcttaaatctataaaagatataccaaatgtgagccctactgtaaactattgacttggggtgactataatgtgccaatggaggttcatcaattatagcaaatgtatcagtttattgaggaatgttggtaaccacagaggctatacgtgcctaggggtagataaaaactttgtatatccccccaaccaatccccccacccccccgatgaaaaaattatcttccacgaagtttggtccctggtgccaaaaatgttggggaccgctgctataaaacactagaagttatttctcctatctagctgtaattttgtatcctttttttcttgactccaccactttctagctatataaataagtcacttcacattctggacttcagtttattaaactccaaactgaaacgttaggattagtctgtttttaaggtccctctctcttctaaacattaacattattatcaccagtttttttatttatatggcacgtttatacttcaccaaacacttccatataaactctatgcattgtttctttgattatagattccttaatcttgatcacttgtgtcaggaatgtctacctgtttgtgtgccttagtgggtgttaccaggccagctaggaactcaaaattttgtttttgctcaatttcagtaagtttccttagttgaagtttttgagtgaaatcaccactccgttttcatctaattcagagatctgttgcactgtgccttgtttgcttttgtggaagcaaagtaggtgtgttgtgaattacaaaagttatcaaatgggtgaatcccttactatctttcattgatagcgacttttcaactctatgaaatcaaagtagtaaaatcagtctactttgattgtgagctataagttcagggacagagtttccctcaaaatgagctgcataatcttaacctgccatagggttttcttacagttcctttcacttctatcaagaagagagaattctcctccagcatctttctcagaagagtctgaaagcccctttcccagaaactgtctagtaaatgtcgtcttgcatctgattggtgcatgtactttgtactaaagtatcctgtccctaattccattactctgaccaggtgcatagaatctgctgaatgtcttaaaccagggaagacactcacctagaactgaggatgggttgagctttccccaaagtgtgtagaccactgaggaaatggtggatgtggattgaaatttaggatatttttacaaaggaaaatgaagagaaggatgtttagttgaatcttgggtatgccctttactcgggcaagtcacttaaactccctaaccattaatgttctcatctgaattgaggataaaaatctttctttccccagtaacagtgagtacatccagtgtccacatcttagtttgcaatatccttctcccataaaaagagccagggctccttgtttgaaatggctgattctacggctggggtaggcaatacacaagctgagcctggatcatcattagagccaaaaagttgaaaagtgctccaaaaaatccccccaaatgatggacatatgtcaaggggaactgggagccaacagaaagaattttcaatgcccaaatttgagcaagaaattaaataatatactgagttataactcaaaatataaaataaactttcctaagtccatactgtaataaataattggatgaattaataaattaggaaggagacagaaatggaaaacatatttcccatccaaaagaattccaaataacttaaatagatacaccccaaagacgtggagcaaaacttgccctgtaagtttggactccatgtagtaacttacttcaaagaaagcagtatagagtgggaggagagaaaaagtaactgtacagtaaagaaatctggaaacctttgccttagccaggtgatcaggtttgctatcagtgagaagtcatgttgacagcatatacctttgatatgacatattgagaatggctcttcgcttctgtagtcttcatcccccaaacccataaataaacctatccatgagaaaaactctagacaaacccaaatcaagggacattccacaaaatacctgaccagtactcaaaactgtcaaggtcatcaaatgcaaagaaagtctgagaaaatgtcacagcccaaggagtctgagacctgatagcaaaatgtaatgtagtgtccttaatgggatactggaacagagaaaggatgctgggaaaaaatctaatgaggtccaaataaattaagaactttagttaataatgaagtatcaatgtttgttcatatgttttgacaaatgtgccatggtaacatgagatgttaacaagaagggttgctgggtgtgggatagacaggaacattctgtactatctttgctacttttctgtaaatctaaaatgattccaaaacagctgatttaatacaaaaaagaacctttcttacagaattgtaatcacaaacgagcctttgtatgctataaagtgcctagcctatgcatggtaggcacttggtatatttagtcggtttggccaccattggcaatagctgtattcacccttaacccttccaatccatcctctgtgtgagccagaatgatgtttatgtaatgctcatctgaacttctcatccctcctcccaatatgtctcaccctaatctctagctttaaatttttcaatgacgtcttattgcttctagcatgttcatagagacgcttagctttcccatgatctacaagaccccacacacaacttggccctgcctgccttcccagaccatccccattttactctcctcctcacccttactccagccacactgacctgcttccaacatttcctctggccacaggccattgagacatgctatttctgtctgaaatgctcttcacttctctttgcctggttaacttctacttatctttagttcctaattcaagagctgctaggccagagttctttcacataatcttgttttcatcctttgcagcagttatctcttggtaagtttacattaatgtacatggttatttgattaatgtttgcattcctccctagattatcaattccatgaggaaaaaacagtttctttatactcttcattgtattcttaggacctgtaccttttctggagcagtctatgcttaataaacatttggagaaaaaagggaaaggagaaggaaggaaagaagaaactgcctctggtaccatcctttttagaaactggttattttccagagatccagatctcttaaataaggattttgcaatgttaaactagtttcctaacctctcagctttcaattctgttcagtagcaaagtgagagaaagtattcaaatggactagtttgaaaatcctgtcactcactgaacactagcgatttcacagatgatttctgaagcactcaaatttagagtgggaagaaagtccttgcagaaggtgtacacaaggcagtcatgagtagttagcatctctagtgctttttgggcttccttgcaagaactcccaattaagctccagtccattctggcattttctggtcatttagtgattcactgcttcctaggggtgtagattccctgtgctaaagtagaataaacagtgaaaaaaatagctcctgcacttatccttaatttccaaaaaaagtggagttctttctttgattccagaaatacttgtattgtggtacagccacaaaatctgtgaactgtgaagtaggattccaattacttaagaaggaaggctctacctttccaaattgtctctgtcccttgtgctgccaaaaattgctcactagcatttcctctgattattttcttactgcctttgaatttcttagttaataagacagcccgacaataaatacttcgtaatgcatcaacagatacagacacaatgtctcttctgccatgattttcctccaaatgaggtcctctggagaacaaaaggcctgaattgccatttttctccctcagttttcatccacacccagcaccctttattttcccctacctgttacagaagtcagtctgaaatgaaatgtagaataaagtggaggaatcttggggatgatgtagatgtgttatagtcatcgagtcagtgactggagaacctgagcttttcaaaatgacactctgtaacaaggcccctgagggactgcattacatgggaatccagtgtaggtttttgttcatgtagacgtgtcaaacaacaaaaatcttgcccaccatttatttcattcttcagggcctatgaagatcaggagagaagccagctatagtttctgccctcagaagtttctagtcttgtaggaggattagatgtgtacgcaaataataacatcaagatagaacaaagtgagggccagtggaagggcaatagaaggaagatccattttcttctttctttccactaatactgtttattgaaactttaacacaggccaggccctgtgccagtctctaaggttatgatgttgagcaaaagccatggaactcataccctaatggagaaacagaggtcagtcaggtgaccacaccaacagatatacaattacaaactaacctgggttctgtgatggagagggcatagttttttcaaagtctttgagaagagtctttgagagacaggctgtggtgaaaaacctgccctagggcagaaggatggcaggtgctaacttagggaagagtaggggaggagtctgttagacagggcaacagcacatctgaggtgggttctgaagccaggagatcctagtcatgcacagatgtgttcccagccaagaaaactgtgtcagcaaagacagggaagggaaatgcatggagcagggtcggggaatcaccaaatggtcaattcagcaggatcacagggaacatggcgggagtggaggctggaaaggtgggcactgagcccagaccatgaagaaccaggatatgtcctcatcatttctaaagattgcctcatggaatccacatggtttcagaacctctcagggctgtagtgtaggaatgagcctctaaactcccagcacaagcaccaccaatattgtcactatttctcacagagaaattcttggtttcatagttttgtattatgagcatctgggtggtactttcatttttaaaagagctacactgattttttaaaaattgaaaatcatcttcatggacagtgggagacaggaccagatgtgtgctttagatcaatctgcggcagcggaagatagagaggagggagggagacaagttgagccactatcacagcagtccaggggagacatgtcaaggtgctgaagtaaggaagaaataggtaatgaagagaaagacacaaacgtatggagagctgccagacagaggaggacaggagagcatttggcaaatgattagatgtgtgtgacaatgagagaataaagtcaaggagatgctgaggtttcaggcctaaatgcctggaagagccaaagccatttataacaatagataattctgcttgaggacagcttggggtagggtgggccaatgtgttcacttcatctgtatggtttcactgattcctcataccagcccaaagaggaaggcgctgtgcttatccccatttttcagaaaaggaaattaggcttatagacatgaagccactctttcaatctcagaatttccaaatggctgactcaacttggctcttagccactgtgcattatgtctcacctggacaatttctgcagctgctccacctttttttccttgcctactctccgtcttccactgccccaagagtaatccagaacacaaacctgattacggtgctcccttcctaagtaacctttagtggctccccatagcctgtagaggtagttttcttttttaaaagttgtgtaacagtttttttagaaggaaagtttatggaaggatctttatataaattataattaatttatcaatgattctgcatccagtggaggacaaatatgacacagctttatttttttccagtttttaccttcagcattgctgtgccagaactccctcttccatctaatgactccttgtatagacttcttagctttccagtcgctttcaaaaacccagtctcatttacaatgtcaattttatatccaacttaaagctcataacctccctgcctcttctgtgactagcttttccagggtcaatgcagggagttgaaaagtcttgggcagtgctgacggggaaaggcaaagttcattttacttagttgggctggtgagtgcaatctcctctccagttatttcactacctctccattggtcccactgtgtggtggcagctaagtgctggtgctctcatgagagacatggatgagttacttgggagcccatcagtgggagctgctactcttagggagatcttcatcagcttcctgtcttccaaccacacataagctcccatctctgggacttcatcctagagcttcctatagccgggactataggaagtatctggaccagcatctggaccagcatctctctggaccagcatccacctctaggatgaagctccagtaagatggccctagttcacctataataccttcctcagtgtgcgtttaacctgtaagaaacccacacaactttgacacatcaaatagtggcagtagaaatatagccacaagtaccccactccagcgggctgtctccctccaattctttgtgttttagatctgctcaactagacacaaggcaggtcaaccagctggctgcaaagcagactttcaacagaaccatgaaaacaagatgctcactttttttcaggaattccaatctctaaaggttattttcttggtggaaagcagcaggaagcaccacaggtggggtaaagaaaagctacagcaatctcttttctcaggctaatgccttgggaaccctgaggggtttctttttctttctaaccagtccctcgcctctcctttcgctgttttcttctcatatacaactggtgaggaaagtcattggaatgatgactggggatagtagggctaggttggacaccttttaataagccctggagggtatgaatgttccaccaaaatttatgtctccaattcctgaacaccaggaagaatcccattcaacactctgctgcagaagtttccttaggtcaacatggtttctcttttgcagttttgttcatgtaaaacttgtatgtaataataggcatgcatttaggcttaaaacatttttagcagggaaagaatgctataaatctggggcccagaaatctcaacttctccctcacttatcagggaagagaaactggcttaagatgttcttctgtaaaatgaattcattgcagtttcttccttctgtacaagataagtgtggtttctcattccagtggaaaaaaaaaattcctgagaaacacagatgttagaatcaagcattaattttttcttccttatgaaatagtgacattagcaaacctaaaaacttaactaaaaatggaatttagtgagaaaggagggcaatatattttgccttactggaaaaagaatggggattttctacttttatcttaaagtgaagtaaataatgagatagtatgattgccttctagaaacctcctcattgtgcctatttctaccccacccccagattttctgcatctcttattctgattcggctctgtgcagcatctcaggcttttaaatcaaggagaggggattgtgtgtttgcatgaccctttccctgcaagcaacaggttgaaggtgtggtttgtgagtgtgtcaggatcagcagccttgtgacagagtgttagaagatagtgaatgcttccagtcactctattgcagctgtctcctggaacaaggaggcttgcaacataaatatgcatacaacacaggggtcagcaagaccccagttgtttaacccctgtgtaagatattacacacctcagtgagaaaaaaccccaaagcactccaaagcagaattccggaaatacctgtctggattgttcttgcaaacctggtgccttcttgaacaaattttttcaccacatatgaactgtcaaaattctcattcttatctcttttcttcctcaaattattttagatcttagcccagctggtaatactgggaagggtttaacagttagaggattaacattatgaagttaagcctccattgtcagtttaataatattctctttgcccccataatcaaatgttgtcagggcaaacatcttactttcctgagatcagcatttacagcagggtttctcagcctcagcaccaatgacattttaagctggataattccttgttgcaggggctgtcttgtgcattgtatggtgttgaacagcaccccaggcctctacccactattggcagtggcacctctcaccctccattgtgacaacgaaaaatgtctctagactttaccaaacatttcctagggacaaaattgctcccccttccctatccaagtaataactactgagaacttatagagatcatagaattttgtcagaaaaatcccaatctgagctagtgtcaaatctaaacctttgtgggtttttctggttttttggtttttttgctgttgttgttgttttggttttttgtttttggtgctagtggtgaggaggaaggtgaagagactggttgggggagacttgacccttttgtcttataaattgtgatggctaatgtcacagtttatgaagactatttcctgaatttctgcagctttgcttctctgataataaactgaaggttgccatgaaattaatcactctagaggggtttgcagagggaggtatagctccaacccttggctgttctcccgtgttggccagtataaattgccagtgcctgttggtttagagattaattattaatgataaggaagcttatgaatttttcagaattttctcctcttagggtgcatgtctgacttcctatcaggagcataagatcccttccatccttcctgcatcaaagccccaggctgtcacccagggcgctatcttgttccatgcaggctggctgcatgtgttgactctaaattttttaatcagccattttccaacacaactgcacatgtcaggctgtagagacagaatctattaagcacggtcagaaaccagcaggggccttgtggcatcatgatttgatatctctatggcagaatttcacaataaaaaattcacaggagtacacagtttgctgaaatgtcaccaaaacgcctgcaggacttaaaaggaggtgaaacaccatcaacaccgacaataataatctctgaacagtcctttcaacttctggaagaattttcacaactatttaggtatctgattttccccaaaccctgtacttttagatcacccacttatttttatgaaataaaatgaataggtagctgatcctgtcatccttaatcaactgagtcgataatgatgaccattacaggttgaatgataaaagcatagataatttttcaattttaaaaaatcgcatagaccatgttaggatattgacagttccctgttacatggaggatgaaatatttatagacaatcactcaacaaatatatattgaacacctcttttgtgtcaggaacttgctgagatattaacctgaaaatcatttgggtttcacttcatcttaaagccatttcttaaaaatgtatttttccactctcttaccttacaatacaacaagcatcttgttgaaaggcatcattttacaaatcaattctgtgtctaggaatgttagcataaaagggcagagtattgatctgatatatatatttggtattgctttttaaaaacacaattgccatcattgtacatttacttttttgtgaaagtaagttccttttgtaaaagtggttacttaaggttcctgcatacgtttttgttccttctgagattttacagtaattggggaggattttacagtaattggggaggagaggagggatttgccataatcactacagaatgttttctctgaagaccctaaaaagcattttcttagcttttgcaaatatgaaagggcaacataagcaggtgaactacctaatcttaaaaacagtttcacagaggattagcctggtgtctggattacaaatacaatttcaagagataagaagtcatctgtcttcatggtggtttaccatttaaagtgtttctcaggctgggaacttgtaggtacattagaagtaaattagattacgagaccctagggccatcttaatttgaacttcccagtgctgaatttgtgtattgcagccaatattgttttaatttatactggttaaaatactgcttatttgcaggtttctctctcagaggagattactactttcttctatttccctcctctaagccaaggtcatatttgcctttcacaatgcaaattaaattatgttacaccatgttcacttgagttaatttaaactcaagctaagtttaaattagttgtagaagtgtccacataggccaggtaaactagagaatcaagcaatttctagatattcaaatagagtctatattttaagcactttaaccaaaatctacaatcttttttgaggcagacacactaatgcttataaaatattttatgtattttttttttcattttctaactttctttgcagctaggttagggccacaagattagtttcagcaaactggctttcagtcctccatgttctattttccctgtcacactgagcctgaaagctacatgttgaggtagcagagtcacaaaatggtggtgcttccatgtgcttggatccctgagtaattctgtggaagagagtcccccataattggcactgggtaagtagagtaagcaagaaataaatggttattgtgttaagcaactgagatttcaaggttaacttcttaccatggaataaattaacctatcctaattaattttcctttttaaatttatttttcaatatttattttgttttcagtacaacacatgattatccttgcttatgattgacatgggattatggacctcagcttcaccaaacatacaaaatctacttccaacttcttgaatatagtgagagtaggcatctatatagtccaacaaataagaactgtctcatgtgttaaagtagatgatacccctgatacctttgtgcatttgcacacaatgcagtatattataagcaggacatacttgataaatgccaataatgtaattttgggttttttagttcgttctttttctcccatctgttggagaatttggccgcttactctttttaataccacctcctcttcttaggcacagttacttttaaaagaactaataaaaaaaactacttggttatggatttgatactgggaacaaactgtttctttgacaggtcttaatcaagatgaaactcacccttttaaaatatttttgactttgaacaatggcaaccccatggtagacaaactcttcagagcaggcaaaatgagataatgatacatgtaggtagacttatgaatagacccagtttccaccaggtactgtttaatgatcagcctgggactggaaattaagcacatcttatatttgtgacatgttgctcaaaggaaacagtggtgcatgtgacagttctcaagtaccctggaaaggttttaatttaattaattcacctcagttttaattgacatgggcagctctgtgatttacagatctgaatgttttttactacttgagctttcttacacacgtgcacatatatacacaccactcacatgcatgcacgtacacattcacaaaagccacaattgcagaagctggaaaactcaatttccttttgaccttgtgaataattttataccatgctatcagtgtttgaaaatgaggttcacttcttcttaaaataaagagcaggtattttttagcaaaagcattcgatttgattagaggtattttaaacatcactggatgtttttctggacttcctgttgagctcattattttgccatttataaaatgctttttaccatgacttgatgctgcttaaagagcaagattatttaacagtacaaaaaggcatttcatttcccataatgtttatgtcaaaatctccagagaatataatcacctctggcttgttttgaaaaagtgaccatttcccatcaaatcagctgcccaaactaaatttcagaaattagtaaaaactaaattgaaaaacgaatggcaatgaaaataattatttaaatatatgcaatgttttactagttttgaaaaatataactcttctttttgttgaaataattctgaaagttatcaagttatgtatttatcctgctctcacagttcataacataatgcctgaaacaaggcaagtgtttagtgaatatttttaaatggttagttgaatactaatatttctaatttccagatgaggaagcagagactcccagagtttaattggttcacacctctattattcccaccactttagtcagttattctctgtcctttctgcacttaaatactcactttcatttactcattcaacagaatttaataagtttaaaccatttgcattcagatttctatttaggtcatgatttgagcacctattaagtgtcagacaccacactaagtgcctggaaaaacatcaccttaactcctcaaaacatccctgccacatagatgttattatctctatctcaaatttaactctgcaaatatttcttactcccttaccatacatcagtcattggctatttttataatgaacaagacagacaaggtctttgccaaaggcacttacagtcttgcacagaacatgccaagaagcaaatcacacaaatgtgatgggagtgataaaagaggaggttcaggatgttagggtggcctagaagaggtgaccttggctgagaccaagaaggcccctaaggtagcaatattgatactaggctttgggttaatgatttactgttaaccagacaaagatgacagagggccaggtgcagtggctcacatctgtaatcccagccctctaggaggcccctgtgggagtttgaggctaggggttcaagaccagcctgggcaacgtagcatgaccccgtctctacgaaaaatacaaaaatcagctgggcatgatgatgcctgtagtcccagctagtcaggaggctgtggtggaagaatcacttcagcccaggaggtcaaggctgcagtgagctatgatctcaacattgcattccagcctagacaacaaagaaagaccctgtctcagggggaaaagaatgatgacagaagaggaaagagaattcacattgaccaggggccaagcaagagtatgtcatgttcgtgaacctagaagtacagaatggtctgagcgtagagaacaagacagagtggtgggagatgaggctggaaagctgtgcaggagccagatggcaacagctctcaacgccttgataagggtctcaggctcttactaccaagggaagtggaacgttattgacaggtcttaagcaggagagtaacatgagcaaatgcacgttccaaaaagatgagcagcctgccttgcaaagcctgagttaaattcgtacttcatggcgtgtggttttgcagcatcagcaccacccaggagatgtttagaaggatgaattcttggttgtcacctcaagcctgctgaatcaaaactgtcccagggtgaggcccaggactctgtgttttaacaagttctctggttgatttttatgggcaccaaagtttgagaaccactggattttaatagaggttttcaatcctggctgcacgttggaatcactcggagggtttaaaaaaaattggctgggtgtggtggctcacacctgtaatcccagcactttgagaggctgaggtgggtggatcacgaggtcaagagatcgagaccatccgggccaacatggtgaaaccccgtctctactaaaaataaaaaaaattaaaataaattaaaaaattagtcaggcgtggtggcatgcacctgtagtcccagcttcttgggaggctgaggcaggataatcactttaacttgggaggtggaggttgcagttagctgagatcacgccactggcactccagcctggcgacagagcaagactctgtctcaaaaaacaaacaaacagaaaatactgctgcctgagccccaacccggaatatcatatttatttggtccaggtgcagcctcaacattaggattgccttttatctctctctggggattcaaatatgcagccaggagggagaactgctttgtatcagagggaagcaagagaggatgaatatgaaatcggtggttgaggatggagatgatgggagcctggcttagggaagtggatacacagcatagaaggattcaagagatatttaggaggtgactgcacagctagcaagggatagaccaggcctagtcccctgtatttttcttcacaaaaccgcctgcttcctctatacccttggttttggctgccacacttacacagaaagacaacacccactctcttctttgaatggcttcagttccttgtgtcttcaggatagtgcaggtgaattggacagtctcccagccccagatataaagattattaagataatccattaaaaaaaaaacacagctgtatcctctatgctggataaaaaacatagtctctggcctcaatagtaatacattatggccttaaccttgcaacccctcatatttgggacatgatgctaagtgctttatgagtaccatcttctttcgttttcataacaagcctctgctgttggcattgttactgttaggactcccactttgcaaataagggcacagacagaggcagcttagtagattgtccaatgtcagggagctggaaagtggcagagcaaggatgtgaagccagatctgactgtttccagctcctgggtctctgactaccatgcgctatgactgctctggggtggaagagagagctaaggcacagggcacatagaaagcttgctagcaattcctataaaagtgggttgatgcctggctaaagtaatcaaggagggcttcttgaagaaaggcctgaagccaaattctgaatgacacatcagacttgaaatggtagaaaggaaaagaagaggggaggtcatttcaggactgcggggaagatggggaaagactggttgagcactacaggatcataaagaactggattggttttctgtttgggtttttttttaatgtatttattggctgcttgttcagaaaattgctgcatttggagctcttgggttatatttactgcattgccagaagccagcaaagacataaaactggtgactcaaatacagcagggttctcattggctggcaaaacctgggagctaaaccctgcattttgcaatcaagaagtacatcattcagaatggaaactttgacctacccaaggtcttctcttgcaaaggaaataaggcatgataaagaaagacacaaatgatcttattttaactcttccacagattaggtagtatcatctccttggatgattttttgtaacaacagaatgtaattgactgcatgggagaccgaactccatgttctttctacaaataaccctgaaacagagcccttagtgaagactcggatggatggcaaggctgcagatttcatcagagtctcttccagtaataatagtagagttatatacacctacaatgtgttgaacccctgctgtctgagaatatttattgtcatcattacaatagtcctttgaggttattttagtgcagcagctatagatgctccgagaggttaagcatctggccctgatcatacagtgaatatgtgtcacaggcagcattagatctcaaggttttctgattccgaaatccatgatttttttcctaaggattattccctctatctcgagctaattatctctgaaactacaggcaaactacttaaccttttaaagcttggtttcttacccaaaaggggaggaaatctgctatactactttaagtgctgcagaatcagaacttctgtaagggagaatatatgcaggctatggaatgccaaggactaatggctgctaagatttactgaacgtgactgcatgccaagcactttgctaattgtcatatgcatccatcttatttaatctcttatcgatcctatgaggtaggtattatcattattgttcccaatttagagttaaaagagttgaaaaaaataaaagctagggctcagagaggtccaatcactttcctaggattgctcagctttaaagtggaaaggcaaagatttgaacttggacagtggagtgggggcacctgctgaccgtgttctacaggctctacatttaaggtggacacacaagagacaggctttaggaaatgagaggaaggaatttggaggcagtaaccaggtcttgaatgcggcaaaaacagccacagttcaaaccccagtgcagtcttgtggcaggagcttgggcacccccatctcctggttgggaactgacactgtcccagctgtaactttccagactgcagtgcaccaggaaggcagcatttgctggagcagcttgtctctgaaggaggataaaaaaacatggggctgtggaggaaaggagggccctgccagctgatgggagtgctttatggggaggtgcctccaccctcctctgcagtggctcttggcagcctccatctcagacactaatctctgggaacccagggggcacactgggaagtagagagaaagcaaagtagcgagaaaacaagctaaacccaggtcagcaggtggcttgcactgcagctgcttatagagacccctgtctccatccccaattcccagaataaggaacgctttaatcaggaaagagactgattataggccagcaaagttcagtctttaccgatttctgcagagaatggcacttgctggaacacagccactaggcagcaagacagagcaaactagaagttagctgattgggaatttggtcccagccctcactgatcgttgtgcgactgtgggtaggtcattcctttttgggtcacagctgattaactcagtcctgtagctagtcaggcagtcattttattcatctgccaggcatttacccagagcccactctgtatttgccgctgtaatgtacaagtagcacctacgtaagtaggtgccagggatccagagataagcaaaataacacccatccctgcccttatggagcttacagcctagtaggcaaacaccaaatcacataagtacctgtaaattaatggtgatatatgttagtaagggaaaggaaaggtgcatcattataaggagagacaggagaaattcacaaatctggagaacagagcagagttgctgcaaagctgaaggatgaaggataagaaagggttaccagtcaagggagagataaggaagagtgctccaggcatgaggaacagcctgtgcaaaaacctggcagcaggagaaagctagccctcccaaaagcctgagtgaagtatccagtggagcatactgggggaggatgtggtgcccgacaaggctgcagagctcagcagggggccacaccattagtctgaggttactacattatccctgaaactccttccagccagtctggatcactatcactttagtcctgaggctgaagttggttcatttactctgaagctcagaaccataggtttttccagaaagcagaacaattattcaaataatgcataaagtaatctgcctatttctgtttacattttctgtgtatttgaatcacatcctctctttggttgactgaaggctgcctcttggcagcgacactgatgactttggaagagtctagggttgaagttgcctccttatcatcgttagtgcatgagcaccagaaaattcaggcatgcccaggggtagctggtacccaagggtgtctcccaggcgcactgtcaaggccaattctccaaggcctctgaagctaatgaggaggctccaggcccaggccctttgacaatttcttcatccccctagaggtcagacagggcattcccaggtgtgaatcattttgctgatacgtagacctatttgcatagtgggattgcttcctccctgtctccccccacccccaaaattctgtctgcagacgtgagaaaaatgaagcacacaggaaaattgcctaggtgagcacatcccagaatgtgttcctgggaacacatgatcaggtacatttgggaatgtggggctgcatgaggttgccttggtgtaggatttcttgctcatgtgtgttgtgtgtctccagaaatgggatagagtgagtttccagactttatttgatcacagaatcctttcccatcgaggatctagagaacctgcaggactgatattccctagaatataactttgggaaataccagtctaggcttttcagataatcctgaaacacaatagctgaaatcttgtcatttctctcagatgaagggactgtgcaccgagaggtcacgactttggctcaagatcccacagctaaaggcaaactaaggatcagaacacaggttcctaacattcattccagggtcccagggttccccaccctggtctgatttctttcatatatcctaaaggcagggaggagaattaacatctggtgactccccattctaaaataggggataactctataaactttgctaaactataggacctctatgtgccaacacctacctcactgggtgctttgaatgtatatcatctgacttaatcctcataacatgccagggtaggtatcttatcccagttttacagataaggaaactgaggttcagaaagattcgattgcttgttcactctgtgtcagtaaggaaatggcaaaaaaaaaaaaaaaaacaagattggaaccaagtcggtctgacttcccttggacaatgcagcacattttgtcattttgtcctttcaaatagctatgcaagataaaatgatgtccactctgcagatgcagaaactgaggcatggtgaggttaagaaacttgacaaggttgcaagggtgcaactccaccctgctatatctcaagcctgtgtttaaattggccctacagtaacaggacagagttttcatctctgcattgacggaaagagtaccacccatgagctagagacaattgtctctggtggacttgaactgatggctcaggcaatacctgtctacacttacacagtgctgggcttagttctccatcactttaaaggaaaagcccaaggaattattttcctctacttgactgacaagtcaaaacaaccacacagcctctgcttgacctcttctagtaggaagattatttgtctaattaggtaaagagcctttatgcgcatgtacatttttgaaccctaatgagctgccaacgtgaaaggcttgcccttggcttggttctccagctgatctttcctttcctcagtggaaaagaccagcgcaataaacagaaccttgtttccatggaagctcactctcttgctttttctttccagcccttgaaaaggtaattacttgatttctctttatattttgggatttcatagagtggagctgtcaagctcctcacgcgaggatggccttctctatcatgccaagctattttagggagcttcagttgcatttcccttttcatcctctcttcagatcattagctgtcaggcagcagtggccgccttctggtcactcccgctaattaaagtctaacagagcaaggggactcgaccccagagaaagtgggagacagaaaagccagggaaatttgtcaagagatgggagcctctgatcacatcatttctgctgcacagactgtcagaccgacaccctacattcacgccagtgagggacactgtcccatctggtgccttctcttctgaacctttgacgccccactgtggcccatgtcagaaatgcagccaacatggactgctctaaaataacaacacaaggagcagcagccaccattcatgagggtttgctgcatgccaagccatggactaagccctttatatccgttgtctccgttgattctcatgacaacctcaggtctcattaacctgattatttagatgagaagagctggagcacagagaggttaagtaacttgcccaaggtcacacagctactaagtggcacaaccaggataaggacacacccattgctattatttcttagggaggaatccagcactgctacagcctccccaaaagaaatcagtcatgacaagtgacagagggttgacatttctctgtccccagtggtggctctatggatcaaactggcccgtgtctacaaggaacaaagtgaggttgctgagctagttaactgtcaggatcaattagaaaaccaaacaaggcacttaagtatgaagccaacataatgcagagcaaaagagttccagtttgaggcagagcagacttggtttcaggtgactagtaccactttaccagaagtgtgatttggggcatgttcctctaccttaccaagactcagtttccacatccgtcaaatggggataatgataccaaccttacaaagttgtttcacatgtggaattttccaaactgctctgtgatttttggtggaataattgtgtaaaagacaaggttaaatgcagttaaaaacaattatttactctagaatttctccaagtcttgattatgttgacatattacaaattttcaagaggaatcatcaattcctcaccccagaatcctttttcctgtgtgaatgcacattagcctctgtttcttgggaccctttagaaaaggctgtaaaacaggtcatagggtatttggtgtttggtacaggcatcaataaatgctaatcctttcttctttatgcccaaatcatgcctgttcttgctggatttaagctccatggagtcagggacttgttcctttcttattccaatatcttgacatatcaagatattccataaaaatttaatgaatgaatgagtaaattagtgaagtaatgaataaaagaataaattaagcttaatgtagaccttgcctactcatcttcattgccagcattttctgctgtttccagttgccttctatgaagccagtgggagaacccaaatgcctctggaaaatttagtaatggagctggttctgttgggctgtattttcccacttctgttttaacctgtacgagcaccatatcttccgacgaaattctcctaaccaaatcatttggctcttaaccaactttagacaataaccaaatcattttgctgcttcccagtgaagtagttgaatgtttcatttgcatatgtattttgaacaagacatttctgagtgttcccagtggatttgcacttagagctgaagaacttttgggcttcccaagggaataaaaagaaaagcagctcattggaacctaaaaacagcactgaggacactgtatttcccacgtgtgtgtgcctgtcaacaagtggttattgggatggacgactggtcagtcatgtgactgcttttgggtggtgtgctttacgtttgtttagaagagagtttccaactcatgttctatgagtattatgcaaaaaataaaaattctagcttcagtttaaaaatggttgtgttggggccaggcatggtggctcacgcctgtaatcctagtactttgggaggccaaggcaggcgtatcacgaggtcaggagttcgcagaccagtctggccaacctggtgaaaccccatctctactaaaaatacaaaaattagctgggcacaatggcatgcgcctgtaatcccagctactcaggaggctgaggcaggggaattgcttaaatccaggggcggaggttgcagtgagccgagatcacaccactgcactccggcctgggcaagacagcaagacctcatctcgggggaaaaaaaataaatagttgagttggtcaaaatctaacaaattttcttactgcagagcttctcgaagactttgtaacagaacaccctttggaaaatactgccttagaatacctagccaaatgttgcaatccagttttcatgatctaaggaaaagtccttctcccaaactgtggaaaggggaagataaagtgatgctggttcctgaattgaacagggtgattaaaatgtacagcataaagccagatggattttcaatgtgttttgtaaaataaaccaaagaaggttaattgtgatgcttcaaaagtatgaccatatattttccagtgttattgtttatatcataatccaaataacttatttgctatatcatttcacagcataggtgagaatcttttttttttttttttttttggaggcagggagctttaaactttcttctaaaattgattttagaagaaagggacttagaaaactcacatatttcttatgctactttttgttttgaattaatatatactaaaaagaggaataaaaaccattttatttaaatgccactgctccttagtaaacttttctgtgaataaaatataacttgctgaataagcagactcaatacagcttgaaaggaaatgctggggttgcttggaaataatagtttcaactcataaaatggaaatgagcaactatggcctgccacctgttgtaaataaaattctattagaatatagtgggtctcattcacctacagcccttacattcacttatatattatctatacttacatattgtttagtgctgtcttcacctgcaagggaggagtggatttattgcaacagagatcttatggccctcaaagcctaaagttttgaatataggtccctttacagaaatgtctgctactcctttcaaagagtcacagaaatttgtaaaagggatgaagactacataactgacccctttttctttagatagaaaaaactgaaaacagagaagttagggaattgtccaggcttatttatgcctgggtgctctgatctttatatccaaatagttctctttatcagggaagacagggatagatttcaacttagatatcaacaccagctgattggaagtagccatctggagggctggtacaggtctcagcgttcaaagagaaggaacgcaatgacttattaatcctccatggtccagaggtggagagcggctggacccgtgccatgtgtgcactggggatatgcactatgtctgctcctgacatttctaatagttatattgccgtctccttccttgtacatctgccgtgtaagcactttggtcactgggccaaaaagaagtgtgcattggtcctcattagaaacactgctgcccaacagttcagaagagattgatgattcttttgcaaggtcgttcaaatgcctgtcttagcagctgcctaccatatcacgctctgtctagaagaattaacttggaatttcactcagactggatttgtcggttataagaatttttttttaactgaaatatgtccatggagcacagtgcaagggggtataaaatggaatgtcctgagtttattggcacttgtgacccaaactaaaagtctcaatgtctgtgcttttgtgcagctggacaatccagatgagcaagcagcccagatcagacgagagctggatggacgtctacaaatggcagaccaaatagccagggtaaggaaacattgtggttgtttgctggggtccaggccaaagtcccactcaggaagcacactgattattgacagcctctaaaggataaagctgagaagcagagaggagggaagatgaggacaatcaccctcattgggccctcagccctcctttctcaaggcaagctctcccagagatacctcatgcatttcctatgctccagtgaatacccaagctcagacctccaacattccttctgagttccagacacatagctccaacagtctactgaacatttccacttaaacattttcctggcatttcaggttgaatgccttcaaaatctagctccttgtcttcctcccaccccacacacataactatatttactcctcttctcttgttctatatccaatcactgtggatgaaacctcctagccattgtcagtttctcctttctccctgcaatgttccacactcagtcagccaccctgcctccagtgactgcctcttaaatgtgggtcagatctcttgactgttttccagccctactactggtgctttgatccaggccctcatcttcagcacctggatgttacaatagcctcccaatgggtatccctggctgcagttcccccattttctatccatcctgcacacagttgcccggataaaactcatatacaaacatctcaaaacagagcctcaaaatccttcaatagattccctcattgctcccaggacaaaatctaacctctttagaatgataatcaagactcttaaccaacagactctaccctttcattttagcctcaccttgcacaactttcccaccggaactcccgagtccaactacagagaatgtctccctccaaatataccaggccctttccaggcttggtgtctttatacccactggtgtctcaacctggagtaaccatgtttctcccctcacttagcaaactcacctactcagccttcagtacctgacttaaaacaccttctctaagagcttagcagttagtcctttccacctttgtgttcccgtcagatcgcatatcaacctttattatagcagctcatcgaatggtgatcatttatttacatgtctgagtctcccagtatatagaactcctcaagggttgaggttatgtcttactgttgatgactacagctaagtgttatctaccattattgctatccctgccatctctgatattattaatagtagtcatgccagtcatattagttgagtgctgattctgtgtctagcatgctaaatgcttcacatgtaccaactcagtcaatcctcaaaacagccctccaaggatatttcagttatcattcttggtttagagatggggaagtccaggttgaacctgctgggcaccagcaaagagattgtggcacaccctcagctcaggtctgtctaaatatcagggctggcaccgggcttatgtcaggcacaaaatttaaacgggcctccgttaatcaaaataaactattttagtaaagtatttttcaattacaattaataccaaaaaaatccatgaagaataaaatataaaaattgtaaatagcatcaggctcctgatgattcctactgtattcacaggccctgtgggcatatgagggtgggggttattagaaacagcagggagggtgggcacagggtagagcttttcactttatggaaagaggtgtctccagacttggaggtatggaaaagaatcctactggaggagaagccagagagattccaagaagcatcaaaatccccctgtgcttaagcagttttactgaaatgttttgcatcttgtttttggacacctttaaagtttataatcaagtcagcctggtggctaaaaatagtatgcgcttatggatttggctaaaggtattataaaaggttacgctttaaaatcccacttaatgtgacagtaaacattaataaagctttagaatttacttctcctgtaaaaatgtttcctactggtggattatccagaaaatggaggtcatttggtccattcatctgcattttagacaacgagtatattcccaactaaaaagtattcatcccatctaaataaaaatcacacacacctcaaaaacaagctcatggcacctttaatttacttgctttgtttactttaaggcttaacatgataatttaagaaactggtgttaggctaattttaatttttaatagaacctggatgagccaagatgctcatctctgaatagtaaatcaaagaactctctcccccaacccccaccactaaatattctgaagctaaatgagatattattaacaacttagacctaagcattcttagacaatgaagtaggcaattaaagtggatcttgattattatttacagagcacggaaaatgatttcagtatatatggagggtccctgtctagggtattgagggtttctatgagatagagtgccctctactgtctcctgttctttcagaaattgactgtcttctgcaatgttcgttcatgccagtggcccccttgctatatagctaactggtcctggagtgagctcttcttcacccaggtggaagcagtcagtttccagcctgccctggccacacgtgattggtccagaaatggaaacttgatgcaaactaaaccaatgaattccttcgtagggcctgtggactgtgggtcagcaaggctgttgtcttccagtggtagaaagatacctgtagcaatgtgcacttcttccatatagggaaaagatgatgagaaaataaagccaacacatagaaacagagacagagtctacactgagatgtcaaggagcccacaatcctgaggacatccgtttaagtccccgattgtaattattcttaagcttcagccatgtacctgcttttccctcagcttagttggatcccaagaaaaataaattctccccttgcctaaaccagcctggctaatactgatgaaaattgtgaaatatctcctccactaaatattaaataaaatatcaagatctcggatattggctagttcatgaagagatattaagacaaatcacctctgcttatcttctttttagcatgccccgatttttctatttccagcatcacagtgaattttcgtgaggatgtgcaattcaacccatatggctgaatgtcagctcctgtaaatatcataaccagaaattcctggatatagatgtcatccatcatatgtaactcactccgttctctgaattaaaagatgggtagagcacttttgattgcaaataagaggcaccaactcaagcaagcttatgtaaaagaggagatcggagacggaggactacttcacagaacctgcagagaaactgcagccagaacccaagaaagaacaaccagggcctgcagagtgatcaggactctccctgcatctcccatctccatgtgtcacattcattatcatttctttcttatcccctgcaaattcacaatgctaagaatcagaactctcactggcccaacttggttcaagggccaacccctggtgcagttaaccaatctacaatggaaaaaggggtgaaagtctcgttgaatacatggatgctggggatatatcatttagggtgagggtgggaagaagtggggctgtgggtggagtggacattatgaattgggaagcactccagatgtacccaatagtaataactatcacttacctagtgttttcctatgtgccagatactcttttaagcattttacatctgagaatctaaccctccaacaacctaatgagaaagatgctattattatccccatttcacagatgaggaggctaaagcagagacattagagaatctgaccaaggttctctaatgagtctgcactcttaaccagtatgcatactatcattgcaaaatatattcccagatataggccctcactttccccctcataccaatccaaggatccattatgccctttactcaggcttttaccttgcctcatcctgaactctctctctgctaatcagtcctttattaaatgtgtcagtcagacactggctgtgcaattcacataaaatctcatttagacccgtgatgaacaatctttggcgttacattaattctcccaagtataggcaaatcaagaagtgtacacatgttcaagtgcacacaactactatgcagaaaactgagttgtctaattccacgtttcatgctatttctttagaatactcagaagaaaggcaggaagttactccaggacaggactcccccaattcttcactccctgctggttccccctcctggaaactgctttcttttctccactagaagttgctgtgtgttccctgcagcttatccagaagcccatatgaagcagcagcattaggcagatttggctcctagaattcagaatcctctctattttgatttttttagaatctggaaaagatattgtagggaccctggttattttgccagcagcattctcatcatcacatatttccactgaaagacatgtctgtcctctcttcctaggagggaagggaggcaaaagcaagctgacttttccttacccacaaccttgcagtgtaatctgtcagttcaatcgcaccagcatctcacgaatcatcagacagagacggctgcacaagaacatcagacagagatggtctcactgtgaacatcagtcatgctgccttaaaagttccagaaagaaatatgaatgcattttttaaaatctggtagaaaagacttggtaatccctgctcaaacattttcccaaatcctctcatgttgatattaaagtgttcccaaatttcacccaggaattaagtctaagttatttaaattgtgtgatcaaaagttgacatttgagcttaagcagacagattgtggcattagtgctgctgtgatatttgccagttcttttggccgaattttagtgtaaaattccaaaattattgagctaattatttaagacaaatcatacagcttttgtagtgtcagtggcagaggtctgggagtaaaacaccattggttcttcaagccgtcgttttaaatatgaaaatgccacttagacccgtattctacacagagcacaattagtagctcatatcctggccctattgcaaatatcagtaagaaataatatccaaatatttatctgatggaaaagttctgttccacacattgccataaaccagatacaaatggaatcctctcctaccagagaaagatactaacccccaactttcaaactaatgttggacatggcacccatgctgtgttatgaagtaacataagtgtccagcacatagtaggaacttctttcaacttgttgcctgaacagttaaacaaaatgtgtgtgcagggatcccctctctgactctggcctttgtcaatagctaaaaatcctgggaaatctgagctcacggaaaaatataaatgccaggggggtcctctgaagcttgttcaagtggaaggaagtccatctagttcataaaagctgaggaagtaagaccaattgggtaaataagctggcctagaaaactataatgcctgagcccaaagtgccttttaatgtctgcaatgcctattttgacaaattaataccaagacctctttctctcatttaacctgctgaccccatcctcattactccctgtgcttaatcctacagagtgcacattgtctgggtaatggtggaatggccattgctgtggagggctcagccatcaccagccttctgctgaccaggatgaaaggagatgatgcatacaggatgcaccatgcagagagaacccccagagttgcctcagctctatagacatttggagccagatagttctgccttatcctatcatagctaagaacaaaaactctgctaggtttcaagtttaactctagtaactattgcttaacacttctgcctcattttcttccaaaaaatagggataaatagaagcatgtgcatcagtgggttgttggaaggattagataaggtaaaataaagcatgtaaagttttcacctagtgtccagcacatagttagtactcagtaagtgccaactaacattattatctttactataggcaccatcattattagtactattgttgtttgtagtggtggtggtaggagcatagtgcttgcaaggggtgtatgtgtgtaaagagaggctgtgtgtgtcagtgatcaaaacatattcatgttatgatctctacttttcacaataattctgtgaggtttattatcctcatttcaaatgtgggaaccaaaattcagatgggtgaagaaatctgtccaaacttacaaagctagtaagcagcagacccagcattcagggtcgagtccgtttcactgtcatggactggatgagttccttgatgccctctttgtactctgcacgcctctgttgcttcatgtgtcactaactggtcactttctggcatgtccccccataccatcacctctcggctggttttctcatctccagtgacagccataccaacctgacacatgacagaagcccaggaagtgtctgagagattggattaaatagctgcagcactgtcagtgagctccagtgtctagcaccggcccttctgtcacattcctccttctgatcacccaccaactttgtcatttgagtctttggggtctagggaacctcactctgaaggggggcagccttgtcatcatttatacataccccattcatcctctctgggtaaaaatccaaaaccagaaaagaaaagccagcagccaagggaggcattagaactttcaaatgctatttttaaagatgttccaaaatccctcagagcataaataaccctagtgggaattgtccttgggaggctatctccactgaggaatgttatcagcccaaaacaaaaataaatggccaacagagatttttttggaggactttgcccacccatacgctatgtttctcataaagcaatatgaataaacaattcttctgtcaaggctgatctatttttgtgcttgaaaaagtagcaatggagatggacgactgcattttccttattttggcacaagttcagctttgaaatgtgtttgcaatgggtctgccactgaaaaactccactcaagaaactcagcctggattgacagtatgctatttcttcccaaggcttaagtccttgcaccagaaaaatgtccttgttttccttgcagacttcagtttttatgagcctctttttatgatgtcattaggaactgtccaagttctgggaggagtgatcattctttggattttcccaatattttgctagatagaatttggtggagctaaccctcagtcagcatggtggcatctgtaaccaccgggcctcctaaaaaaatctcaggactgtggagttaaaaggcactcagtgagtccctaagataagttgtgatagaaggaaccgcacttgacaagacagtctctcaaaattgattagcaagaacccacttcacaaacgctagctattttcttcatcctcctggcaactaccaagccagcaactggcattaaaatcagaaattccccacttaccaagttcccccacccacaccaaataccatgtagttcactgaggttttggccccagtatgaggaggcaagatacaggtcagtgtaatgagtttcaggctcttgggatgtaacctttgttccgtgacagcctttaatggggcctaaggactactctcagaccatgagttaacctacctcactcttcccttcactctccagagaggccatattccaagaaatatgaggaaatattgtgtggctatgtaaagttgtatacaccttcttggattcatggttgcctacagtattttccatgggaaggagaaaagagcagtggccctatctcagccaactcaacctggtggcaaactcttctttatccatcagaccctcatcccaaaggtcaccacctctgggaagccacccttgattctctcaggaaggatttgcatcacattatacttccattacagtacctaccttgatgttctgttatagatctttctccccagtagctgtaagctcaaggaagacagtttacatcctctcaacatgatccccctagtgcctaactctgtaccatatacagtgtttgtggcagtaaatgttttccaagtgatggggacccagcagccaagtcctcgcatcttgatggtttttcataaaagaaatccaagttctgaggttcacacttgtccctgatcaagtccaagaatgacaaaatttcaaggccactgtgcaggaagttttagagaaatacaacgtttgagattcttttgtgatgaatcattagtagctcttgtcaagatcatcagcctgtcatctcatttcagaagcatccatcctgctctttccctcacattcatgcacagcgtgtttagaaagcaccacacagtgagcttagcccagtcttaaaagcaggacgtgattatactaagaagttccagaaggaactggtactgtgacgttgcggagtggatttcagacccccatattttattcacatggaaaagcagaatctcggtgttctttcagaacttaatttatcatctatctacctcctcctcacagctgaattttagctacattgatatttaatatgggcatttttgacaagtcattgatctattcactcaattcatatgtattgaatacttattatgtgccaaactttatgctagacacagaaaattcaacaggagtattaagatagatatggtcctgaatcattgcccagcaggaaagacagaaattaaacaaattccacaattgattgattaattataattataacaagtgtcttagtctattcaggctgctataacagaatgccatagttgacataaacaagagaaatttgtttctcacagttctggaggctgggaagttcaaaatcaagccaccatcagattcagtgtctgatgagggcccactttctggttcataggcagctgtctttttaccaggtcctcacatgctggcaggaacaaatgagcagctctccgaggcctcctttatacaggcactagttccatcatgagggccctcatgatctaatcatcttcccaaggcccatcttcaaataccataacattgagggttagatttcaacatataaattaggcaaggacacaaacattcaatccatttcaataaatgctaccaagaaggtaagttagcaaatacaacaggaggacccaacccagggaagtgaaattttgaagctgaaatatggaagatgaaaacaaggctgttagttatgcagggagatagggagagaggggaacaagacttatgacagccttcatgtaggaaggagactggcactggaccagcacaaagacatctccaagctctatggagaagaagcactctccgtatttgactgaagctgtgagatggcaaggaagaaaaacccttttaactaacagtgggtgggggaattactgaaagaaaaataaattcttaaggaacaaaattacaggagaaataactagtcctgtggaaattagaaaatgataaaagtcagagttcctttctgtaactctagaaagcatctttcttttcttttcttttcttttctctcctctcccttttcctccctccttcagtccctgcctcccttacttcttctctctctttgtctctacctctttctctctcttctttgttaagtgtcttattctgctttgacctgatccagtgtggcagccaaccctgagtctgtaagatgttactgtttcagttctaccagccaattgcagtctcaatgtctctcagtctagttcaactgcttgacagagtaaatctgattgatgacagggcactaataaaattagttggttcatcttgactcagatgcccatatgttacacagcttatttttttttttttttttttttggccacacagaattggcataccaattcatgttccatgggatctaggtggggttctactcccagccacaaggacagaggacataagctatgcctatgcacatcagcacagcatattactggccatagaaattggccagtaatatggccaattggacatgtacttaagttagactttgggtgagaatttggggatgaaagactgtctccatcttccttgcatattacaagaggaaatatgcacttttccgttagatagcatgatgtgatgttgtgcagtccacatctttagcaacatttctgtgaagataggggagccaaactgagcatgaagccaccccagaggaaccaaagccaagattttaacaaaaatctcagttgtggtgatatcacctgagccctgattccagcctttcctgaagctgggtctaccccaggatattttcttttgttgttttaagccagtttgaggtggatttttctgtcacttgcaaaaaaaaataaaaatgtcaaactgacttggcttgcttctcactccatcagttatggaatagggcttggggagggcaagtttatgtttcaagtggtaaatgactgtttgggaaggtgattgatccaaagcacattccaggtgacttagaagtatgaagaaacaaatagcatggttagcacgtgttgcaattacaactaaatgtataagcaagaaaggaaaaaatagaggtcagttatgataccaaattgctctatcttctaaagaattttaatcacatttttcatcacttcattaatttggttcaatttttcttgaaaacagtaactattattcttagaaatagacacagactatgtttgaaacctctcaaatgagctccttttgaattattcatgtgagaaaatctctgtagatatccagaaatagggtctctttctgtttccctcacttaaaaacaaatgactgcattttactaaaaagaaaaactaaactgaaaccatatttgaaaaataacaccccatttttcttcctacaaatcaaatttgctgaaggaaactggggaaaaatagaactgtaataaagcatttcaatgtttcttactatatgtttatgtacgtgtttcttacctgttacaatgtataaataactagcaggcaggcagctgtctactcaaataggctgaacatttttctagcacaaggccatgagatctgggtgaatttcactagtagtagatgtgattctaactctgggccatgagacaaagaccttctttataaatcagctttctattttctcctctgctcatacttttctttttcttcccaaggaacgcaaatttcccaagtttgtatccaaagaaatggaaaacatgtacattgaggagctgaagtcatctgtcaacctgctcatggccaacttggagagcatgccggtatccaaaggcggggagttcaagctccagaaactcaaacgcagccacaatgcttccatcatcgacatgggcgaggagagtgagaaccagctctccaagtcagatgtcgtgctgtctttctcattggaggtaaaaagccctgagcccttgaaagtttcttggcacagcaagtaggacatgggcgattagatgcgtcacaatcagcttgttttttctgttgcaccccaggagcagttattaaaataacagcatgctaagcttaggtcagctaatcagcaagtgattccccatctccaggagcccacatttttcttaaggaaatgcaatctgaaaaccacctactaaatttaatcttgcattactttctgtcttaaaacagtgctcaaggattttataaagaccttatataatttagaaagttaaaaattttggcagccagttttacagttataagagaggcaagctagcatcatattgtggtgagctgtaaattttctttcccatcatccttcctgttggctacaaggtagagagtcccttgtggtggaggcttttttagtttatctcagctcccaaagtaagtacccattcaggctagtattgtggcaaaatgctcaacatgtcaataagtttctctataatttctcttcacacattttcttttcatatgtatataatctaaggagtagttctgatctacctatgtcagaattacatgggaaggtagttcactatgcagattcctgggtaccacccagatctactgagctaggatctcgaggggatgggaatataaaattgtgcagccattttggaaaataggttagcattttctgaaaaagttaaacataaaactaccatatgatctagcaactccactgtcagatacccaataaaaatgaaaacacatgtctgcacaaagatttgactgtaaatatttatggcagcattatttataatagcccaaaatggaaacaacgtaaatgttaaccaactggtgaatggatcgacaaaatggggtatacccgtacaatggaatatgattcagcaattaaaaggaacaacccactgatacatgccatgacatggatgaacctcaaaaatacgcctggtgaaaaaagccaggcttggcatggcggctcatgtctataatcccaggactttgagaggctgaggtgggaggattgcttgagctcaggagtttaagaccagcctgggcaacatagtgagacatctctacaaaaaaaaaattttttttaattagctgagtgtgatggtgtgcagctccttgggaggctgaggtgggaggatcaatttagctagggagatcaaggctgcagtgagccataatcatgccactgcactccagcctgggtgacaaagagagaccctgtctttaaaaaaaaaaaaaaaaaaaaaaaaaaaaaagaccacatattgtatgattcccttgatataaaaggtccgaaaggcaaatctacagaaataggaagtggattaatgttccctggggcaaggggtgaaaaagggcataagaaatcttgttaggaaaactaaaaatattctaaaactaatttatgatgatggtcatgcaacttagtaaatgtaccaaaatcactgaattgtgcatctaaaatgggtttattatatgatatgtaaaacatgccacaatcaagttgtcagaaaaaaaattctagacaggatgcagccctggactgtatactttaaccagcccctacatgcttcttatccactccaaaatttgagaaccacttgtaacttactaaagttcaaaaccccacaagggttttatgataaccctagatttggggagaccaagagaagagatcaaatttctgtgcagttgattagaatatgtaaaaactaaattaattttctaaaacatcattaaagcctgctgtgaattaactgcaggtaatttgtttttctgtgctaagtttggatggagatactcacattagtgttttcaacatgtattgtgcagttggaagaggcagtattcaattaaatatagagtacttagtgtgtgaaaaaatcatccgtgtaatttcacagaaactttcttttttaaaaaacaatactgccacctgaggtactgaatgtattttcttaggtgtctgaatttgattattgccaattaaaggtgtcaatttattccctactgcctcttgtcttcctacagaaacggggggaaagtggtttattgattttcatgagtattttaaatctgtaattttctttcctcttttttttttttttgacacaacgtctcactctgttgcccaggctagagtgcagtggtgcaggtgcagtcttggctaactgcagcctcaacttcctggactcaagtgatcttcccacctcagccagcctcccaagtagctgggactacaggtgcacaccaccaaacccagctaatctttgtattttttgtagagatggggttttgccatgttgttcaggctggtcttcaactcctggactcatgccatctatccacctaagccccccaaaatgctgggattgtagatgtgcaccaccatgccctgctaaatctgtaattttctaattctttgtcagtactcgatattacacagctgattatctgaaatatagatgtagacaagtccgtactcctatgtgtacctgattcagatggtttgacttgtaattgaaagtacagaaagaaatgtcctaggattcccaaatactttttaaatagaacactgaattgcacatcatagaaaactgccagcaaaaaccattgcacatctgtttgtgaatgtgttttggtgggcacaatgagggcaggcaagaagagggagaaaggattgtcatctcatcagggcagactaggatttgaatttgcagcttggtgcaagtcatattttacataattatacacttgcatggctggaggggccaccaggtagtaaataactttgcagtgagggaaggaaggtccagggtgcccagtagccaggccttgggcaaaggacaaagggcaaagggcatgtgctaacagaaagcaacaggtgtttgtagaatgccactgtgggccaggtgctttttcatcataacacagtgaatcctcacaatagtcttttcaggtatttgcaggtgtagtaactaagcctcagagaggttgagaaacctgcacgtgattacacagcttgtgaaaatgcataatcaggatgtgaagtcagatattttaaattccaaaatttgtgctctttcactgtgccttccatttctttctatttatatggttcttcccaatgtaaaaatgttcacttatgtgcatcgtctcatttgatcctcacacaacagccacgggatacatatttttattcccactttacagatcaggaaacaggccctggagatttgaaagaaaaatgaagtgacttcaacatcaaatcatttgcccaacatcacgcgagtagtacaatggttttgaaagtatggcttctgggtcagcagcatcagcatcaccaggaaaattgttagaaaaagaaagtcctgggctccaacccaggcctactgattagaaactctggagatcatagagcctagcaatctctagtttaacaagccctataaatgattctgattcacattaagtttgagaaccagtagcaaaactgtgacttgtggaatcctggttcaatgctaaccctattgtactttcttgaatctgatccactaaggaagtattcattttttgcgcactcacattcttcttcttgtgtaataccattacctgttttggagtacaactgaatgattttttcatgtataaggactaattgtatatctctgatgtgagtcatttgtttcagatttttaaattgatctctttcttctctgctttctgcattcttctccctccccggtctcttgtgacaagccatactgttaaatatcagaatagtaggtgattacgtggagtttggggaggtggtaggaagtgccagaaactgtaaatgatacatcttgatccatcatgacaccggctttttctctcagtctggaccaaagactatgcagctgcagacatgtttttgttttgactcaataatattggcctgtacagagtttgtgtattttatttctccctatttgaattattgtcagcatttcaaaatcagctttctcactgtgactctgattcagtttttcattttctggaaggcaaaattggagtatctggtaactctaaagtgagaaaagacaaggcaacaacgggttgtaactggcagctgctcccttcagaaggagcatgtgctctccagtttgtcatagtccctgctaatccctgttgcatctctgaatctaatgctgaatagtacttgccctttattttagtatttgcactattacttatcttattgtgaagcaaaaagtgaatttatgagcctgtggctctttaaagtgctgaaccaaaagccagactatttttaaagaaaataagagcctggccgcgcgtggtggctcacgcctgtaatcccagcacttcaggaggctgaggcgggcgtagtgcctgaggtcaggagttcgagaccagtctagacagagtgataaaactctgtctctactaaaaatacaaaaaaaaaaaattagctgggcatggtggcgtgcacctgtaatcccagctactcaggaggctgacgcaggagaattgcttgaaccagggaggtggaggttgcagtgagccgagatcacgccattgcaccactccagcctgggtgacagagcgagactccatctcaaaaaaaaaaaaaaaaaagagccaattccttggtagaaatgaaaaactgatcttatttgcttaacacagaaagagtagcccattttatatgcctgtctggcccctgtgagcatttgaattggtgagccttgtctttctatctggcaggcaatcagctacactatgaggaattgcatcttcgtgctagactggtcccagcatgactggtacaaacctaacagaagccatcagatacctgttggttttctctgtagcttctcatttgtgtattttcctctgggcgatgctgccaggggccttgccaataacctccattatgtggaattctcttttcaggtggtaattatggaagtccaaggcctcaaatctttggctccaaatcgcatcgtatattgcacaatggaggtggaaggaggagagaaactacagactgatcaggccgaggcttctaaaccaacgtaagttatgtttctccagggtccatcttatagagggttgctgccattagttccattttggccaactccaaggtaaagatctggtttccccagaagatacgagaagacataaaccttgtttatttttcaaacaagatgacttgcctacatttttatttggcagccacagcaaagattctagttccttcaaagcagagaactgaagaaaattaaagaaacagtgtcctttctagtggttttaagtattcaccctcgagagattagtcacaacttccattcatcaatataatgtgcaggaaagtttgatataagtttacttttattaaattttctaaatatttggttttcagtataagacataaaaatgttttcatttccatatatttttggggaacaggtggtaatttggttatattactaagttcttcagtggtgatttgggagatcttggtgtcatcacccgagcaatatatactgaacccagtttgtagtctgttatccgttacccccttcccactctttcccctgagtccccaaagtccattgtatcattcttattcctttgaatccttatagctttggtcccacttattagtgagaacatatgatatttgggtttttgtctaattttttcctgtatgtcatagttctgaatgtattagcaaggtagtatgttacataatacattaattcattgggtcaatacaatttagtcaaatgtgtgtgtacaaggtattattgtatggtggaaaggaaagtagtcactgctgtagccctccacagctcacagtttcatggggacatcagaaagtaatggcacaaatatataattataaatagttataaatgctgacaaagaatgctttgagaggagatagtgggaggcacctgaaccagtttgtgaggacagatgcagaataggccttccttaggacatatgaggcatttgaactaatattattaaagttgagcaatgggagtggggatgggtggagagcattctaggcagagtaaacagcttgtgcaaaggtcctgtggttagcaaaggccctgggcaaggagaaattcaaaagaggccagcagggctggagtttggagaataaggggtggataagctgccagagaggcaggcagggccataccatgaggaagttgttaggccttggtgaggaaagtatgcattggagatgtattttgaaaagatgactctcgctgcagtggatggggagtgggtgggcagggttgtgcaggaggtcagttagggtactgtttcagcggtccacaggagcaataatgggttcattcattagggtcagtagactctcaggcctcaaagattcttgagagatcattgctcccttccctccctacccactactttcctctcccttccttttctatctcagttaagcccatctagactaatgagcatctttttgtgttggtgttaattcataagagagtcatcaaaagagaaaccctgaacagcagctcactgcctctcctcccccagagcattatgagctgtttggcagaacatgaataatttgccaggatgttcaaacaaaatagttcaaagaaagcacggaatgtttcctggactagagaaaatctcagggcattgtataccttcaagtggctctttgcatgaataggcaaaagcctcagatgctcagaagctgggagaaattaatgagtgtgtacaagaggaaatggaaaccaatgcaccttgtcacacgtcacccttcctccctttttttacaaccaagtttcaaactgacaataaatgtggtttcttttttactgccattgatgaaatcccagttattcctcaaatggtctgatcgttttccatgctcttatgttatactgcactatttgtgcttttttaaaatgtgtgatacatgggggaagaacaacctatttcgtgtttctggcaaccttttaagatgctgggcccaatatggcgttataagattgagaaggaagaagaaagttctgattattctaacagactgttgtttcatatgagctattataattcaaaacatagtttgtaacattcgatcagatgcaacggtttcagttaccagggtaaatcatgagttgattttcctgtgtttgtaaatggttaaaacagaatttcagattacaaataattacagaatgattgggtctacctgcatgaaatattcatgttttatacacatacttactcataactatacatgtggcttatgatgtctatgtacagaaacagctcacattgaaacattttgcttttccagtaagaagtatacatttttgattcctcttcagtcaataggttggttgatttgtaataccttaaggattcaggtttcatgaccagggtcaagtgaaatcagtcagtggtagctacctgaagtgctgtattgagaagggttcgaggccaaatccatactcagaggaaaatagtgccaaggtcaacttgtaacatctgccgtggaagaggaaggagtacaagtgccctgtatttgccatttctatagtatcccaaagggatatacgtggagcttgaaatatacaacactcgtgtgtcttcctctcttcctttatcctttacatgtagactctcctatatcctttacttattttccttctaaatccacaattctgtactcaatactctttttaaccatttttctttgtcacagttcacttctagtagtttttctctacctccaagtggttttgttttgttttgttttgaggtttgggttttgttttgttttgttttgttttgttttgttttgttttgttttgtcttttgagatagggtcttactctgtcacccaggctggagtacagtggtgcaatcacagctcactgcagccttggccaacctgggctcaggtgatcctcccacctcagtctcctgagtagctgggactacaggcatacactaccacgcccagctaatttttgtatgtttttgtagagatggggtttcaccatgttgctgaggctggtctcgaactcttgggctcaagtgacctgcccccgcctcatcctcccaaagtacaaggattcaggcatgggccactgcacctggcttgcctccagttttatctggtagcatgaacgagcctgtttgtgcagttccattttcttcctgcctccctagttttaacttactcagaagcctcttcatcatctcttttctttgaagctttatttcttctccttttctccacccctcccacttacactttctcctattactaatctccaactgtcatctctgctacttgatttttattattccagaaattttcctttcggggattatctttaatttgtcctaataactccacttcatcctctgacaagcttagcccttttcctgccctattcatcttctgaatcttgtctttgactatttttacagccagctggtgcccatgctttatttatatattctaaaaccaaaactccattcaagcatgttttgtttattactcaaattccatggttgctgctaccaagtactacaccccataactggaaccctaacattgtgccatagcacatgtctacaaggaatttggctgttgtcttttttttttttttcaagtatagccaaaaatttaggagtacataacataacccaatttgtctaagagtatgttatttggaatcctcatgtattgaattgacattacacatccttcacctccttttatcagtgccatctcttcacttatggccaggaccctgctcagcatcgtcatattggatcagttgtataatataataacactgcgttcattagttaaatatattaatactttgtggttggaaaaaatggtgtgtgtggtgaaggccggcagcctcttatactctcagctaaattgtggcccatacttatccttcagttgatcaatctgtttgctacctgtgggttgtttccaagcagactatatcctctcatttctgttgtcctcctctcctgcgtttttaacatagaaagccaggagaatatacgatcaagttttcatgagacgtatttattttacaatattgtctccatttgcaataggttgtttttgcttctgatgggaaaccaatggggatacttaggcagaagtgcttgaaatcctgccattagatcagcagcctcaggaaggcagggagatggagaaggaaatgctttggggattccaaagcatttggaatatattttcccactctctttgaaatagagcagagggctgttcttgctctaaggtgatatatttcaaagggtggcactcttacctttactaagaacagagattatgttaagtaataccagaaaatggcattgagtgagatgaaattatgtgaaaaagaaggcactcctttaccatttatttttcaattcttctgatcaggtcaaggagaacattttaattcgatgctagtaggtcattaacacctccacaggtctcagtctcagagccttctgcaggcaacagcatccagttaagatttcatagccttgtttagatcccattacgcttaccttccattcatggctggtggtgctgttttgtcttttgtagcaatgacataagatttcctttttaaagaaatacattaacatttaaaaagtgaatcaatttaaataaaatatattaagtaaataatagcacaggtggtacctggatacaatgaaaagtaatcatgaaagtatcttggtatacggaaatggcagagattgggaagatggtaggcaaataaagtaaatttgaaaaaaaaatgatgtaaagaaacctgacatattccctgagtagaaaatatattccaaaattatatttattggtagttttgtataatgtaagttgtcctctgtaataaccatgccccaaggattaaatactggaacacttaaataattttgctgaaaagaaaggaaatttgaattagcaacccagtattgtgctaatgtatctgaaattatattctactgaattgaaaccaaagatgccacttggcatttgattatttaacaagttcattactccctgacaggccatgggcttcgtgacatatgaatttcattattgccagggattagaaagcacaaccaaacttggaaaattggtattttccaagggaatgagaaaataaaatgccctaactgggatcttgccacggccctagggttcttcaatgacatctcatctgatgagacaaaagacaaaaccaaaatacaacaacttcctgtaacatttttcttctgtgaaatatattactcatcctaatggtagagtgtagaatgggccaggcttattatacccaaattattcatagaaatggagttctattaaattgttcccacattaagtcagttacaaagtcagaaaaggaagttgttccctccagttgcttgcctcatgtattatcttcttaatggtgcttcctttttcaatttaagcaaaatgttttctgtgtactgggccttggaatggtttacatcaaggcagaatatctttcctgaatggcttctttgatattcaaatgtgatacgatgatatgaaagggtagatacttgcattccttcagcaagtgtacacaggatgctttccttatgtccaaccagtgctggggctacagctgtgaataacatatctcaaaccttggcctgtggatcaaacattcaagtaagggacataggcaataaacaaatgaacaaatgaatatataagggtaacaacagattataatttgtgttctgaaagaaatgagcaggctgctgtgatagaaagtagtgggggcatagggaagaggaaacagcaagtgcaaggctttgaggtagggaggggcttgatgtgtcctggaccagaagggggaacaatgtgcctagaaattagtcattgagggagagtgtttacagggagagtgcagagagcagggcagggccgacaacttacaggtcttaggggccacgcaaagggtttaaactttattccaagaccctggagaagctattggcggagtttaagccagggaaaatatgattgtatttccatcttgaaacctgaaatatctttaaggactggagtaaacttggaaccatatattggtaaactagtatttattgagcacatactatttgccaggctttagtattagagtggggaataacacagatacgacctttgaagttgtgcacccatggaggagagttgattggaaaaatctgagcgcctgagcatggtctatattccaggagcctcagtagcttttgagaacttcaaaggccactgaatgggaaagggaatgaggcttcctgagaatcagctcctttcctgtcttgacactccatgctcaagttcacagtccaggagatatttacgtagagacattatgtagcgagaacgtggagcttggatactatttcttctgttttttccttccagaaaaaggtttaatttctttctaagttaattaaatcataaatggtaaaagtcaacactgacccagaaattaaattttgctaggctcccagaagatacgtaggttgggagaaagtaaaattataatcacactttgggatgctcagacactgtcctgcctctcagaccagaatgcttggtccagaattcccaatgtttatttaagaccagtttgtgtgtgtttgtgagctggagggtgaaggtgggcagactgctaggacaacagacagtaggatagacagtgggaaggaagcaaggtgctagggaacaagttttggagagagagctcctaattcttctccaagctccatcataaatttgccaacctgtgttatgtaagccaccaagctttccaacttctccaagtcctgaaaagtggaatccaaggtcccttctacctcaacaattctataattatttcatccaactaactggtccagagaagaaccataatggcagaacttaagacagaggtttcaggaattgcaactgactctgagttggtgaaatttctgaaattagttggaatttcagaatgggatgatcaagtagtggctggagtttgtcagttagacgttgatactccatctaaacgtgaaaaatctataaaagttctgatttcatgagtagtctaatcttgtgtagctatgaaacaaggctgtactctttttaaaaaaacccttaaggactaagtgactgtaggtcatttcctttctgattcagcttctctattaccttgccagagaagattacttgccacttacatctggagtaaatctaagaactggactgtttttctatcactgttcagtagaaatcaaatttaatacatttctctccaaatgtgaaaagccactgtattttttatttagtgatcagggagaacataggaaagaatgtcatagagttatttccctgtaatgatagaatgagggggaaattctaaatcctcactaataagaaaataacagatacttgatttagattcatcagtgttcacaagcagtatggtgtcatggacaagagtacaaaattgagagccagagcactgcgttcctatttccgctgtgtgagtgggcaggctgcttaactctttgtgcctccatttccatattcttatgaaaattaattgctatatatatatacatatatatatatatataatgcttaaaacaatgcttgggcagatagtagtcctattgactattgtaatcatggctttattcttgtttagatggacgaaggggacatgggggaaaacaaggtggcctgagtctaaaacagtgatcattaacgttgattcagtattttctatggaccaggtgccatgctaggtatttcacagtcatcattttatttaatgccctaccataacctatgagataggtactattgttattctcattttactaatggaaatattgaaatccagagaggtgaagttatttagtcaagttgcagatacaatagctaagccaaaagccaaacccaaagcctgtacttttcatccattctgccaccctacctttctaaaagaaattagatctctaaaacagagtaacttaattagcattgaatattcaacaaaactatctaaaagcgtgcatttcctttccataaattcggttgttttgtggattaaaacccagcctatatttaaagggagatgaacgtgctggcgcacacaccagcacaggtgttccacattagtgtacacactcagcaggcataattcgacccacatacatcagcactgtgaggtgtaacacgtgagtctaaaaagaggctctctgcccttgaggcatttacacaatcccaggagagacactaatgataatgatcatcatcctcaagggaatcattatcaataacaactgcccctaccatttattgaaatctaagtaccaggcactgaactagctggaaccatatggctaagagtcagatggagctgggtttaaatcacagtttcaccgttcaccagctgggtaaccttgaccaagtagcttctccccattaagcctcagtttccctaaatttgaaagagagacaagacacaactgccccatcgggttgttgttgaaaatcaatctgatctatgttaagggctgagttcagtgaccagcatattgtaacctctcaggaaatagtattaatagcctaaaactcactataatgtcactgaactccacatggtactgttaagaaatagaaggaaaaaagagaagctcagagaaattaggaagcctgcccccaaatcctacaactccacacacccaggcttcaaacacctggaaatcaattggccaagggtgccaaagtagaagggagtaccattgccaaaatgctttccagagccagaggacatattctgagggtggactgccttcgatttgatgataaaagaactagttctcaaaggcaagaggaatccaaaaggcaacatcctccatgagtcgtcttccagaggcacagccctctacagcctgggtatccacaagcctgttattctggcttctttctggatcagggccattgttccagaggctagagtgcagctaagataatactttctatgtgtttatcagttacttatttgtcttccagcaacgcccctgtgctgtgatatggaactcacttcactataaaggtgcagatggatgtgagccctcggggaggacacagcatcttggcatgatgccaattatcagggggtttggaaatttctagagctctggtgtttaaactctggagtccttcagagtcacctgggttccttggtaaggattcagaagctttcatgccagcccgtagctgctagtttagatggtttgggatgaggcagctatttcaggcagtctttaacagctgcagtctgggtggaaacatttcagtgattatatgaaaaataaaggttcagcatgggcataagagcaaaagctttggggtgatacaacccctactttgaatctcacctgtgccactgtcattgttatggtaggtgagctactaaatccttctgaacctcagtttcttcacttacaaaataatactgatgatacctacaccataggctgcttaataacatttcaaatttaacatatgcaaagaacttggcacaaatgtaagagatgttattcttattttaatcattattgctgtcagtggacccagggtaaaaaaggaaaacagcacagaccatcaaagtcagttggtgtgaactaaagaagctaaagacgctttatctctcagatgccttttttagtttcctttggaatgtgttcatttatatgtagatcccttacttgtacttggaaaaaaactatatagcaagctagttttcttataatgcttacatgtaaagatgattaataaatgttggttgattcagagctaaaccttagcagcaagtggtaaagggttatggaaaagctgagaaggggcccaatgtgatgggcttgaaaacctcttcagagtactgatgaccataaagataattatagtgcagatctctccatctagatgaggctccatacctaaaagaacagaagatggctgcaaaatatctggggaggggaaaaaaaaaaaaaaaacagagaaagcccgaaaagtaaaatgaacccattgtatgagtgcttgacaccaaatcactgtcatttactaagtaatgaataaaatacatacacacacataaaaatatatgcaccaaggaattgctaggtccaacacaagtaaatctctgtaaatttgacttttagcaagtagcacactatacaatctaataatgacagggtgttgttttttggatgttcttcttctgtaaatttactagagagggaaggaatgaaaagagggctcttgtctcccatgactttatacatgcagtagtacagtagagttgcaggatcaatcattgaggactattagaggcagaaggctctgggtgtgttgtcccagttctgccctgccatgtgatgtcaccttgtttttctccctgctgtgtcaaatcactcaacctatttctaccccaagagcagaattaggtgattttctgttgagccaaatgtagcgggacttggaacctagaaaatgtttctctttttcacctgcctgctttaaacagacctcaaatgaaatgaatctcaaaaacaacctggtctctagaaatagcagcctctggaagaacttagtgtgtaatttttgtcatttgtaatcagaaccaagcgtccaatgcagatctcacaaatacttaaaaatcagggggagaatcaaatcacagagagaagtgcataagatgctattggccagactcctaggttcatttggtcagcccttccttcatctcacttatctgggtggctgctgtgtgctataaacactgtgcctttgaggcactggggctacaacagggaacaaaagcagaaatgtagctgttatgtcacccacaatctaatggcacaaacaatagacaaggcacatttaagtcattgggtagagataccttcaagtttggctttggccttattattcagttaaaatattttatatacctttggcttcaacttgcctttaggagaccaaatagtcaagtgttatttcaaagtcatttctgaaatttctggacttgcgcatgctcagtgatcttggaaacacatagataatcatcatacccaatcaatgtgacaatgtctgtaatacaagcaatgcatatcattctgacttattgttaaaatctgaatattcatttttaaaataggtgagcattccaaatgcacgatggagtaaaaaatcttcatatgtgctctatatgttgaattctattagtggaactacaaaaatatgtacaaatatgtattaacatgttaacatgtaaaaattgttcattaaaactattttatatgaataaacaaatgactaagaagataaatagtacaacagtacaactcgatatctttaagaagaacattatatcacttctgagccaagaaatcttcaaaaaaattaaataatgatgcaaagcagaaaagtaaagatgaggctatatcataacggtaatttctctagacctgtttgaggcactagcattcatcatattaaatgaaataagataaggcttaccttaattctttcctatccggaaggagaaaaagcttaacaacccgctgtcaatgtcgctgtcaacgattggccatactgaaagagctggccccaaaatatttcacttcccactaacctcaagtcaaagtaaatatccatttgccgtctgtcctaaatgtgttgtatagaggcagcagggggaagtaaaaaaaagtttaaattttagctaattaagtttttaatagcaacattgtaaaaataactgaagtgttaatttcgattgttcttgtaccctcagaagtttattcagtgacatctatatttggctttggccaaatgttcatttttaatcctcagcccatttagcattcagccaaaatgtgggttcagggcccctgcaccactgctgtgaagcaaagatgtagggtggtgatttggtggagatttaccaagttggggagaagctgttttaattagaggggtcacaaaatatccccaagaggtggcatttgcacttaaacctaagcaagagggaaccagttatgtaaagagcatggtaagcagagagaattgccaagtcctgagactctacggcaagaaggcacctgtgaggggcaagaagaagacctgagggtggagcacagggagagggaagagagaagacagcaagtcagcaaggctggcggggccagatctcacgggacctggaggtcaaggcaggaggcttgggttttatgtcccaaagtaacctggttggatttatgtatttaacagatcagtgtggctgctatatggagaaggaccgcatgaggcatgagcagcaatgggagtggggacaccagttgggaggctgtggctgtcatcatgtaagacagggtggtggtcgatgatggcagaggaaagcaagtgagagggacaggttcaagacacattgggacatagagcccaaactctctccttttcattcccattgtccgctctttttccaagggtggtactatgccctctggaggttgcattctagcagcagacaacacttggctcttctctccggagtttgcaattgtttattaccaccagatgctgctctgcacacactgcttgtcaatttgtaagttgtagtgctagcgtctcggtgaatgaccttgagtgagttaaagtcacctggcatctctcacaaccatgtgggtagtggatgtacagatgtgaactggggcagtgagttctcaagctggccgttttattcccataaggattattctacagctgtaccaaatttgttctttttccactttagcagagacgtgtcttttacagaatgttacatgctgacattagggtgacattgacacctaaccaaaaaaaataaacgcattcccttccccttctagatttcatttcctgcttggtttataagtcagattgcactgtgcttgtggtcgtgcttgctgctaggtagggaggtattattaacgggaaactattttgagaaataacctacagtgagtccagtcccactgagcaagtgagctgttctctgtagataatgtcagtgttgggtacttgaagtctttcatgaggataatgtttaattacatgtaaataaatcaggcttgactccaactctacggtggaatcttggacccaggacccttcccaacagataaaaccgctaaaaagtctggaggaaaaatgcatactttgtgcatacacttcaaataatatttatttggtaactattttgtataaggcagtgtggttggtcttattattggctacatttttaaaataatattttatgtttttctgaccaaaaagttataatccttgttgtagaaaattgagggaaagtataaggaaaaattaaatattactcatgatccctatatccagcaataatcactgtatatgttttggcgttgttttccagtttttctgtatctgtgggtgtgtccacacccatccagagatatatgcatatgatagataacctcgtatgaaaatctgtatactcatatatgattgttccttttgcatcaattcctaggaaatggtgttattagttcacagctagttatgtcctgtatgttggtgaatagggtgaccaaatcattctagtttacccaggacttttcattattggcattgccccatcctggggcaaacagacagttggtcaccttgttttagtgaatacatcacatctgctcaacctccatcatcctatataccgagagaaagtgaatggctgaaggtcacttgctatatttgtttttgggagacctctatctcttcggcttctaccattaggaagctgtctctctcttgcagcctcagagaattcattgcagcttttaaatatgagcctggaattaagatatggttcagctgtttgtatacaaacagcaagcaaatcattgtgctcaaatgaaggtcactgcctggtctcactgagcaatctcaatttgctccatttgtctggatatataaaaagctgcacaattagagttattgtataaacagcagagtgatacttcatgtaactaagcaagcagattccactgtggtgtttgtacatggaactgagggcaattaatgtcttagttatatttgtgcaggatcttgcgtggaagcatcaggagaaaacaaagccatggattaaaatattcagagaaatgcacatgaaacaaacacaatcattgtgggaattttccaggtctttcacaggaactagtaacagtataagtccttttgtaaatagagtgttttgttactttcttcctaatttttaaaaatccatccgtgatcagggcaccaaagccatattgtacatgttaagtttaagtgacaatgggtctgccaagcaagtattaaaaccaaggttaatacaattagttttaattacagtaaactcagattaactaccaacttcattacctaccacctaaatttttccaggctctaggaaaaagtattacatatagaaaaaataagtgtgtgtgtatatttgtgtgtgtgtgtgtgtgtgtgtgtattatacagataaagtttttaaagtatgcatttataatttgaggaaagaagtctcttttcatttcagcttttattgtctctttttaaaaataaactaaaaaaaaaatatttgacccatatttaaaatggaaaatttaggcacttgggaaataagatgagaaacctacataaccttgaggacactcaaaatagaaaggcagttaataggacttaattctaaaccttggttgtcagggtgactgaaaccacaagtctcttaaaatttacatcaagcaccttgttaaaaagtgggagtaaatcacacaaaactccaagtcagcattataacatgttatttgcactgatttttttatgcccaaagtacaaatcacaggtacatactctctctgtatgaagttaaaccaatcaagggacaagtgattatattttcttcataggaatacttactttaaaaagaaactgcatggtggctcacggctgtaatcccagcactttgggaggtccaggtgtgtgggtcgcttgaagccagttcaaagaccagcctggccaacatggtgaaaccccatctctaccaaaaatttaaaaattaaaaaaaaagctgggtgtggtggtgcatgcctgcaatcccagctactcaggaggctaaggcacaagaatgcaagaatggcttgaagctgagaggtgggagttgcagtgaacagagatctcaccactgcactccagcttgggtgatagtgtgagactctatttccaagaaaataaaataaaagaggctggggcaaaatacagattcggattcaaatatattatcaattcaaccaaattaaagactgtagtttgatgtgggtttgctgtttatgtgttttaactctccagattcactttgcattctgatttagcctgttacctgtttccttattcattcaatacatgcttacaaaaaaatatgtattagacactgctttagacacaagggatacaccaattagcaagacagacacagtctccaccctcagcaaccctatattctagtgggtggagaccaaaaaaaagtatgtaaacaaatgaaataatttaagacaccaatgaattctatgaaaaaaattaaacagagtagtgtgatgggaaatcactggtgtgatgggaaaaactcccttgagattagcttcaaattacctccttatagaggagctatttgagttgacacttcaatgtcaaagatccactcacctgaagatcaagtggaagaacagtcaaggaagaaaaaaagcaagtttaaagtccccaagatgggaaaaagcttgtaatattcaagggacaggaaaaaaacaaacaaacaaacaaaaaaaaaactgtaccagagtctgtgagcaagaggtaaagtaaaaagagacataggcaaggaccacatcatggaggccttgtaggacacgaaaggtctttgatttccgttttaactgtaacaggaagccctcagagagtcttatacaaagaatggccatggtggtggttactttgtgggaactggattgcagggaaatgcagggtacttaatagctttgtaatattctagttcaaagttgagtgatggcgtcccagatttttaactatcatttagaaattacatctatgggtgtactgtttagcaataaaaaggattgaagtcctcatacatgctccaacattgataagcctccaaaaaattatgcagagtaaaagccagaggcaaaagaccacatattatctgattccatttataaggaaaatgcaaatctatggaggcagaaagtagattagtggttgcctaggattgtgggtgggagtgtggttgactacaaacagacacaaaggatctttttggggttgttggttatattctaaaattggagtacagcaatagtggcacaatgctataaatttacaaaaacagtcattgaattatacacttaaaacatgaattttatgatatgtaaatgatctctcactaaagcttttatttaaaaaaatcatcaggagagaaaattttatccatgttacatatgttcttttcttaagagagtagacataaggagagaagtggggggcctattgcagtcctccaagcaagagacaatggtggcttaggctggattgacagtgaagaaaaatagatgttttacagaatgatacaaaaaggctcatggttggccaggcgtggtggttcatgcctgtaatcccagcactttgggaggctgaggcgggtgaatcacgaggtcaagagatcaagacaatactgaccaacatggtgaaaccccatttctactaaaaatacgaaaattggccaggtgtagtggcgggcacctgtggtcccagctattcgggaggctgaggcaggggaatcacttgaacccaggaggcagaagttgcagtgagccaagattgcactactgcactacagcctggtgacagagcgagactctgtctcaagaaaaaagaaaaaaaaaaaggctcatggttgaatggagagagagagagtgtgtgtgtgtgtgtaaaggagtagaagcagtaggggcaaaacaggaatcaaggatagcatctaggtttggaggttgagcaaccagacagttgcaaaagagcaggttattaatttgtcaccccacctgggaagtcactatcagtacaaagcatattactagattttgctgacattcaaaaaaattcattaaatatagaaaattcagttatctctatattaagatctctgtaattctcttgtacttttataagctttttttctgagcccagaagaaaatgattgcatgatggctaacatgtacaaagaatttcatctcatctgcattctcccatatctgtgtcaaggcccccagccagtgactgcagctaaggaagtgttcactgttgcagtaatacaaactggtataatgccttactcctctgcacgtgtcagggagtgtttctctccaatctggatatgcttacgggagcaagtcacacagcagaacgccttcctactttgtttcttcctaaactgtgaatctgaacagaggaggaacactctacttcacccacaatagaaaagagctaggtgtttagatatgactactatgaaaatttcacctgctaaaatttccttaggggaagggatggattgactgatttatgaacacattgcttaccatgaggatcctcgattagaatttcacatgacagtttgaggttgaatatacttgagacctcaaatataatggctttttgaggaaaggggaatcctgtttcttcccattggttttggaagcatcagtaatgacacaatccagatgagggagggaggggaacaaaggcagactcgagcgagcatgatgatcaaaactcaattaccagaacttcacaggttagggtcttctgaatatatagattcttaacagcttaggaggtgagcataagtaatgtggatatatacatttttttaattctgtattaccatataatttaaaagaaaagcatcaaatagtggtctgttttaaagattctcagattatcctgaaagaattagtctgtgtagttatttctatacttacaacaccaatatagttgatgtctcttaaatccctgcatttgaaatttccgttttagtaaacaggccataaagtaggtcttatttgctttctaacaaagaaggcagaacagcttgcccatggggatttaaatcataatttacattatgtttatttttatagacaggccataagtacaatttgcaaagctgggtaaaactaaagcactagaaaattaaaaagagagatttattttttcctttaaaattgagctcagttataatttaaaactaactgctttaattatactgaataattggattaggtggaggtttgcataatttctcagaatcagaatatgacaattaatgtttgctcttctgttaactcaggatacacacacacacacacacacacacacacacaactggaaagtaaaatgtaacatggaaatgattcagaggagttaagaacttaagattaagaataaatcctcatatacacatattaatgatgaggtttcataggaaaatctattccaaatatggctttgaaaagaattaggacatatatctacttgtaagacaccctccctttttcaaatctgacacatatctttaacattcactgcaattaaatatacaaggtaaggtactagctacatttttctaaaacttcagtcatttctgtctacccctcacaacatatcagcatatcattgatactattatttgttttatatttttctttaaatctattttcactttttaacttagattttaaaaggcatcttgttctgtctgattgtaaatataaagtagccataaaaataacttcagtaaaaacaatgttagtaaattctagattgattctgttccctgcagaaggagctccaaacgtcaacaaaattgccttctttgtagaacaaaaaaggcttggcaaatttaagacattcttccttcacactgagaacttcttcctagggtaatcaggagaaacagaagagaacaactgcctcacagtgccatttgatgtcccgtctttgtgccatgtcaaatcatctccaggggtacaagatttgtgcttgaagagtcacagtacccaatctctgtttactgaataatttcactatagtctgtgtatttccctggtttacactcatccttttgggtgtttttcctagagcattccatggtttcttttctgtttagtaaatccatgccagcttgcaaagtgacgtgaatgagaaagatggaattagtaatgttgttgaatgtgaacactcaagacaaaagaaagaaaacattttcccccttagctggctttgtcttctcaatgaccggaatgaaatgtcaagtgaacgtgttaattcttaatggggataccaatgaaagcttcaggggaagagaacatttaacagaggctctcacttttctctgaattttatttggatagacattagcattttattacatccttgaaaaagatgagatgacaattattgacaaggttcccaggacacaaataaataaaatgaataaattgtttatttgataaatttcaattatctacaaggtgtaaaacactatagatgcgaatgattaaaaaataaagagcaaagaccctgttttcaggatgcagcatacttacagggaaataaatcatgtacatttagtagtgaatataaaaaagtaaagattccattctggggaaaactgcagattgcttctgttgagaaaaccaaagaatggtcctggagaagatggctcttgaaaatggcccttgaatttggctagaaagcatttgcaagtacagaaagggtggcaagggcattctagcaaaacgaagtagtatccgccaacacctatagtctcagaagtgctgtactgtgtagggaacgtaggttctaaaaaggaggtataaaaggaggaagagaaaagaaagaaatctataaatataggctgagtcaaggtataaaagagctttgcagacgaaactaagaggaagagagcttaaagaaacaagtacatttagcagggataagataaacactggggacagagagctcctgaaccagtgtgacccggctccagtggtgtcctgtttctgtgcctctccattcatgtgagcatgtgtgtgcgtgtgtgtgcgtgtgtgtgtgtgtgtgtgaaaaacttttatgacaaaattgaaatgacattgttagtcatacattttgacattgaattttacaatgtttatgcatctaagcttgcagccattatacttggataatctatgtctttgtttctgctataaaaccatgttttctcttggtgtgggaattgactagttttttttttaatgtgtgtagtctttaaaaaaatttattaacttttatttaaaattcaggtgtacatgtgcagttttgttacataggtaaacttgtcatggggcctcagactaacaaaggagcaaagaccctaagtgccttacctacacctccaacaagctgtagtcaacccaagaagaagggaccactctgtctcccatggatcccacacaccctctctgctcatcaccagacaaaataagactctccattgtaagtttcaaatttcggaatgaggcaatgattggctcgtcctgggtcaggtgctcatacctggatcaagcagctgtggccaggagggcaagatcatgtaccacagacatggctcctggaggtccaagccagggcatggaggtggggccatagagaaaggataaccctgatctacacaccccacctcagaacaattctgtgaagtagatattatcattcccactttacaaatagagaaaaccaagacttagtaccatcaggtagcttgccctatggaaggagaagaaacttgaaagtacaagcaaagaagataagcaaatctgtgtttgggaatttccagattctcagtaaaacaggaagcaagttcatctgaaaaaagatggccaacttaatctcttaaccagagatttttttttttccagtgattctttaagagactggagacattttggaataggttttttttaaaaaaatatattaccagccctagtttaaatggttctttgtaaagctgtatacttaacagagaacaattcatttgcatttttggcatctttttttctgaaacatagggatggtctgatgcaactcaccaacagctggaactgggaagggtttgcaaatacactgggatgggaatgaggagaagagattcagaaggacagagatttagggcccaaacattgtattctaccaaagcagtcagatacaaacaaccccatcattccttcaaagacctgtgcaactcttagaactacctaaaatttccctactactggatgaaggtgaaagatttggccaaggtttctcagcctcagcactgttgacgtttcaggccagttaattcttggttccagggggcagtcctggacgttgtattgaggcttagcagcatctctggactttaaaacgttctagaaggctctcaaatggcataaaaggactagagaagaaagaaatctataactataaactgagtagatgccaggagcacccccacccctcgtggtgacaaccagaaaaaaaaaattgtcaacagatactctcaaatgtccccagggagtggaagggcaaaatcacccccaattgagaatcatctcttttagccaagaattctttttatttatgatatcaaagcattttaatttatttttattgaccgaaacagtggtttaagagaatgattgttcagccgtgggaagttacaatttatgttcattgttcttgttggcaacattttcatgaaagacagtgctgaaaagtctggttacctaagggttagctcagaaaaatcatccttccaggatctaacactcctcacactattgacaaatagggaccaaggtacagctagcatgcagaaggactaggaatttattgtaaatcaatttagggcttgattcttgggtcatattatcttcttatatgccaaaaataaatagaaatccattccggtgtagtatatttcctgatggtgtccagggataggacttgattttaatgattcaatcagaggaaatggagggattgtgtatcagtactaattaaatcaggaggagttatcaaccaccaataaagaataatccagtggagctttccattccaaaaagtcaactccctgtctctctgtctccttgatctaagtttcttattctctaaagaataagacctggaatgactctgtgttgaccttgtgtctctctctcttcttggtcagctctctcttctggatcagctctggggagagccacaggggctagatgtaaacccaggagcccatcttcacctcacatgtgggacttactcccagagaaagaaaatggaattttcttgagatacacttaccttccatatcaccgtaatactgtatccatatcattgttataaaacagaatcaaagtttgtttaaaaataaataacaaaggtgcatttcaaaattacatttgaatattagccataattacaattcctctttattagttgattaactctacttggttgaatttaaaaagtagttaagaatgcaaaggacttagtgtgttcatgaacatttccaaatgagctgaaatatttctgcaacaaatggaaatgtacttggaagcgcaggattaaaaatgcgctgtggctgaattttagcgcaggcctttgaagttggctattgtcaaactttagggaacatttacagcctgggattgccatctagtggctaaattctatcatgactttttttttcctcctgggtttcagcaaccttttatatctcagtgtcttatcagggaacaaaccatcaagtggaccagtgtacccatgcagctcagctcagggataaacaacatagaattataaaagaaggaaccaggatccctaaaaatactagtagttaatgtgtctttggccccttccgtttctaagactttttaaaaatatttcttatttcatcaaggttagctccctacctttaaaatcatagctaaaattggaaagcctacaattgccatgtctggaaaataaatcagatgtgtgtatgcatatgggcctgattgttcagctttaggaagaagtttcagtggcccggaaaaaactaaaaggcctgggaaacaagtaacaatgctatgttggtcttgttccctgcggaatccccagcaccaagccccggacatcgtagaaattcaataaacatttgtggttgagagcgagaagtatccaaaagtcagagacattgaactccatcccatctcctttttacacctcagaccctctgagataccaggagggcccactcagcatacagctcggggctgattctctggagatacagaccagctgcgggccaaaccaacccaggaaaccagtgaaaggcagctgagaaataaaatatgcatgagaagtttgaatgcaagaggagatgagcaagggctggatttatccagaaaggtgcacagaggacgtgaaacttgtaggaggatgggtgggatgagtgggatttacataagaaggaagtgaagagccattactgctggagaaggcaggctccagatgaaataaaaactctaaatttaaaaaaaaaaaaagaagtaagtaggactgcctttatcttcagcaaactaacacaggaacagaaaaacaaatacctcatgttctcacttgtaagtgggagctaaatgatgggaactcacggaggtatagaggggaataacgcacactggggcctatcggagggtagagggtgcaaggaaggagaggatcagaaaaaataactaaagggtactaggcttaatatctgggtgatgaaataaactgcacaagaaacccccacgaagcatgtttacctgtgtaagtaacctgaacatatacccctgaacttaataaaaacaaaaacacccaaaaatcacctgaaaattgtaattatgtatatttctgttaaaaactataccccataaatatgtatacatataccacattaagttttaaaattacaaaataatatatatttcttaaaagaagtgaataggactttggggcttgtggtggaatgaagtcaccattaggagtgagtaaaggagagctttgctcactgggattctgccaacccactaaacattcccattccttgaaggtggatgttctgatctgccacagggacacacgcaactcaacttcctccaagcagcttcacggaccagcattctctttctgctcctctcccccatcctccgtacttccctctaggtaatagtcctctggacatgggaatggcaccaagtttccaagaatacagcaatcaaagttcacttcacagagcaatctgcggtgcccccatatccagagatttgtcttttaattcacagaagttttacaggaaaacctatgacactttggatacagattaaataacagaaacaaagatgctggatccagaagagagtgttgagtttgtcctgtccaaccttctcactttacagatgaaatgactgccagagcattacacaagactggagaggggctagaacctgggcttccaaactctcagtccagtgctccttttaatcatcatcctgcatcctgacagaggcaaagggaggctgagtttgtctcccactgtggaattcctgcttgaagtgaggaatcccttccaggccctcagtcacaggtaccaggctgtcacaggtggtggaggccagctctaatgggagagcaagggtgttggtttcaaagggtgctgcatttgctgaatgccagttccactcctaagaagcaaggacagctatactagcacaggtttttcaaaaaggactctgaagtcaaactgggcttgaatgttagtttcactcctcactgatctggtgacctggagcaggatctctgacttctttggacatcagtgtcttgttctaaagcatggaagcagtagtagtacctgctctataaggttgttgtggcaattaaacaagacactgtgtttgaagtgtttcatacagtgcctagtatattaagtgttcagtaaatgttaaattataattgttattgttttcattgttgcttggttgagtgaccttgctcaagttacttagagactctaaatttcaatgtcttcatctgtaagatgggagtaaaaactccaccttgctgtgattgtggtgctcagtcaatgagatcctgcagcaaaagcacttagcacagcaccaaacacataataggctctcagtcaatgtctttaatgagtgaactggaagagatccctaaatgacagcagtctctcagccctgcctgccatccctattccaacaacagaaaagctggctctgtctaattaagtgattctctttccaatacggttaaatgaaacctaatgatatgaacagatccctgtttcccaagagttaaaaaaaaaaatcaatagcacccaataaataatgaatgtccttttgtgcatcaataacaaatgcaatgctccaaccacacagagcagtctttctactaccaagcatgccaaacaaaggcaacaaaataatccataatcgtcacctcaaaccaagagatgtgtcctgaagcagcctctgtccacaaataataatatattgatggtctccaacaaagcacctcaaagagcagtcactaggggaaaggaaagaaaacacagtacattgaataatatcagaatgtctcctctcattaggaaaactgtaacacttcaaaaacctaaacaaatagtacaacaaaaacttttctctgtcccttgtaatttccaagtattccaaagaggcggatgggacatactgaggccaaaaattacctggaaacaatggtctttcctgattgctattgtctctctaatgggaggcagaggggttgcagggactagagaaagcctcctctcctctaagccacagtgtgaaaagtctcacattagaaacatgttatttctaattcatgccatgttttttcaagctggaacctgaggtcatagagttcaacagagagcatcttcttgtcatatcaatgtattgataaaatctgaaacatttttgtattgaaacaagcaatcatgttatggggtagaatgcagcacgtgtagggcttttaaaaccagaatatttcaaataggtgtgcttgttgtgtgggatttcacatagtaccaccaagttcctgagggttcaagtttaccttttatttaccctcaccatttagaagcactgaactaagacactagatatcttgggatctcatttatgctgcaggtaccactgtagggaaacaaattagaccagtagtcaccagacttttctataagggcaaaatagcaaatacttcaactttgcaagccatacaatcttagttgcaactgttgaactctaccagtgtagtatgaaattagccacagaggttctgtaagtaaatgggcatggatgtgctccaattagactttatttacaaaaccaggcaataggccagaattggcccaagggccttagtttgccttttcctgtattagaccatccctagtcatcaatacctaattaagataagattattatacaacaatccagactgttagctctgtgagagcagggatcttttttatctagtacttgaaatgtctagcataatgcctaggcctgctaggtgccaacaaatgaatacatacataaaggaaattttagttttcaaactactctatgttctattaaaagcctgaaggaatggaactcaagagaggtgaggtttgattaatagttcttaagaaagtttcaaataatgcagtagtgccagcccagtgggaagaacaaaatatcagcctctgagaatgaaacagttggcatctgaaaggaaggaaagcatggaacatggaagatgggaagaagcaaatgaaaaatcaggagtcaggtgaagaaatacggataggcggggctctgctttactagttttcctctggtgcaattaacagaactccaattctttattttaacttttattataaagggaacatgtgcagatttgttacatgggtaaattgcatgatgctgaggcttgcagtcccaatgataccatcactcaggccataaacatcgtacccaacaggtgcagaaccccatttctgattggcttaaactgagacaggatttcattagtccatataaatgaagagtttagggctataggcatgactggatccagatgctcaaacgatgacattaagaatttctctctctccttccctcagctgttttcctctgggtggtctttagtcttaggtagcctttctcctcatggaggcaagctggttgctaccagtaactcatggcttgcattctgcagtggagtaactccaatgggaatagctttcccttccctggggtttcagcctaaattttgtggctgactcttattgagtcatttgagtcagatatccacccatgaaccagtccatggcccaggaaatgcagtgtcaagaacgaccacctgtcaattcaggggtggggtcaccttcacccaaaccatgtgtaccaagttcaaggagaggtagtcccaaagaagaatttgaatgctgtgaccaaaagcaggggcaaggacgttgagcaggcaaaaacaacagatgttcacgaactttgcctacttcaccaattttcccaactctgcctaccctcacatagttcattcatcctacccaacctacaggtttctaccctttcttcagcaacctaagtaagccaccctccataaccaccagcacttctctgtgaaaggaaagaactgacaccatgtgtgttaggtgtccttacagggatactgaacagccttcccctctctcatccccaaattaaataagctcccacattatatgatccttagcccctcaactttcaccttcataaatctcatcacacatgtcttgttcattttggggtttctccaccagcctatgagcccccttgaaagtgggaaccatgtccacactaactctaagcacaggggatacttgatatttactgattgaagaaataaacacagacttagaaatttatcttgaaagcaaaaggaaaatacttcaggatgctcagtaacaattgctttcaacttcccatctccaatatacttactctgttcatccatatattttttttccattcttaagacccattccagctgccccttacccccagtaatgggttcccaaatccctgctaccacatcaatctcgttctcctctgaaccacagtgttcattagcactatttttcatttattggctcattgtgttctcacttgggacatttcttgaactataccaaactgtttagttcctctgtgtagctctctaactgttcaggtaattactcagttcttcaaatgaactaagacaaaccaggagctagacatctttgcagcactccaatatttaacattgtgatatacaaagagtagattatcaattaatgtttattgagagactgatcatacatcttttcccaaaatgccagggtaaaataaaattacaaaatctaagatgtctgtttttgtctgcaggatattttttacagggctaaagggacatttgattaaaacaaattatttctgagaaagaacatgtctaagttaatgcaaacttttaacatttggggcataataacaatatatagataatatgataagtatctgtagcattagacgaaaactttcctcagccttggtgagtctctttgacacctcatatgtaaaatggaagtaatcatatcccgatcacaggactgttgcacatataccatatgctatatgtacagtgctgagcattatattgaggatatagtaaacatttaatacatgttactgttgttaatatacaaaaatgtggggttgcaaactagatgtgctgtaacgtgattacagataaaacattgacccagccggggtccctggacatgaccagcaaattacaatttaactccacatggtaagatctgaatgtaagtccctgaacaccactgctgtaggaagagctaaattatgtatcagtcactcattgtgtcatgtatctgattttttttggcattttctctcacttcccaggaacgtaactttgttttttgtcaccctccacagagaagagaaagtttcaacacactaaacataaccaatatacgtgcctgacacaagacagaaggagaaaaaaaaagtctgtctaatccaaacagctctgaattttcatgttggacacatgtcaaatttttaatgatgcaaataattcataaaaatttacaagcaatcagaatggaaaatgaaattatcattctgtgcttaaagtgatgaaattaatgactacaattctgtgaattttcttcgatgattgatggagggaataaactggattttattgtgctcataatgaactgtcagagcctaagctactgatagaaaaggggaaaaacatttgtaggcaaaggaaaaaaaacacatagacatctttagagagggatggagactggagtttagctgtaaagtgatgcagtatcgaatctgttcttctccatcatgagaagggaggtgaagctatatgacaccactcagaaggttgcagggttgtcttattattcctataaatctgaaagctataagaggagagttcaaaacatgaatagtcacagaattctgattgtcaacaaatttacttatcataatgttttactctaggacaaatgcatttttcttccactttctcattctcttctctcattcctctgtgggtgtgggtgggtgtgtattgggggtgtggttgaccttgtatccatcgggtacttgatattcccacaatattgtgagacagtcactgttagccaaagcgttctctgctcatgcagctgtttttcagaaactgagtgtaaaccggggtcccagacgtgcttcatgaatcaagtcttcttgactgtggctgaccttgtgagacataataatcaacattcattcaactcaggttcaattattaatttactgaatgagattatccatgtaaaagcacttaacacagtcgctgattcagagtaagcactcagctgatgctttgttactgtcatcatcatttgctgggaagtgggagagtcattagcataactcccaactaagagtcactcttgtagtaaccctttcaaagctgccattccaatagtcactgttccaatgtgcccattgatggctacaaattagagaaggtggtttgcctggggtcagcatctcaataaaactgagtaattactctttccttccttcatgactgggagaccaagacctgtcttgcacagtatttatggaatggagcctgaaaatctctttcaataccacatccatcatccctgcaaaccattattctcagaccattctcttgtcccacctaaactattacatgctgccagcctctcctcactctgaggtcctgtatccttgacaaattttcatcctaaatcacatattgctaacatttattgagagctctcaatggtatctgacactttgctgagctcttaaagaacatgcactgtcccatttaattctcactgccctaagagacacatatgttatgttcccatttacagacaagaaaagagaggctgagaagggtgagggtacttatccaagatcacatagctagttagtgatctgcatatatctggttttgccacacctgtatagacaccaatgcctggcacaggaaacccaggtgtgtctgattccagagttccagcttcaaaatattacataataattacatcattatgtacacattatatgcatatacatcatgcacatatctacacagtaatcattatatcactcccctgccaaagacaccttattcccttcaacagggatcacaaacgtaaatgtttacaagagccagacaacaaatacagaatacagatgcctgaaactgaggcaagggacaagataaaggagctacgcttttagtgtgtaagcttcctgcttgcccaggtgtgatgccttttcaaacatagtggccaggtccttgcctctctgccttcagaaaatcatcattaaaatgctcaacaaggatcattgactgaagtaagccaccctgtgatcctgcagtggattcatcagagtaaagtggataagagtgggacttgaacataagatggggacagggggagggtcacatatacttagcaaacatgtgacttttgtcaaattatttattcctaagcttcagttccctcatctgtaaaacagggctaacagctctcaccaccccatagcatcactgtgaggattaaataaaataatatgtggaaacctcttgaaacattgcctggcccatagtaagtgctcaataaataggagctgttaggctgaattgatgatgatggtagtgattaataattaaaatattatcttactcagccttgagtttaacaatctgagattttcccaggccctcccctgtagcaggcagggagttggaggtgggagcactctctcagggtcatgcagattggcagtcactcggggagcacagaggggagtagggaaagaagcatagagagagatctctcctcttcctttctctgcatctcccagataaatcccaccagtgactccacccacagcaaattgaatggctgccctcctttcttctaaccaagcctcttaattggtctgattattgtctccttcatttcagctatcggttttacccgatttcatcaagacaccaatatatgtctaggagatgatacccctggtctcaacatccctttgagattatcttggttatctaaaactgattattagccaataagaaattctttggtacatttgtcaaactctttcaggtttgtcaaggtatcctccaccaaacactaaccattcatgatgctctttggaaaaagggttctatagtcacaaaaatttgggaaatattatgtgctgtggcccctcttgaaaatctggaatgcacattaacataataaaggctctgagaaatcctacataaaggaactgatctttgttcaagccaacgttttctgaacttatgaagaagagtcttatgaggacgacccttcttcctcataaacacctgtattgcctgctaactaaactgccaatgcttaggtattaccacctaggaactctggagctgagccacagagagagattatcaatcaaatggatttagacactcaaaaaatacttttaggatgctgggctccagagacaaagtgaagaacaggggtttaagtagatcgcttccttctgttgagtttgaagctgtgcttccacaccctgttatccctttagtacactaagagggaacagagaaggaggagcagcttgatggggacccctcctccatctggtctcagctcaagcaccatgtcttcaggcaggatgtcccctgattaccccatctaatgtggtcctgcctcagtcattctctgtgtcctgactctgttctactgtattcacaactcctgtcattcttgtttgtttatttgattattgtctgtcttgcccaaacactatgaactcctttctgagtgcaaggattttctgtcttattcatttgagtcttgccagcgcccagaacagtgccttgggtgctcactatggattggagaggtgggtgaatggatgaatggatgaacatcaacaaatgggaacaaaggaggctaaatcagtaaacttgcccccattcactggaaaactcagaggatacagcaaggacagctgtccaatcaattccctcttgtctcccattctctatcactgctccagctctcatcttgtgctcctcacaagcccagagtagaagtcatttggttggtacctggtgactcatctccattatagacataactattgacttcagcaatgagtcccttactcaattaatttatttggattaaaataagtggaatcagagggttcagaagcctgtgagaccctggaactagcctggaaagtcccacaagggatgaatggggaaggggcaagtggcaacactctggtagagtccattgaggttgggcagctggagaggaaattcttagtgtgctcctgtacagactagagaaaatccctatgtgtagcaccatttaatatcactgtggcagttattagttattcagtgctttgtatgcgtccaatgctttatgtgttttatttcatttaacctcatgacaccttaatatgtgattttattgaacttcataagaactctgataacttttcaggtgaggaaactgaagcccaaataatttaagtagcttctcatagttatatagcatttaagtggcaaagaagagattcccatttggagtattctatacataatgaatgaaagtcattctgacattgtaactcttcagtagaactatttcaaaattgatgattcactcaaaaatatttgttaagtgtctgcagtgtgtctgacattgacctagacacagatagaacagagaacaaagcaagcaagagtccttgtcctccacagagcttggcttctagttgggggagacaggcaataagcaaacaaaaacagaaataaaacatatgtcgggtggcaataagtgataaggagaaaaaagagcagggaagaagagtaaggagtgctagggaagactttgccttcctagatcatcctgcgtaaagtaatatccccagcactcctggaacaagctgagtgattcatgcagggagctgagggaagagcagattgtgcgtagggaacagtaagtatgaagatcctgaatggaaagcatgcttggcatttttgaagaacagctataacagattgatgtaggtgaagctaaatgaaccagaatgagaggggtaggagataaggtcagagacagtgaaggttcaactcatcaaaggccttgtaggccatggtgaaaacactgtcattcattctgagtgaaaagaatgcattgaggggtttgaacagaaaagtagtgagagctgacttacattttaaaggattactctggcttctggggactgaggaaaacagggcaaatgtagaaaagcaagttagaaggccattgcaataaatcagggaggaaatgatggaaagttggtccagggtggaatgagtgtaagtggtgggaagtggtcagattctacctacattttgaagatcagaccaacaggtttgctgaggcattaggtgtgggatgtaggcaacaaaacggagtcctggatgactctacactttgggcctaagcaactggaaggatggagctgccaactgctgacctgaggaagccttcagaaaagccagtgtaggtttgggatggggaagatcagaagccgagtgttatgtggggtgcctatgagacagtggggtggtcagtgctgaccaggatttctcagcttcagtgctactgacattttgggctggataattatttgctgtggggactgccctgtaggatgtttagcagtatccccagcctccactcactagatgccagtagtagtcctactctctcccccacacccctgtgtgacagccgaaaaatgagtctctagacactgcaaatgtattctggagagcaaaatcagccccccacacccccctcccaattaagaaccattggtgtagacagaaaagaagaggcctaaggtcggctaagtgtgctaaggtttagagaggagatgaggaaaatcagcaaaggggactgaggaggcctggctagtgagacaggggagagccagaagagggggtctcacactccccttgctattcaaatgattctaagtagttatcttgataaagacctctacaagcaagtccatcatggagcatagaatttaatggtaagctgattatgactgatactgaacaacccagctgtaccaaagaaaggtgtttttaagtttagttatggccttcctcaacaaaatctctggccaggcatggtggctcatgcctgtaatcctaacactttgggaggccgaggtgggtggatcacttgaggtcaggagttcaacaccagcctggccaacccggtgaaaccctgtctctagtaaaaatacaaaaatgatccaggcctgttggtgggtgcctgtaatcccagctactgggaaggctgaggcaggagaatttcttgaacctgggaagcgaaggttgcagtgagctgagattgtgccactgtactccagctggggtgacagagtaagactccaaaaaggaagaaagaaagaaaagaaagaaaagaaaaggaagaaaaagaaaagaaagaaagaagggaaaggaaaggaaaagaaaggaaggaaaaaaagaaaaggctccaaattcaaccacttggggttttttgtttttgtttgttttttgttgtttttttttctggtgtgtttttgtttgtttttccagaaagggtctcactctgtcacccaggctgaaatgcagtggctcagtcttgactctctacagcctcgaccccctgggctcaagcgattctcccacctcagctccccaagtagttgggactataggcacggaccaccactcccggctaatttttagtattttttgtagagattggatttcaccatgcccaggctgttctcttaactcctgagctcaagggatccacctgcctcagcctcccaaagttctaggattacaggtgtgagccactgtacccagcccctctacttgggtttttaaagggccttttaaacttctgtcacttctaggacattgttaataaaagtagctacatttattcattcaagccataccatgtgttcatgtgttaatgctttgcctgaattatctaattcgatctttactaacaaccatgaggtaggtgctttgcttattcctattgtacagatgaggaaactgatgctcagagaggttatatctcctggccacaatcacccagctcctagtaagtgaaaccaagactcaaatgaggccatctaactacaaagtccacatttataaccacagcatctctagatttccccactggctatgcctggctttactctctgccacttaattttccaaagtcctgagcctcactcaatgtggtggaaaccttaaaaggtaaaacagagcacctgacaaacagagcagtgggaatgcagaggtacctagaagctggcaggctccacatggacttaactgtataccgtgaatctatctctaacatgagaaaggagagaggaggatgcaggaaagaaggaagcaggcaggctggaagtgtcacaaaaaagaaaaaaaaaaagagggtccactgaaaaaagatcaactaacatttgtaagaaccttagaagcattaaggttcataacttgctgctttgtctaccccaggggttaaagaaagcaagttttgttattgtcaaatgcattgaaagaaaagttccaggggtgagcgattggttcttttattgggtatttcagacagtcttggttgaacctaccctcgcttacgtctatgtctccttgggactgagataaaggagagtatgaataccttttaggagaaaatgcatggcagaaatatttgctctcttactttacctgggcaaaggacatgaagataatttttgttggaaggaggcgtacaagttggcattcaaggaaattaaagttaattctggcccttatcagttggtaagccttcaaatttattatttcagaggaaaaattgagtactggtcatcaaattttagttatgtctgggattaagacatttggcctgtggggcccaaatgcttttcaagagcttaggaagctacattttaaaaggaactgtataaactccaaaatatataaagataactataaaatcaaaaatcatatttaattatacgtcttttaaatttaacctatatcagctagttaattacaactcaattcaactttcagctgggtgcagtggctcatgcctgtaatcccagcactttgggaggccgaggtgggtgaatcacttgagcccaggagtttgcaccctgggcaacatggcaaaaccccatgtctactataaatacaaaaattcgcctggcatggtggcacatgcctgtggtcccagctactcaggagtttgaggtgagaggatcacgtgagcccgggaggtggaggttgacgtgagccgagattgtgccaatatgctccaatatgggtgacacagcaagatcctgtctcaaaaaaaaaaaaagcaacaacaacaaacaactttcatacagttttttggtatttttttttcaaagatagtttttagtatgtttgttattttgtgggtgtggggtcccacagtaagagtgactaggccttgtggtgaacttaacatagccccagtggtcagtgtaaggagccccagatgcaactgggaactcaggtagtattttcactctgctgtgatagtgtcaatataccagggtccagttatttctctacaactgagattcatcacttttcaagaacaactctctggctccaggttgagcctatgtcatgcacttggcctccagagccatttccccaattctttaagacaacacctcagtccttactgaagggcatttagccagctggcctcattcatcatttccttttgagattcctggcattcatggccactcctagtggtttctcataagtgttgaaaagagaaaataaagaccaaacccacaagccagtccctggggaaagagacaagcatggctcacagtgtcctcaggggtccccttcagtaggatgatgggaacccagcccatgaaagcagccaacccccgccccaatgcaaaccaacaacagcttccgtaatcccctctatcaaaggcaaccgggaggtctcacgggatggggctggctgcttggagggcagccaaagccctgaatggctatccctgagcacccctaagcgctgcttctgtgtacccaccacaatttgggtccccattcagagacacaaatgttggggacactcaagtgctactgaggttggctttgttgtcattgcttccatgtgggaggctcgatcgggagtgcctttgatgtggttagggcttttcctgggagcacttgagcgttcgtgatttgagagacattggctgcctgccttagccctgggaggtgttaacacacttgcttattcgggaacctagacagtgcctgtggcaggcttggccagcatagccaggcctcagtgcagctctcacaccgtgggtagatcctgcttaatttgacactggcaaaacagagctgtcattttcaagtcactaaagtcattaggcaggtgtttattgagtgactgccatggactttatataatatgcaagggctataaaatatctctgggcactgcataatgtgatattctaactaaggactgcagacagaccaacagaacatagagtagaaacaggatgatgtgattaacagataaagaggttgtatcagttcactgttgctgtgtaacaaaccaccccgaaactcagtggcttaaagccatagtcatttattctcatttgtcatctgaaaatcagttgaaggttggctgatccatgccaggctcagctgaatggctctgctttcagttctggatctggctggccttcgattctcactgtgggtttggcttaggtctactccacatagttcattctgggatccaggctgaaaggatagcagctacctggaggaggctttgctcacattggtgacaaagacacaggagaaaaagctcaaccactcaagcaccattttaagcctgtgcttgcatcacatttgccaatgccccgttggccgaagaaagtcacatgggtaattttaaagtcaagctgcaaggatgtatagtctgcctaggagactgtcttggtctattttctggtgtttattacagaatacctgaaactggataatttataaagaaaaggaatttatttcttacagtcatggaggctgagaagtccaaggtcaaggggctgaatctggtgagggacttttgctggtggggactctctgcagagtcctaaggtggcacaagtcatcccatggcaaaagggctgagcatgctaggtcaggtctcttttcctctttttataaagccacaagtctcagttctttgataacccattaatctgttaacccattaatccataaatagattaatctattgatgtgggcagagtcctcatgacccaatcacctcttaaaagccccactcctcaatactgtcatattggagattacattttacaatgtgtttttgaagggacaatattcaaaccatagcagaggccaaaaggagtaatcgcatgaacaaatccaacatcaagtgggcaggaggaagactcctctcttagagagggcaggagagtgtgaatcccattgaacaataatctcatctatcccctggggtcaggaagggccagtgaaggaagataagaggattgggagtgagaggaagtgttccaggcactcagagaaggaagtcagaaaaatgagaacaagtccttttgccatagctgccaaaaaaaaatcagacccaaattcaagccccgattttatgtttctcagactgagaaaacacaaaagccatcgctcagatggtttggaaaacatttgcaaggtcagctcatttcatgatgtttgattccagtactggcacttggattacttgtgcatctttgagatgtcactgaataattatcaccacacttttaggatttattgagaatcaggctaggacgtatttcctcatctcacaaaagaaagctaggagaaaagcactatagacatctccattttacaagtaagaaaatagagtctgcaggagagtcagctgttcagcatcactcaggtagaaagtggcacagctggatgtagaagctaggctgccagattccagagcctgcactcttaatcctgtgctgcccagataacgctgactgctttgtattaagaacttacattctcccacttaattgggagcaaggcagattagaaaccctataaggtagatgctattcatgtgaccactttacagacatgaagactgaaacctgagaggctaataaatgtgtctgagatcataaagctgttagatgatagatatagaagagtcttactccaaaattcctccccactgcaccagcttcttcatttataaatgaggggcatagccaaagttgtcttcaggacttcttcagctcagaggctgttgttctgtctctcccagttttttttttttttgtttttcccctcatttggctcctgttttcagagaagctggttggaatgcaaaggggtgtgcaatgcattttacaattcccctggcccaagcctgtcagtggcttttgcctagctggctgtagtgtaggttttgtaaacttttgagtcttctggagcctgtaaggtgtcttaaggcagattcaagttccaaagacacaattagccagagtctcccagttatttatgggaaccacagttgcaaccataacaaacagctcaggttacaaaagtaattatagggaaacacccagtgttggaaattaaataggagttggttagcagaattgctgagaggagggaataaatgaatgctttccctataacttcataggagctcctttttatgtctgccatgcggtgagcagttcattttctctaaagatactcaggaactaagaataaacagatgtctagaagaaggcagctgggtgatggagatggggcagaagagccttagactgggaagacagagccaacatttcgaaggacaaaaatctcacctccttttacaacaaagggggagatccttgggatgccccatgagctccatttcagagaaggcaacactgacattcaaatcaggtgatctctctaatttagcctttgacagttcctcactatgccatcctgttgcttagctccaaccttggaaaatgtagactttactgttgcccaactctgtattttcttatgagtcaaccttcaatgaataatgcaatctaagctttcacagctgaataggatttcaaaataatacaggctcagccggacttccagtccccagtcctgcatgtgaagagcttggaagtcattgttcctgtcctcaccacaagaaaaacgctgaacaaactgaaaatcagcatctcttcttagatccatcagaaatgaggttacagggcaaaccactgcccccaaaattggagagacaggcaggcagatccagagaatcacaccttactggagcagaagcccaagagcagaaatggccactgaagtcagtgcagggtttcttttactcagtgcatcaacaaaaatttgctttcaataaaaattggaaatcatacttgaaaaaacgtatagcaggccgggtgaggtggctcacacctgtaatcccagcactttgggaggctgaggcgggctgatcacgaggtcaggagatcgagaccatcctggctaacacagtgaaaccccgtctccactaaaaataaaaaaaaaaaattagccgggcgtggtggtgagtgcctgtagtcccagatactcaggaagctgaggcaggagaatggcatgaacccgggaggtggagcttgcagtgagccgagatcacgccactgcactccagcctgggtgacagagcgagactctgtctcaaaaaaaaaacacagcatacagatagcaagcatcagaaccagattcagatacggcagagatgttggaattatcagaccaagaatgtataaaaactatgatcaatatgcttagagttctaatggaaaaagtgcaagaagaggtgggtaatataagcaaagagatggaagctctaagaaagaatcaaaaggaaatgctaaaaatcaaataccaggctcttggttttaggacagaaaaaaaatcagcccattatacaggtatgcaaacagactctgccaatgacttggccaaggttacacagttagtgagaaaataagcactgagatgcaggtcttctatatgtgcataaagtgtggtatacattattccctccagccttgattcgataggcatttattgaaagtttcctctgtactgagcactgagctaaacaactggaatataacaataagtaagatggacttggtctctgtccttatgaagtttatagcatggaattttcctcacttcctcttgaaccataccaaataatgtccatggataatcaagcattgttaaatttcattttcaacttgaatttcatctccacacatttgtgtgtgtggaggaactcagagtttcatgaaatcattttttcagcaaatgcctattgagtgtgctcatgtgctttgcactgtgctagaagccaggggcatagaaccctgtcctgtgagtttacattctggccagagacaaagcagccaacaaaacagataaaggagtgcatcgtacaggtgacaattgcttcgtggtgaagttttcatgttccaccctatttaaatattgcccccgcctgcttcctggtacttccaaatgccattttctgctttctttttctccatagcaaaaatcagatttgtgatgtacgtaggggatttgaaagatccggtgacaagatggacatgtggcaaagagaggcaaataagaatgatgtctgggtggctggcagttcctttaactaagccggggaagccttagaggaacagatgtgagggagaagagatcaagctgaggtttggacacatttgatctcagactcctggagaggagacgttccagtggaaatgtcaaggaggcaaaccaaagccttcatctctgcctcccagacagcccaatttctacaaagcaaacgcctcacttatgtagatgagaggtagcttagcttttctagtacactaaagaacccaaagcccagcctatcaattagtttgcatgagacacactgcgatggcacaattgattcccttggagtggaatatcatgcagtccacctcaaaggcaggccacaagattttaatgcagctgtctccaggcaattattaactttccttcttagcaacaggaccacggcactttcattccttgaaatgacacttctctcttgttaaagcccacagttaattttatgaaccgcaccaatttaacacccagttcacatgagccgtataccttgaataaatgcaaatccagtctccgagacatgaattatggccttatgctgagcatcaccatggcaactaatgacatccccccacccccgaccccagcaccaacctgcacaaaatccaattctccaagggtccttatttgcctaacgtagatgtgttcttggcttactcacatatgcattcgtaaatatcactctgttgtcaaaggtttgcagtggatgtttactgtcattttgggaggtatattccctatgtggcaaatgttgttttttgttcatggggggaaaaattctaatgaaaattactgtgtgtatttgattagcaacatttgttgataacatatggtctgaggaggcttccgcaaataagaggctttaaatagtaaacagagatgcgactgtgatcaagcagatgctccccaaacacagagaacaaggttgttttacccatagatttttctgagctccactctcccaaaagcatattcttctccctcattttctcccccagatcaaagtgttcactttcaaagtggtggtactgtggaacaggtttggagaaataatgtgctgtgactttaaaagtcatccccatccccctaaatatgaatcatctgctactcatgtttattatttgatattaataatgatgtagtgtgactaaatgagtcagccagctcaagtggatcaggaagcagcatttgggcaccacgtgtctgaaatgctatgatacacaagccccaattttctaataaactaagagtgctagaaagagctccatgaagaatttagagcagcaaattggatccccatggggtcagctgtctttgtgagtgcatgtttatagttcgtctttgtgggtatgcccagatgagcattctgctaatctgctaatgaaaataaaagtatttccattaggccaagtcagcaatttaactgtttgtaacagagatcggcaaactttttctataaaggaccagaaagtaaaaattttcggtttgttggccctatattctctgtcataactactcaattctgccattgctgcacaaaagaagccatagacaaaacaaaaatgagtaagctaactatgttctaataaaacgttattgatgggcatcaaaatttgaatttcatataatattcatgtgttgcaaatattcctttgattattttcagccatttgaaaatacaaagcccttattagcttatgagccatacataagcagacccatacccatggccatagtttaacaacccctggtctataatcctaaaatgaagacttacattttttagtgctttctatgtgccacgtattgaggtaaacaccacatatccaatagcttatgtcctacatatccttccgtcaaggactccatcctctgggtcagttctatttttttaagagactgggtatcactatgttgcccaggctggcctcatactcctgagctcaagcaatccacccacctcaacctcctgagtagctgggactacaggtgcagaccactattcccatctggctatatttataataaaactaaatattcttatccccaatttatagatgtgaaagctgagacactctcacacgttataagtgttatttctgcacggggcatctcccccaaaataatgtaatatccatgggggcaaaacttacatctcactcacctttggatccatagcagtgcctatcatagtgatttgcacacagtagacattcaggaagtgtttcctaaatggagcactatttggagatagaatccctaagcagtgaaagttagagcctcatctgatgccaatatggcgcttttagattagtcagttacactgttcatctatttatttgccaccctcttacaggaagtatttggtttggaatagacacacatgtcccaatacacattccttcatctttggaggtgcctctatgggtgatggcatttctacagtctctgcttatgtgcttgtggctgaaaagaccaaaagtaataatagcagcttattatatagcttggtggcactttccatcactataccgttggcagccacattgctgccagcccttggagagccattcctcagccttcatggattgacgccttgctcccaagagagctgttgcatgctgagtatcctctgcatgctgccagctgctgtgtgcacttcagagagtttgtctgctcaaaaaaaaaaaaaagaaagaaatcaactcctcaaagagataaaagccctcagttgaaaggggcagtcacacctttggttatttcatgtgtctcacctctctacaatcccctgaatttagtgacatggttattctgaatttgttgctttcctagttactaagcaaatatttactgtgttccaggccctgtgttgggtgccatgtatatcattatatatcgtacattatatatattatatatataatatattgtatattatatataatatggtatatataatatatatatattatatattattatatattatatattatatatataaaatatattatatatataatatataatatattatttattatatattatatatattatatatacaatatatataatatattatatatattatatatacaatatatataatatattatatatattatatatacaatatatataatatattatatatattatatatacaatatatatattatattatatatattatatatactatgtatattatatattatataatatatatattataatattatataatattgtatatataatatatattatattatatatattatatattatatttattatattatatattatatataatataataaatatataatatatttatataatttgtataatttatataattatataatttatattatatataatatatataatatatatgtaatatatatataatatatataaaatatatatataataaaagaaaccacagtaaagcactctcatttaatgcatgggctttgaggtcagaaactctgagtttgaagcccaattctgtgatttgtcagaaatattaattgagataattcattagaagcactaagcccagggcctggcaaatcataagtactcaataattggtggctatttttaacgtttatgtaagctagtcatacagtgtgagtacagtggaggaaaggatgggatcacagaatagggacacctaacccattttacattatctacttcatcttcagagagaagttagtcagttaacctttccaacttctgcttgcaataaatattatccacctctggtcttttcaaatcaaaatgcaattgtatttcagttctgggacactttaaagaggtattcatcttaatagccacaatcagttgcacagcaagggcaaagaaatgagcagagaacaaaatagattcatttttgggtgtgtggccccaccaaaaggccaaggtttttgatgcttcctccactggctaatttgtctgtctgggatatagtgctctgtgaagtatattgaacacgtgaaataaattcaaagtaaaaagccagagtggcccaacgtcccaccagtcttgaaacagaacttcccttttcagttacagaggtaactcatgttgatttaatcaagacataaagcagtgaatgatggaatgagcaagggaggcaacatggtggcctgattaggagtttgaattctgaggtcactaactgccatttactccttgtgtgtgaccctgaacatattacccagcctctctgtgactcatttataactctggaggtgataattgtaggcatttcacaggatgtccaagaggctttcaaatgatcaaatgcatgtatggctgtgtcccacttttgagataggaatttgtgcctagcacatagtaatctgaataactattagctatttctattacaaatatagccagatctctccgtggctacaaaaggacaaagaatgaatatttttcatgacattttttcctacagaggaaaggaagataaggaagggtgcaaatatttaaaccttcttgattctactaagagtaggaagcattgacaaaaaaaggccagaattcccacagaatccaatgactgtggctaagaccaaaagtttcatgtcaacagccagtgtcagccaacatccacttctcagtccaggctaaccagactggggtgacattggatcagagccagcttgaggggcatgtgacctgtatagctgcacatcttctacattcagaaggggcccccatttgatttaatgctcttttgttgccatctcgaaattcttaataattttatcttcgagcttgtgtttgtgacatcccatggaacgatggactgtggatttgaggagaggaaatactcaagaaaatgaaaatgctttatattttagtaccttgaatggcactttttgtgtgtgttttgttttggagttttggagtttgctgtttttttaacaaggagatctgcattttttatttgcactgggccctgaaaattgcacagccagtcctgattagatgagagaacttctcttttggcctgcttcactggaccaggttaccattttgaaatctgatagttaaatagttaaactgggattcattagtgacctgacagcttgaggtgagccaagggtcatggtgggaagcacagctgcaggcctggtggaagggaaaagaaactctgtgtccaataggatgggggttgtcagggcagcctccagcggcctgaattccgtccagctgatgggttctcggaagcactgactgccccacagtcagactcttgttacacgccttatgagctgagcatctttgggtagcagcaggggttcaggcatcctgggttggtacccactgaacatgccaagaaatccatccacactgaggacagtagcatggaaacatacagtggggtatctgcaggacactgggctcaagttctctttgtggcttagtgttaaagcttctcatttcagaactcttttggtttccagcagaaatctttctcttccccatgaccaagtataatgaatgcccaaagaggtatcttttattttatttttatttattttcttttagagacaaggtctcgctctgtcacccaagctggagtacagtggcgtgatcatagctcacagtaacctcaaagtcctgggctcaaagtgatctttaggccttggcctcccaagtagctaggacttcaggcatgcaccaccatatgcagctaattattttactttgttttttgtagaaaaaataaaaagcctgggtctttctatgttgcccaggctactctcaaattcctggcctccaaaagcactaggattacaggagtgaggcaccacacccagccatgcaaagagattaatagtacaattaatcataagtaaattaatggtcacattttttccagtgttgctaatcactaataatgcttattactgataatttttacaataataacagcaacagctttaaaatgagattttgggttctggtccagcttggtcataattccctggaataaaataggcaagatctttgagtgtctcttcagttttctcatctgtgaaatggcaatgataatagctattttaccattcatctgtgtagtagaaagggcagtgtcaatcttgcttcctttacacagggtcagttacttagtaagtgcttgataaatatgtgttgggtagaagccacaaaggatacaaaagtacagcaagataaggggactgatttctagtgttctctagtactacagggtgaatatagttaacaataattaatagcatattttcaaatagctagagaggattttgaatgtttccaacacatacaaaaaatgataaatatttgaggtgatggatatgctaattactctgacttgattattacacattgtatacatgtagcaaaatagcactctgggccaggtgtggtggctcatgcctgtaatcctagcactttgggaggccaaggtgggtggatcacttgaggtcaggagttcgcaaccagcctggctaacatggtgaaaccccgtctctactaaaaatacaaaaaaattagctgggcacggtggcgggcacctgtaatcccagctacttgggaggctgaggcaggagaatcacttgtacccgggaggcagaggttgcagtgagccaagatcatgccactgcactccagcctgggcaacagaacgacactctgtcaaaaaaaaaaaaaatagcactctgtaccccattgtattagggttctccagagggacaaaactaataggatatgtgtgtgtgtgtgtgtgtgtgtgtgtgtgtgtgtgtgtgtgtatacatatatataaaaacgggagttaattaagtattaacttacaccatcacaaggtcccacaataggctgtctgcaagctgaggagcaagaagagccagtctgagtcccaaaactaaagaacttggagtccaatgtttgagggcaagaagcatccagcatgggagaaagatataggctgctggaaggctaagccagtctctcctcttcacgtttttctgcctgctttatattcgctggaagctgcttagattgtgtccaccagattaagggtggatctgcctttgccagcccactgactcaaatgttaatctcttttggcaacacccacacaaacacacccaggattagtactttgtatccttcaatccaatcaagttgacactcagtattaaccatcatagctataaatatgtacaattattacatgtcatctaatcattaaataaataaatataaatagataagcaataatcactattactagaatacatctccttaccttgggaagggaaagtagccaaaatttgttgggttctcaacctgttccaaacttgcagctgtttgttctttacaactagtctgtgaaattagcttattttatagctgaggaaattgacagggacattaattccttgccccaaatttcatagtttgcaagtgactaagccagaatttgaactaaaggtatctggttcaaaacccttgccattgctaagacaaagatttccctatctcggggtcttgctgcagttgctgacaaccacttaggagcttctatctgtacctcaaacgttttgctaatgtgtttgaaacctgtcactttttgtcctatctcatggcctcctccatgtcctctctgtctctactatgactgttgtgctttctcagtggtttcatgcactgagatccccgtggatctggtttcccctcatctcaatttttctggtcttcttttgtcaactctcactagattccctgtgtctttgagttaataggatttatttgattgaaggcaacactgagactaggatgcaggtttccataatttacaaaagaagaatgcaagcagccaacaaacagggtaaaatgttcaagcccactagtagtcaagaaaatatccatgaaaacaacaatgataaaataggccagaagaaaaagtgaatagtgatactcagaacaggcaagaaggaagccctgtgatttgaactctcgttcccaaatggtggcaggatagtcactgcctttgtggaaagcattttgggaataggcatctcaagccttgaaagtgtgcattgaggaacacagctcctgcaacagtgtaagatctctaaatttttgttgatggaagaagtgatctcccagctaggtctctatcccaaggaaacaatcagagatgaaatcaaaaattaatatctaactcctagctactcaggagactgaggtggaaggattgcttgagcccgggagtttgagaccagcttggacaacagagtcagacccccacctcaaaaaacaaaacaaaacaaaattaatgttcaattctatttcaataatagaacaatggctaaataaattatggtacatatagaaagtgtaatattatagaatcattaaaaatcataatgagggccgggcgcggtggctcacgcctgtaatcccagcactttgggaggccgaggcgggcggatcacgaggtcaggagatcgagaccatcccggctaaaacggtgaaaccgcgtctctactaaaaatacaaaaaattagccgggcatagtggcgggcgcctgtagtcccagctacttgggaggctgaggcaggagaatggcgtgaacccgggaggcggagcttgcagtgagccgagatcccgccactgcactccagcctgggcgacagagcgagactctgtctcaaaaaataaataaataaataaaaaaaataaaaaaaataaataaaaaaaataaaaaaaatcataatgagcattttaaagtatggaagttggtcattgtataaagtaaaatgaaaaagttctctaaatgaaattgtatctatgctgttttctagtgctgtaaaagacattatatttggcatctttcatttattcaacaaatatttgttaagttccttctatatgtctagcactgtgctaagttctgggtatgcaacataaaaacacagtccctgtgctcatggagcttacagaatattaggggattctgctataaaacaatgacacaaatcaataacttaaatccagtgattgctaagatgcaaaattaaatagtatgctaaagagaggttaataccagaacccagtttagattgggagatcaaaggacagtggttttaagctgagccccaaaagacatagcccagtgaatgggtggggagaaacattgccaacagaggaaacatacatgtaacaggtctgagatggcagagtcaggaggcttgtgagattggagcagatgagtggcagtccataggtaggggtccagattgccccctgagtgcaatggaacaggtgccctggacctggggctcagtgcaatccagttaacacttctggaagatcactctgcttgcaggcacagaatggatagagatgaattctctgtaagaataataatgagtgaatgaagaggctgcatttgaagggcacatcaagggctcatgtgagccgcacctggtgctctacccagattttgggtaagccaggctcccgtgtgtggaaaactgagactccgatatccacaaactatgagcagggaatggcatttcccacatcctcatccttctcccttccaatctctctttgaccttaacagggtggagctccataatctccttattcaactcatctttgaatgccagtgaaaatggggctccccacctccccaccactattgttgaagtctcatttgaaagtcaggtgttggcttgaaccaaatgaagccccatcccaagatgtacaactgcagtttccatgaatgaggaagtcaaaggatgcaatgaaatattagtgatttccctggaatcgtttgtagatacagcaaatgcatgggaacaagttctcaccaacatgagtttatgctaatttcaagtcattccttatagtgctctgtgaagaccatggcaactttctgagcatctgtctttcatttgcctaacaagttaattaacacgtttgttactctggcagctttgaaggggaggagaagaggatgtgacagctaatgctgccttgggttaaccctgcattcacctgacctgggaacaatggaatagtttagactcatcaaggcagatatgtctacaatgacctctttgattctgtctgcagctggggcacccagggtgacttctccacaacccatgcactgccagctgtgaaggtgaagctgttcacagagagcacaggcgtcctggcgttggaggacaaggagcttgggcgggtaagcacttcttatcacaaggggaactccacagagaggatttccccagctaggtctccagtgcacaggtcaccaagaggcagcattgccaagtgctgagaggctcagttttgaacattaagtcctggactccactctacattggctgggtgaccttaagcaagttcctcaacctctctgagcctcagattctcttctacaaagctggactaacaagagtgtgccctacaggagatagagcaggagttctcaatactatcagacccaaacatcctttagagttaagatttgtaatgtcttttactgtcttaaagtggagttcttagatgatttaactgcctgcccacctgacaatgttaaagtcaacacaatgacataagagagaaacaaaaggaagtaaattaataataaaaaacttcaaaatgtacatactcaaagatctaatagaggagtgctttgcttgctcccatatgaagagtcactgtgaaggtgacagctacaaaatccactgtggggtgtggatgtatgctgtagtggtgactcctaagcctgaggatcagtaaaccgatttactgacatattaagcaatacttgtaaagtttccttgatttccttagaaatgtgccaaaaagactttgatttgaaatgtaagacaagagttaagatctccacgtagttcattataaacagattttttcacctccaccaatatcccatgggaatattcaaaagtcagatgggatgcaggaagatgcctcactaaggagcatcatgtcattccttgcaggatgtttagcatccctggacccacccactcagtgccaacagggactggcaccaattattttgtcaatcaaaacatcatgaaaatttctgagacatccctgagaggtggtaccaacccccttaaaaaccacagagataatagtgaaatttctgtttgcatctgaaccattgactctgcaccaagaagccagtaatattttcacaagttgattttgccaataaccccacctgcttgtggtaaaatctgaactcgtttaatttggcttctgctcacctcttcacccccatctgctgccacattcctccccgcctactataccccagcatcattggccaaatttcaatccctcatataaaccaaattctctccctcctcaggggactttctatctgttgtcatttccccacctcccaacccttcaaaaagcataaatgcattctctgcataaatgccacctccttggagagtcctttcctgacagctcagtccccttcatttgctatcttagctccttgttcacatatactactaaagtgatcaccaatgagagaaagaaacagaattgacagacattcaggcttctgtctgccccactggactgtaaaatctccacggagacagaaacctaaactattttgttcactaccttatacccagagcccagcacatagactttcaataaattttatttcagccaggcgcggtggctcacgcctgtaaccccagcacattaggaggccgaggcgggtggatcgcctgaggtcaggagttcgagaccagcctggccaacatggtgaaaccccatctctactaaaaataccaaaaaaattagccgggcgtggtggcaggcacctgtaatcctagctactcaggaggctgaggcaggagaatcacttgaacccgggaggcagaagttgcaatgagccaagatcgctccattgcactctagcctgggcaacaggagtgaaactccatctcaaaaataataataataaaataaataaataaatataaattttatttcattctggtttaatgtgtaatcactcctgaaagctacgtgatctcagcccagagaatctctctgagcctctgatataacatctatagcataatgagagaccaccccagacaagcacacaggcacacacacctaacgatgccagcaagaattcatctcctgtgcttcctttttttcttcctttctttcacccatttttccaatctggctttcatctatagaatcaacctggagtcatattactgcagcatagactacagatggagataaaacgaaaagtaaataaagctaacagcaaaaacaaaaaaacagtgtccctacccagaaaagtgggaggaaaggggatgatgaaagaaaataaaaggtttagctgttttctttgagaaacgatactcatttctgtccctagggaaagagagacacacatagagtggaagaattatcctgcctttcatttttcttcaaatttctccttttccagtaaggcagatgttaagaatcacgagtctcagagatcctgaatattagtgttagaaggaacaagtgtaactgaccagcgcaggatgctcaacctgggtccacaatgagcctccgaagacccaggatccaggatgccctggaatttttttttttttttctttagctggagtctctctctgttgcccaagctggagtacagtggcgtgatcttggcttgctgcaacctccacctcccaggttcatgtgattctcatgcctcagcctcccaagtagctggtattacaggtgcctaccaccacatctggctaatttttgtatttttagtagagacagggttttaccatgttggtcaggctggtctgaactgctaacctgaagtgatccgcccgcctcggcctcccaaagtgctaggattagaggcatgagctactgcacccagcctggaaatagtttacagatgtgtttgtgcctgggcctatatgcatttttctggactggctaccaaagcattcactgacttctcaaagccatttctactcagaaaagttaaggccactgacatattgaaatcctttgttttatagatgagaaaacttgctcccatggaaagcgggagacctctccagagcgatcaagccagtcagggacccatgcatgggccaggccactgtcccaaagactttgtgcacagcccctcagtgctctctcaagacaaccctactgaggcagccacagtcatcacctctcttgtacagaagagcatgctgacgcccagagggttcagttacttcaggaatcatgttgcctcatctccagggctatttgcactacactgtgttgtccctacacaaaaataaaaccctgggctgtgctgtggtggtgaagaccatgggcttgccacagccccacacacactcatttcataatggttcattctcttcttcaggcccctcatacattcccccagatgctagtttacccctcctttgtgccaaagaaactttctgccaattgcagcggagctggcctgcctggctcttgtgctggctggacaccctctgctggcagcatcttcatgggcagcagctgggtgacctaagagtgcagtgaagccacacttggacctcacgagagagtgtttctatgctcgaattcttcccacacttagcagacctgtgtttagaatcctggcgttacatttacttattcaaccactttttggtttgtttctttagggttatgttttgtttttaataacctttttaattaaaaaaaaattcatgcacattgtgaaaacaagttaaaattgatatatagtgaaaattaatttttctcttctatctcacgctagtatcccttcccagagaaagattttgttttcaatttatggtatccttccccaaatagtctctgcatgtaccaacatagcgtatataagcacatatgtatatattccccctcttttaaaaaaagcacagttggaagctactatatacacacttctctacatggtgcctgaaatcattatatttggtgattagttttcatatgaccctagactgacctgtctcctttttacatagctacattgtattccattatgtagatatattttatttaacaaatcctctatggatgaatttttagattatttcatctttggctatataaacaatgcttcagtgaatagccttgaatttatttatttgtatatgtgtgggtatctatagaataaattttcaaaaaatattttgctgactgaaatttgaaatttgacagctactgccaaattgtcccctaaagtgcatgcaccaattgatccttccacaaaaggcataagagaatgcctgttttcctgcatccttcccaaccctgcaatattataggattgtaggccctctgtgtccaatcatttgtcctgtgcacagagcaaataggaataatgactggtaaaaaacccttaacctcacaaagcataagggacacagacataaaaacagaaattatagtgcaatgtgggaagtgttctgctaggaaaaaaaaaaaaaaaaaagaaagacctggaaatgaagcacctagcaaaaaggcagaatccagtcatacagtctcagggacagggattctttcctggggtatgcaagaggtactgaagagatataggctaagtcgaggaggggatctgtcaggtaaaggctgagggtaaagcagccccctagcaggccctgcctgtgtgcccaggcaactaggagaagccacggctggctggagtgcagctacttcagggggtgggtcgtggcggccacatcagcatccccacatcaaagtgcagcacacatggtcctcggctgaattgacaaagtgcttgattagcagcctggaatgtccagatgaggtgtctggtctgcttgggattcatgtgcacccagaaggaccctcataattcagcagtgctgacacatacaaatgagtcatcagcctgtcagaggcatggcagggtgggggcaaagacagaagagagctgtggtcacttcatctctccatccaccctggaaaagagggctccccagcaagcagttgcacaggggacgaagtctttgtggcatagccggtaatgagctgcggctattgcgtcacgaatggacaccatattgccagtgggaagcacgcccagaatccatatggcgaaaggcctgttaatgagctgcgggtgcccagagcactgctccctctgtgattttgccaaacaggcaggagcagacagaagcccagggcctttcttacttaccgcggttctggccctggatggggtgtctcttaccagcacctccctttctggcttcccagcacatctcacccctacctctctcaggccagaccagctcaggatggagggtcagcttcactgaaatcagcagctcccacaaagtgtcaggcctcgggatgtggtacatgatacagggtgacgtgtaagaacaggcagttcctggagaaaagggagaggtctccacaacccagcagtgccctatctcactcatttcctcccagcatctgtcctatgatatgttgcagttctctggtgccagttaagtgaatttatacattttatgctggagctttaactaaatcaacctttacaaaataagcgacctcagaagataactgcacaaaagctctgatttggaggtagtactagcaatgcaagcctggcaaacaagaaaatggtggagccaacacctgacctactggcaaacactctgtcactcatatcatgagataaaaacaatgccaatgtaatcagatgggacaagatgtcagtcaagacatgatgaaattattgagaagacaactcaaactacagatttataaccaatgtcatcaacaatgtaccttgccctaaatatatgtggtaccttaaagatagctaataacaccacagccaccacaattagcaagttattccaaaatgtagatttttaaatctttagcccatctttgatttttgtatattttatgatatatgtgataaggtaatatattaatacaaagtaaacttatgtaatataaaatgttagtatacagatactgggctaattgctcaacaacattgtactaaagtagggcatgatcaaaaaacattgacagcctctgttctgaaaaatcaggcttttctgtatttcaatcatgtcataagacagtgggaagacttgaaatctgtggttagcaagaatgtatatttcatcagagacagggaacttaatgaagaaaaagggtcaggcccagaaagagaagggctgagaaatcggcataaatgaagcacatctaagtgggctgatttttttttctgccatggcctcctcctcctcctctcagcagtcttgtttcacaatcacacagggagccatatgtgtctgcccttcaagcatgggccaagcttgcatgactagtgaagctgatacagcatctagaaggccagagtgtccacccataagaccatgagcccctcacggccacctccagaggtgaaagaagcccaggaaaggggcctgccatccttgcacctagagaaaataaatactttgaaaacagccaaaacaatgtgccacaaaccagggcgtgctgccatcacagaagcaaatcttagcaagcccagcttttgttgtgcctatatttagttcatgttcccttagtttcaaggattttccaaatattcaattcctccctaaatgcatattccccagatcccatgtgtctcctgagaactccgtgatcacaaagcgaaaagtggatttagtgagttactcacttcctgtttcactctcagaattccagacaataagaatggatgcagaagacccaaatcaaactgccatctctgaagcacactgatgaaaggcatttcctaagaaatggtccttcttcaagtcatgtgtgctttcctccatgccagggcaaagttggatgttgtgtgataagatttccaggccaggtgaaatcaggttgaaatgtgtgactccaatcaagtccctttccttccctgagtctcacatttctcatccatctaataaggttccttccattttcccctgggggccttgaggaatttctcctcttgaaaagtgaaagaaatcctaaagaatggagaaaaagagtggactaaaaggactgtctaatatataagcatatttcttccttttatgcatccatcttcttatacaaagatgtagagaataatgtgtggacaatattctccattctgggtttgtttagtacgtctgaacattagaaaagtcaaagcagaatcacagagatcatgattttcatgacagaatcatcacagaattacagaaatctttacttttacaaaattagccaggaaggatcaaaagaatgtgtttctatccccaggtatggctgctccacagtgggaattgttcaagtcactccactactcagaatcaaagtttctaatctataaaaacataatggtgcttctcttttctagttgcttgtcctttttcccctacaggttattctccatcccaccccgaacagccccaaacagtcagagtggcacaaaatgacagtctccaaaaactgccccgaccaagatctcaaaatcaaacttgctgtccgaatggataagcctcaaaacatgaagcattctgggtaagtgtttcttccccaactagcagttttggacacacgtctgttcatttctcaaaatgaaaacaaaaataaacacaagatcttcagagaactatgtagaaggaaatataaagaattcatattaaaatattcgactttgatatttactgtaaacttcctcaattcttaggatgactgtatttgcatttttgctgtcaaaatagaaaaatgtccttctctttctctaatacggtttctaggacaattcaaaactttcctagcagcatgctaggtgattctagtttggagaggtcttacaggctccgcgtaccttgtcggaggcatccagatcattcaaactctgcatatgactcacttgcacctcaatcagcaacccacatctttgaggtgtgagcagcagggagaggccaccttcaatcaactcacatttaatatattttagtatttagtgcagcatttaaatgaatgagaaaaaaatagaaaatttgtgatcatcttcattttcttaaggtttgagaaaaatgaccaattaatttcaagtaaagcaaaaagaataggtaagatgccaaataagaccagtgatttttctagcaaatgtttgttggtgactgagtatatgctgagccatgacctattaaactaaatcacatggatgtcattatctcagaaaacatgataatcgtgtaactctgaaaagggaaagtttagtagaagggaatggagtgtttggcgggtattctgcaggtacgctgccaactggctatcattctgcttagcccctctgggccctagagaggtctcgttaattcttttttgggtatatgtatattgatgataaagctcaaagtactaaaagtgccattaaaaatgagggttacggctgggcacagtggctcatgcctgtaatcccagcactttgggaggccgagacgggaggatcacctgaggtcaggagtttgagaccagcctgaccaacatggtgaaactccatctctactaaaaatacaaaaaaattagctgggcatggtggtgggcacctgtaatcctagctattcaggaggctgaggctggagaatcacttgaactcaggaggcagaggttgctgtgagccaagattgcaccactgcactccagcctgggcaacagaatgagactccatctcaaaaaaaaaaaaaaaagaggattgggtagatgtactagaggtttggggaattcacaaacccaatttcagggcctagccgtgattaagacaggtctaaacagaagcccacatgaagtccaggagggcgtgaccaggacaggaattgaacttcccagtagatgagcagaccacagcagcatgcagtcagatagtaaagaacaggagcctagccatggtgcctcagagttctaggaagcaaaaaaaagcccaaggttccagagaaaaacaaagacctaccagtcagggcaccagagaggttcaggtatgaagggttccagaggaagcaaaggtcacctgtgagctggagaccagtgactcaacccaaggtttggtttggatttagagaatttgctttgcattgtcttgaggccaaattatgccaagcctgagctgggattatggcaaagctcttctgcctggggtgtgaaaaagccacaggagcatgtgcagggccctaaggacacactcagtcctttgtcaagtgtccaggatgaagtacaaccaggttttcttcgattaaattagaatgccgtgaaacattgctgaggtctaccgttcttccttcttatcatgctcctggtatatattctgacaatattcgtggaatttctccctaatatgtcttccccctctgtgatgaacatcctactttcaagacaaaggagttgataattcagttaggtttctgtagtacacaagagaagatcttcatctttagcaaaatcctgcctcataaatactccataaatatttgctaaaggaaccagcacatgagtgagcagaacagacgtagaaagagagagagagagagagagagagagagagagacaaagagggtagggcagatcaaagagagaaaataaagaacagaatatgaatgaatgtatctgtcctctaaagtgctttttttaaacttcctttaaaaaaatgatcagtgcctcaacctacaaatgagttctctctgaagcactgtactaggagttttattgtgtcacttactctccacagcaaccacttgacacaggtattattttccctattggatgaatgcccatttcccacattctcttcattcactctgctagaaactgaactacctgatttggattggggaatttttgtgttgacttgtttgtaaaattattaacatatttcaggctaccttgaccctacagatgacagaagaaatatgtagctcacttctgacaggtttcatagctatttcatattgctggacttccattttaaaattacccctgccaggagatacaccaagagagcttaaaatagctctgaaaagtgaacggtgagtgccttaataacaccatcggacccaacgtggcctaaatcagggatgagcaaccttagttgcctaagggactattcagagaaaataaaaatgtttatggagtacattttttttccatttaaacttaaaatagttttactgagcccagttgtgtaaaggagggtagaaatatgagagcaatgtcacagcttggaaaatgggagaaaaaaaggaaaagaaaaatttttttgagatggggtggggctctgtcactcaggctggagtgcagcggtgtgatctctgctcactgcagcctctgcctcccaggctcaagccatcctcccacctcagcttcccaagtagctgggaccacaggtgtgcaccaccacacccagctaatttttgtgcttttggtagagatgaggttttgccaggttggccaggctggtctcaaactcctggactcaagcaatctgcctgccttggcttcccaaagctctgggattacaggcatgagccaccgcgccctgccgaaaaagcaatttttaagaagcatagctgaggttataaattgttcccatgttaaggttttttctaacataaaaggaacataagaatcactgggaattatgaatattggtgtgcactgtggttctttgaatgagccactgggccattcagaataactttattgaatagaaatgtgtcaatgggaaaaatcaacactgcttcttgaccttaaaatgttagtatctgggcatatttgagaatcagcaactcctagatgcctttctaattttcatcttttatatctgcatggtgttttcaagttcaggaagtgcattcacatccattctctcattttatcactgaaaccacctcacaaggattaggtattatcattctcccatcttaataaatgcccccccgacacccagatacccagaccaaaaaccttgaagtaatccttgacatttttctttctcatccaccatcaatttttgtttttctttttgagacagggtcttgctctgtgacccagactggagtgcaaaggtgctatcatagcttactgcagccttgacctcttgggctcaggcagtcctcccacctcagcctcccaagtagctgggactacagccatgtaccaccacgcccagctaagtttttttaaaaaaatttgtagaggtgggatctcactatgttgtcttggctggtctcgaactccttttttttttttttttttaattttctaaccaggttcaaaatttaatgtccttattttaattatccaaacagacaatttcagttaaaatttatttttttcttgtgaaaagacataatagaagaaaaataagttacaatttgagatgaaaataattatggttttaggggaaggtagcatcagaaaatgggaatgccagtagaatgagcaagaaagtaggaatgagaggaaaacaaatgcctatcagatttggcggttagcttcatatatattatttaattcttacaacagctctacaagatattagagttaccatttttactaactataacaactagaaatgcaagaaacttcttctttacaccagttaaataggcagatagtgatgaatgaggattccagtgcttatctctctagctccatgatcactctttactgtacctctttgtgctattggactgtaattcaaatgacccacataaaattacttctaaagcacattcaaatgcagattcttgaaacccatgccaaatccagcataagattttctaaggttgtagtccaaatatctgcattttaaataagaacatcagggaaattttatgtctatttaggtcagagatccattgaatactactaaactaactgatttagagaaataaaacttaggcttaatttctatttctaatcttttatagattcattactttaagcaaggcacacattctcttacccttagtctttagcatttgtaatatgtcttcccactgccttatggccttcattgttcctgatgagatattagcagttaatcttattggatttctctcatatacagtcagtggtttttttcttgcctctttctttttttttttatttttttttattatactttaagttttatggtacatgtgcacaatgtgcaggttagttacatatgtatacatgtgccatgctggtgtgctgcaccattaactcgtcatttagcattaggtatatctcctaatgctatccctccccactccccagaccccacaacagtccccagagtgtgatgttccctttcctgtgtccatgtgttcttattgttcaattccgatctatgagtgagaacatgtggtgtttggttttttgtccttgcgatagtttactgagaatgatgatttccagtttcatccatgtccctacaaaggacatgagctcatcctttcttatggctgcatagtattccatggtgtatatgtgccacattttcttaatccagtctatcattgttggacatttgggttggttccaagtctttgctattgtgaatagtgccacagtaaacatacgtgtgcatgtgtctttatggcagcatgatttatagtcctttggtctcgaactcttagcctcaggcagtcctcccacctcagcctctcaaagggctgggattacaggcatgagccaccaaacctggccgtcatcaaattcttttcactccatcttcaagataaatctagaattcaacccttcacccctgcttccatctcaccattggcttccaagcctccattgctgctccccttcacttgctgctcctgcctcgtaagcagtaccctgcttctgcccctgcctcccagtagcctatttcctactgtgaagcaattttttttaaaaaacacaagtcagatcctgccactcgaatgcaggaaaacctccaatgattccccatctcattcagagtaaaagccagtgttgttaccatgactacaagaccctacgtacctggtcttgatcactgttccagccacactggcctccttgcttttcctcctaggcacaaagtacacccccatctcaagacccttgtcctggctgtttcctttccctttcacccagatctccaacatttctataccttatcagaaagccttacctggccccgctgtgtcctccctctctctcttactctgttttgttttcaccagagctcttatcatgtatatcatatacttctttatttattagtttgttgtctgtcttccccactagactgtgagttccttgtcagaagggaaatttgtttccttttttcataggaccttcatacagagactgacatgtagcaaaagtccagtgaattatttattgtttagatgaataagtgaataaatgaacccccatttacacttagagaaattggagcttaaagtggttaaaagacttgcccaagtcagagtaagcattagagctcggtccacagttattgctttcgatccaaccttaactgaggacctgaagcttgactaaaatagagagctcctcatgactccacatttaattcattcaatgaaccacagtccaccaaccgggagtaatttgcagcaattctgattttccttttatatttaacaaacttcaaaaggaatacagtttgtaacacttggctatcttcttaaaatctcttttccccttccatttctgtagctgtaccactgttctagacctctttttcttcaaaatcatcacacttctctcctcctcataggtctccaagacaccatgctttttggtacagactctgaaaccagggtactggactagactaatcaaatatctttagtgtttcattttatctcccttgttgaattcttatcaataaacgtcaattagatcaagtcagtttatagtgttgttcaaagaatctatatccttactgattttcatttatttagaggaagctctcaagctcttactagaattttaaatttgtttctccttgtagttctgtctggttttgcttcatatattctgaagctttgttattagatgcagaagcatttaagattgttaagtctttttttttttttttttttttgagacggagtcttgctctgtcacccaggctggagtgcagtggcatgatctcggctcactgcaagctccgcctcccgggttcactccattctcctgcctcagcctcccaagcagctgggactacaggtgcccgccaccatgcccagctaattttttgtatttttagtacagacagggtttcaccgtgctagccagaattgtctcgatctcctgacctcatgatctgcctgcctcagcctcccaaagtgctgggattacaggcgtgagccaccacacccggctgttatgtcttcttgattgacttactccttttacattatgaaataatcttcttgatccccagcagtattcttcacctgcaatttactttgtgtgacagtgatatagcccctccagccttttttgtaaaaaaaaaaaaaaaaagtgttagcatggtaaatctttttttttctatctttttatttttaacctattcgtgtctttaaaaagtgcatttcttataggcagcatagagtgaggtctaactttttaactcaaatttgaagatccttgccttttagttgagatatttagcctatttgcatttaatgttattattgataggtttaaacttattttgttgtttgtcatccttgctttttattttctgtttgtcctatctgatctttgttacctttttcctatttttctgctttctttggaattagctgaatatctttgtgattctactttgtcttctttattgtattgttatccctaaatgccaattagatcaaattgcctagaatgcaattcctgccacaaccacttactagctgtaggcaagtttcttaacccctctggacttcattttgctcaacgtaaagcagaaataacaacagtgtttgtcttgtagggttgttgtgaggactaagtgagctaatacatgtgcagtatttagaacaaggtctcatacatggttaatagctacagctatagaagagttattgttgttagtggtgttggttgtaatcatcattgttatttgctttcatttattctttgtacttttttccagcccatgcttcttcttgctgggctgctataagatagctgaggtacctggagtctgcctgctctccatcttctccttgacacccaagaagaggacaaaagcatccctgtaggaatcatggttcttgtctcactgcaacttctgttcttataagaaatttttatgaagaatttctgacaaggaggaataagttcaagagacctattgtgcaatatggtgactatgattaataacaatacattgtatacttgaaaattccaagagtagatatttaataaaaagagccatgttactaattcacgttaaattcacaaataccatatgagagaagactgcctcatttttttattcaaatgaaaagttacaagcattgccatgggtgctaccctaccaagtagtcccagagcagagggacactgaggccagaggggtcttccagggttcagcaattttgggggattcctggaactaaagttgaacacagatgaatcttcctcttctttttttaatcctttgtagctcgctcactctggtctctcatataactaaaacgtccccagtgaataacagagatgtcagtgacccagtagcaagaattttacaaaaatatcataagagaggatacattcaaatcatgatacaaaatatggcctggagctccaaacccagacatgtgtacctcactttccttcccaacagatgtgcacccaaaattatttactctttctactaggactgctttttttttttttttttttttttttttttaagacagagtcttgctctgtcacccaggctgaagtgcagtggtgtgatctcagctcactgcaacctccgtttccaggttcaactgattctcgtacctcagcctcccgagtagctgggactacagatgcataccaccatgcccagctaattttttttttttttcagtagaaatgggtcttcaccatgttggccaggctggtctcaatcttctaacctcaactgatctgtgcacctcagcctcccaaagtgctaggagtacaggtgtgagccaccgtgaggactgctatttttaatactacaaatagtagcacacataacaacaataacaataatacttatccagcccttaccacgtgccagtgagcgtgctaagctcttgacacatatcacccccatgagttctcacaagaactctataaagtaactgttaggttatccccatcttacagctaaggaaactgaggcacagggcagctaagccaaaggaaagttaatgacagggccagaattcccacttaggtgtttctcctttagtctgagatataaccactcgtctaaactgccactgactacattagaatactgctttgtctattggtaaatccagatttccacatacccggacagcttgaaaacagagagttcagggccactaatgcccacacaaatagatctgcctgtagtgtgaggagctaggagggaagccacctgtatgtctgcaataacagaacttccatctgctccaggtactgtgtatcctatttaatgagcatgtttccacccaagaaaacgcagagccggagctgactagacagaaacagtacatctcagccctcagtttttcttggttttgacaccttctggtatgtgccaaattagcaataaattccgaggaaaacctcagagggaaagcccctccctcaagcagactttccaaaggaaaattgttactttttctctgatcccaccagctttcccattcggaagcctttaaccagaaatcccctctgttcaattagaatcgtgactcatgttcttacttcaaaaaaagaaaccaaagtttgtcatctagaaggaaggaggaagagtgtgaagaagagggtgctttagagttaggctgttttgagtttaatttctggctgtgtccttcatcagctgtggaacctaggaaagttacttaaactttctcagcctcagctccctcaactgtaaaataggaataatagtatataatgatatatctaatagcaaatatttactttaagctagctattgttctaagcactttatatttctactttaatcctcacaacccttgaggtaggtaccattattattatccccattgtaaagatgagaaaactgaagtagagataactctagtaatttatttgcccaagtttgcacatgaatctgggtaacatatctccagatttaagcacttaactcttccagatgagtgtaataaattcacataaagtgactggcacagcacagaaaacttgtaacacttcactaagtagtagctattgtttttattatgaagaaatagttaatgattcaatatgaattacactctatgggttctatgaacttctttttctacttttattctcatgtcttatgattatatacacaatagatattgtagctgtattcgttgttgcaaatctctttctatggatgcaaagtaaagggaaatggttagtagctgccagatataattccagaaaagtgtgaggctgttacaatcttgctagtcattactaaaacaactacaaaatttcttgcccacttcctgaatttgatctttgaagtcatctacttccctttgtacctaagtccaagatttcctttcacatatttaagttattgtttgctgctaaaatgatacattttctctgtccgtacagagattttgtaataaagctgacatttattgtacacctacttcctgacatgcctcatgcttatacttcacaagcactgtctcgtttaatcctcacaacagccctgtgagttaggaaccattactgacctgtcttacagagcaccaagaggttaagcatcttgaccaacatttcacagtaactggtagaactggaactggaagattatactcttaactgttacaagccaataatctgtctccttagccctggctgaacctccctcttatgtctatttactgcatgaaaacattaatatattattttaagcactgaccaggacagctagatgatctatgtaaccccagagctgtttgtgctggcctcatcagcagcacaaggttgataaacttatcagtcatccggtcgatgctccctggctcagctttggtccagccatcacctctcttgcctgagcccctgtgaccagctcttcactaatctctttgctttctctcttgccccgcttcctcctacagtgtattctctatccagcagccagtgagatcttcttaaatagaaatatgatggtgtcacccctcctgcattcttaaaaccctgccatagtttcccattcatatttagaatcagcatactggcgatctgatttacccatttaagaggtcagtctagctaccatgggatgaatggagcatagagatgagaaggaaagtagggaggccagttagcggactcctgtcatggtccaggtggtgttgatggtgacttgactggggagttgcagtggggatggaatgagatgggatacatttgggaaggaaagcttgaagaacttggcaatggattacatgtttttatgcagtgttttaaaatctcatcagaaatctttagaaagatcgctctgatctcgcaagagcatggcacttaaaaccaactgaactataacaaatgtctattgaccagttaccatctatcaggaactgaaaggaattcagaaagaagaacatgtttctatgctaagtatttagaaagcaggaccagggttccttccctccagaaactcacagttcagtaggaacaataaatataaccacaaataaattaaagctgtgtgataactgtaacagcagaattatctacaaggcctaggagatgatgacatcaaagtaaaggtttaaactgagggagaatatgagttttcccatgaggagcagggagaaggcatcccaggcagcataggttgtaccaagttacagaggtgtgaatttttatggtgtggtcaggaattacagatacacaatgtagataatacaatgggcagaagccaagtcaagggggtaagcagagatggaaaattaaaagttttttaggctaggtcaagatgctggactttgtccctataggctaaagttttcccaagtgcattcatggcactgatagtgcacaagatggttttaatgatatatagacgagcatggatcaaatacaattggccttccccatccacaagttctacatctgagaaatcaacaaaccatggatggaaaatatgtggggggagaaaagcaaggaaaaataaaaataccgtaataaaaaataatgtgaataaaaaataatacagtagagcaactatttacatagtatttacattgtacaaagtattataggtactctagggaagatttaatgtatatgggaggggccaggcgaggtacctcacgcctgtaagcccagcactttgggaggccgaggcagccagatcacctgaggtcaagagttcgagaccagcctagtcaacatggtgaaaccccatctctactaaaaatacaaaaattagccggacatggtggtgcacatctgtaatcctagctactcaggaggctgagggaggagactcgcttgaacccaggaggtggaggttgcagtgagctgaaatcatgccattgcactccagcctgggtgacggagtgcaactccatctcaaagaaagaaaaaaaaagtatatgtgaggatgtgcttaggttacatgcaaatactacaccactttatgtaagggtggtggattttggtgtctgtggattttgatgtcttcaggggtcctggaaccaattccctgtagatactgagggacaagtgtaatcatttatgtattttaatatgtgctacataatgtataattggtatatcaagcctataatatagtttacttttcaaaatagatttattcatgttaagtaagttaatttaaagaaaaatgtcaagtaaatcatagaataggtgaacagatgtgggaccaatgatgaaatgtaagaggccaaagtttgaggcacttttcatataaatggtgggggtaggggggaggcactgaaggaattttagcttggaaaaggcatgataagatttgcaggtggtaagctctgtctcgtttccaggaataggatgaaaatcattctcgtgtccctgaaaccaattaagaggttcctctataattgtccatggaagcaaaaaatgtgggtggggactgaaatagtggaagtgggaagagggaagacagagccgtgaggaactccccaggaggtaaaaactcaactgcacttggcgactgaggaataaggatgaggaaacagaaggacccaggatgactcctgggtttctggcttgaagatctgaatagattttggctgccagccactcttaagggcccctgaaatttgtcaggcaggaaaaattttaattaggtgcattcttcattatgttccaaagcagaaattctgtctgatttgaggtaaagtgaggatttggaagttttccagtgggtgttgatgacagtagacaggtaaagccagttttagaactcggtatttgaatgtatttcggtatgaccagatctctcctttcttagttggatagagcctgaaaaatgccaggcctggattcctagatcggtgccagttcaatatgtaacaatccacaatgcagataggataatacatgaattgattagtaatattgaccttacgccaggcacggtggctcacgcctgtaatcccagcactttgggaggccaaggcgggtggatcaactgaggttgggagttcgagaccagcctgaccaacatggtgaaaccccatctctatcaaaaatacaaaattagccaagcatggtggcgcatgcttgtaattccagctacttgggaggctgaggcaggagaatcacttgaacccaggaggaggaggttgcggtgagctgagatcacaccattgcactcccgcctgggcaacaagagtgaaactctgtcccaaaaaaaaaaaaaagtaatatttatcttaacatgtccggacggctttgagctctgcctctgtagttctcaaccctccgttttattttatttttctgtataaaaaaattaatttctttcaacagaagagcttttggagaaggaggaaggaagtggggagaccttcctatgttgacttggaatttgctccctgtaatgtacctgcattcctccctgtaatacacctgcaatacagcaaaagaaaacaagggaaggttttcctgagtgaaacttgacaagatgcaaaagagttgtgagatttagcaccctcttttttctttcctgtgcaatgtctttcaggagttcccctacctaaaagacttttagcacatacacaaattaagttgcagcatcacattttccaaggtgctttctggaatcagtcaaggagtctaagtctcatgataggcctcaattcctcctgtaagtggaagtgaaaagtgcttgctgttgtttatgctcaaccacagagctccaaaatctgcgccccgttcctgagccatgtgcgtttccttgtttataagtaccaagcttcacggcaaagtgtgttcaacaattcactcactcaagcattaatgcagctctggtctttctcctctcccttaggtatttatgggccatcggtaagaatgtctggaagagatggaagaaaaggttttttgtattggtgcaggtaactaactcttcaactcttaagagacatcagtattaaagatttgctagaatgaatgaatgctttttaactgaggtataacttaaatacacagagctcatgcatttagcttaatgaatttttacatatatccatgtaaccaccattcagaggaggatacagaacatttccaatacccaaagggctcccttgtgctctattctctatttttatatcacttttaaattttaaaaaattaatgaatactcataattttttaattcgaacaatacagtagtatgtgagataagtcggggagagtagactcccacccctgcccagtctcctgccagggatggaggattccagaagggagcaagctcatgccaagtgagggctatagggacattaactttggctgaaaacaatgtagtattttgaaaagaactgagataggcattatgagtaaagtcagaatttagttggactttttgcctctattttattatttagtgtgtttgaatttgaattatctgtgtgggagtgctctactcttcttggtgcctggtgcttccaaaagtcttagccaacgtcccataactatgtttaatatctaggataaatttttctattaaacttctttttttttttttttaactgaaacaaaccaaattcttcaagttgttctgcaagttgctttttccacacaagttatttagatacctttcaatgtttacatatatagctctggctctcatatctgtaaacttttcccttttggatagacttctggactttcccaatttgggctattcttaacaaggctgcagggaatatctgtgtatatggatacaaatgtagatgcggatattgatgttaatacattagtcatatataaataacacctttactcttgagcatttcttaaatttttttccagaaatagtaatacctgtccttgaaagaccccatctttttggtaggggagggtgtttattttttgcatcaggatttttcagtttacaaagttttccagtgcctgtttttaattttcagactccaccagagcatttaaactataattcaatttgcagaaatctaatttatgctatactctgaaagatttcacaaagtgagtcaacttggaactgagtgacaaaggttcttactgggttacttgactaggattaatatttagagtgctaccaatatttagagtgctttatactcagagacctgactacaaagcaactcccttttaggtctaaatgaccttgagggtttcaccaactctgaacttctaagactagactgtctatagatctacttaagtctctgctgtgccgctaaggcaaaatacagctctctggctctaataagcaagaggtcatctttgctttcagtattgttgtagggtagaacaaaaccttaaagtgatttagccgcaaagaacattttggaatgatgcccgtccctcagaataacccacggctgcccagcacggtggctcacgcctgtaatcccagcactttgggaagccgagacgggtggatcacctgagatcaggagttcaagactagcctggccaacatggtgaaaccctgtctctactaatagtacaaaaaattagccgggtatggtggtgcatgcttgtaatctcagctactagggaggctgaggcagaagaatcacttgaaccagggaggtggaggttgcagtgagctgagattgtgccattgcactccagcctgggcaacaagagcaaaactccgtctccaaaaaaaataaataattaaaataacccatggctaagcaattgaggctattttagcttgtggtacatttcctcagactattaactgaccagtatttattgagcacctactttgtgtggagtgcattgagaggacatggagaactatcaggtctggtatttagctcccagaaaggaatctgttagagttctacatatgcaaacagcagaagtagactcaagctaattaaggtttaaaaaatgaatatatggaaggctttggagttaactcatagaattgtgaaaaaggctgaattacccatccatgttaagaacagggccagcatagttccagaaatccaagttgtattaggtttctccagagagacagaaccaataggatatatgtatataagaaagggcatttattagggagaactggctcacatgattacaaggcaaagccacacaataggctgtctgcaagctggggaagaaagaagctgatagtggcttattctgagtccgaaagcctcaaaacaaaggaagccaacagtacagccttcagtctgaggccaaagacctgagagcccccagcaagtcactggtacaagtcccagtgtataaaggccaaagaacctggagtctgatgcccaagggcattaggaacagaaggaaccatgtagcagggaagaaagacgaaagcctgaagactcggcaagcagtcttatcccacctccttccacctgcttcgttctagctgcactggcagctgattggatggtgtccattcacactgcgtgtgggtcttcctctcctaggccaccaactcaactgtcagtcttctctggcaacaccctcacagacacacccagaaacagtactccaccagccatctaggcatccttcaatccaatcaagtggacacctaatattaaccatcacaagtcctggaaccatggccagtgctgctagtgtggtcatgagacagactggctctgaccactttccatccttgcatctctccttgagggtcaaatttcataaagggagaattggtttagtctaacctggttcactcccaacttttagcaggaagaagggatggcacttggattgacagtcccactggattgtctttcatgcaaaatcaggatgccattaccagaaggagaaatggatactgggaaggtaaaaataactggtatccactttaaagagcatacaatgtaaatgggaagacaagacacatcaagaggcagtgctgtccaggagcagtggctgacgcctgtaatcccagcactttgagaagctgaggagggcggatcacatgggttcaggagtttgagagcagcctgggcaacatggtgaaaacccatctctactaaaaatacaaaaactagccaggcatgctggctcgcacctgtaatcacagctacagggaacgcggaggcaggagaattgcttgaacccaggaggcggaggctgcagtgagctgagattgcgccactgcattccagcctgggagacagagtgagactctaaaaaaaaaaaaaaaaaaaaaaaaaaaaaaaagcagtgcttagtcatggatggttctcacccctcagtgcttctcattgcacttggcacagcagtctctcttggaatcacttgggagcatgcctggcctccccgatagactgtgcactgtttcagggccagttttgtttctgattcttttttgtgtctttccctctttcctccaccacacccatacacagtccctagcccagtgtctggcaaagaaaagaaaaaggaagagagaggagaaaagctcaggcaataccttgggtggtgctgaaaaaggagagatcatgtgctccgagaagtggctggtgacaaccattctcagatttctgagaacttttgatatgatgaagtacttaggagaagtagatgacctcttattttgggagaggaaactctgcaggaaaaacaagaggaaatatgtggaaaacatcagtaaagccatgtctgtgcagtaagtacagggagaaccaaaagggagagaatgattttttcaggcaacgggaacacaggtgtttagagccttcacactgagccttctaataagagaagatgaaagtcacacagcagctaaaaagcaagctctgtgctcacttctgagaatcataaaagggcacttctcatctaaagctcagtatctttcctagaaaggcaggagaaaataagttcagaattctgtgaaatttttcatgtacatatgattctcattaactttaaagagctgtcaaggtatgttggggacatccatccccccaaaaaaatctgtttcagcctgaatcagatttctcccttaacaacctctgtgacacacagaggtgacgtgagagtcccatcatcacaaagataatgggggagccaggatgacaactcaggtcttctctttcaattcttgtcctattcaccacaacaatatctaaaagcaatttgctggcatacccagaaaatactgcattatttttaaattctttccatttttttcttctcctctatttaagtgatcacatttagaagcactttatcaatatcataaagaaaaaaacacactccctttgaaacaaccccaatgccatcagagctgcaggaggaaagttcaaggccaccagtgctggtccaattcagaggaagctaaaatgtctcaggttgtttgaaggaaaggatgtcaatccaagcggtggcaattggcccccaacagctgcatgcaatgttgaattcagtcatatgtacaaacgattttcagtttctctttagccaccaaagccttactttgaaactcaaaatgcaaacatgaaacccggagaaccaccctggttcaatttgcagaagcgtgagagttctggggaagggagaagattcccctaaccccgcccctgctcccaggcagccttggagggaactccctggaaaacagtgtggaaaccaccaaacagaaagtatatctacccaagtgacttacggaatctttgtgtctttcagttcagatgttagatcttatggaatgtgtttatgtagagagctagcagcacacaatttccaacacaattatgatttaatacattagatttaaaacaacgaaaattgtctgaaaaaacaaagacgaagagaggacatccaacattagtctcctcaaaattcatctcctgctctacacatacacacagagtctacttttttgcttataacgtgtaacaattaaaattctccctgactgagatttcctattagtactactgtcttggggaaccaaattttagactataaacggacttcctactagccagggataaaggatatactcagaggagtgctggaccaaagtagcaattcccatttcttaaggatcagagctaaaattactatagatgtggctagagtctaccctaccaactgtgaagggaatgaagcagttgcgaggagcttctgtgacagagattcaagcattcctgtgcaatgagagagtgtctgtaaatgggggcctggaccatctgcattaggtgttgtttaaaatgcagaccccaaggtgccatccagaagactctgatacagtaagtctggggtggggcccagtattccgtacttataaaaggcaccccaggagatactgatgcaggtggtccaaaggccacccttggagaaacactgccttggaggtcattatcccgcttaaagtgaagggtctcattcccttcagatgacaccatcttagagtttatgttctctatggaaccgagcatcagagtagctaaatagatgactatattcaaatggcacaataaagcctcctcttgccatcttccttgaaattccaatatatgtcctataaacttggctggctgcaaaccctaacccagagatcaaggggaaatgggccttcagcaccctgagtcaagaaattactggggcctcattctaaaccctcgggtccatggtgagaaccaaacacattgattactactgttagtaactctaatgtgaccaaatcaacactaatgataaaggtgccaattccatagagcactgctggatagccagaacgccccaccccgtgtgtgtgtgtaaggagaacagtgaaaacaggccaacttatcacccatatcaggttagaaagtcttaacgctttcatctttttatttaaaaaatatttttattctgtgatcaaaagatttctggtgcccagacatggtggctcatgcctgtaatcccagccccttgggaggctgagtcaggtggattacaaggtcaggagttcgagaccagcctggccaatatggtgaaaccccatctctactaaaaatacaaaaattacctgggcatggtggcatgtgcctgtagtcctagctgctcaggtggctgagacaggagaatcgcttaaacctaggaggcggaagttgcagtgagccaagatcatgccactgcactccagcctgggtgacagagcaagattctgtctcaaaaaaaaaaaaaaaagatttctggttaaaatctacttttttgattggtgttcaaataatttctgagacatttctccccattttagcactgtacaaactgtaatattctgtggttcctctaataatgtggacaatcacttatatttatatggtttcttagagtttacaaagtgttcgtcaagctggtcttcacaacctttctgtactacagtgaggacaaggcttttcgcaacttcacattagaggaaactaaggctcagagtggataagtggcctgcccaaggtcaatggcttgtaagcagccaaatatgaaacctaacacaggccaggcacggtggttcacgcctgtaatcccagcagtttgggagtctgaggcgggtggatcatgaggtcagggaatctagaccatcctggctaacatggtgaaaccccatctcttctaaaaatacaaaaaattaggcaagcgtggtggcgggcacctgtagtcccagctacttgggaggctgaggcaggagagtggcatgaacctgggaggtggagtttgcagtgagccgagatcatgccactgcactccagcctgggtgacagagcgagaatttgtctcaaaaaaaaagaaacctaacacaggtcttttgattgcaagtgccttcaataactcctagcacttagacaggactggcacctgaagagattgatgcatacagaatgttatatatatatgatggaatactactcatccataaaaaggaatgaattaatggcattcacagcaatttggatgggattggagactattattctaagtgaagtaactcaggaatggaaaaccaaacatcatatgttctcattcataagtgggggctaaactatgaggatgcaaagacataacaataatacgatggactttggggactcagggggaaagggtgggaagagagtgagggataaaagaccacaaattgggttcattgtatactgattgggagatgggttcaccaaaatctcataaatcaccactaaagaacttactcatgtaactgaatatcacctgttccccaaaaacttatggaaataaaacattttttaaataaagcattgtgttaaaagaatgttctagaactgaattactcagatagaaccaacatggctcctctgtttctgattcccaactgagaatgttaccaaaaattatgttccagctttcagaaaaatcactaaatcagaataagataaaatattgttagataatatataatgccttggaatacaatagtagtcacctgggaatacaatattaaaatgagttaaccacaaaaatgaattgtaagacatatgagtagttgaaggatttgtaactccaaatgtttgtttttgccactccacaattgctctataagacatttatatttatattctggttatcagatatctggttatcagatatagtctggttatcagatatcaacccaaacagacttaagttttaaaagggcaagaattgtattggttaactaattaaactagtaattagctggagggtcttctgtcatgactagatccaggactcaagcaatattatcaagcctctgtctctcaatatatttaatcttttggctctgctttccgctgaattgacttcaccctcaggcatgatctctggcagctcaagccttacaaaagtttaccagccccagagaaaacttttctttaacaattgttccagtacaggccctcagttagctttctttggcccaatgtggtgccaaatccttgcaccagtcactgcaaccaaggagatactatgttgattggccaggcatgggccaagtgttttactcaccctacttccagctagatgtgcagttactcccacacaaaccacttgccctgaaagttgaaaagagagtggttcccaaaggaagaccaggattcagttgtgggagggcaatgaatggcctgcatgcacacataagaaatgcccccacagaaggccaggtgcagtggcttatatctataatcccagcactttgggagactgagctgggacgatcacctgaggctaggagtctgagactagcctgggcaacacagtgagactccatgtctacaagaaataaattcttttttaattatcaaaaaaagaaatgtcccacagatgttatcatcatccccatttaaagatcacaaaaccatgtcccagaaaagttaactgaactgccttggttcacatagaaaataatggatctgaaaaccaaatccagttctgcatgactctaaaatctattctccttctcctccaccaaatggccttcacttcagtgccaatcaggagtctgggatttagacactgtgatccttcattcgcaactacatcacattaaaaatagtccttagtctccaggaactgtgattcacaccataaaaattttctccatgctcagattttggctcaatccgtcaatgcttcctcaggaattccttgcccaaccacccatctagaccaaatctccaagctcttacagtaccatatacctctctttttaatatttgccactattaaaataacacatttgtgaaatcatgggattaatgtctaccttcatgctagacatgagggcaggaatcacatctggttttttgcatgtttatagtcctcgaaccaaacacactacctacgtatttgttgaaagaatgaatgtatctattataaacaactcttttctaaattatgtatatgaattttggacaagggctggtgaccagagttcagtaaaaataacagctgattaattttcaaagaatgatggtaaaagcaaggaaagaagatttagacaaaatacattctactgttgtatgtccaagtattttagtctcccataggtgataagaaggggagaggagagttggggacagaaaagtctaaccttttcatctcatgactggaatctacttgctaactataattgaaactcaagggcaatcttagaggttatggacagttcctatatattaaaaccgtggttctcagattttaacatgtattaagagatatctggccaggtgtggtggctcatgcctgtaatcccagcactttgggagaccaaaatgcgaagatcacttgagcccaggagttcaaaccagcctaggtaacatagtgagacatcccccccaccatctctaccaaaaaattaaaaaaaaaaaaaaatagccaggcatggtggtacatgcctctagtcccagctactggggaggctgaagcaggaagatcacttaagcccaggaggtcaaggatgtagtgagccatgtttgtgtcactgcacttcagcctgagcgacagcaagaccctattttgagaaagagagagagaatctgagacagttatgaaaaatgtataatcctaaggcccactctgacctgagattctgattctggtctgacttaaagaatctacatatttacagcctaatccaccccctcaccccccacacactatctaataataaaggcagctgtcgccatccactctttttttttttttttttttttgagatggagtttcgctctttctcccaggctggagtgcagtggtgcgatctcagctcactgcaacctctgccttcccatttccagcaattctcctgcctcagcctccggagtagctgagattacaggagtctgccgccacgtccagctaatttttgtatttttagtagagagggggtttcaccatgttagccaggctggtctcaaactcctgacctcataatctacccatctcagcctcccaaagtgctgggattacaggcgtaagccactgcgcccagcccaccatccactctttaaggaacattacttcaaagcattctgtagtttaagcacgtgactggaaatgagctaaggatttttaaaggtgtgtctgaggtgcagccagctttaaaataaaacctcgctgactgttccctcagaagtcccaacggcctgtcctgtgattccatgagaaggtacctaccctatgaaaatcccaaggatgtgaaagacagagttctttaagcccttctctgcaaagtgcactttcagatgtctgctgatcatttgagatcactagatttttatgctttctgttgtaggccaggctgtctgacaagggtggctgactttctcacttctaacatgcattccaggctctgccatgcctttattacaacagtgctcactgcctcattaatttttcatcaacaaaatacagttttaaaagaattctactctgacagaggaacatgcatttcatgggaaatggcttttacttagtgtggtcttgtggaagtttaaaaaataaatgtaaggctttccaaatctttgcaattctcccaccattcaatcagtctataaaaagtgagattccccccaaaatttccaataattagaatcattcaaagagaaatcattctttctcccctcctttatttcctaaagtacattgcaaaatcctaaatcaagatgctcccaataaaccaactcaatttggtttaccaactcaaagcaattcagtttgtggagagtgacttcagcaatataaccagaagagggcatcagcatacagctctccaagaaggaagccactgaaatagaaaaggaaaaaaaaaaaaaaattaaaaagcccaaaccatgtagtaatagtaaatgcataaatcttgaaataacacccttctgttgtgattttttttttaaatcttaagtgagtgtcggcaactctctgtttggccaatcacattaacaaactatgtcatctttcatgttgtcagatgagaaatgccaggttaaaaaaaaatccggctgggcatggtggctcacgcctgtaatcccagcactttgggaggctgaggcgggcagatcacctgaagtcgggagttcaagaccagcttgaccaacatagagaaaccctgtctctactaaaaatacaaaattagccagacatggtggcgcatgcctgtaatcccagctactcaggaggctgaggcaggaaaatcacttgaacccaggaagcggaggttgccgtgagccaagatcatgccattgcaccccagtctgggcaacaagaagaaaactccatctaaaaaaaaaaaaaattccccatgggaccgttccagcagtatctatgatcattgtcatgcagagggtcacaggaaatctgttatccctaggatcaataataacaagttggaaaggcctggtactgtacttggaatcccctgtaaatttggggggtaaaacctctttattggattgtatgtactcaactttctagaaccaatcagattcaactagtgaatgcccattatatggcagattttgcttatgagactgaaaatacaatcaagacatatgactccctagacctgtcttcaatgaatttataatccagtaggtaaatccacctattaagctatactatattagaaagtgtgtcaaatgcaaggaagctgcctgtataaatgcatgtgtatatgaagtgttcgctctatgggtatcacacatggtatgtaaaactcaattaattctctagcaacaataagatgcaggtaaatacagatgaagactctgaggcttacagaacggacagcttatcagagctgggatgggaccccaggcccatggaaccctcagcctacactcttaaccttccattttagaagagtgtgctattgattactttgtttattacaaaaaattaatatgtgttcctttatgaaaatactctcagtgacccagccttaggtttcccctggcattgtgatataaggaagaagttctgcaaaccctatacattataaagaaacccaagtggggcggtaaagtttccatcaggagccaacagagggcagcaacagacaaaccaactaccaaaaacatcctcctgcggacacccttcatctctccactgggaccctcaagcctcggacagtgcgggagatgcatgtagcactcgagagcgtcaatttcttatcaccattaaaacaacaaaaacaaatctcactatagaagagactaaaaatgtcccccactgggatcaaagttcacttagaaagtgtctcttttaataaaggaaactaagggatgagggatgtggcactccttctctaagacatttgacatccgtggatagtaaatatgcctgagagcatttagcccaaagctaggaggatgcttgctttcccacgggctacttgcagacaagccagatgtagaaatgctaagtatatgtgctggatctggatgcactagagtgacagggtcctgaaggcgggcctgcagctgtgagcacccgccctgcactggcatggtttgtgttggtagagtgagggctgccattagggcacaagtgacaacagccacgccattgtgggggctgaggattgctctactgtgactggcacctagcgatcaagcgctcattgcttgtgacagcatgtcactcctgcacttgtctgagataagaagaagacttcaaagcaaccaaagtactccttcagcaggaagaaggggacaaaacatgtagtttgatgctgatcaaaatgctgcaaaaaataaaatactgaaataaaaaggcatgaataaatgaatgtctagcctctaacttctgaccaaaaggcccatgttgtatctgcgagcatggcagtctcagccaaggccacagtcacattaggtagaacatacaaaattgctgtcgtttaaccacttttgacctacaaaaatggcagtcacatgtagcttaacccaattatattaaaagcaataatgataatagctaaccttcatcaagtacttactaagtgccaggaacagactgtaagtgcattccccacatgaactcattcagtcttcacagtaagccaatgaggtaggttctaagattgtatccagtctacagatgaggttatgaaggaccagagaggttaagtaacatgctcaacgtcacacagccaggaggtagcaaaactcagtttgaacccagccactcagtccagatcctcagaggagagaacatgggggagggttttttggagaagacaggctccaggggtcaacctcacaatctgcttttccttaacaggtcagtcagtacacgtttgccatgtgcagttatcgggagaagaaagcggagcctcaggaacttctacaattggatggctacactgtggattacaccgacccccagccaggtacccaccgaccctcaaggccacgagcccacaaaccctcaaccttcccaaatcaatggtcaactaataattgctgggcacttactccatgctaggcactaagtcaattcactaagggtttcagctgtgtgcatgacagtcacaatccctgatattatgccgtttccatcccggttggttaaatgccatcctaacctagtgctttggttttactcaagggattctctaatttaaacccaaaaagtaagagcatttttcttttacctgcctgtatccacatcaaatatggactccaccatacaatgctaaaaaaaaaattctgaaaaagaagtagtcccacatgtacaccaaggagtgtgtgtgtgtgtgtgtgtgtgtgtgtgtgtctgtgtgtgtgtgttgtttttcaccagtgatgtgtgggcttggcaggtttcagtgaccaagggagcctgcccaatatatccattttccctagctacaattcaagagatcataaggttagctggtagcacttgaaaaccctccctaaatgtctttttccctaagaagacaccaatccacaagcagagacaatgaagcccttaagccttatgtagctaagaaaactacacgagcggtagtatttcttaaaagttctacaccgcataagttctacatcctgccccctcgcacctctccccccacccattttatctttttcccagaaaaaaaaaatgaatagaaatcagcctcaaagaaccttcaaaatgggaggggggtgcgaaatcatttcagcatattaatgaacaacaagcaccaacagccctctcccggagaagtttatttttatgccaaatctgcacaaggaaagcatttccaaccatactgcattatttggcccaaaacctttttttctactcccatattgctcttccacatgcaacaaaatacacataaaagaaaaacagagtttgagagaagatggggtgctaacctgaaaaggtgtggcagggaaggccttgggcccagcccacttagtaaaattagcacctgcagaatctcaaccgagtgactgggcccagcgccaccccttcggtctttcatatgttatttgctacttgccagagcagaatgcagagctgaccacataaggcatgaattaaatgctctgcctggaaatccttcatgagcagaaccaacgagtttgaaacaaacaatttcatgcaacttctcatggaaaggatggggctcctgccttaggaaaccagtccttaggacattctgtgatggtttgtgttcttcttaagccattgtgtatccttcaaaaaaatagattcagtcctccttaggacttttatttttaagtagaaggctagggtgaggagtggtggctcacatctgcaatcccaaggcgagaggatcgcttgagaccaaagttcacgacaagcctgggcaacaaagccagacatcatctatacaaaaaaattaaaaaataaccagggcatggaggcacacacctgtaggtgtgtgctacagggaggctactagggaggctaaggtgggaggattgcttgagcctaggagttggaggcagcaataagctatgattgcactgctgcactccatcctgggtgacagaaatagaccccaactcaaaaaatagaattgtaaagaataataaatttttaaacataaaatgggacgctaaagggccaatatgagaagggaaatcaataccaccttatgacaataattgcttttaagccagttcattttcctttccccccatgtgattgtatttagccctcagggtaatcccacaaagtggataagaccaggatcattaccccattttgtaaatgaagaaactgagattctgagatatcaaaggctattgtttaagactgcctggtggctgagctgggactccgggtctaacccatgtcacgctttggcacttgcagtaaagcatagctgcatgaacagctatagcaaagctatggttgttactttatcagatgaaagcaaaattatcttcactcagtggggagggcaggagtggagagagctattctatctacatgtgtaaggagtaactgtgcacatatatttttaaagcttatttctttttacatcgatcccatgggatataatttataaatttctatacgaaagatgtaaatggaaagatgtaaaatgtaaatcaattatgttcttgagaataataagcagcttcttctatctttccatgtgctaagtcctatttattccccaagtaatgtctgattgaaaacggagacttaaattctctcagttgtcatgggaaagtctaactcagaattttttaaagagtgattattggccaggcgcggtgcctcacgcctgtaatcccagcactttgggaggctgaggtgggcagatcacttgaggtcaggggttcgagaccagcctggccaacatggtgaaaccccatctctactaaaaatacaaaaattagccgcacgtggtggcacgcacctgtaatccgagctactcgggaggctgaagcaggagaatcgcttgaacctgggaggcagaggttgcagtgagccaagactgcgccactgcactccagcctgggcaacagagagagactctgtctcaaacaaacaacaaaaaagtaattattaaaaataaatgttcctgggccccatttctaacctgtgaaccagaagtagggagaggtcagaatctttgtatttaaataagcactgcaggggattcctgaacacagtaacatttgccagctggagagccaagtaatgcacattttaaccaatgtcctcagatttgaggagtctcctcaactgctccctgaaaggtgagtgtgcaaatggggaggacttcagactctacctctctccctctttctcttggttttatccaaattgtcagtggatccacctggtggcgattttgtgtgctaagaacccttgtggcctgttgctctctgccatagaagggagggatgcaattaatattgttgccttagtaccagcctacaatctacgtggttcccccagacacaagcatttccactaaataaactctacctgtttgggtccttgacgtgttcatttggtgaactggcaaattatgtaagtttcacttacaagctactccttttaagctaaaaataaaaatgcatcactttacctttccctgtgtatggtttggaaagtttgaaataatctcaatttctatccgattagataattaagccttcaaataaaagaatattaatccagaataattcaatgccacagtttatcaaacaactgaattattcttatacgactcataaagacctttcttaccctcataaatggactttggccatgcaagttgttggaagtgcaattcctttcccctagagagctggccagcattcctttgcctggtctgcctccatctattcccagacgtgtctttttgtctttgaattgtgggactgtgcccctcgttctccaaggagagcccatttgaggtcacacatcacattcttcagattcagtccccaggaattgttgctttttctaagactgatggccttgtggttatgacatgtggatcttcactttgtggatgttcactttgctttctcctctcttggttctctttcatctgtcgctcttctatctccttcttgctttccttggtgtgtcctcagcctctggtgctttctgaaaaagccctgttgctctctgctgctgtgcttgtcattgctgccatttctttagatgtttctctttgcccttacccactccaaaattaggcttcattttattgttaataatgactcttaagagagctgttagtgagggcccagccctggattcatgctttggtgcagtaaagcacagtggttatagtcatcagctgtggagacaaacagccaaggtcaaaagccagctctgacacatacaacccagctttgtgtccatgggctagttaccaccttccccatgacttagtttcctcatctgtaaaatggaataatagtacttacatcataaggctgttgggaggattgaataaaaatataaaaacttcctggtgtctttccatctctacctctaaataactgcacagtggagagggctgtccacttccccaaagtaactccatgaactgactttctgacggtagctccagaaatacagtatctctaccccagcagcaggccctgggtgagggggaggccttggggctagtaaaagtgatacctgatcgtgtttgtcctggcattccctgactgtagcaaaacagcttattcctaaggataccacgagactaggctacaggtctattgacctgctcttccttttttaactctttattgctcacttttcaggcttaaaacaactctcagagctcttcttcctcctccttcccctttcagaattttcctttttattgtgctattcattaggttcatcagattttcccagcttgctaactacacatcatcctactcaaattaggtattttaaaactttccatatgaaattaagcaaaatagtcccttataataaaaaccaccaaaaatcttttagtaaagctttattggtgtgatattatcagaccctccatataaagaagtagctatttattgtcctaaatccctggccattccaagtgcaaaactatcaatacacacccacgcttgcagcatagacacctcaataaattgcatcggcacaatgaagaagtcttaatgttaccagaaatcttttccaatgacaaatgtcaaacagattactggctggtcctcactggaaatttggggatgctaataactcattcattctcctcttagtttttaataattgaggaggcgacgaggaacctgatgaagatatgaagtattatttccagctagagaatgctgagtaatctaaaatacaggtttctagaatatgttgatggacacaatgtagctttggcctgaacccaaagagaagtttccacctacttctcactaattttttattttttatactttaagttttagggtacatgtgcacaacgtgcaggtttgttacatatgtatacatgtgccatgttggtgtgctgcacccattaactcgtcatttaacattaggtatatctcctaatgctatccctcccccctccccccaccccacaacaggtcccggtgtgtgatgttccccttcctgtgtccatgtgttctcattgttcaattcccacctatgagtgagaacatgcacttctcgctaaattttaaccttgagaactgcccatggaaaaagatggatctagagcatattcatttattcaacaaatatttgtgcacccactatgtgccatgcactattctaggctccagggatacagcagtaagcaaaatagacaaaaactacctgcacttatgaagcaaagtaaattatatagtttgctaaaaagtaataggagcaaaaaagaaaaattaagcaagataagagataggtcacaagaagggaggtcagggaaggtctcaacaggaatgtgatgtttaggaaaagatacaaaggagataagagtgtgaatcatgcagatacctgaaaaaagagtgctccaggcacagagaaaagcaattgcaaaggtactgaggtgagcacatgcctggggtgttcaaggaagagcaagaggccagtgtggctgcaatgaagtgagtacatgtgtgcatagagggagagagagagtattaggagaggaggttagaggtggcagaggaccaattcatgggaggctttcaggccttgtcagaaccaacgcttttcctctgagtggaacgtggaactgctggcaggttttgagcagaagagtgacaggacctgactctagtgctaaatcagggactctggctgccttgtgagcatcaactatagagaatgaggatggaggcagacaggtcagataggaggctattaaaataatccagggatgatcctggctacatttatgatggccgcaactggagatggaagaagtgatcaaattctggtaatgtcctaacggtggaaccatcagaatttcatgattcattggaagtgggtagtgaaagaaagtaaagagtcagaattgaccccaagactggggacttgagtggcaagagagatgggctcagctttgctgaggaggtcagggagaaagaccaggagttcattgttgggtttcacaagcttgggatgtctatcagatatccctggggaaaagtcaagaaagatattcaagtctggagtccaggggagaggtccaggttggagagagaagtgtgaaggccatcagcatactcatggtacttaaaggctggttggcatcaccatgagagagggtgcttctaaggaagagaagaagggcaaggacagaagcccagcatttaaaaatcaggaagaggaggaggaggagccaccagacaagactaaggagcagcagccaggatggtaggaggaaagtcagggtttcctcctgaaagctaagtaaagaaagcatcttgaagagaagggagtgcaaatgctgctgataggtgggtgggcccaataaaatgagggcttttaatcagtcattggattcagcaatgtggaggtcactggttattcagcaatgtgtccactgaaacctggacaagtttcagtggggcagcagcctgattggaggggttgtaaggcagaaaaggaggggagagacccttgctactcaacatgtggtcctcacaccagcgccatctgaatcatctgggagcttgttagaaatgctgcacctcaagctctgttccggacgtactgaatcagaagctgcattttaacaacatgcccagggggttcgtatgggtactaaaattggaaaagccttggtagagatttccctttcgttgtaaagagaagaacaataggacagtagctgaagggagagatgtggtaaagagaggtttttgttgttgttttgtttgtgtttaaagatgagggagaaaatagtatgtttataggcagatgtttatcccccaagcaggcagtctgcttggcagttctatccccagcaggacacaaaaagataagatccaggctcagaaatacttcttcaacatcacggtcccactctgtggacaagtgaatctcagacttcccatcctaagttaatcactacccccctcttctgtcccaaggaaaagcagcagaaactgctttttcaaaggctgagtccagttgagaacatcacagctcagcttagtagaagttgttactcccttttcttccaggtttggagggtggccgagccttcttcaatgctgtcaaggagggagacaccgtgatatttgccagtgacgatgaacaagaccgcatcctgtgggtccaggccatgtatcgggccacggggcagtcacacaagcctgtgcccccgacccaagtccagaaactcaacgccaagggaggaaatgtacctcagctggatgcccctatctctcaattttgtaagtaaatatgccgttttacaaaaatagctctgtagagtaaagtaaaccttccaaagttgaattagaaaacctagttgcttttatacttaaaatttataaaatcatgtttgctgaaaacatatagtgaattcagggggaaagttggggcaaatgttagatgaaagtaattttaaagtgcaatacttgaccttctcccacaagcactaaatgaaggaaagtgtattttaggtggatttttatctctgttttggtgagagtacagaattcacagccaaacatgtatttgtttgagtccttcaaatatagtagattatgtatgtccttgcttcatttcttcctattaaaagtaatttaaaaatagggttgatttgaaatcaacttaaatctgcaatttagaaccatttaaaaataaatgatgacattatcacatgcagcgaaaaaaaaaaaaaaaaacacaaaacatggtacctaaaatcccattccgagctaaaataccgaagacccaaaaatgaaactgtctccttaaacagccccagttcatattcgagttttttctcctcttacctctgcatacatttaatttcttgccccttttccatgtcttcttgctacctaaaatggcttttatctatcaatacttctgatacacagggtgaggtgaaagccagtacatgtttggaaatatttattaaaacaaagaaaatggagaaataaagtaattcattttcgttccaaacattcattctaaatagagtcttttgctttaccctgaatatcaagtcaatcagagatgacacaggtacaagtcatttttagcaataatcatgatgatttattactttagtatggaattcactgattcattctaggtcattgagcaactgtctagaaataagacatgctaatgagaaggacagacaaggtaccagctcttataatacctgcatcccagtggggaagcctagatagtaaacaagtgaacagataaataagagagcttcagacactggtaaataccatgaagaatgtcatttagtggtgactgagtgagaaggagagacattagacaaacaaagaagctttccctgagtttaggttcaaaggataggtagtcagccccacagatatttgaggaaagagaattgcagctgaaggaaaacaaatgcaaatgcagagacttaacctctaacacagtgcttgcacgatctctcctctgttgctcttaaacagaatatggatgtgggtggaataattttgcagctgtaactactaaatagaggtaaacttgtatttcagtgaattctactgccatgtccatttctgtccaacaagactatattcttacaccttgcaacacccttgttgatcaggaaatacaacttcttttggatcacaaattctgtctatcagatgctcccaggaattcctgtccagtactgatggtgatgcatgcccttgtggaacagtgtaaataatcatataatggctgtgagtttccacacagaaaatcatgaaagaataagaaagagattgcccacacctaccaccaagttctccactcttgtattctctaacatcttcctgcacttaggtttacttgagagcagtaaagagagtaatagttattagtcaagataaatcatacccagtatttgtttaattgttgtgtgttttttttaaagtatgacaaaaatccctcctttcaccttgggcaacatgctcctttgtaattcatttggaaacaacacatcctatcgtaacctcttgaaaagaagttaccccctgtatcagaaaaaaattctaactataatcaccattcaaatcaacctcataaagcatgtatctcaggtgatatttggaaaatactggtcttatttccaaataatcttcatttcttctaaagtcatttcaccttacattcagtgtctctgttctatcatctgcccagattaagaaactgctacatggtttgctattgaccccactttttcctcactagtataagatgaaggacattcaggagtaaaattagagacaagaaatcgattaaaaaagaaaacctgtgatggaagctgctgaagaagagatgtctcttcatggaaatgcatgggggctcttgatttagatttctgtctgtggataggattcatttagttgtgaaattagaacactagttgttaggcatcagcagaaagactcaattgaatacacacagcttgatgtgtatcactactctagttgaaataaggaacttttgttaaatggagcatccaaagcaaactcctaagagttagaatttgcgggggggggggggcgtaaatgatatcatccctagggaatatgtaaagtaggctgagaaatgagtgagaaaaccagatcatgcatgccattgggatttatcagtacctagtggtagatttaccttcttctgtactgtctcctttattactgccgaggaacgggagttcttcagagagcatgaggccctgctacatctaccaggttctaaaagaacaagccactacaatcagctatggagactgtgtaatacaggaaacaccttgcacatacacaaaaatatgaatggcacccattgagttctgcagtgccaaatctgcacaactgtacacagtggccatgtaataaatggcagcccttacccagaacttcagtctaatagtgtggatcccagccgtcccatggttactttattatccctgcaacagagcttcaacactgctccaaattctatctattgctagtttaagcacttaataaaaactgcagccagagtaccagccagtgtggcttctgttcctataatttacaagccatcagagacaaccagttaggatttaatcaacccaacctttatgcctgagcatctacaaaaagatcaagaaaggaaccaggaattttacattccatggtatcattgggtagttatgcacagcaaccaaaagagaaaaaagtgtctagatatgagggaatacagtcttccctcagtatccatgggaaattggttccaggaccccctgcagataccaaaatccatgaattttcaaatcccctttataaaatggcatggtattttcatataaattataaacatcctcccatgtaatttgaaacatctctagattacttataatactggatataatgcaaatgctctgtaaatagttattacactgtattgttcagggaataatgaccaaaaaaaggtctgtacatgttcagtatggatgtaatttttttctgaatattttcaatccaccgctggttgaatccatggatgcagaacccttggatactgaagagctgactgcataattgttagtggagtaagccacagaatggtggttagttcataattacttcacagctgctgtaatttgtaaaattcaaaccgtcagtactaaatagatcaagccttacacatgggtaactcagtcaaacccacagtgttgattcatacttaccgtgaccaagtcatcttagtttgcccaggacgtctctccttttagcactgaaaatcctgtgtcccaggaaacgcttcaatcctgagcaaagtaggacggattggtcaccaggtactaccacgcaagaaagatgaaaaacagtcataacatagttgtaaagaacaaattttcattcttcacttacatttggttgccaatctatacactgatttattttaatcaagtcacatcacaaaaattaagtcaatcacagattctctagctaacaaaaaatgtaaaaaaaaaaaaaaatcaagtattgcattttaaaaaggtttccttgacttccaaaaaggtaagggtcattgttaagtacttaactctgcacacatctcattaaatcttgtttttgaatatttgttcaaagtacttgcctttcttgctagtgaataatttttaagaacaacaatctttcagtgacttaactctataatcgctttattagtatttacaagacaaaaggaagctacgtagaaatggaaaaatacatagagaagggaagcaatatagaaatatttttggggtagagaaaaagaaacactccagtcttgtcatgtcactgtctgtttaagggaaacttaagaatggaccatttttatagtttggaaaacttgggagtaattgtgagtttatttgggtctttctaaattcagtttaacagtttttattttttgcaatttcaaaagctcagttttaaaatgaaaagacacttcgagaagagtggagtggggtatttatgtggaactgtaaaaactgaaaaaaatagatcctgctattcattagtttgtgtgtgactctacagagatttttgggagggtttcaccaacctttaaaacttttttgttcttttgtagtttttttgtgtgtgtcattgttgatttaatttttttcttttttgttaaaatttaacaaaattaagtcagcacctagctatacaatgtttttaaacaaattcttgcaattccccgatttttaaggccaatgctgcttaccttggaaatgatgtcaatctgtagctgagtgttccacgatttattatgctgagtggcctctcattgagataccttatcccctgtccattatgtgttagtggaacagtaaaaattagtacctcaattctcatttggattagggtggggtgggggaagagggtattttaagctttgacatttgatcaatggttatttaatatatcacttgcaatgagtcattttaatgtctgtttctcaactaataactgttaatcacatcatagaaccccaaagctgggtatttttgagaactgttctatttttgctaccacctgaacgtcttcaacagttagggggatttgggttactgttggtttgggggaggttgattttgttttttgttttgttttgtttaagttttcttgttcaatctttgctcgaacccaagaacttaggctgctaggttagaactcctgtctgctttcctgagccttgttgctagtctttatgttattctggtttgttccttcttaccctgctaacttctagctggactgaagggtaagtgctcccctatagctagcacagctcagataatcagattagattatctgacacctgcaatgtgcttccctcccccttaaatcttcctcatgtctagaatttgtagtacaacttttcatgttattttcctgaccttaggtttgaaatgtaagcttccatactgaaactaggatgcatgtgatgtgtgcataattgcctcctctccttggctttcatattggcatcaaatgatcctctgagtaaagccaaccattaacgtctaattttttttcattccaagaatattaattaacatcacaacaaaatggcaaataatgcctttgtttcatgtaattcacagctacctgactgcttaatgcctgaaaacagatcattttgcactctgataatgtgctgttgttgttgttgttgttgttgtttttcctttcccattccaaagattcgaatggtcagagtaccagtggtgtggtaaccatggataccttaaaaaataagtggggtaggaaacccagagttgttaactgagcaagactagaagaaattgcaaaatacaattaagaaagcaaatgcattatttgaacactaaagagttcattctagctggcttaagggtgtgctctaatgtaagacccaatagaggattaattttgaaaggagagctacaatacatggaactagcacacacaaaaacaggaaattaaggacaagactgaatccatgtcactcatttacaaatgctttggattcacagtcttacaatgccaaggtattaaccttggtatcaaggttgacatttaacctctggtatcaaatgtcattctgctactcccccaagaacaatgacaacaataacttttttgacatcatttgtatttgtattaatttttctaaaaatacccatgtaagagaaaaaggagacattaaaactttagaaaaatatttctcttaactattcgagttattaataaaaaagaacacatacttccttaatttatataggaaaaaactatcaaccaaaaatgtgttgaggaaagacttgacgttagacggagttagaaaaattggtcaagagagcaggcaactatgtatttgagtattctgaatgctaatttagaagaactaggtcatatcatttctcctgaccatttaatgatagtcttttcttcaaattttttttgtttccttctttaatttgctttttcctccctttctttcttttttcttttattttgcataaatgtacccctggctagcagacagacgtttttcaccacttcaagcagatacttaatttgactttacttttcttgaatgtctgatgaggcattttaaaaggcttatcatagaatgtaaacttagtgggaatttaggattttgctatactttttttaaagaatgaaagaaaggatggatgaatagttaactgaatgaattctgttctaaacaagtttacatgtatttgcacaacaacgcattgctatcctagtagatttttaaacaattgtttgccttaattcctttctgtagttttatctcataaaattttgctatatcttcttatattgtcaacttgcagttgctacgttgcaggaatgcaatatcaaataattaattcaatattaacataatttgtttgacccaaaaccatactgtaaatcatgtcccttttcactgtaaaagtaaatcactttttaaaagaatatgttcccacaatcaggtctaaaattttccaaacaccatgatttgatctaaacagaccatattaaatgaaggtttacctcactgttaactacgtaagacatatttaacatattattcactagttaattgagtattttcatgccatatagtgagttatagtaagattattaatcaggtatagaaaatttatttttgctcatgttggagtgagtgcaaaaacatcgagtactctgtaagttaatataactacagcaggagaaaactaaaatcatttatttattttgcttgagatctttgacaaaatctctgttatgatttttactcaaagcaattgtctgacaaataattatagaaattaacattgaaataaacatcacacacttatccttttgggggtattgccatagtagttttaaattcaagatttctgcatgatgcaatgtgagccttgagagcttccaaagaagccatcctcttttggccattcatattaccccagtttagctaaagggaccacgaagcaattaagttgtttctcaattaagtggtccatttgtgcctctgggcagcaggcatgtgaggaccagtcttttgcttgctgtgcagagctcaggcagggcacaacatcccctggttacttgactattccaaggaaagctcttctagaaaaatccataaacaaccagctgccatcagtcattgtcatttctttatttcatgtcttctgatgaggctgactactgtcattgttcgttattgtccaaaccatacattcactcttgtactgtcaagcagatatgacaagcacacattttccgtataagagaaatacaaagtcaccttttaatttgcagtttgggttcacagatgactttagagttgcattagctattctcttgcctctagcatccatcaggagtagcaacagccataactgtgctctaaattccaatgttaaaacagctacctctagcttattacaaaagggattcatgagagagaagagcctctttcagacaatttgttagtaatataatcataattattttcaacagtgaatttttcactagcccagaaaaatttccaaaatgtaatatcacagaataaaaaggtagatttgaccttttatcttcaatccctaagctgttagtataataggaaaatttcaataaaataaaaatttgaaaactacattattcttccaggaaaattacatttatttgctagacattattgcaagtctatctaaaaatatatatgttagaaacaagatcatataagtgtgcttgatactgagataatagatcatgaaaaatagtatatggttttcatttgtgagggaggaaaaaaggaaaagactatcaaacatgaaatgaacccaaatatcatgatcaaagaacaacatagatgacagagtagtcaattagggaccataccacttgaattttaataaagtagattaaatgagatgagagtataaaacccacataatagtatcactttaggaaccagtgttttcccaacattccttaaatgtcaagccaaaattacttccaagcaaacttggggcaaggtttagactagtttccgcttgaaagtgcacctgctctccgtaagtctgtatgttcatcaacctgcatctatgtcatagaaaccattgacagtgcttgaaatttcttaatgtcagtaccaatagcagcgttatccatccaagcttagtttgaagtcagtctcctatgcccatgtcataaaggactgaaaaatccttatgcaattaaacccccgaagtgaaacaggtagcaatgtttgcaaggtgtgttgaattatgccctagctgcagagcctataaaatcatatagctcactgtcagtacatcagtacatctggagcccttgaagaccaagcaggacttaggaactacttcctaagactaggtctgacacaggtaaagatgattgaaattggttcttaaaatgtcaatcgttgatttctagaaaaatacggttaatgaaaaagagcattaggatgcatctcccaaagcaagagatcatccaaacatcactggggttttaagcagccactttaccctcctaattcctttttgcttaacccgatgttcaaattcattttcattctcttgacacatgccaaatattggcaaaggaagtgatcccagaatgtcctgaattcaggaattgactctttcatactgcttgctctgggctgttttccctctgctaatgtcaacattggagttttctttttctttaatcaaccaattccaactgtttgtacagggaaaaaatggagttgcaaggagcatttatttttttatgtttgacactgtggaagaacagaccgggacagtgcaagaatgactgtatggtgttgcttgggaagcgcccacaagttctttgaaacagaatttggaacagctggaccactgcagtgttttattttaaaatagacaacatatgtaatgcatatggtcctagacatgtatggagacacaggcagacaatctgaatggtatccaaagacacctgcacctagaattctgtttccttctataagatttttttcccctaagagcacatgttcctacttttggatttgcaagataccatctgaatccccatgtgtgtgactccttaataaagtcaatgagaagtttactgggatgaaggtgtcagagtaagccagttaataacccctcctgaggacctggctcctctaagagctggcaggggaaataacagattagaaacttgccctcacagaacatgttatctaccaagggattcaattttatgtatgtgtcttgaccacagagaaactggaaaataacccaatgaaaacacagaaacaggacataggaattggttatacaggggcagaaaagaaaaataaagcagagagatagggaaggactcccagcttcctagaaatgataaggtttaagaagcaaagaaggaatagaacattagctataaatgcagagacatccttggctcactaactacttgaaacaaactggcttttcaaacactaaagatcctgtttgtttactcctagctaatgtttattgagcccttaatatatgccagggccctaggtactttccaggtacttctcttcagatcctctcaacagtcctctgaaggtggacttgaatttaacttcattttacaaatgaggccaaggaggcccagaggcattaagcaacctgcctcatatcatatacctagtggtggcagagctagtctcaaatctagtgtttgtgacctgcctatgcccagccacttaaccacttgctatgctagctcccattaaataagccgtttccaatcaatgtagtatataaatatgccataaaatcaagaaagaaaaatatttgttaatagagtgagtttctgtatttattctgagaagataaacttatgattttaactaatatgtgcttagtgcctactacgtgccaggtactattctagggctgggaatgtagcacaaacaaaaaataccgaaacccctgcttggatgagcttaaacatcagatttttttcattagcaccttgaaacagcactcctggcttactcctccttctttttttttttataacataataagctcagtaaatataataagctcaatgaaactcaaagattttgtgggagccagccacccttgtaagcgctcttgagttgtgggaaccattagaataatgagcccaattttgagtaaatgataatttggggcaagtaaaatccagaggtggctcgctttacttgctggaaattcccactgcattaagctccattccacacatagtgtgcaagggatcttaaggatcattaaattacagcctataacggcaggaagggaactgaaaattcagctcctcttacacagaaggcaactgatgctcagagataaacaattcagccagcatcctacagttttttaaaaacagagctcaacctaaaatctagacctcctagatccagtcctaggctcatgctacaagtggatggggagaaagaagaaagaaaggaagaagggaaaaggaagttttattttgacaaggttactttttgaaaatgaaagcaggctgattttaggcttttctgtaagcttgctttaaaacgttagtaaaaaatgaaattgttctttagacttcgactagaattagcaccacaaagctgcattcattgagccattgtgatggactgaggggtggggagtgggtctgaatccaggtctccataaaggagccaagtcgccttttcagatccatttcctgagtggccagcaaagtgaaataggtcatcagcaaagttttcaagagtttcaacaaacaaacaaagagaaagagacttgaaacatgtgccatatttttttaacagctacaaaagagcccccttctctctgagctaaatgaccagttgtaccatcataattgaaggcaataaaatagccaagccaaactggcagagtaaggccccggccggtttgtcagtttgcagccttttctgagaaacccgagagcaagaagctgctgctagccaaaatgcctgatctatctgttaaaattgggaggcgagggatggatgaggctttttatgaggatgaaacagcatgagcaattcgtgtgtaccccatgcttagtttctcctgagttaaattgatctgggactgacaggttggaggtgagagggcagagtctatcaaaggcgatagagaaatgtcacctggattgcaggagtgtcattatgccaggggagactacagttggagcaggtttaagacacttgccttgggccagaggagtcacacacatgccctagaagcagctagctttcccaggagcaacaacttcctggccatcctaagtcaaagaagaaatgtagtttggagaccaaacaaccgaactgaaagaagcctcctagatgaagcagccaacctcaagttgaaagcactttcctgaggataaatctgaggcagttaatgcagcaaggaggattctctcagattctctaatataattcctgcacatgtgatatcctttccaaaagctgtgttttattattctaatggagcgatttggctgttaaaatacacattcttcaacttgccttctggaaaccgttgcttctgcgagtcttgggcataaacgccacatctcgttcaaacaaggaccacttgctgcttctatgaaaaatgacaacgtttttttaaaaaagtcaaacaataaggaggtataaatctgaccataccatggatttaggtttgaatgatttattaatacaatatcaataataataggagaaatcatcatctggaagtgacactgctaaccataacccaagcttacagccataccccaagcatgggagaggaaaaaaaaaaagctgcctgggactgaggccacacatgaaaatgttatccaaactactcccaagtcagaaatcgatttttcccgtgtcctgacagcatcgctagttcctggcaggtccccgtattccagtaagatgtttcatgaaaaaggatgaataaaatcttttgctagatttgatagaagattctttttctccaaagtctgcgtatcaggagagtcagtaaagatgaggtggagtgagccaatttctttaatggagagcaccttcatttctacctctttaggatttgcctggacacacacgagttgaattctctgagttattttgcctgttgagtatagtgtattttagttacacatgttgagattaattagttagcccttaggaggttttgcctacagccttcaccccgtaaggaaaagtgtgaatacattgagactattaattcacaataaatggcagatcatagcccttgctgagtaaatttgtttgtctctttcctaagctttgctaactgagtaagcacactataaggaaatgtcctttattttcacaaactaaattcccatttaacttaatctccaggtttcaatgaaaatcgttttttttatttttaattttgcagggtggggactcaaaccttttatgaaaccaaattggcaatggggatttggaagaagacgatataaatattgtcactttgctgaaaatcagcataaccctttttccagataatcccaataattgcagagaaattgctgtagacataaccactggaatggcagaatctattaaaaaccagcaaagctaaataggctatcttaagcaaagatccgatctgctttcagtgtttggtgaaatgcaggcgaagttacggtcttatgcttagtttttaaagaacaacataaatgcactggaaatgtgatcatttgataaacatgttgatgccaatatcttcttgcctaaatgcaataaactcaccagtaagtgatgcaagttgacaatgggaggtaaaaagaatatcttggggatgttggtgggaggcaacggggaaacagctaacgttcataatgtctagtgaattcctgtgtatttgaaatgtcaaagaaaatgtgatgtgtttctctaaattgtgtctctctctacatgtataaatgaacagacgcagatagagctcaaaaacatggcatggatgaatttatctcttccaacccctgtaactttgaccacgcttccctctttgagatggtacaacgccttactttggatcacagacttaatgattcctattcttgcctggcaagtatattctttggtctacagcaatttaaacataacattttttttcatttaaatatttctctacctttatgtcagaagctcttttctccattacagaatccctttaacaattataaatgtgttcccgatttcctgggttgagatagttttacttaccaaagaaacaagactgagcgggaggaagttatcagtagaaacagatccaattccccagcctccctatcttagcttcccccttttcagctgctacatgagaaatattcccaagagggtaatcgagtttggcacctgcttgtggagaacttgtaaaaattgcctcagtagcttagagtttaagatgcccttccctccccatcccagatctggtaatcctatctcattacatgaatgtattctctttgtgtattttcttaaaggttaaaatgatttgtaaataaactttatttttcataagctaaattgatttgggtttgtttgtttgtttggatggcttttttttttcttcacaatattcacagcattttttcaccctttcagggaattttttatggtgctttagttatttggaaattcagctatctatccagcaggagtatcaatatttcctgaaatcctattttaaagctagatttaaatgatttaaattcaagggagtgctattatatttttactggatttctgaagatacatttttggctttaaactatcaaattcaaacgcctaaaaaaagacccaatttacttcttcctcaagccataaattgttatttcatttcttaaaagtaaatgctattaatcccactttatagatgggaaagatgagggaaaatgatgaaatgtctttatatagaggaaaattctcatccctgattctaaacactaaagttgagaagaatatctctatgtaatatttatactatataataagtagggttaagatattattgatactaatatgtataatgacaatctttcttttttctaatttttattttaaatttctttttttgtaccaaaagccaagatataaaaaattgtagataaaatagtcttaaacacagaaacagaattatgtggaataatttattaatctgtatctcatgaaagattcattgattatctcaggtttagaattccttcatcaaaaggatctgaactttgccaaattggaaaggaacacatcactttgacttaaaaaaaaaaaaagaaaaagaaaaagaaaaaagcttaccttgcattgcaaggcaatttttctcaaatgtgttttgtacaattatgtgattgttcacataattataaatggcattcattaaacttgtaagaatgtgcctctgaacttaaatcattcccttttatatataattactattcccttaaggaatttttttgaggtatattatttccaagactttttcacattatcattttttaaaacaattttctttgttttgagattcactgtgaaggagagtttataaatgctctctaaaaaaattaaaccagaaatgaaatattaaaacttgctttccattaattacttataggcttaaaattatggtccagaatctaaaattaattatgaatagcataaaatagcttccttccccatttgtatacctgtgtatattagtcattattccaaaatttcagaaaataacagaaattaaaaaggaccttatctcctgcctctgtatattccattttctcattattacaatctttttttcagttagttttggagaccgaccagcagggatacataaatttttctgtgtcttcgactgagttcctaattgatatttcttcaactcttttcaaagcagctattttggcatctacaaaagacttggtgtcatctgagtcgtagaaaatatattttaatctttcacagcagtgttgtttctaagatttagcatttggggtagcagatggagtggcaaagaagttgcctataggggcagcccactgcctcgactactctccgccctctgcagtaacttataatttgaaacaggaaagatgccgtctttcgttggatgcatcactgagctgcatgttgtcaattgaagattcccagatccctaatacaagattagagtgttgcaaaggcctctctcgctgtacttctgtggcctctacctgccccctagtcactttctctttttgccttttctctcccaagatggagcaatattcaaaagatgactcagagaagaccctcaaagtaaaattaagtttatatttaaaatagccccaaatttccagcttagaaagtatcacctaaattggtttatttcttgctttgaacagacactgaaaccagaaaacacaattttatttcaggctctgcttaagggtgaccttgagtggcaactcacttggcctttctgagcacctgttttcttaagtgcgtaatggggctagcaatttccatcccatcatgccaccaaacctgctctaatttgcagatctgaattcccattgtcttgtatagcagagtttggactggtcccatagcaagcaaataaataataagaatacaaacaattaccagaagagaaaataaaactctaaaccaggacacaagaagttcctctcagtttaatggaattacatctgattcacaacttgaaaactaagccatgctgttctctttggagagttgcgttattaccttcatttgaaaaatttaaaaaacactctttccaaagtgaaaggatttatgaagtcctggcatgtatgtagatcaaccctaaaatttcttcatgctctagagtagagaaaacaagaagacttggaatatgacagagctggatttgagtcctgcctctgttttgtattatctgtgtgagtcacttaacgaccaggatttccattttcttgtctttaaaataaaccttctctgtctaccttacagagttgctatagggctcaactgaaagttctctgttaagtgtaaagctctatatcaatgtagagcattaatgttatgatttcctcttatcagtaaccacgactttgccacatccccaccccaatactcctttaacgtgtatggttccgtgttcaagcagtaggtgagacactgtttctggaaccaagctgtctgctaatccccctccatcactcactagaaaattttatgcccttcttgaactcaatctttccatctttataacagggataacagaatgtacctcataggttccactgtgaggactaaaccgcaatatgctgtgcacagtggctggcacataataggcaatcaaggagtgttagctctggctatttttcagtccccttctctagccactcccaactctagcagctctccagaaaacaacctgtatttaaaagaaagtctctcctttattctttatatagggctggttcagtcctggccaggtgtttgtactagacgagtattgcgcccgaaatggagtccgggggtgtcaccgacatctctgctacctcagagacttgcttgaacgggcagaaaatggcgccatgatcgaccccacccttcttcactacagctttgccttctgtgcatcccatgtccatgggaacaggtaagtgtgtgttcgtgtgtctagaggtgatccttaagaaatggcactggcaatggtttatggctagtcttgcttttaggatctgcctgtcttcattccttcggtggtatgtgcacacgtacacacacacacacacacacacacacacaaagggcactaactttcttctcctttcaagaaacttaaaataaatggcaagcagggcttctagggcaagctcggaagttaggccaatctaggttcaaatcatagttcttccatttactagcaataaccctggttggtaattaagccctttgtgccacggttttctcgtctgtaaaatgggatgattgtatacccctggggttgttgagagaatgcaagtacctataaagggctcaacatagtgcctgaaacatggcaaaaacaataaatatttgcctttgtttttgttatttatttcataattgcttaataattacttccttagtgtcagtcactctgatacacatttagtatgtgtggtgagtaaaagccagacatcaaacaagggcagagttacattcagattgatgctctgactctgaggaaagggaataaaattccatgacaaaatttaataaagaaacatgactcagatggaatggcaagatggcaaggaggacctccctgaggaagtgatgctggagctgagaactaaagcatgtgtaggagttgagtggttccaggcaaaaggaacagcatgtacaaatgtcctgcagaaggaggaagccaagtacatttccagagctgaagcaagctaggtgaagctggaaggcaaagatgatgataacacttttaatttaaccatagagcctggaagaacttttgagatcacagtctaatcaaccccctcattttgtaggttttatatacaagcccagaacgtcaagtctcctgactctgtactaagtactctctttctttagaccttgcccagctcctggaggaaaagatccatgttctgaataatgcaaagcagcaaataatttaagaacattgccatttggctctggagacatggaataaatttccacactgccacagccagtttactatctcaatgtatgtagccttgcattagtataaagacaagcctatattatcccaaagctccccaaccaacagccagtgaagccacacccaggaaacactaggtggcttcagaaacccagcctcagatgcaaaagtcgctgctctggagaaatccacatgtgggagaatccagaattgactacatttattttaaatcagaactgtgtcagtcgtcttcatctttgcaagctatacaactaaaatctctgtaggattttttctgtgcttttcctccttctagcactgatgtatttttacgaaatgcaacttcaacatttagagctagataacaatagcatcataggtttgaatatttaacaggcaacaaggttatcatcacctcccattgttatgaggtttgctagcccagcacgtgaccttttatttgcataaaagatactcatgaaaactctgatacctggggggtatctgtgcataattctgctttttataaatatgtacactttgatgactatctgttacagcctcttggactgaattttttaaagagagagagagagagagagaagttgcattatattctctgggttgtcacactgtattctacatatgttactgaataagaaagtgttataaaataatgaagtgtttttgtaaactccctggtaaacatcatcatgaattatgatacacattgtctggatttcatattgtaagactgccacttgattcacagttaggtttatacatcttgtcatggaaacagttttggatttcttattttcttttcagttctgattttccttatgcaagtttgcatctttttttcttattattttagtttgaatgcatttgcgcctgctttttcatgcacccttctttttctttcttttgtttgtgcatgtgcgtgtgctcttgattctcctatggctggccacactctgtgcatgcctcatgcgaccaccccctctccaaagtcaacaaatgcatgtgtaccttagtgggctgccaccaaatacagaccctgaagggagcaaaactccctccccacctgaaccagaagctaaaaaagataccaaaaaggaatccaaaaaaagaaaagattccaaaacccaggcaaatcaagagctgaaaaggtaagaagttatgtgtgtattggcttgtgtttgtaatatctttaccctttccccaagcctccatccatgccatcacttccacttttgcaagctttgagtattcctaaagtctctctttaagcattttcaaaggtgcaattttaaaaaaaaattctagcaatgggcaaaaataccgtgtattgggactaaatttgagtcaggtgttcagtgacttttaaaacgtgttcatattgaaaagactaattgagcaatatgtaaacagaattgtgagtcagattgcttttttagtggcatctagttaggggcctggtaccttaccaagtcattcataataagcaacccatgctttataattttgaaattatgtttaaggagcaaataaaatagattggcataagataggcctatgcatttatagtagtgccatcattttcagcaaatacctattagttctacattcatctcataaaaagaaattcatctcaaataatgatttataataatgtcataagataaattctattaccaaattaatgcttcttagtagaatcacttatatactgaggtcacctttaaggcacttttaacttctaaaattttgtttatcctgtcctgtttcctatgtcctttctttgcgggtttataaattggcgaattggtgaactttttcccttttaaattaggtttactaattatttccagttttattctgtgcccttcttcaccttttataccgtcacccaaaattaacactgacattttaaagttttttgtttggttttagaactgatgactctgatcctggcattgccaagctacccaaaattctcaagcgtgtatgctgtatgcttcatcattataaatttattcactgaatatttctaagtcctgaaatgtataccgttcacttgtagacaggccaaatgaaaatgcaaacttttgctttctagagaatgtggcaggctgtcaatcagtatatgcgggtccaatagggaaggtcaaagaaaaccctgattccatgtggccatccatctccttcaccgcaatatgtaaggatagaggtgaaatgcaatttctgtttgtgtttcactgtaaaagttagattgcaaggcaacagtaacttgcaattaggaagaaagtgcatgcagaatgttgtaggtgcctgaaggtgaggtctgacagaatgacaaggcttcggagaggaagccttcctggctgctgtccaaggtgctgcttttggaaggatcaacatccaagtggagcagagaacaaatggccagtgttgaaaggcacacttgcttgaacctgatctatttcttaggccacgaaaaactaactaaagggatcttgactggtcctattgaggcttatgtgtgtgtttcagaatctttgtttgcattgcatttttttaataaagaagaaatcataatattaagtagcaattgtgtaacattctacagtttacaaagtgcttttttgtttttgtttttttgagatgaagtctcgctcttgtgccccatgctggagtgcaatggcatgatctcagctcactgcaacctccgcctcatgagctcaagcgattctcctgcctcagcctcatgagtagctgggattacaggtgactgccaccacgccccgctaatttttttgtatttttagtagagagagggtttcaccatgttggccaggctggtctcgaactcctgacctcaggtaatctgcccgactcagcctcctaaagtgctgggattacaggcatgagccaccgcgcccagccacaaagtgcttccaaacatttgctataaaatattcagattagctatttttatgttcattttgcagatgataaagtcaaacatctgtaaatttaagtagcaaacctagatgttctaagtccaaagctctttccttttgcactacatcaggactgtacttatatgctgaagacctgaatgttagaacctattctgcataaatctaggagtatcagatcccgtttctgtgcctcagttttctcatttctgtaaaatgagcagactgaatcatagtatctgtaatatccctttaacatctaaaattatcttctatggattacaataacaagtgaaatagtccatcgtcaggtttcataaataaaaatgttttcgaaggtgcaatttaaataatcataaataaagtttaattaaaataaggataatcactaccatttaataattacttgctatattccaggcactaagtgaagtgctgttgatatatgttatctcattttatccttattacattcatgtgagataaatatcgttattaccctcacccaatagatgagtgcttgaggctcgcataaattcagtcacttgcctgaaactcataacaaataactgtctgagcctgattcaaacatggatattctgactttggtgcttgcatttgtaaccactctaccttcctacctgtccaagattagcacttgtatatggtgtgagatggcaaacctggccgtttgatatttgtttcaacatttccaggtgagatgctacagcagtcatctgaattaaagagaagcctgaagatggccaaaactaatatggcctacctggagattttagctttgtggggaaaaccagaatttatctggagttttataccacctaaggggagagtctcctatgaacactaattaattgcctttgggattggggaaaccacattccaaacctttcaccagcatgaccagcatttggatgtggagatgttatctattctttgttccagatttaaaagcaattcatgactcatgaaagcaatggccctttaactgcctttaactgaatagagcccatttccactgagatctcacaaccagattcggattaggtaaaaagatgttttttacctattattaactcagcatttccaccggcagaggcagaaccttgccctgctgcagctggaaatcattaatgaccactgacgtggcagtgaccaagtttctcccaactgctctggaaacttgtgcaccatctccgtgaaaaactatgctctgtgaatcacagttactgtagtcaagtgtagacacatctggtcaatcaggaaggtgtttgctgttcataatttcaaacactgggatgtatggaaccatccacatgtttggcatttttagaattactgggggtaatccccactcccccaccccccacccccagcacacacagaacatttggtaatatctggagatatttttgattgccacagctggggtggagtggtgccatttttgtctagtaagtagaggctagggatattattaaacatcctataatacacaggagagcctcctgaaagcaaagccaaaaatgttaatagtgccaaggtcaagaaaccctgttttaaaccaaactccctggtgatgagctgcatttttcctttacatggatttgttgtttcttttacacaagacttaccctatgtctaaaagcctaacaggtaccaccactgattttcagtttgtacagtggttctcacacttcattgtgcacataaatcatgtggggattttataaaatgcagagtactaggtggcatcctcaaataatttcatttggcaagtcttaaatggagctgggaatctgcacttttactaagcacccctctcaaccatgaatctaaagcatttggtctttagatcatacatatttaggattttggttgtcaaactaggctgcccactagaatcacttggagagggtaaaaatgctaatgcctgggctccacctgcagagattctaattaatctggaatgtggcccaaacttcatgagttaaaaatctcaagtgatttaaatatatagcaaagttcaagacccactgattgagggaacattagtttgaactaactttttaaaactgaacccattttctgaaaagagagacaggagaaaaaggaaaatgtgagtatgctcagctggttgcatttggcgatcataaaatccacagatgtaaattgctacatcttctaatttttaaatcagcttctaaggttgcagtacttaattctcaccataatatttttagtattctttctagatgacatttagattagcatcactttggtcactatcccacagtgacaaggcaatcaaacagctctgatgattgcaagttgcgtcaatgttccttggatccctttattattgggattggaaatttttctcatttacattattatttaacatttcttgaatgccagtgctgctcttcacatatggcctgtgtagaaagtacattgtatcagcaattaacaaatctataatgccaaccgccgcaatccaaagtaagctgcatagattaatgagtaaagcagatgtaagagggtatgaatcttaaaaatctctggcagtgtgctctaaagatttcttttgggcgatgtatttggagccaaggtgctgcccatgttcagagaccatgtgatcccttgtagattaagatttgagtaaccaaacaatcaaatggaactcacttttctcctgttactctgccaggattcctaagtaagtggtttcatcctcccggttgcccaagatagaacctcaagagccatccttgacttctctttctccccagtgtgtcacaacaattcaatttctatatcctgacaatgcccttaagtatctctcaagtccaccatttctccctctcttcaatgccactaccatagtttaggtctctatcttctctcctctggaccacaatgattgccctattgactgtgcccttgcctccaatgttgggtggccgtttcaatccatgtcacataatggttccttttatttctttttggtgaatgccttcctagtagtaaatgagtaacacatttttttctttcactctaactccgtcctctctctttctcatacccgtgcatacacagacacacagacacacacacatacacacacacacacacacacacacataatgacattacatccggtgcttctcaaccctttttcccacaaagataaagggcaaaaactgtgtagtggggatagctctgttttactaacctctgcatgtagcactttatatagcaggcaggcactgatgcggtataaaaaacacctccacattcttggtctcatgttacacactgaacacaaagattattgcacttgtgaacatgagcatgttgctggctggccttccaattctgagcaagtacaggccttgcacatggctgagtcatgctctctaaattctaaggagccagctttacttaataggaagtacttggaagagaaagtgggaaaaattttcaaacaaattttacgtataagtaggcatcccagatgtccaaggagaaattcactttggaacttgtttccttttaacccacgtgactctctttctgactttccccatgagaacagcagattctcccatcgagacatgaaatcttgtgaaatatgctaaattacctattccattggtgcaatctttctggcccatagcaaaccatcagataatgtgtttttcctcttaaaattccaacaatgtgtctttatcccatagtcattgaattaactggtacaaaaacatattttcagatgttacactccttttagagtggatgtgatatcaaaaagccacacatactactggtctgaccactcagaattttgtatatggtgtcttcagaaaggaatctaaagattagttgtctgtatttgtctagaaataaagaaacacatcccttattcctcaaagggaaaaatctatgcagtgccaatttttaaaattggtcctcttgggggtaaaatgcatgctttcctgcattttatacaatttctctaatcatctgatgtgttcttgcttcattcagtacctggactgagcctgagccactttgactaatgtccttgtgcccatagcatccatattctttgtgactgttcagtagagagagacttctccacgactttcatcctttaatagagttaatgacaccttctgatactgttaggttataaccacatatttaggagaactgtaaataagtcaagacagtcctcactggtgtatttttgccccttccaagccttgtttggagattaattattagccccaggaagctacaatgcacacttgtaatattgtagaaactgcttattgttgcttcctatcttattctttgtgatacaaacactttgatatatttgttttagcagcgtgtctgagccccagggcatcagggcataattagaaaagggcatgggctggaaggaaaggagaggaaggggtgaggctggctttcataatgaagcagtaactatgagatgtgagggccctaattataatttataattaacataggattgtacaaaccatatagatgagcaagcagggatatctccttttgagaagataatgctttggtgctatcttgaatttgtggttattaatcacttgaaagagacaaaggaaaactttccatgcaaggattaaattcaaaggtatcattctaaaactagaagtaataaagagttagtttctgggagaactctttttctttttaagtcagtggttaaaagaggatgtttggtctaaatgtcctatttagggagcactgcaaagaacatctactaagatattctgtccctctctggccctttaagctctcatgtttctgggctggaacaatttcgtagcaagtaggattcagttatcatgcttgtttaaggacattttcatggatccatcatgcggtctgcaggcatgcatccatttggagagagagaatatatcatgtttacggtgcctgcaccagcatatgtggacatttgcatttggagatgaaagtatattccctcttcagctggagttttaccccttgttggtagtgactggagcctgaaagctggttatatgcggagcagtggaccagacactgtttcctcttctgtggaattcatacatttctttttacacctggattctgcccttaatcaccaaatagatgcaatatcagaacatatagatcattgtaagctttgaattaatttagcattctgaccctcttgaagagacatcttacctttcaaaagaaggtttttgtggcccagcttttaacataatatggagaaccattctagaaagataatgaactgctaaaagtctgtgtgctcacctgggtgtgtagtgacaatttaacaacactaaagaggtaaattcatttcacaaaacacattgaatcttgaattctttgactacactgttcacacttaatttcaaatattaaaatgtttcacattaaaaactcagtacttcattatattaatcctataatagatattagttaataaactccaggtcagaagcatttgggaaaaagagaacaatttgcataactagtcactcaaaggttgggcagctgggttatggtagtttcaatttgacaaaaaaaaagaaaaatgcaactctagatgtattattatttgtgacatggctcaagatgggagactgtgaggagagtgaagatgacagaactggtgctaaccactgtgacaagaacttgaagagcagccgacatgacatctttcctatcatgctgccgaaaatgtcaactttgtgaaggacagtgagaaaatggtttgccgaaaacttgaaaggtggattccggagatgcccgccgtgtcagatgcgatatagtctgctgtggctggagagactcatttctggctccagtgatggcccgcaggtgggagagcttccaggcttcagcacggctccaaaaatgactgcgcttgacctgcatattgtctcaagtttgcaggatcatgatataaaagaagcgcgttgttagccagtgtgcagttaggtggaaccagagaccaggggctatgttcgcatgtgtatgtgctcatgtgtgtatgtgtttctaaagctaagttcaaagacatcatctattaaaatttggaacgttgtgaaggaagagatatgtgctttatgaacttatatcgagttcaatataagtaacaaaaactaactctgggtaatctaagcaaaggagagtttattaggatgatgctgggggcctcaaagacggggaaaggaatgctggaatcaagtgagctatggaagagtagaaagcaggactgacacagtggttcttactgtatgttagagtaacacgggaaaccttaaaaatgccagtgtcaggctgggtccagtggctcatgcctgtaatgccagcattttgcaaggctgaggtgggaggatcccttgagcccaggagttagagaccagcctgggcaacataatgagaccttgtgtctgaagaaaattaaaacaaaattagcagatatggtggcatgcttctgcagtcccagcctctcaggaggctgcagtaggaggatcgcttgagcttgagatgtcaatgctgcagtgaacagagattgcgccactgcactccaccttaggctgaatgagaccctgtctcaatagttagatagatagatagatagatagatagatagatagatagatagatagatagatagagctttgaggatgcgacctttcacaattctaagaaacagacaagatcaaaaactactgacctgtaaggacagtctggtcaaggcacagctgctggaacaagcaaattccgtctgtttattctagccttgtatcatttattcaacgtaaggattccagaggagggtgtcctggtagctgaactgaggtcatagtccagcttagatatggagtggctgtgaaagggaggggctggcctctaggaagcccttcggctttaatagtaggggaataggcacctcgatttaccctcacacgagagtggccagaatgtggctgaggccactcctccaaatccaggggttagaaattggcaatggatgctaaaaagcctgaaagcaagaagaccagaatattcacagtcaggacacgagagcgtgagagagtcaggcttctaggcaggtgttctgtgtagacacatctcagcctggaattttctagctagcagtttaaaatccagcttcacccctcctcttctctcactctttgtgtctcctttagtgatttagcattgagaaaggaacaagatgcagagctagttttaagacagttgtagaatcacccccaaatattttcagaaagacaaaacaaaagcatggcgtctgaaagataccaatatagctctactatttattttgcaaccagcactacttggaatggcaccttgtaaacaatacaaatgccacttttggaagggattcatagttaaataataccatgtatctcttgcagaatatcttgggttccaaatccactccaacctaagagaaatcaggaaccctgaatcaaatataccctctctgccactggaagaaccacccacctaatattttttttctctagaacagtggcacttagagtgtggtcctcgaaccagcagcactagcagcaccagtaaacttgttagaaatgcaagttctcaacccctaccccccagctctactgaatcagcaactttaggggaccaaccaatccaggttgtcaccaggtgatgctgaggctcattcaagtttgagaaccactgctctagaaaaagtatgctgttgcttctgtggaaaaaacagtactctccaaagcatgtaacctgaatttttcagttaatagttctatagagatctatctaaacctgtatagctaacattgccaaattataggggtcgatgaacaagaaattgatgtttgacagaattttcgaaaacaatgaagtgaaatcaaacaaaaaagggatccttttgctttttaactgacctggttacaacctatgatctttgacaagttgttattcctgcatgtcttttcctcactttgtaaagcagcatctcctgttaccaataccatttcagagcaattctggcagttacaaatttacattttatgtcaaaatcattcgacatcaaattgttttatcacctgtttttattggtgaactctgtacttgtaccttacagacttagtaaagttagtttgttttatttaaaataaaagttgtcgcgctgacataggtgatcaagaagcaaatttaagagacaacactacttttcagttgtttacttttattggaatagtgagattaatagtgttcagaaagtagtacgaggagaggttatcagcgaagcagaagctgctatctgatacttttaataattacaaatgggaatcatcagaacaaaaggaaaaaacataatccattgttaggtttgtaataatatcttttatagtgagaattaactgagaaggccaagcatacactaaatgttcagtttttatcatctcagacacaaagcagaaagctgccttctaattgcctaattgccttagaaggcttgtagggtaatgaatgaatggttttattcacagagatatttatctcctaataatgaccacaaatatcctggctcttcatgttaaatagtctccatactttttgctgtgatcagtaaaccttttctgaactgtaaaattatatttaacagcatttttctctgggttaattctccactaaaaaacaaatgctttaaattgctccatttttcccccagttgagtgtgtgcatgcacatgctgattacataaacaaatgtgtgttcagttcattaacaagctgaaggttgtttaaagaaatttaaaaaccacagcttaaggaagttgtaggttgtagcatatacacgaaaagttacaaacaaaagcatcacatgttttgtggaggccagtaaattcatcctgttatctaactgtagattcacggacgtttcatgtaaaaaaaaaaaatttgtttttgttaagcatggtagcttgcacccataatcccagctactcaagaggctgaggcagaagaatcacttgaggccaggagttcaaggccacagtgagctatgatcacactgctgcaccccagcctggacaacagaacaagaccctgtctcttaaaaaattttttaataaactttgtaaattaacatttgagatttaccagagaatttgaaggcaacctacctgttgtttatcattttgcctttctttggaagagtatgaagaaatggactgaacaggattttactgtttgggggtattttttataaagtggggaagaggaaattttcgcatatttcaaatagggcatttttattatcaaaaaagaaggaaagctgactgattaacccgtaacaggaggtacattgctgtcatttgccaagtcttttgtgcagtcagactggtctagtataaaggattttcccaacttatgctggatccttgagaaggcctataaataagaccatttgtttggtctcaagatgacttgcatttgcaaactgaagaatgttccaatagaagttttatggtgacacaccaatctgcaaactggctcagccagtagtcaaaacaagtcactatgagatctgggaagctgaaggctttgaatgggtcagattatcctgcatttagtttggaacagataaatttgggctataaatatgtatcctccctttatattttcaacttgaatggtccataacaaatagagtatatatgtatgcacctaaagatgacacagaaccatgagaatatgatgatcaaactgaaatcatttatttaagctggggtcctttttattacaatgagtaacagtttgctaaaattggaaaacatgtggtttgttcttcaacgaatacatgagcacttaaataaatctgaacatcggtagttataggcaagaaattgagccatttaagacgtctgacaccgggaaagacaaacacttacaagtcacctgattttcataggaatttttgtgcataattcagggaccccaaacccaagtgcctacaagagagataggtaatacaatttagcaatgtggaccaggtgagtgcctgtcccaggtaaggaagaagctgttagccaccaattaataatgctaactgttccaaattttcaagaaaacagaaatcagaatcgtattctcaaacttccctaatttaaaaaaatgttggcaactggttcaaatttcttaagacgctgtgagccaaacagaacaagttcaggggctggacttaaccttcaagccaccagtttgtacattttaccatttcacaagaaaagagctacagctctgcacatgtttccaaaatgataacccaaacacaacccaacgcctttggaagctagccctgaatagctgggcttctcctgagctcacatcgatcactgtagttgtttcttctaaaatggacagtttcctcctgctagagatttgatttgatggtgtcagcatatgaggttcccgtcatttcatgacatgtcttctttcaggcctgatggaattggaactgtgactgttgaagaaaaggaacgttttgaagaaatcaaagagaggctccgagttctgctagaaaatcagattacacattttaggtaaggatctggggctggagagctttaattaggagatgagagtgggaagggaaaactaaaggacttaattttccaaaactgtaaatctaccagaggatacattggatatttagaaataactgagtagaacaagcaaatcaatcagatatggttccgcaataaccaggaaactttgcattcttaagttcatgttatttccacttaaagaacaaattcttccatgtttgagctgaccctggtcaacaatctattacaaaaagttgaatttgaagcttcttcaaggttcctaagtaaaaatgaataaataaaaaatcttgtgaatcagaacatggtgaacaaggaaggaaggcagtgatactcctaggagagtctccactttttccactaccgcagaaacagcactggctggcaacacagggaaagaatgaaccttgcatcagcctgggtggattgaatctcccctgcatactcaagagagccagcagattctgtgcttgagccttacatcacatagcccacttctcccttggagcacattaggtgtttttagtgctgtcctggtggttctggaccagagatcctgaaatagtaactgaaaaataataatagcatttgtaattgttcctatttattaaatacttcctatataccagatatagaactggaggctggagaagtattaactcgtggcataacaactttgtaaggtagttatcataatccccatttaaaccaggaacaaagtgaggctgagagaggttaaggaacttgcccaaggcaatccagctggcaagtggaagaagtgggatgcttacataagatagtccaggtttaagcagccatgctagtctctctgtcccatgcacagtgttctgacgggccagtgacaacctgaaaccagtcactggaacttgtagtggtacctgacatagtttttttctgtgccatcaaaatcctcctggataaatctttattgatcatacacactatatgtaaaatgcattaccggtagcagacggtccataacaataggaaaccgcaagcagggaaggatagctagcagaatcatgaatttgctctaaatccacttttctattccatatattgatcttttggggacttaagtaagtgtatttgaatttcagcctgttccaactaatacttttttaacgccagtctcgataataacatataaggtcacatttgagctaacaaatagttctccttcacaatagaaatctaaacagagccttatgtcaccactctgaatattcttttctgctgcagacatttgcagagtccctctttagtcattattcacacatacacatatatacattatatacacacatatatggtgtgaattcagattaacataacacaacgtgacaaaataaaaagcattttccattcctcagagagagttgctataggaatcaaattgcagcatatttcatgctaaaatgtaataatttaggcaacctgaagaattttgtcttttttaggtattgctttccatttggtcgacctgaaggtgctttgaaagctactctctcactcttggaaagggtaagaatgaaagtaaaagatagatcacatatatataaaaagacataagcataattgtaatgaaatgttttggttgaatgacctagttgtaatttttataggatttgtttaccattcatcaaatatcagaatagaagcgaggaaactgccaaaactcttgatattttatcttcaaactcccaaataggatatacagaagatatgttcctagcccttccctgactcatggacggcctttgccaatgctttgcaattctggtgctttctctttaagcatggctctcaatcttattaagtcacaaagaactgattttaaactttcacgcttctaagaagtatggatgagtgacacatttgcttgaaccttcttaataatccctctttttcctacttgaaggttttgatgaaagatattgttaccccagtgccacaagaggaggtaaaaacagttatccgtaaatgtctggaacaggctgcgttagtcaactattctcggctctcagagtatgccaaaatcgaaggtaaggctcccttctgcccccagttttgaatttaaattttgatatgcctccctggggaagtctttctcttttctcaagggcacctgaaaacagtggtccgtctgagtatattaagctgaaacctggaagcacctgaaatgtcgaagtttccttggctgtggccaagtaaatgaattaaaagacattacaggggctttgtaattacagttccctttgtaagggaacaatattgaaaacaggatgttatcagataactaaattccttctgagagtctgtgttggccctaagtatcggctctgtggctgatgttttcctatgaaggagttctgtagaattgcccccttctttaaacagaggaaaataaagcagtctgttgtccgctgctgatagcattggaagcaatacaagaactgaaaagagcaagatcaaggttttgctctttcttgcccccaaaagtaccttgtcttttggtagtgcttcaagctcgatggcaggttagtgctgagccatctgtgatggctccaagttggctttagatctcattcattcttgttactccagaccttaaatgcttgttaccactgccctctcaagttttagggaagtggtcactgatgacccagtaatcaccaaaggtgctttgagtaaactctacttgagaagatatggttctttgggacctattcatccacgaaggtattaatcacttttcattgttaccctgttggctgctatagggtgatttgaaagccacacccaacttgaccagtggtgtaagtgtataaatgtggaagttctgtgtgcaaaactcgatgtgtccgcattctggaatctgatgttctctcacacgtgaaacatgacacctgactaaaactagcaaatgcgcattgtctgcctcaagacaactggggggaaaagaaactaaccaatcactcagaccccatcacttactctgccaaaatccttgtttccttagagaattaggttaagattatgtcaaattcacagtgttctgtacattacgtgtcctccctctctcaattttgtctgtctgacaatgcaaattgtgtaccagtggtaatgaattcactgttatgcatccagggagaaacacttaagaattgggcaccaaaaggatgtttatcaactcttgacttggtaatgagtgacaaaaatagaggaacaagaggtcgttaaagggctatattagcaaataattgttccagcatttactgtcccaggacgtaatgattggttgtatttggtaaagtcagccaggtacctaacaattctaggcaagtccagagatgggatgggatcaagaaacgttctgttgccatggctgctgcctcataggtcttggtctagctattactactagtcttttggtaagatctgctctcttctttcagataaatctatccaaaaacaaactttaagatctgtaagtaaaaatgcattcatttccaaagtagatcagctggtctgtaatttccttttgtgcctcaattcttcttggttgtgttaattatcttttgcactgtgacttttaggtctggggattctttgaagaaaccaattcttttttttcaactctcttttcagagaagtacctcattccacactacctgctctcttccgcttctctccttccttgtccgtgattggctcagccactttaatgtgacctctgcaaaagtggctgagacaccaatttcaaagcatgctgggattgttaattcagacaacccaacatcctctggctgcatgtatcaggttttctttcatgaacatagtccaccataggctgagacattgcagcctgaaagatattactaccagacaactttcttttacaaggctctgatcctaccctcagagaagaaatctttcattttttacatttgagcccctctgtgagaattaacagctttgttatctgagaattctggaaagaagttgtagtaatattgctggagactatgtttatgaagaaatacctcaagagccttagatactaaagtcttaaatccttagtatcttggagccttaaatcaatgaaattttgtttccctttactcatgatgttttggtcattgtattcttgcaaacagctctaaagagacgtgtaaaatcatggtcacaatctctctcgtgactcacggcatgctgaatggttaatccagtagatctccaattttgaagctcctttttcttttatcctgtgtttatcccaaaatactctgtggctattttcctttgagctaatgtaacgttttcctctaacctatgacctttaacctctttacctctgacctaagcctcttgcatgcccaaatcctcttttatagggaaaaagagagaaatgtatgagcatcctgtcttctgcttggcctcccaagtgatggatttaaccattcgtgagtacctaccacctcctcaccatgctgtcttcactctttctgttttcattatttcaagaaaatccagatccaaaccaactcactctccttgcttcaagttttttagcattggcttgtctgttggttctgtctgtgaaacccagtgtgagaagtccagtcactttttatcagcctaaaacaggttagacaattaagccatttgtttgtgataaactcagatttgtctgtaagtttttcagttattctctgtctgtgacctgaatgcatttttactttgcttgtgtgtaaccctaatttgtaaagtgcttgtcactggtacacaatcaaaaggtagcagctaggctggggagcaatgcgttaggtgtcagataaaggatatttggggcaaaatcatgccttcttttccatgtttaagatgccaaactattatgggtatgagaccacaccaggtggtccattctctgtaaaaattagatcttatatgcctcctgtctgttctctatcaagctgggaagcttttccttgttccctctagagattttgacttgtccttgtcctctaaactttgcctagaacatatgacttaattgtcacttggagagttcatgtatgtttcatagcttgatttcacattaaacttaattttactaattttctatttgtgcagcattttccacctctgtgaaggagccttttttgctggcccccaaactttggggcggtgggaacccaagggcaaccttttctttccaatatcatgtatcacacataagtggggggcattttggtccacttgctcattaattctgcatatgtgttcttgtttctctctcttctctccttgttgtgctctctctttcaaatagagaatcaaaaggatgcaggtgaaccaattgtatatgcattataaattatcaggactgttgagttatattcagtttttgtttttgtttttcaatggctccttaaggtttgtactcccagagagccatgtggagttgcaataatacttaaggagttaatttgtgctgtctaaatacatctcatgcccatttgatgttgacctttatagagcagaatttctgaaaaggcataagctttaaaggaatagaattctggtttgctgcagagcttcatttcatccttggttataggattccagtgatttggcctcatgtgcattttttaaaaagttgtttaaccaaatgaatcttcctctttgtttttcatttcttttttctgttttctgccctattgagaagtttgtgttctttgatgaatgtttatcagccaagacagagagaagttgtatccatgttgttcttgtatgtatcgcatgataaagcaggaagcatggacaggatgaccgaacaggggctgttgctggaagttgtattagaggaaagctcttggaaagttctggcttcggaaattttcttcttgtttggtcccaaaacttctgatcttattttgaggagaagtctgacttaaaactttaataaattagaatagggatcatcatttttgtagtctaaagggttgtcaaaaataactatcagttaatccaaattaacagttgagcacatttcaaaacatttcagaaagcattcctgagcacattccaagcatagggctgcaataagtatttgaagactcataaacctgtgttcaagacacatgaacctttctctctggtagggaagatatttattcagtcatttattcactcattcattcatttattagacaaatggttagtgggagcctaccctgtagcaggtacagtgttaaaagccagagactatgtaaacaagagggaaacggctattagcctcatggagtatacatgcaaatgggtctatgtatgtaaatcactatattgcaaggcctattggtagagttatgtgtaaaagggatggggcattgtcagaaaaccatggaagtcttcacgagatggtaaggattgaactgcatcttgagagatgaattagaataagcaaaggggagctaggattgggaatggaaagtcatcctacatcaagagaataatatgtgcaaatatgtaaagccagatagctaataaaaaataatgaatgcttatttaatgcatatcatgttccaggtatgattctaagcatattattaacttatttctcctcaaaatcccttataagagggaactattattattcccatagtagagatgagcaaacggaggcacagaacttaaaaaaacacacatccagaagtataagtggtatagctggagtcagcccaggcagaagccacacttttaactactctgtaattaattcaacgtagctgcaaaacagagtgaaatgatagtagtggatgggtgctgatgatggcaaggtaggcagggacaggacttcaaaggtctttctatgccataataatgctgagttcagactatatctcatggttcaaaatttcttaacttgaaaatcatgccaaccttggcatgcatatggattttttcagaagaaagattccacaggtctcaactgcaaaggtgatgaagagtcattgaaggctgtttatgcaaagggatgggttggcggtttacactgcagaaaaatcacgctagcaggaattaagagaaaggactgaagagagggaatagggtagaactggacttaaaagttgaggttaaagcagagatgggtttgaagcttggtatagtgaagctttttctaagtatatcaggtctcaattgcaatcttaatcataattacttctttcctggcctttaaatgttttttctttcttaccccttccctcccttttcaattttcttaatgagaatagagcacaaattcatggataggtctacataaccaactgtatggaggtggtagggcaccaccggagttacaggtgcaaattgtagggaagtgggtagaatactggggactgaaatatggacagctgctgagtcctttagtcagactatgctttaagaatctacagggctatgcagatggcattttggtggacttatgctttatgtttggtggcattattagaaattaaatgttcaatttaattacagtacctccaaaaaaagatgcaaaagcctgctagtctatgaaagaaaagctgtgactcctgcaaatgaattctattattttaaatacatttccatgtaaaccgtcacacattctgaacccagcaagctctgagaaagtctacactactattgctgttttgcctcagttcttggctaaatacttgcataattttctgagcatcataacgattccactggaatttgaaataaaacaactttttcctccaaatatggcaaggatttgcaaaatcagacagatgatgatttgtagacagacagcagatagatatagacagaaataattaggtaggcaggcagatagatagatagatagatagatagatagatagatagatagatagatgcagaaataggtaggtgggaggaaaggagaggagagaggagaggaaaggagaggagagtaggtagataggtgggtgggtggatggatgaatgatgggtaggtggggagagaaagagagaagagagcagccacctatgaacctatgggccttggccctgtgctaagggcttctgattcaatcttaaccttagactcataaagaagtctttatttttgcaccctttacagatgaaggagctgtgattcagtgaggataagtaactttctgaagcaggatttgaactcaggtctgtctaaatttaaataccatgcatttttgtctctttctaccatgtagactttttgcctgatgtggtgagcacttagacaatatccattcattcagtggataaggtcaagtataatacctaccactttttacataggaagactacaaattaacagagcagtcctttctggaactggatcattgacaaaatctttacattgtaaattcttcccgagggcagttgagattccccaaggttgtccaagaactgaggacttttcttctctccaattgacagaaaccttctagatcaggtcaaatctatccaaaggacttccaggaagattgtgtgatgttgaggttttgtatctttctctgtctccaggcaaatttcctacagatctaaggcttgttgaaagagagaaagagaaccaagctggcaaaactcaccaacacatagagccaagccaccaccccactgtcttccacaagggaccaataatagtgaatctcatccccacaggatggccattctgagatgaggaccatctcatgcttcatgtcttatacatgagggactaagtggttctcttttatttctttctttctttctttttttttttttttttttgagacagagtcttgctttagagtacagtgataggatcctggctcaccacaacatctacttcctgggttcaaacaatacttttgtctcagcatccgaagtggctgggactacaggcacacaccaccatgcccagctaattttttgtatttttagtagagatggggttttaccatgttggccaggttggtcttgaactcctggcctcaagtgatccacccacctcggcctcctaaagtgctgagattacaggcatgagccaccacacccagcctttccatcctttttgtttcagtggtgcataaatcagggtttccaagcccagattattctgtggactagcacctcatctatactttacaataagtggggaggacaaagagaaacatgttttaaacactgtcaccaagaaagattttgggaaaaaaaaggatgtgttaaaatatgctgtgaacccacaaatatgaaaccagtgtctctctcttctatcagaaaaaaagatgtgatgctgcagattatgataaaaattgttgtttattgagaatttagtatgtgctaagtagttatacatatctcatttaattctcaccatgaccctgtgagataagtgttttattaccatatttcattgaatctaaagggccatcaattataagctgcgccattcatatactgtattgtgacatgctatcaaacataagatgcatccggatttcagaaatgttacgatgtgcctcttacttcaatgaaataagaacttatgcattcatgcatggaaatcctgaagtagaaacatgttaagtcactcccccaaggttaaacatctggttagttgtagagtcaaaatttgaacatgaccctgtttaattccaaagtccccattttcaacttctacactataaagtgcttgtgatttgttagcaatgaaactgtataacacaaaagaggtttcttggtcattgacagctagaaaaatcaaggcctggagaaaagaagccaggttcaaaaaaaatgagtagtcagtgactctccagtctcttgtcctatgtgctattcaagagccatcaccaccccaccaggctgccttacctttcagccaagatataacggccctatccacaatccattaactggtctgagcttccagtaggacatttgatgacatctagcatccacatgttagagtcatatacgtgcagctctaagaaaacactacctcaagcccagcctgagcactcaatgatttgttataccccaaattcaaatccttatcttgcctccactgggctttctaacctctgtaacctcacttttattttctataaaaggtgctaataatggttcctcccccagagaattattgcaaagattaaaatacatattctaaataaatcggttagcacaaatgcctggcacatagtaagtgctcattatatatattaatttattatttgtttgaaagtatttaaaaggatgttcttccaagttgaaatgtatagtataatgatatcatttgatttcagaaatgaatcataaaacagtgcttcttcaactttaatgtccatctgaatcactggggatcttgttgaaatgtaggttctgattcagcaggtctggggtggagcctgggaatatgcattcttaacaagcttccaggtgatgctgaagctgctgatccagggatggtactttgagagccaagggaatataagaggtattcaaattgtcttttattataaatttcaaatacaacattgcaatctccatatatatttgttaaatatccactaggttccaggagctatgccagacaccaggggagtgtgtgatgagcaaaagcagtcatgctccctacccttgttgagcttaccaaaaaaaaaaagaaaacagagacatgaaacaagcaatcacaatctgatgatgatagtaaagggaacaagcaaggtgtcacaggagtgcagcacaagggaattttacccaggccagggtctttgatgaattgcagagcaggggatagtgccagagaagggcatgatgtaggtcaaagactggacccctaagaagaactgactggggtgttccctagccttgtttcagtgtttgcctctattcatcatccctccagatgctccaagctcccgcccaagacagcttgtggcaatgtacataaaagtttatttggggactaagtgggtacttagtagtactactgaatcagagaaaaaaaagaactcaaatagcctaagcaagaaaagagaattttttggttcatgtagctaggaaatccatgaaggagttggtctcagaaatgaaaaatgttcatgtgttttcatatctccagctgctgacaggcttctttaatgtgactggagctaatggttgaagtttgggaagcaatatggccacaaatagcaccagccttttatcctagctaatgactctagaagaaaaagagcattcctctccaagcaactgtatacaattccagagaagggccacagtggcccagcttgggtcacatgctaaccccagagccagtcatagtacccatgatggtatgaggtactatggttggccaggtgtagctcatgtggcttcccctgaaggatactttccttggaagtcccaccaaaataacatggagtagagaaggtaactcccctaagcaaggttcttgcacatacaaggacagatttccaacacaatgtccatgcagaattaagctcacttttcttatatgcaacagctcagcccgaggaacaaagcctgagttggcatacaataccaaattagagaagaaaaaccattacaagagtgttatatttctttctttaatttaaattaatttgtattaagttaaataaaattatttttaattgtcttaaatagtttttgtttttgttttttgagacggagtcttgctctgtcacccaggctggagtgcagtggggtgatctcggctcactgcaacctccgcctcccgggtccaagagattctcctgcctcagcctcctgagtagctgggaatacaggtgcacaccaccatgcccagctaacttttgtatttttaatagagacgaggtttcaccatgttggccaggatggtctggaactcctgacctcgtgatcctcctgcctcagcctcccaaagtgccgggattacaggtgtgagccaccgcgcacagctgtcttaaatagtatttaattgcattaagaaacctgatgttattctctggcttggaagtttaagttatgatgtttactattcagaattcagcctagtacatttgttaagtaaccagagactttggataagagataagaattcctgtgtagtttgtatgtatactgaaaacacagagcattttatttttcatgaaagcactgcattggacaggatccactgagaattcccttctaccaatatttgatgacctaccctggccccagcactgctctaagccctagaaatacagaattccctggcagacagggagatagacaaatgtatataatttcctattatccagggccagaagtgctcaagtagaagcatcgacagaggagctgaagctttgctatgatggcactctcttgttatggcatatgaaggcataacccttgtcatgaagggaagctctcaaaggtttttaagcaggagcatgacaagttcagatgtgtgcttaacagagatcactctgactgctgcatggcagagaatgaactgcagaagagaaaagggactgaaggctgccttggaggctttagcaacagttgaggtggaaatgatgagacctgagtcatatgcccaccccctcggcaagagtgtggataagcacgtgatctagtacggtgtgagataagagacattttggaggtagactggacaagctataccacctaagtccttacagggaaaagacaacgatggctccaatgaaaagcatgggaaaaatccatgatccatccaacagcctgtattaacacatactttagactgacctagagctggaaccttttgaaagggagtggatattggagaatcaaggggatcaagtatacataacagacagtcccactaaataaattgtattagatttcaaccttgcatgtttttggcctatgtagccatcattttagggaagctgggtattcaggatagtatgatgtggctatctgctaagctttctgttgctacttgagcttttatctacccccacccccagatcatagcaaattgctacaggctagttattttctgtaattgcataatacaaatactagcatcttcagcaacacatcaataggctggaacttggtaataagtgagtttccatcaatcatattcatctctcatatgatatttcagggactggcaattcactagctagagccagagttggtcaggttatttaagggctaattggagtgtctcttgctcctggatgcatctcttccttggcttagataagcctgctgcggaattctctttttgtttttctgcagtcacatttaactctctctctggaagccaagcagatttaattgtgtaaacatgagcaatggtaattgggtaaatgaagttggaaaccaaggtatgatgtttttgttttgctctttgaggaaaaaaaaatagggagcttgtttttctatggtggcaaacctcactgtcagaattctggacagacagttggcaggaggaaatccctttatgaatttctcatcaagacccatttagctgaaatatgtatctgctgcctcatgggtgacagatcaacccagaggcgccttattgttttattcaccaccagatcaagtctttctctacccaggttcagttaactgggtgagaatgagtcaggaatttctgtgagaactgcacatgcaggtaacatgcattcactgaaagagccatgaggatggattaccagaaatgctcttaactttaggcagtgctgtcagtggaaaaccagattttaacaaaatatacaatatggagtactattttttatgatgaaaggattagtagttgcctccttttaaatggttatcatttaaaactgagtcttccaaattctatttacacacatttttttcccaaacaatttcaataagaggaaactgttaatttttttgtcctgtattctaaacactgaaatggtccagcaagaagaggatctcatgcttttaatagatgatttttgccagaatattatattttatccatatttttcaatcttttttattaatgtcactagaattccatttcctacatgcctgcagtaaaattcattttcccagttgaaaattcaagcaaaccaagaaggaaacttggcaatggagtatgtccctctcaccatacagattgctttataaaccagaactattagaaaggagcaggtccaaggttaatgagacactcattaaagagagagaattgcagaagctgatagtgctctgtgcctgtactgaaggagaggctattgttataggatgtttgctgtgctgatattgtaaaccacatgacagatgggtcaagtgctgattacagtattctaacatttggaatagcaagtaacatatttgataagctggcaagtttttatatatgattcaacccacaatataaaagccacgagaattccaaattgaaaataattaaatgagctggaaacaatcagataccacacattttcccccaaaatgacagattttgacatgttgaaattccacaaagggagcaagaatatttcctagctcacttgaactaataacggcccttcatctgcttttgcaaagcaattaattgcagccttctcacaatgtggaggtagcaataaacatgtgtaggcatcttgagctttacagagatcagtcccatagattgctttctttgctcttatcagcagccctgtaacatatacaagaaaagatactctcaatttatagatgaggaaactaaagcacagagaggttcaagtagcagatgcaaggttacgtagaaagtaagtaacatatgggggatgacaagccagatcttccaactattaatatatcaagtcctatttctggtcatctgtaaaaaagaagcagctattaatgtataggtgttcttcattgtacgaagtgtatctttttttggtcagtgctgctgctgccatcattcatgtgtatccatctggataaagcatctggtatttgcattcagcctctgagtgtctcggtggtggtggtgggtgggggttgctggtgacactggtaagagtccttgtcaaacaatgtcacacctctgtagtgttgaagaattgccaagaaagcagcagctctccatttgtgttttatcatttttgcttatttggttgttcttttcagagtttgtcatcttacttgtcaccctttgttaaagtcactttgtctttacttttttactgtctctcttcacctacccaagcagctcccctgccacatcctgggcctcctcctccacccacccaaacacagaccagcatgttatatcagaggctcaaaggcatgcctaggccaaaatcaagtaccgtaaactttcatcattcctctacttggcagctttctagtttagtttgcttttctgttcacctttcttcttgaaattttgtttcagtttggaacactaagctgagactcgggctctcaagtataattttataggttttgagatactcaaaagagagcatttatttccaaatgtccacatattttttgtctagctatgtctgacatatgcaacattttcaaatctcaatgtcagcacaaaataacattgttgttgcgtaacattttgcatgacaattttttctgtgttatgagcttcaattctattgtatgaaatggttcttaagtatactatatttttagttccattttatcagtgctccagctagcgcaagcttgggggataggaatattgtaattcatctgaagacagcgttaagtggccaaaaaaaaaaaaaatcacttctaagcacaaatttctccttgacctctgttggggagagggaagaagtgctaaaggattttgcacaatattttctttaaagacaacatcttagggaatttacttttagttccattttgccatttagctagtagtacagcagctatgcaaacaaacaggaaaatagtgcagtgtctcactaatgtggcttgatctacagatgatggaatcacagctaattaatagtaaatgaaagactggctacatgggttaattggcagatcaagtgttctagattaaaggatccttaacctgcttactttaatggttttatgttcaagtaaaattgcaaagggttttattaaacatactgtctgtatatatacatcaggcatacacatatctgcgtacatgtgcacacactcatagaatggctgcatgcacatgcacaatttatgtgtatctattgatatctattgtagtcaatctaagagtactgcctattaaaacaaatcttcaggtggtcctagcttcaacatcttggatttttccaaacataaaaattattgacttttttttaaaaagtgcataaaaatattggtatgaattatttatttatcctatgtcataaacagccagaattcccctagatttggggagtgtttcacccaaaaggacaaagctctctatttttaaagcaagagatttcaaagatgtgccccaagtgggatttcctgaagatttgtattaatgtgcaggcttgtctgttactagaaaatgtatgtaagtgtgtgatgtgtgtatgtgggtgtatgtgtcgaatgggtaataagcataggatgaggaatttgcaaattgatgtgtaaatgtgaatatcaacgaacaaaaaatagtagcctgtgcatatttactatcaaaatgcaaatacctcactctacacatattacccaaaaatatatacacagtatgtttgtagaaatgcctgaaagtctacgaatgaaattatgatagtctatttatcaaattactaacaggtcagatgccccaaaagcacagaagtcaatcttgtcatacactctttctctaaatatatgttgctctagaccaggcaatgggctctcagcacctaagctcccacatctacttattctgagtgttggttgttctctgcctaatccacatgtttatgtttcccacagccccaccttcaggctctaaccagatccagccacatttccatctgggtttggcagagataatggagctttccattgacttgaatccaggaagcccattttcacactagccctcaggccctgttagactgagactttcaacacctggctagtcttaccctgtcccactaatcaccttacatcccatttgctagaacactcttcttgcatagtgtctcgctgaatttatttttcattattaaatcctaaattactaatgacctgatatgttcattacgtaagaaatgcataaaagaatattaagaacctttttttttgtaaattagcaatctcttatgattttaagtctgcctacttcctcccacccactgctgcctgccagaaaccttcctatttagtaataggtaattctttctagcaagaaacatcctgaagccaaaatatacctgtttcagatgaagagatgaaaataaattttgccagttcttttgcaaatgtatgtacctacttggggaattctactaaatgatgtttatttcactatatcccatgtgctctgactctgagacttcaaggtttgaagggggctaaacatgaaatacaagttcccctggaattcagactggttgaatccaagcagtttcactggccaagaaaacctttatgttttggccgggcacagtggttcacgcctgtaatgccagcactttggaaggctgaggcgggcggatctcctgaggtaaggagtttgagaccatcctggccagcaaggtgaaactctgtctctactaaaaatacaaaaatcagcccggcgtggtggcgggtgcctgtaatcccagctactcaggaggctgaggcaggaggatcacttgaacccaggaggcagaggttgcagtgagctgagatcgcaccactgccctccagcctgggcaacagaataaatgagactccgtctccaaaaaaaacaagaaaaagaaaagaaagaaagaaaacctcctttatgttttaaatattactgttttcccaaaggaaaaaagtttgtaatttttggaacataatgacattgtcaaactcatgaactcagctctaaaaagaaggcaacataagccagggttcagattcttcttgagctgggtaaaaatacaacactttcagtttaagagaaactaaaaacaaagaaaacaattaagtacattgtttcagtttaactgataaaatttcaattgtaacaaccagtagcacaaactatcacaacccattcaataatctactcctaacacccttttaagaattattattcctgactaatggcccaggcatatccaatttttcttttctatctcctccctggacaacttgaagcagacatttgaatctgcattttcaaaatgagcgttccaacatacgcgagcctgcaatgaaaaattacgctgtagcatttaataactaatctaaaaaacaaatgtaacagcaatcaatattaaacttctgttaatcttcccacttcaggtagcataattacaatctagagagtggtatagtacatttatgctgtctttaaagaacatgtgtacaaaatgtcactaaatttgatatgggctgtcatagacttaatatagcttcatatgcaaatttgaagctggagcactgcttttttctaatatatattataataatggtgataataataaaatggctttatggtttgctcactactaattacatggcacttaacatttgcatgaattttttttaaaaaactgataactattctcaatttcttatccactagttctaatggccataaaagtagcctgccactttcgctgaattttaacacaaactcttgtactacagaaaatgtaggccggttaatcactcctgccaaaaagcttgaagatacaatacgtcttgctgaactagtcattgaagttcttcagcaaaatgaggagcaccacgcagaggtgagcaggcttggtgggaagtgtatcttactgtcccttagctgagcttgcagagctgattttcccagccagattgtgaataagatgccttaacacccattttcttttaactgggattgcaaagggaatgaaagtggaagttttgcaagaagtctttggaaggttattttaaccaaccaaaaagtggttgcatgttgtatgtttcggcctaagttttcagatgtttctagcgatgaacaaatgaggtgagtgctttttaaagttaatcattcaagcagcatctggttaccattgtccagaacacaaaatattttttggttttttgtggttgtttttgttgccaccactgttgtttttattagttatttggtatgagaaccacagaccttctttctcaatttatctcggtaacttactctgcttgtactacagtcttcattttttttttcatcttagattgcctgggttgttaaacacagtgacagaagcaaattattctgtgtcgttcaacttgtcgattctccaacatacatctaaataaatatagcttactttttttaagaaaccactgtcaaaatgatccttttgataataattataaaccaagggatttcaaggctaactaaatcccaaacctataaggacttaaacaacctaacacttccaaaaaaattccaaaatttcatgatggttaaatggttatatcaatgctcatctcaaaagtgagatttaaaatcatctctcttaaaataatctttttgaaaattgcataattctccccctttctctacattcagatttacagcaaaggggaaaaatgacatttcctaaaagtaatttctcaagtacctaaaatggtcattccatgactaaatggaaattgccagtatagttaaataatatataatacgccataaatccagccgtcccgactaatgcctgattgcatatttaaatttcctccctgtttttctactattttattcaatcttggctgatcatggcaggggaaagaggtatgtgactaaaccgaatgaaccagccacctgctgtcatactttgtgcatgcccttccagtaccatgtcttctaatgggacttttcctggtgctcctgctttctaacactgacccaaggaatgtaacagcaacttccagtggactgcttgtggaatgggtgaccctccacggcagggtcaatgtgggtgattctcttgtgcgtgcatgaagcaattgatatacttaacaacgactgcagttacatcccaacacaacgcctcctacctgccttgattctgtccttagcctggtgtagtttcctatgtctgtctgtacttacctttattacagcagatgagtatcaaacttagtaaccagtagctcaccggagtgatactaatcttcctcaacaaccgtctctatgtgaatcatatatacagtatttatatatagagagagtactgaagaatttttttccctgaaaacccttaaagaatgggggtaagaccccttgaggcaggtagaactaattcatgcagcatctatccgcaacgcacagccatgagtgatagggaaaagcaaatcgataacctccaaacatgtaaacaattaagtgggttagaatatttttcctacgctatcctataggatgttcttttcagattgcaggcatctggggttccggcgatggtaagtgtgttcttcccacgtgtctacaaagtcatctccagaggcatggaggggctccagcctgccctcctctgatctgagtggttgaggctcttcccatgatgctgggccaaacccacacattcttgaagacataaatacaaagagcacagttttctcagtcacaattgtgcttttaagtgaatcagaggagaagaaaaatgacagatatacttgatttataatcaagttatttttggaggctgctacgggctaagaaaggatgtatatttttctaaattgctcaaaagaaacaccaaaggagggcttatatgctaaacaaggcacgtttcacttttccaaaaagccctttctcgctgtgttaatccttatcctaaactgccctaataaccatcatcacaaaatattttaatcttgtatattcaaaagccattcaaattaaatagagtagacatcaactcaattcccattaccaactttaaaacttagtaatgaaaacttcagcatactttgaagtgcctgagaccaaattttcttttagataaatgtacaggattctttccaaaattaaaaattttacccaatcacaaaatcttctccatcaatcaaaagctacctattgagcgtcttccatcttctgagcactgaggcaactaccttggtgctttttgaaagacaactaggcataggacagcctgtccttcaagcaatagaacgcagggtgtccaggagtttaggctctgtgccagagaagtttggctttgaatcctagctttgcctcttctcttccagtataacttctctcatcctgtaaagtggagataacaatagatggtcattgttagagtggaaggccacattcattaaagcatctggtgttatgcctggcacaaagtgagcactccacaaagcttggctcttttgttatgaggaacaaattgctaaggaaacaaaatataagaatatctgattatcaaagtgacaaaacctgtgtggaaagtaccaaatgaacagaataaacagaacgtgttgagagcagattcatttcaaggtacagtgggccagaaaggcactaccacctgttctcaacttttacttacagattgcaatcacgtggacagctcttgaaaattcagatctccaggtcttgtcccagctcaatttattgaaatcttccagggaggtgctgagcatgggtaatttttaaaagctgcccaggtgattccagtgtacaaccagggtcaagactggctggagtacagtggaagaggtagccttactgctggcacactaaacatagggtttttcttccccaaaagaaaaagtaagacaattatgttctactgatcagtactcactaccatgttctctgggtgctcagtatattaaaaaaaaaaaaaagaaaagaaaagaaaaacaaaagactaaatcctaagcttggatcttggctgtgtggccatgctgtttggtggtaccactcaaatcaaagtgactagtaggcttgcctcctccacctaaaataaaaacaataatccttaaaggcattttaaattccaagataaagtaattaaatgtcccaagaaaagaaatctcaccagctaagagtacatcatatgcacacacatgcggtatatggtagcagtggtcacagttatctcttaattgcagctaaactctgtttccagagtctaatctattcacaaacatacacacacgaattatgccttcatgtatggttgctacaccttcccaatctctctctatgtatacgtatgtatatgtatatatgtattgtggtatatagaggagtacatatatacatgttagtttgtgtgcaaaatatacagtgtgtttgatgtagactgtacccctaaagcacacatctttgtctttgaataacgaaaagctctgggtaagtatttagtagccgaagtataactccttattctccttattgtctttggaaaaggtttataagactttagatgcccatgaacattgtgagttagctcaagtacaaaaatagcattcacctgtatgagcaagcataaaataaatatttttaaagcctggcctttcccaacccggtcacacagattctgttcatttaattggaattacacttttgctttctggttgttactgcccttgctagaatcattttgttcttcttggagagtcaggtttgattataaggttttgaaaagaattcccttgaatgtacaaaaatagctctggtcctcacttactctacagtccccaaatttaaattctcttggttcactagatccctaaactgttctaccagactccaatagcaatgattcatgccacagtagtcatcgttctttgcagggctattaatatctaaatgattattaatgcaaggatggtaaatatttgctcaataatatattaaattacaatgagggatgaagttctctatagatcgtagaagtggcacttcttatgacctctggtttgcaacttttaagctaaaaagctggtaagaggccaggtgtggtggctcatgcctgtaatcccagcactttgggaggccgaggcaggtggaccagctgaggccaggagtttgagaccagcctggccaacatgatgcaaccccgtctctactgaaaatacaaaaacaaacaaacaacaaaaaaaaattagccaggtatggtggcaggcgcctgtaattccagctagtcaggaggctgaggcaggggctgcagtgagccaagatcgcaccattgcactccagcctgggtaacaagagcaaaactccgtccaaaaaaaaaaaaaaaaaaaaaaattgctggtaagagccaggtatgaggttgggttaataaacttttaattgcaaacatttgagcttggtttttttgttttgttttgttttgttttttcctgtcattctagggcaaattatatctggggaggcaactcagtcttcccaataacttttcttggactcatcctgaagatgtaaagttagttgaataactaaagaataagtactagccaacatttagtgtacctttgtgaatttttcaaatgtctggaatcaggattgatgagagtcagccttccacacaggggtggagatggaacttcatccagcaagttccagggtttagatggtctctgcctaaaaggctggtgtctgggaaagttctgggggtggcatggagggtttctctatctactggacttagctaggtagtcagtggagtaagccctaaaccccagggctctcatctgcaggtggtgaaactacaataaaacctcatcggttcagacccaaatattggaatctgtgaaaattcaattgcagatgtgactctttctcttatgtaatatatttaacttgatctcaactttctcaggaaattctaaagactcttcttacaagttagaggaatccaatacccttttttccatcctaggatctatgaaattaaatctactgtttctttgacttcaatttataagtcatcttatctataattattacatgcttaaaaaacgtttacacttatgttgcattaataactaatgtaaacttaatgaatactttttactttagtgtccaattataggctacattcaaaaacagtaaaaggatacctctttttagaaagtccaataagttaggcttttttttgctgacaggccagcatctcccctctcccattaatctgaatcagtgaggttttactgtaaattaaaatggaaacagcaggtgtctatttccagccaagccaaccttgcagaatggtccatgacttgatttttttcatttaatttgcaaaccagccacatgttgataaaggagaagtaagtaaagtgaaatctcgtgaaagaagagaggtggacccctattctgcctcctagtggctgttagaatatccctctaataactaatagatcacagaagagcttggccattgaacaaaccctttcatttatggaatttttccataatcatctttcatattttcaaatgccttcccatctttttttggtgaatgctccggaaagtgtttccaatgtaaatactttgcggcattgaatggggatgtgggggaccagaagaggctggcaatttgtttttgtttttctgctctctttgaaatcggcaaaacagggcctgttgacactgccactcattctgcatgctccctgccagaaatgattagtcaacatgcatgcatgcctttgaattgaattcacatctggcccagtctgatgtgaatgtcaccccctgagaccctgcacaatgatttccaagggcccatgtgcatgaaaatgagttacttcactgatattttttggttttcaatgtacatatgtgtccaacccccagaaaaataactcctgatcttactcagtgttttctagcctaagcctgatctttcctccagactggatacaaaaccaaagcctccttgcttaaaaagattacaactcaaaagttttgtgacaattgcaacaatggttttctttgacttagtatgaaataggagtaacatttccaatgtgtagggaaacatgagttcttgagtttttgtatgagaccatagacaagccccagatatgtagatataagtgaacaataattacaaattttcaagttagaccagcagaaaacccataaacacagtgaagaaactcccagattttaataccttagagcaagaactagccaacaacaatgacaaagagcatgactcaaaatgtactgagttattgtaaattgaacagaagttccacgtctgtcatttctactgcagcatcctctgacccataggtcagaataaaggctctctatggcaggcctggaataacgcaaagcactgccttaaacacttaacaccccaattgtatcaaaaattctgttctctttacaataaaattaccaaaccctgctggatgcaccattaattttgaacagtgagggctggaattcacgtcttatgtccgagaaagaagctcatcacttctttgtctattgtttttctgccaaattttaaaggcctttgcgtggtggtcagatttaatggtggagcatgcggagacgttcctgtcactctttgcagtagacatggatgcagccttagaggtgcaacctccagacacatgggacagttttccactatttcagctgctgaatgattttctccgtactgactgtatgtattacctttgactgtttgactttcctaagtagtgtgcagataaacagatcactaagatgtctttatcccaagcagactacaggcttgacatagctcttcatggttttattatgattaaccccaccccccaaaaagaaacatacagctgaagggtattccctttcttccaaaaagtatcctgttctagggacgctctctcttaactagacagaataacctgagagtaatgtgagaagaggtatccattttttgtgtgtttgattgtctctcaaattaattaacctcttcatattttgcaatttttatcaaaagatgctttctagatgaaaaaaaaatttccagctgactaacatgtcaagcatttcagagtatgttatagtgacaacagccataaaatagaccttcctccccagggagggtgatgaaggagggcagagtatgaagaatgttctttcttcctaggaacttaatgggaagaagggaagtgggtgcaagaaaaacagaaaaaaaaatagtgtggattgttgtttctgttgtttcttaaagtagcatgatcgtttttccttttagaagatcaataccaaggggtaaagtgtttttgaattccatttcaatgctttttatgtacttttttccttctcttctctttttggcttccttagaagcagtatatttaatgtagaagacaatcaatcatctgtgtgtgtgtgtgtgtgtgtgtgtgtttgtgtgtgtgtgtgtgtgtgttgtacgttgataaagtagctgtgggttcttaacaagcttttgcttatctgttctagataatttgtgcaatggaaaatttcacaaacacctgcaagacctgtttgccccacttgttgttagatatgtggatctgatggagtcctcaattgcacaatccattcacaggggctttgagcgggagtcatgggaaccagtcaagtaaggaaaccttttttgataccatcggagtttgggtacaaatggctggagagtaatacagaaatggattaatgatgtcatatgggtttcactgttattgtggacagagagaaacaccatacatttcttctactatgatgctcatagcttctttgcccaaatggcaggagggtcggggatggaggaggtgggtagggtaggggaagaggctgaaaaaacgtttcatgaaatgaaatctcttattgcacaagataaataaggaagaaggaatataaactcggctgtgatatttgtgtggtatgtcttactccaatggtgttatctctaggattcagtgtttcccaaagtgtgttcggtggggttctaggcagggaggtcagcaaactttttctataaaaggccatatactatatacttaggcttttggagccacataatctctgtcacaactcaactctgtcattgtagcatgaaagcagtcatagacagtatgtaaatgaacgagtgtagctgtgttccaatgaaactttgttaacaaaacaggtccatagtttgccattgcctggtctaggccttttagatgcacctttttaaaaaaaacctttatggccaagtatgtttaggaaacaatacctaccccactgacctagaattttgtgtaactctgtttaacccggattttcctaaatgtatttgacaaccgtgtgctttttttaaaatgggacatataccctgcaggataaattatgggaaatcttgtgggttgcaagtttgtcaatttccacaaatgtttggcaaattttaggtcttatttgaaaatgtttggcaggcttggtgccatctccattccccaaatgggaagagggcttgacttgaggctccagagggtcagtctcagactcccctttctgaaaaaatagagactcctatatggagagtttgatggttatggtttgatggtttgaaaagctccagtaaagcctactgctggatttgccttgttagtttctttctttctttctttctttctttttttaaggaaatcatttcgttcatgctagtattttacatctttgggatgcagcaaacagtatggagcaaagtagagggatgttacaagcacattttaggaactccagaacaaatattcatgaggcctttcctcagtttggaagccttgacttgcagcctatttttaagcagttttctgaactgagaccctcctctaatgttatactgtataaggctctcactgataaattaatgcaaaataggcttttctgccccccttccacatctgagccacaagaggagtttccctattgcagggaggttaataaccagtagctcctcctttgcaaataccaagaaatttaaattttagtttgttattctccagtttataacagtctcttaatatggccctactgacttttcactcatgagggtagaactggatcccttgatggtaaattattgagagcctctattttttttcaatgttcaatacaatgaagacagttgtgctggagaatagctattaagaggaaaaggttaaaatgagtaatatttacgttttaaaataacaatggtcttgaaataacatttacttacttgcacttaaatacggagactactactaccaacacacatggaagagaataattggtatccttcactattccttgaagagccctagatttagtgcccatttactagccagaagtcaagggttcaaacctctatgaacttgtttgctcccctgcaaaactgaagttttaaaaatgtgcctgtccagtgtctgagaattgtcatggaacttcgtgataatgtcactaagtcattttataatctgttaaatttcttaaaagtcaaacacggccgggtgcggcggctcacgccagtaatcccagcactttgggaggccgaggcgggtggatcacaaggtcaggggatcgagaacatcctggctaacacggtgaaaccccgtctctactaaaaatacaaaaaattagctgggcgtggtggtgggcacctgtagtcccagctactcgggaggctgaggcaggagaatggtgtgaacccaggaggtggagcttgcagtgagccgagatcgctccactgcactccagcctgggtgacagaccgagatgccgtctcaaaaaaaaaaataataaaagtttaacacatgactgctacttctttgggggcattaaatattcttaataccatcagaaataaagatagactcaaaaatcatcttcatacctggaaatcttagtctagggatgttttcttgggaatatttttaccaattaaaaaaaaatttgaactcttgcatgggcaatttaaaggtctgcaaattgtgaataaaggaataatagttgcgaataataacctgagaattatgcagatacgtgtgtgttttttagtagctttttgctatctaaaattatgctgttagtgaatatgattgtggtttgttcaattcatactaaatagtatatgcctttcagagtctgtggagatctttaaaagtgccaactaagggctgggtgtggttgttcacacttgtaatcccaacactttggggggccaaggcgagaggatcacctgaggccaggagttcaagaccagtctgggcaacataaccagactccatctctacaaaataaaaaaagtagccaggcatggtggcacagcatgtagtccaaactactcaggaggctgaggtgggaggattgcttgagcccaggagttcaaggttacagtgagccatgatcctgccactgtactccagcctggggtgacagagtgagtccctattaaaaaataataataataaataaataaataaataaataaataataaaaacagtgctaactaaaatacaagctaccacacacactgtatcagccgatttttaaacagagtgtggatgccacggggcagctttgcagaatggaataaaatggagtgtaaaaaagagcttggagacatgttatgtgctaagaggagtgactctctccatgtttcctacaacgtgaatagaaataaagtgtgaacttccatctgactacttattggtgggttgatgaagaagcagattcatttctcttcttagattttttttccaagtgaagaatgatctttttggcatacttctcatcaagctcaccccaaaacaagaaactaacttaggtaaatagatttagtttgctcagtcttttccatttttgccacagaatcttccaatacatacatacacacacacagcctttctttcaaacaattgttatcctcaagtagttctgttcttcttcttttcaaaatttataagcacctcgttataagtaaaatgagaaatgcattgtaatgaaatgcaatgtaatgttcaaaataattagcatgcaaaatgctgaagaaaaatagcaatctgacaagaaaatgctaccaatgtattgagtttgctaaaaagagaatgaaaaatatcctttattcttcagattttcttatttcaaaatatggccctgtaaaagaaaatagatatcatcatttaggcttgatacaattaaggttatttaagatgaacaacaaaaacaacaacaacaaaaataattgaagttatttgacggaaagggtaaaatggctgagtcctatggcagcctttccctagaaagacagtcttccatctcttcgaaaagagaaaagggaagctacatctctgtttccgttaagccagacacagtcatggttagaatctctatgaattggtggacaatgtcatctctttgcttctaaccatagctaaagatagtcagcttctcaaagacagtcccaagttgtcaataaaatctggagcccatggccctctcatgggtttccatcaggacatgtagtagggtcaccactcacagttgggcaggttgcccacaatccttctggcagctgtgaatatgaggttttggtcctaacaagaaatggacaacatttccatcagctcttcagtgttagctcattggtaataagccatggtggccttcaatatgaaagaaaacctagaaaacaactcattcaaagtcttaccaagtctagtagctccaccacccttgcctactaccttttccctgacagatggtcactcaatctttacttaaacacctccaggcatggggaatccttggctgcatggttgcccacttcaagttaggactgttctgaggcaagagccagaacttaactctggaggtggggttcagaaaccagaccaaattgggaactagctaaaacaaggatggggcaaaagtggctttccataagacattcccaccagtgtgccctgtcagtttaccattgccatggagttaccactcatttccatgtcaatgacctgatgacccagatgttactaccctttgcctagaaatatcttgcataaacctctccttaatctacatgtaattaaaagcatgtataaatatgactgcaaaactgccctgagctgcttgctactccaagcacactgcctgtgggaaagccctgctctgcaggagcagtcacagcactgtaacaccaccagagattttacactaccacttcaataaagcatttttcttccactttaccatcggctcacccttgaattctttcctgggtgaagccaagaaccctcatgggctaagccctactttggggctctcttgccctgcatcagctctgaatggtagaactaaacactgcttcttaatatatgcacactgtaaaatctgggattctcatttctcaaaatgcactttctcactctgcctcagatatgcatataaaaagtattttttaatgtcactttccaaatagtcatagatatcaatatcttttttttttttttttttttttgagacggagtcttgctctgtcgcccaggctggagtgcagtggtgctgtcttggctcactgcaagctccgcctcctgggttcaagcgattctcctgcctcagcctcccaagtagctgggactacaggtgcctgccaccacgcccagctaattttttgtgtttttagtggggcagggtttcaccgtgttagccaggatggtctcgatctcctgacctcgtgatccaccagccttggcctcccaaagtgctgggatcacaggcgtgagccactgcacctggccatcaatatcttttttgaaaataggttttattgtatatatttaagatataaaacataatgccataagatacatgtgaagtaaaattgttactatggtggaacatattagcatatcaaccatcagaccaaagacaccttagcaatatgcaggtggcctggtgtcaaatagacaagtaatgtacttggtgtcagatctcatgattctgccaataatttgctgggtgaccttgggccaccaagtgtcctgagttgagatcctccctcagttcacctccctgaggctcagtatcctaccttgtcaaacaaggactttgaataaccaaagcttttccaatgctaacattcttgaagatatcactgtccatattcagacacatatacacatttgatcatcgctgcctccctaacacctataacagggcctggaacataacaggtgctcaataaatgtttgttgattaattgccatatttgttaaagaacccacacaggctgaaaatgataaggatgtaatgggaaaactatggggatgtttccccagatgagggtttcaatctaattgggtctgagcaacatacacacaagaaaaatgactttatgaaatgtcaaaattatcatgaaaaaggaaaaacgactctatttgccaatgtaaaatctgtaatttacaaataacataaggaaaagttatgaggacataagaatagagggaaatcaatttccactaaggggtcatgaaaaacgtagcttgagagcaggatttcaaaaggggtagggatgctgggaaagatgatgtacaaaggtagaaatacaagggagggagagcatgcaaacgctgagttttcgccagcatggattataacaaaggcaagccataaagttggagagatgtttgggaggttctaaagtcccacaaagtttggaattttttttttttctgtagatgatacattctcaatgggggctttacagctcataagttgagaaaattgactcaggtgggagggtggcgcttaaaaacgtcttactctttttatatatatagcacagatctacatataatacataaacagatattctatatatctgttgtattaaattttcatggagaaggaagttgtggggcagggtgataatgagtaaaagattgtaaaatactgctctagattctaggaagatattagagaatgcccctgccccaaagtagggattagacctaagaacaaacactgacagaggcttcagtgctcaaagcactaagaaaagacaagatgtgctacatatatgcatgcaacaactgattcataaaagtagaaggcattttgtatcttaaatacaaccccatccataaatctaaagccaaaatctttgagaaaggtacaactatatcccttctgcatggagtcagtgtcttgattagagtcaattctagaagcaggaatgacttcacctccactcatttctatccatagaaatgatgagacgtgcacacatctgtgacattcatccatgtaagagtgagtagatgagaatgtttctaaaccatccacggatgggcactttggcctaaatggaagctattctttttcaagagtccccaaaatgaatgaaagagtgtaaattttaatgcatataagttgttaggattgcaattcatacttcttgtactatccagagatatccaattatgattctctcagagatgcataactaacttgttttaaggtagctgctaaaaaggccctcttcaaagtaataattcattatagtcatcagcagttccaggagcctgattggaactaagtgctacttaaaaattcccccttttcacatgtatattagtaaaatattatgcttagaattacctccttgattctttatgttattaatatccaaatgaaatattagtaacactagtaatacactacattatttttctaaaagcagaaatatcaagcatgtttcatccttttaaaagtagagcattataaaatttgaaagcagagcattaaaaaaagagaaggaaatgtttctatgagtccagtgcagtagtctagctgaaatgtcatattttacaaatacaatatgttttgattaatagaagtattttttttatttttgtgtgcaaaatgaagcttgcttctaatttgtgtacccgccacccgctaatatgtttaaattaaattgcttttgcatacatttgtatgttatgcactcctagctacttttaatttgctcagaattgacattttaactttccgggctgccatctctaagatcttctaattccttgatcattattcagtgtgtgtatcatttaatgatcacatttgcttatataggcttacacatgtctcagtggaaatcgccaacggttttgttacatggcagtgtttaagactaagagccaccagggactgaattcaaaggcaaattccccatttaaacagagacacataaaaggaaaagttccattttcccttctgtttaatagtcatatagttaatcttttcttgaccattcccacaagagcaccctttagttccaagtagagatgtataattggctttcccaaaatgtgaggtgtaaaggacaaatttatgagacacctgtttcccttacagaagagaatgccaggtagacaattttgcattctaggtttttcagtctatgagctggggctatattgccattgtgaaagaataatctgtttctagagggagacaggtatccaggtgatcttcaaggtccagaatttctgacttagcagaaggcatgtacccacctccacccccccaccccctaacttcccccttccctaactcccccactcccccactcccctactcccctactcccccacttccccacccaagcaagcccagaggcagctccagctcttgcaggagtcctgttagtcaaacacagcttgcccagggcagagctgctttggcaaaacttgctcttctcctgcaagatccaaaaagagaacctcaagtcctttgccaaagtgctgtcaacttcacttaaacaggaaggctcctctcagatgcagagttaggctgggctctaccgtgccagtgactttggctggatggaacacccttaaaatgccactactgagacacacggtgccagcttgaggagccgtgtatgacaccgtccttccaaagaaatacagttgattcaagttgggggttttgttttgttttattttctccctctacttataaaaccatccatctctcttccatcacgtcagttgatccatctttgtccaaaaacaaaaggctggtatgaggtaacatttttaactttttagtcacttattttaactttttacagaaaaatacagagcttgattaattttcacaaattgaacacacacccatgtaagccatcacacagatcaaaaagtagaatctccccagaagtccctttcatgctttctcccagtgtctgtcccacttccaagggtaactattatgatatgaagccacattttaaatccacttttggtcaaagagtctaatacaagagctgaattggggattgttttcatttccttggtgtctgtttctgtgtgtaaacatttctgcatttttgttgaacttagtttgagagagaaagtttctattttctttaaatgttctataaaattattcaaatctgatctttcttcttgatacaatttcataatttcaccatcaactgacatgccattgcccatacacctgtctttagaagcagcagttagaaagagcttggtttctgtacatcaccattaggtgtgcctccaagtgggtgaacttcctactctatttggtgtctaacgtctgattgagaaatatgcctccatcaacagtaatttgttttaaaaataagaaaattgaagtgctccaccatttctatcaatcccagtgacttcacagcaaccccagccccagccacaccaagaattccaggaacttcaagttcttagcatgagaaaagttctagactcttatggcaatggatatggaaaccaaaggcccctcccaaaggcatgtgatcattgtgtatgggtgcacttttaagtcactgtgtggttaatttttccattaacttttgtcatttctctggatacagagccacaccacagcttcccatctgtaagctgctttctgaagtgtgtcgcttgagtttttgctgttgtcttgctgtggacttggtcaatttatttacaattgtcgtgtgcttctgccacatctgcattgtcactgtgatggtattttttctttctgtctgtttcttccacaggagtttaaccagtaacctacccaatgtgaacctacccaatgtgaaccttcccaaagtaccaaatctaccagttaacatccctctaggcatcccacaaatgcctactttttcggcaccgtcatggatggctgctatatatgatgcggagtgtgtattcagttcacattagatctcatttaaatttaagtgatcttggcatggatatgtattgtttatttctatacatcctatataacagagatggagatggataattagacatattttgctgatcatacagagacaatattgtttatttctggcatgcatcatgtttgtaagatgtttgctatatatacagcactaacaatttgtcttacgcccactgaatgctggaggactatgtttcacttcctgaattcttttgcaaaaggattctaccctttttggcaggtgacatgactttaggagctagacatccaaaaatagtggaggaaacctctttggtgggctggccagtcatctctggcctgatccaaatctaagaaggaagcacacctacctagaatctggggtgttttctttaaataaaaataaaaaattcctagagaatgtttaaaccataaagcatatttctggtgtcagcaaatggcaggatatagtaacagtatgttcagggctaaatgaaaatttctgaatggatcaagccttagtcacataaatgttatgtaaaaaaatatattatgtactttccaaggtcacagtacaatatggtgctttgagagctaggtaatgagaagttcaataattctcgaaacacaagattcaaacaataaataattaaatttgtggtagccatatcatctgaatatagggctatgctttatactcatccacatgaatgtcagagttgcatgggccacttcttgaaagccagcagtttgggggagtgagggttgagaagccatttcttctagcttcaaaaatgaatcttctctccttttttagttagcaagaagatcgagcacccctaaattctacctcagggaaattagaaccacgtgcatgatttaataagtgaaataaggtttagcgattctgtacccttctttgatccttttcttagaccacagctaattacggaccagataagctttttcttgaaagaataaattggcacgttttcaaagggaagtgttattatcaaaggaataaaaaatggtctgaaactggcagtgatgttttgaaatcttagaatcacattcatcaagacggccctcagcatttttattcttgcagtaatccaggtggaggacagaccattaaaatgactgctctagctggctcctccaaagctgcctgatatttctacaacctacaattgctcacaagttcacactaaaatcatatggtcaatgtgtctgattctcttttaaaggcaaattacaacctccaaaaatttatatctgaaaaaaagcttctaaaaaagaacacaaatcatattcatgctaagatgactatatgaaaaaattagattaggtagtatctgtgaaaaatttaaaaatatcagaaagcttctcttatcttcctctgtgcatgctctgtgacactgtttttgaaaagatatgaatcaagacattgtaataaagcagataatggtctccgttcaattaattaaggcatgagtgggaacacattttggtaactgctcagcaatcaaaataatcttggtgctattgccttaacattaacagtttatcttaaaaataaaaagaaaatattcttttcctcatgtcaaaacttaataataagctcttcaaagaaaaaaaaaaccctacaagaattttttgaaactctgaaaccagatgggtgtcaaaatgttgttgtaataaataccaattattgcattcatatgtacttaatgatttaaaacatacaaccatgcagttccaaaacggggcttagactagacaaagttggggtttctttttcccaagcataggttggggcagggggaaggctgaactttcacggagaaacaacgcattcccccacttttgaacaatgctcacggcagtatctgaaaagaaggcgtggattctcaatcacccaccaggaaatgcctgattctatatcttttcataattccagtttcttcctttgccacctttcattttaagggcgtgtttatatgttacctgctccatcgtgtcagatacgtctacgtactgacctcagactggtctgtccttgaaaacattaccctgttggtccaggccgtaggctccctctcagcatgcttgggcgtgtgccccctccccgccctgcagtagctgtgtatgcatttatgcactagctatatttctctctgaagcattaattcaatgcagctggcatctgtcacaatagaaacacccactctcatctgtttctatagacgatgtcagaacaagtggtaatgcatggtgtgttggacattttataaattactgtgttagcattagtggtatgcgaggaagtgggtgggggggaggacacccctcagagctccaaatgggattgttacaaaaaagacagccagccagaaaagggcaggaggatgagagatggagcatttttcatacacaggctttttgtagatgccccaggtaaaagtttcttagacgtcatcgtatagaaaggcatcaaaaccaatttccccaactgcacacaggactgggtaagatggtgcaatggtaaaagagctcaggttttgagccctaaagcattgacaatatcccttgtccactaacttccactgtctcgactcacctcatcctggtgaggaccctgcctatgcaatgggctggtctatgaaaattggaacagtaaccaaactgaactagaattttggaatcaaggtatccaggtgtacccctcttgatctgagtcaccctaatttctttccagctcttcaagagagaaagcaggtcctcgctcaccactttgttagcactgtcctttgaaaacgaaaagtcttgtgcaatctccaagaggtctccactctggaggggagctggggaaatgcatgaaaccctgaagtttaataactgcatgttgccatgtagttattatctgttgagactatttctccccctggttcgtggccttcatctgaatcatcacatgtgttaatgtggttattaaaagaaggctgatttttaccatacaccattctcctggttgttatggggcaacaccttccccagacttctcactggtctggggtaattggctgagcaaagcacactaagtcatgtatggtaaaactcaaaatctgccggtggagactcgcccccgcctccaccgccaacacacgttgttttgtatgttgaagctgctgtttgccttctagcccccagttgtctctgtgttagtttttgtagagcctgaggccagtgggtgactctcattttctaatttttgtcctgccagtaatgggtcaggcacctcagaagatctgttttggaaacttgacgcccttcagaccttcattcgggacctgcactggcctgaagaagagtttggaaagcacctggaacaacggctgaagttgatggcaagtgacatgatcgaatcttgtgtcaaaaggtaagtataggtggctggacaggttctgcacaccctccccaccatacacagactcagggaagggtagatggctgctctttcaattggctgtagtttgaaactaattggagaaggggattgcttgtcaaagtcagctggagtagtggctgtcaacgtctaacttccattcacctgccctccatctgtcccaaacccaaaataatctggctgccaattttttcatggttgttggctttaagaggaaaagatccctgtccattcttttttgtatccctgatatctagcagtgtctggcacaaaatacttaactagtaagtatttgttaaatgtatgaatgtgtgcctgagtggacaattagaagggaaaaaaagaagaatatgcaattctggagctggcgtatccagtatggctagcagaaatctaatggttttctaacaatgtggatagggccttagcatcatcattcactccgtatataaaagatgagcatatatgtgggccaacttgtagttgtcttgttgaaaatctagctggatttcaacagcggggcatgagacatggaacattacattttgcctgcacatagattccctgttttgtcactgtggcttttaggactaggttaggaatgctgtacttgaagttcccaggcagactgttctgagaaggtgagggaaaaaaatgaggacaacattcatccattcagcaaacatcatttgagctcctcccatatgccaggcacagggctaagttcttggcatacaatgaagaatgagagtagtagaatccctttcctcatggagtgtctccatatcaaatatagaaataaaattccactgaggggacatcatcatcatcactctgtctacccccagatacacatccaagttccttttctagttcataactgttgcattatttttcctcattcaaaaaaaaaaaaaaacccagattgcaagcagcacaggctactccaaatctccagatgttgtgtagcttggttgatggatcaattgtgggtgatgggggccgggtttgtctggaagttctttgaatttattatttcatatcttggaagaggaaaggtgaagtaatatcatcagaactggaaagcaaagaagcaaaagaacaatgcaatctcaggtaggtgaacagcatctcagcaggaattgagaaaggaactatgcactatggagaatctgggcaggtgtttgaggccacttccagaagcttaaagttgtagtgatccagattttttagtattgctcttttattctctctcttagaactgaaggcaggcctacttctcaaactcaagatcaaaatatttccttagggtcttgaattccacgatctcctagatagtctatatcaattttaggaaaagcaatgcttttccaatggccaaaccattccataaaaaaactttttgcgtgatctgtcctaggggtgaaatgcattacagtaaaggcttaccagttcctaaactgtgcacataattgtacagaaagacatgcatgtccttcatggagaggccagtctgggtagggagcaagaaatgggaagatgctcagagaaaatggacagatatgaggatgtcacaggtggatagggactcttatcccttaccatgctgtaatcatgtcttcacggttcagacacctaaagagggtgagctgcacagagccagggagtggatctttttcatttggcgttccttaccctccccaggtctcagcaccatgcttggcacacagtagctgttaagcaaccttttactgacagaagttgctccactgcacatgtatggctggcctggacacttaaatttcctgatgtcccttttaaatcagcccaaaagcagacaagagcaaaaatgggtggaaatacccccggacctacagattcagaggacagagcatggacgagtttttgaatgttttaatacatagaatctacattagaagagcctagaaccgttgttctccttggtagaacagattctgtgtcccttgttctaagccaacatagcaaggacattgtttcataggtataaatatgccatgacaaaaagtcaataaggcactcctcatgtttcagtgctccagaaatttaattcatcaatttgacagacatttacagagcctctagtctagtctatatcaggttacttgtgctgaacacaaaacaaggcatgctgtcttttgccctcaaggagtcagttgagttaaatgacctctccttttctggcgttttggtcctacagagccctctcagtcatattaattttgcattcagcttcctcttttcacagccctgcactccaagggctatgaacagttctcctgtgaaaactgaagacgattacttcattggaagggagcaatttagcatttccatttctcaaattgggccggaactggcacacaagcctcagaagatcagcacagggacctgtccaactcagtcctcatcaggcctccttttcacaaaaccggcaaatgatgtattttcagcgtagcttaaaatgatcatcatgattagaaagctacttgagtgcactgaatcttcagaagccaagatacatttatctttaacatgatcatataatatataggggtgttttaagggtttgggatttttaggtgtttttttttttttttttttttttttttttcttaagaactgggctcccaaccttagaaattatacttggcttctctgcatgcactcagggtgtgttagcaagctggcatcctttcctgagctaactagctgtgtggtcctcctatgcactgttagaaaactgctacaaattcctcttaaagtaatgctttcctggtggctgtatgatctccagaacttgacagtgaacaatgccaaaaagatgcatcaggcaaatggggccttaataaagccacttactaaccaggtgcttttctttaaagacatttgatgatatcacccacttccctgaaaccttttaaaatataactaggccccttttacaatgctgatgtcaaggataagatctcccacctgtattaccagctggccatgtcaggctaggctttttctatgagttgttagcacattgctgagatcctaatttgaccaatgtcagaattatgttactttcagattccaccatcacacaattcttgaatttgtatatgtatattaagcgtacatataaaatagttgtatattatgacattttaaatcataaaataatgtattttattgcaaaataatacattgacattgaaaacaaaacatagtggaagtcccccaataccacacctcctaatttccctcccctcctcaaaggtagccatctttaacagcttgatgtattacctttttatgtcctttaacaagcaaaataaattttgtagtctttaaagcaatgtaatacacttgctggattttaaatttttgtctctttcaaaaccagaaaggggaaaataaaaacccacagcaataaacatcatttaagatttttttccccaccacgaggttttgaagattaaaaactgctttggtttttgtttgttttgttttattaatgaagtaattcaaggtaggcagttgccaatgtgagagaacttacatatgctatactgctataatcgagtttttgtgaattcattcattctcctgcaattaaggttctccatagcatgtaaactatagagagaaatacgccaagctacaagtgttccgggtactgccggaaaggaagggtgtgcatgtctgtctccgtgaataggccttccttagttgggaaagtcatttaaaagggaacacatgtgaagtcattgttgactgaaactgattacagccttcaattttctttttcactgacctctcagaaaatatctcctccacctgctgccatctgaacgctgaattggtcttttcctactttgttttaatagaaccaggattgcatttgaagttaagctgcaaaaaaccagtcgatcaacagattttcgagtcccacagtcaatatgcaccatgtttaatgttatggttgatgccaaagctcaatcaacaaaactttgcagcatggaaatgggccaagaggtaaaaaaaaaaaaaaaaatacagatttttttttccctcttcattgatcatgtagaagaaaacttcacaaattccttccatctaccctagtctgctagtttcagaaatacactctaacatttgtggattaagccatggatgagtgttcagtatctgtttgtcaagtagatttctaaggcatgtgctgatgagaatgtcagtcacttggaagtgattcttggctggagttggggtggccatatagttctctaagctaaatgaagtttgacgaccttatttattaggctggtgtctcgaacagatctgtgtttgccagaatgaaagtcattttcacatttgaagtgcattttatcactttgaacatctggacagcaagagaggcctttcttgcatcaaacaacttccaggatgtataatgttagatcaccctgctacccaatccccagccagcaggttctgaatttccaaaaaaaaaaaagaaaaaaaaaattgcagactttcaattttccttagactgaattgatcatgaatctttcctgaccaaaagtttagtcctttgctaagtttgcaattccaaagcagtatttaaaatgtaaaggagaaggaaacagcaacttgggcttgattaaagactatcatgatcatttttctctgatggccttaagccagctagatattcatataccaatttagaattaattcagaagcatttctggcaactctatgttgttgccaattggcataaattgctcctaaatcagatctttcgataccagccttacatgttcagaatttttactaaattatatttgctccttattcgttatttattttctctttcagcaccttccatttttaaatgtgggttggtggtattctcttcctggcaagatcatcttcaaccttgtttcccctacaagtcagcttcctcagcccccacccccaccctggttaactctgttcctgactaattttcttgtcgaggaccttttcctggggattaagttctaagcactggagtcaaattcagggtgcccttggttctctgtcccagcatcgtgtgctcatatgaatgatctggggcagtggttctcatgtttcagtgtacgttaaactcacccagagagcatctgaacacccagatcattgagtctcacccaagaatttcagataggtctgcggtgtggtctaagaattggcatttctgacaagttccgtggcgatgctaatgctgctggctgttccagagaccacactatgagaaccactgatctggatactcagtatgtaaacctgacttcaggggaaggactcaggtaggaaggatagccccccttggggaagacctgggttcggtgttcagaaacctagattcttcccctggctgagctgaaagctggagtttgacaaatcactcagcttctttgggcctcagtttcctcatctgtaaaatggtagcactattctagttttattcagggtgtttttagtggcacaatctgtttttcaaagcaaatcaagaaggccagcatgtgacacaaataaaagtacagctgctctggatggagaggggaggagggggcctagagtccaagctgccaggtggccctctgctctgcacctcttcactgcccaccacccacctaagctgctctggaatatttaaacaatctcttaggcttcatcaagcccactttaaaggccctgtttttggtgatctcaaaagttcattgagatccctttgagttcatattttccagaatcctgttcctccttaatttttctccccttggagctactgtttttaaaattgagatataattcacatacccataaaattcaccagtttaacatgtacaattttgtagttttagtgtattcacaaagttatgcagtcatcaccacggtcaattttaggacatttttatcacctgaaaaactgagtacccattaattctcacacccctcccttcttcacagccctaggtaatcaccaaaatactttctatctctaaggatttaactattctgaacatttcatataaacaaaatcatacaatatgtggccgtttgtgtctggcttctttcactcagcacagtgttttcaagatttatccatgctgtagcatgtattgttcgctcctttttatgtatttattgaccattgtatattttctttaaagaaatgcctattcaaaatcttttgcccatttaaaaaattgggttatttgtctttttattattgagttgtaagagttctttatatgttctggatacttgaccattatcatatatacgatttgcaactattttctcccattctgtgggttttctttttcatcttctcgatgggatcctttaaaacataacaggtttcttttaaattaaatgcagtgcagttgacctatttccccttaaatcttcttgagatgtacattttaactgagttttctaaggatggtgctaggccagggtgcagaagggttgatacaacaggactggtcttgccttctcctcagcagcttttgcagtccctccccagcttgattcaatgacggccatgtttcaaaagctcccacatacctggtcagatggttaaacaattcttccaaacaagccaagtcactttgatctgggctgttttgcttttgagctgggggtttagggagagtagtgggagcgtgggagttgctgtcacaaacttcactgagaatataaaaaaaggtatggagccatttctcaggggaaaaaaatactttcatatattattactctacaatttcagacgacctggggaccttcttgaccaaaccatagaccccagttggagacagaggatgagaaagaccaagttgacttttatcacaatggcggacccttcttttctctttaccactaattgcttctgggccaaggtagaatgaccttagcttgacctgggagtctggttttatagaagaataagttgccttttggtttaatcatgacatcgtatggactccataccttagctgccaaacgatgtgtcatcatttgctgaatgaagaacatagcatgcaacacacaacctttgggaagtatgtggtttgttaaaattgggtattaaataaagtcccctaattctggatataaaatcagaaagttgtcttggacttgcagtaacatttttgacatgaaacagcagtgtctatttctttctagacattgttctatttgataaagtagaaaagactacccatactctccccatgtgactcaacataatttttttaatgaaaacaaataaccgaggcttgtaaacatttcttgtttctcccaaaatagcgcgcacacacacacacacatctagactgaatatctttattaagggcccatccaataatgcatcctagtctatgattcttattgtaagactgttggtttttttcccaagccatcttagagagatctttcgtgacatttttccttagtataattgaatctgagacacttaaatgaccagctgtgggaaatgaggcttctttgaatgccaagtggctgagaacaggtgagaataaagctagcttgacttaattgtctgtaaatatgtacttcttctaagtggtctagcacagtggctgtaaccttaatcagaacttcaatggaaagtcatatggaaatgtttcctccttgatttttctcactttgtagaatgggaatattcatctccaaagtaaagctgagttgctaaaatgagatttaacaagaatatctggaaacatcctggaactgggataagaatagatgaaagtccaatgtttttatgtagtttgtatttctgagtatgggatatgaagcccatattatagacctagctactaataccagcctccacctgggtcccaactccctcaacctgctttagattagatactggccaggtgatgaaatctccatttttaagatcgcatcctggatttcatcattgggtaatatcacatgtaaaggcagctgctgaaacatttgttaagcatagttttccatcttaagtatttatttttttcattaaaatttgtgaagtaccaatagaagggaaattgcgtattaaatagtttctcacttggtctagtgtgttttcatctcatttccaaggtcagatggtcttaacagaaagacaacatacacacaatctgttctatgacaaggcaaaacgtgtagcacaggaagtcaagtggaatgattttcacacagtaattgtgaatttgcacctcagcccatcagaagcaaaagtgaactgaccaaactttccaggccattgaatattagtagttccctcaggatataattttggagtatagggcaagttaatccaagaaggccagtagaggccggacgtggtggctcacacctgtaatcccagcactttgggaggccaaggtgggcggatcacgaggtcaagagatcgggaccaccttggccaacgtggtgaaaccctgtttctactaaaaatacaaaaaaatgagctgggcgtggtggcgcacacctgtagtcctagctactcgggaggctgaggcaggagaatcacttgaacccggcaggtggacgttgcagtgagccgagtgctgctgcactccagcctggcgacagagcaagactccatctcaaaaaaaaaaggccagcagagaggactggaaaatgggaaaatggtaaagctccctctttgtaccgtatctggatagtcgatcagactgcaaggcattttataacaaaattgtctagtaggaatgtttgttaattaaaagttgccccactgatatatatataccccttcatggagcttcacatctgcacagaacaatatatctcccaagaaagatcaaggagtgaaagcagagtactcactattactccagaaagcaagttaatccaataagtctcatatatcagggaaaactagcaaaagggattcacgtattctgtaattacttgaataggaataggggctgctttgatatttacctctttgctacatgataaacagagtaattattaccctgctctgctatcttccacaaagaagcttatatttaaattgaggcataatttacatacaacaaaatatagagattttaggtgagtttagagaaatgtatatacacatgcaaccactatgttaatctattaatcatagtagtagtagtaatactgccacatagcacctctcagtttctaaaccacgtttccatgcattgtttcattatttggttaagtgaatatgatgtctatattcacaagttataattctagccccactgcaaaaatgaggaaatagaccaacagagattgacatgataaagtttcccctggatgggagagacagaataatcatatcaaaatactttgttttataagcagaaaaaaagcaacgttcattataacagaagaggaatggagatgatcatatttgtatggagtgaaagggagagatagtgggactgcctggagaaaaattaaggcgaagtttggcatggaaaaattgaaatgggaagaggttcccataaatcatcatatttccataagccacgatgtctcaaccatgtctccttatgaaagggtttgaagtttctagctcctgaagagaaagcttgtttctcttgggagaaagaatgacatcattaactcctcagagtaagaccctaaatctttgttggtgtgtggagaacaattactctagtctctatttgccacttcagcccagtttttcaagagagtgttttgtttctcaatgatgttcttctttgcttggtatatttcatattattttgcacacagctagcttttctgatttagtttactcccataattaataaatgtgaatcatttatagcaatgcaaagaaaacctagacgagtgaggcagtcatatgaggaggaaaagtaagcatgtgattctggatcttatctcaagacctaaaaatgaatttggagccctgtcaattttcctgaattcttttgctctgacatctttctttgtgtttctagcaaagaattctgcagataaattttttgcatttagcttcaggtttatgccacttaggagtaaattcctttttgaatctagcagtatagccaacatgggttctgattcaacgggactacaacatacaagccattagctgtattatttttcctctaatcaattaaaatgaaactggaggagatgactaagtgataagactgtctctctctacccttatctaatacttgatgaacttgaacaactaacaatatttgagtcacgatgacagttgacaaaatattttcacatctagactctcacttgatctcccaaacagagacttatgagtctgaaggcatgactacaggaaaggactcgggcactggtttttaaaataataatactagcatagacccgctaaaaatctttatacagggttggctttgttcccgttccaaaatcagagtttcatactggtttctcccttctcattggtccaggatgatagtattattatctcttttgtttgttttttacagataaggaaactgagttaaattttcataggtaacatgacttcccaactttgcactgggactttatccaggtcttccaattacaaacaaacctcgcctatgattctaaatggatttacctaattcacatccctttcctcactctcaataattctgattgccagttatcagaatattaaaccacattactatggcttatttccatatgtttacatagacttttgaatattttatttaatttttattttctcatgtgtccttttgtcctaatttgtatttgcactgttcctttttttttctgttcctaattaatcatccttctgaaagtttgctaaaatgtgggtaagtgcattttccttttcaaataacaatgtcttgcattgttattttttgttagggaaatatgggataattcaaatggatactaaaatgatctaataaatgtcaaggagctggcatataatattttgtgttaaaatcacttttcctttttccctggcatttacagcagatttttatttgtgtgggggtttgtcttcacattactatttaaatgtaattgacaggcacagttagagaaatttaaaaacttagcagtggtctcagtgtaggctctcatactgggtctgtttatccatgtatggaggaaatgagtggcttgccacaagagttcagaaagagacactttgcctttatactgagtcaagacttggagacaaaatgaggagttctgaggtattaacccaaagaacctgagggtttcagaacagtttttgcaaaattagtcacagtgtcttcatcaaattccctttggaaagggaatctactacctaagccacaacccccagcagttttccaaagataatttttaatctcctgtgttaaattattacagtatcctgctttgtaagatccaaatcaacacactgctgggtcattaagtcattcatgtgtgctatttgtaaaagtgtttaagtgtctacacacattagaagcatcgaaagccttgagtaaggaacaatgaacttggtaatatttttaagagcttcagatctctctctatcaaagaactggagtcaggatcttataaatatttctgggactaaggaaataaacggggtccgcaggccaggctttatttataaattaagttgtctaaaaattactgacggatgcagtgccatcacctcccaaacatgctaatatttgtctttctgtgttcttagcatcaataccattcaaaaatagacgaactaattgaagaaactgttaaagaaatgataacactcttggttgcaaaggtaacctccagcttcaggtgaaatgtttcattgtgaacactgctttgttatgtctccatttccattaaaatgtaacacattaaaaagttgagctggatacttgtgtctctcaggaaacaagattgtacatcacccagcctcagctctaaatgattttccgatgatctcgagccgtgtgaagataaattgatgaagtggcatatgttaacttaataagaatttgtccccaaacgttgcgctaggttatatgagaaatgtttgttttgtttttcagctctgacaaagttagatttttaaatacagaaagttaaacggtaataaggaattctgccatcatgaaaaccccttttcctctagtttcacatgcagtgagagtcataataaaacataaaagtcagataaagctatttcagtcaccctcatgaattatagaattttaactaagtaatgctgaatgggaagacatttatatttgccagtgctaaacttctgtttcccccaaattactgataaaatacaaataaaaatagattggattaaatgtagtgctaatatgtaacgtagaaactgctttgcgcagttttggattttaaaaagtgcatttaatattatcgcatgctatatgcaactcaataatattttgtcactttgcacttctgtaacactctatatttgcaatcacataataatgaagagaaagccggataagtcaaatatttctatgtaaaggcagtctattcctttctccgaaggcgggaatcaaataatagactgcagaaatgaacggagggctcgatcccagcctttatgtggtggggaaatgatgtgctttatggtgaacaattatagtttgaaataacatttttttcttttttgctgtttttctagttcgttactatcttggaaggagtgctggcaaaattatccagatatgacgaagggactttgttttcttcttttctgtcatttaccgtaagtaaagagcttctttatttcctggcttttgttttaatttttggtttcggcttgggagaggagttatgttgtgtcattttgttttgggatgggtgtgtgtgttaattatagtcaactattgtataatattaacactatgtgaaaagccaaacatttaataacagcaggtaatccaacatcatttctatttcatttgtaaaggtacaatatgtgtgtattttttatgaacacacacacacattgctatttgtatgcatccagagatttgcctacctaagcccaccttagctagctctggcaaatgacttaatgtgggccaccatttcctcatctgtaaataagaaaaattaattttagagttttaaatgaagacctgcactcagtcctggaaatatgttttatatggtcctcactgtgtcaagtatgttcttcttaactgaattgcctacatttaaaaatcaggagaattcacagaaaattctgtatttctgggggtgcctgcatagcattctaggtgcacagcaactctgctggagctgtgtcttgggggtcttagactggacatgtgtttgcagtttgctgtaaccccctcctggctgtttcactcattcacatacctacctgggcttaggagccatttaagtttacaacttctgggacatatgatctaattatttgcaaattccaagaggccctgattctgtgccagaattaggcaaggccatagaaatgaggtagctaagtctgggcagaaaccagccttattttctatggataaatgatcaatgaagatggttgctataaatggactgcttcgggggcccagttctcccactcttcctgatgctaggcagacaccacagctgcatgcttccctgccatttctgacagcaggttcctgctggctctgagactagctgttttcctctgacaacaccataggaaagggaatcaatttaggacccactgcctgtgggtctttaaaacagcctcactgtatgaagaatctcccagatagtgactgaatgccaagacaaggcccagcacagggtagtggatggcacattattgtccttggaatccaacagatccaggctcaaatcccattgccaatgttaacagctgtctgatcttaagcaaatgtcccatcccctcagaacctcagttttctcatttgtaagggagtgcagggcagataatatgttccctaatgagctatcatgaagataataacgtaggcaaaagagcttagcataggcctagctcataatagagttcaataaatggcaactattatttttaaaaagtaactaatatgattattgtaaaatgcagacatacatgcacacaacttctttccaaatatgccctactttgatctttccccaacccatacattaatcttcctgggaactaagggaaatataaacagaacatttaaaacagtttcttctgatatgcagttctgaccttcccaggtacgaggattgaattcaatcccagaggtgcgatggcccctatccctggagcttattggcaaaggtgaggtgggaaggggataatgacagtaggaattccatccaatttcacttatggaacattcctataatgtgtcacagctgaaaggaaacctatccaacccactcctttgacaaagcaatgaaggcccagagaggggagtgatttgtctgaggtcacacagcaatgggcagagtggggacaggaaccagtgtgtcctgccagctttcccccaccactgaatggcttcctggagagagtgggattcagctggcaattgcctggcactggaaggcagatgggcaaatgagtggggaagattcataaagaaggattcagggcacatgagtgggaaatattagacaatgtttcattcctcagtgaagtcctggaaatggtgaaaagaaacagaattcagtgcaacatttctggaaaatgtttccctgacacccgtagaagacattgctttctttgtgtcttcactttgagcaactgtttttgttgcattggacttgaacctgtgaaactcaggaaagctcctctactctttactgagcagaattcaatccaccaagggccccaccctaattactggcctaccaagaggactatgggaaggtggtccaggggcagcgatatcaagaacagggcaccagagagtctcacaggaagattagaaacaggacacccagagcatcctatgcagaagtgttcaaactgaaattcccatcctctcatctcccttttcagagacattttgcagcctcacagcatgcctagcaaaggcagtgtaatgcagaacacttcggtgcctgttgctgggcccgtaacttccctccttagtgacacttctcccacacacttggccaccccaggccaaaagcacccacttatcatttgcagcccgtgttctcatctcctgccagtattccagtattagagaaagtgaactgtgtttagaggtggcaggaatatctccacacatggattctgagttcctgcccaaattccaaatggcctttgatggcttccttcggcccaattgtgttaattccccaggagtggagtggaagtaaaaaggatgagcagaggcagcaggtattgtgcaaagagcttgaaacctgtgaaagaaccagctgtgcgtcctaggaccctgtgcagaggcatagagatagtgccgacgctctggcatgagtttcttaactccactcccatttctgattcaattccttaagtattactgtgcacttaccacgtccccacctcagcagagctgccaaggatgagccatgtgctctgccccccagaaagctgacgagtatcgacaaatatgccaccctttccccctctttctcccgctgagcgcctcctttcctgggtgggcttgtttcatggtccaagccagacattttggaaaacgtctgcagtggcacggagcaggcaggaatatttatttctcgtctccatctgcattgcttcctctcttggagaggagctggagggaggagggaggatgagatgtggcttcttcgtgccagcccgagaggcgcccaagcgcaccctcctctcctccctcaccagcttcagcagcagtagcagcctgggatttatggaggcaggcgcctttcgaacttttgaaagatcagcccagttggaagacgcaattagcaactatctgcccatttcccttgactacaagatgtgcttttgcgtgggatgcctgtttggaagggtccctgtcttgtgggtagccactcgctgttcttttaggaggccaagaagagggcaagcaggtacccaggttcctcccacagaaagtgacaatgctttcctctgtcctctgcaagtgttaacaaatatgctggttctggaattcattcattcatttactcaacttctatttactgagcacctatgtgtcatgttctgtgctaggtgctagggacacagcaacgagctagaaaggtgtgttctcggcccttttgggagcttacatttagtaaaggagacaggcaattaaaaatgaaagaaaattatccggtgggagaagcatttccacaggacataaactggagagcaagagaaagcggggaggtgatattactttagtcaggatgctcaggcaaggtctctctgcagaggacatgagcgacttaagctctcaagcttgaaggagtcagcgatggatacagaagaggggagaatcttctggacaaaatagcagctgcattagccaggaggcaggaaagcaggaggcacttctgtggatattttggaggccacataaacacggtttagggattaagtgaatgttgggggtggagacttgactggagagggcaaaggtggaaagcccgagaactatgatataccggagagctcagctgagctaggagtcctgagagtccatggagtacagtaaaaaagacagcacagggtagggagactgggatggtaacccagctctgccccttaccaaggagctgtgtgacctggaacaaggtaccacatcttggcttttaatctccttcagtgtaatatgatgatggttatattagatgaattcagaagtctaaaataactataagagctacagctcctattccttaaacacttgctaagtgcctggcacaaagctatgtgctttaaatgtatttttcctgctgaatcctcagaacaatcccattccaacaacactcttctgcagatgttgaaactaaggcttggaaaggttaagctccccccagctcacgtgaattcttccttcactaaaccctggggcccctgcagaggaataaagatgtaggagtagcccaggccccatctcaaagcagacagaaccttatcaagttctgtctgaactttatatcaagtcttctcaagtcccctagaattcagacatcctcctccgatcaaataaatccatttgaggtggtcacaacacaacatggaagccactcacaacaggaagaataaagcctatcttagggctgtcaagggcctgaaacctaccgtatgtccagtcttctttgtcttaagttactctcattcaccctgttttccttttgccagcattttgattgtcttgccacctggaaatgaaacaaaacagatatgtttctccccactagaatttgcgagacgtttgtgtaaatcagtagcattgactgcttttgtgcagagctcttgatgccatgccttagaacgagaatgccacctgggtctaaagcccaaactgaatcaatgacattcacttctgttcacagaacatttttgttaagaggcagtctgaattctagagtggggtgaatattcctcagagtttgttagtattttctctgatggcatttcacttatgctttggcttcagggaatgtccagggtaggagagacggctttttacagtgtgggttgatgatgagtgatgcagacagaggttttggttcaccctccagagggtaacatcaccagattattcactgccaaatacatgtaatttttaagtcaattggcttctatatttcagagtggaggtgtctgccttggacagaagcaccaactgtggtagtagtagctggcgtttattgaacacatactatgtgccggacactgtgctaagtgtatgcatgcattttctcatttgatcctcacaatcagtctatgcaactgatttaattagcatccccattttatagataagtgatggtgagtgatttgtcaaagtcacatagttattaagactctaccctaaattgctcctttattattacaaaaatgttattccccatatatacacagaaatctgtaggtgaagtcaattagtgacttttccagaaactatccactagctgatactacttctaagggaaagagtcatctatttttcatatattaccagcaaaaataatttataaagattttactcaccagccagctattttaccgtagtactgaagtaatagacattcaaaattctccacttcctttgtgctgtccagataatcattcattttacattagtccttcattctatacctgtttatggagtgcctactatgtgctagacactgggggggttagcaatggataagatggacaatgctgtttattggacatttgcatgagggagatacatattctcaacaggtagtttacaagcatggtgattactcagaaagagagagtagccagtgcagtgtaactatggaccaaagggacccaacctcatctgggagaccattgaaggaaatgacatttgggctgagacctaaaaaataagtagagttttgcttggcaaaggagagaacaaagagtattccaagatagaaagacctggaggtgaaagggaagatctagtaaattttaggaactagacgttccttgtgaaaggccaggccagaaggagaaaaatgacaggcatggagttaaagagcaatcagtgcaggagcctgatcatgaaggagcttgcctatggtacagacttccagcgttttcagcagggaatttagcaaaatcaattcagctggagaagttaagcgaggtcacagagagaccagctccctgttataagccagctgggtttgtggtcttctgatgctggagctgagggccaccttccaatggaagccaccatttattttttctaatgtattttgttcatatgggccaaccaaaaaacaccgcgctttaaaaagttagagaagtcttaaacactgatctgctatatcttctatcagtttctttcatcagccactccctagtgtttcagaatttgacatcccctttggggtctgtgacagatcattttattgcctactaggacatccttatttccagttgatgccatgaaaatggagttaacaattaacacacttgctgtctgaagcaacccttcagaagctttacagaagagaaaagataagtatccaaagttaactatttcacttaatattgtgtagtgaacagctgaatatcattcaaagcaaacataagacacacacagtattttctccagactgtgtggtctaagtgaccaggtcacagaaatgctagctacaaaagaaatacctaaagaatatgggtatttcccagcactttgggaggcagagatgagtggatcacctgaggtcaggaatttgagaccagcctggccaacatggtgaaactccatctctactaaaaatacaaaaattagccaggcatggtggcaggtgcctgtaatcccaactgcttgagaggctgagccaggagaattgcttgaactcgggaggcggaggttgtagtgagctgaaatcgtgccacttcactccagcctgggtgatagagccagactccgtctcaaaaaagaaaaagaaaaaagaaatacctaatgaataggtacatggcttcaaacaggaaatagttgtcatgaaattaattatagattctatcctgacctccaaatcacatgcagtgggaagtttatcgccagaaagttagagagtgattaagataaaggtgtgactgtgaagcccagactaacagaaacgtaggcaggctattgaccgtttctgagccttggtttcttcatctatacagtgggaatgctgatagctgcctcagagagccactgggctaataagagataaacagtagccctttcataacacctggtatatagttagtaggtgctccataaatagccattcttagccttactgtcaaattattcaaaactgtaagaaagtttacatgaccctggtgcttttttaaaaatttttttttaaattatacttcaagttctgggatacatgtgcagaatgtgcgggtttgttacataggtatacatgtgccatggtggtttgctgcacccatcaacccgtcatctacattaggtatttcttctaatgctatccctcccctagtcccccacccttcaacaggccccagtgtgtgatgtttccctccctgtgtccatgtgttctcattgttcaactcccacttatgagaaaacgcggtgtttggttttctgttcttgtgttagtttgctgagaattatggattccagcttcatccatgtccctgcaaaggacatgaactcatccttttttatggctgtgtagtattctatagtgtatatgtgccacattttctttatccactctatcattgatggacatttgggttggttccattttctcaccagttcagtcttagcataccaatcatttctcctgtaagcaatccaaactattacccatgacaaggtcaatcaaaactcttgtgacttatattttagcatattctttcatgcaaaaatttgattcatcaaagtcatattccattatgtttagtgtattttagcattttgtgttttattttaatgccaaaagaatttttcgtttttacatagtctctaaaacacctctttattaatcaaaatgtttgcttaactagaattgaatatctcattctccaagcatattttggtttgaatcaggtttatttcagtgtgcactggggtttcttatttttccagttctgccacttcctaaagtataatcttagacagattgattaatctctgaccttagttgcctaatctgtaaaatgggaacaataagacctacattatgtggtgtgggtagaattaaatgagaaaatggtggattggagtaagtatttgacacttgttagacattgttattattgtaattattagtgtagttctatcactgagcacaaatgttagcatcagctactcaatcagccactgctgtatgtaaattgctgaactaagagtggtagagataggtttaaaaaaaaaatcttactctactgtctggaagttagtgtctagagtgcattcaatcgaaggaactttctagactttctggttcaatgtttccactgatatgctagagtctgcttggctcctacctgctggtgagagccgatctccatttctcttcctatgttcgaagttagggatgtcacattggtagcctaaaactgaccacagcaggagcattttactgaaattggcaaacactatcttacttatatttcagtatattattatattgggttttttttttttttttagacagtgatagataaagagaaagggaagagagagagtgtgagcttttcagaaaccagcataccactgagtatatcccaagtgcaggatatgtaccacatgggacctcagatgctactggtgttagatgctccaaaaactcatcattaaacaagaccaatcacattgtgagagggttattatttttctaattctcttttcatctttatccttatgtcaagaagaaagtttccatttggtgcttgtttgtctttcacacttttctaaaaatctcaaattttcatttgtaacagaggacggggaggcttcaggctcaggacccttagcaggcaaccatgtctacccagaatttactaccattattttagttatattgtatttattttcaccctggcttttttcttattgagagtgatattgctttttcatttatagtagaaacatgtttccctttataattaagtatttttaaagtgagctagtttaaggaggaataataagtaactataatacagatggttcatgggttgcagccaaaatcaggaaggtgtattgatgctggaagtctgggaagtactgatactttctagccactccattttgcagttgcggaaactgaaaccagagaaggaaaatgacttgcacagctagtttaatagaactcagacctcttaactcatcccttgagccttgcaaaaatcctccctgggattgcttgttttcttcactctttacctgagaaaatgaaaacaaaaaagagagagagagagaaaccaaaccactgtgttacaaacccaggctatgatagataagttgtcactggcagcagtgacataaattataccttcaaattcaggctaaagcagcctgcaggaaaagtcaaggacaccagaggtcacaagtgaccccttcgtgcagaagcattactattcagtaacaacaatatagccctcacttgctcagcaccaaagccatgtggaagccagggacacaagtaagacatggcccttgtcctcttcaagcttgcattctgtcacccttcttagtgttgagagatgttcaaaaggcaaacaaaacacaaaaatgccagaagggggcaggggcccccacttaaaatccgcaaaaataagcttacatgtctgcttggagattttacaaaattaaaactttccaatttgcacttccaagtttctcttaaaataagatcatgtcacaaaaatcaacaaaatggaaaagcatacaatgtggccattaggagggcaaaccctggagtccaaggaaaccatgcttcaaataccagctccataatgtcactagttgtggatcttttcaaaagtcgattaacctctctgagcctcagtttcctcatctgtaagcaatgagaatttcacgcccaccattgtgagggtgaattccttataaattgcttaaccttgtgctaggcaaagagtaagcatgcaaccattgttaagtatcagcagtgttaagaggctgggtctgagggagcccttgagccttggaaaaatcctctctgggaatgagggattgggacagaaatgaggaaaaggaaaactggaaggaaaaacaggtctacttcaatcaggcatctgttcagaagccccagggggtggggggtggggggagatgagaacatacacttcctggatctagtctcggagcacagtaccctgaacaacaggagatgagaacaattctcatcgttaatgaggctgcggctcctaatcagagcatggaatagaatgcgtttgcttaatagagatcatttccttgcctcttgcccaactccccagcagtgccagcagccctttgtttaataaaaggtagggactttgaggagtatggtgggatgggctgtaggaggcattactaccctcattactatgataatagtttaatcacaatcaatatttatgaacatgcacagaagccgtacaatcaaccagtagccctgcaactcagttttcatgttcttgcctaaggatgctttgcaggaaaacctcggctctctcccactttcccatggccctctgtgaagctctgcagtggttcacagaggtcatttcagaatattatccttgatggttacagttttatatatgaggtcttatttgcggtcagttaatattataatacattttgttgttcaaaatacttccacagtcatggtaggacttttcccttcaaactttgttaaattgtcttgtgaaaaggcagtgtagggacaacctgatacagtacagaatcctttgaagtcaggcccacccattagggttcaaatcctagctctgctacttcttgactgtgtgccctgaggacagcaacttaacctctctgagcccagtttcctcattcataaaggaagaagacaagtccttagaagacgtgaataagatactgtaaattaggtgttcaatcattggtaaatgcatcctgattttatatatgactatcagttattaaatatttctgtattgttcatgagaaatctgagtagttcattgcttttcccaaggtcacatagacactaattgagaaagtaggagtaagagtcaagacttggtcagtattctcttttccattatctgaaatggttccatttataggcaacttagagaaaccttattttttaaacatctcaaactttaactcttttctttcaaatgggaatcaaattttgaaagccagtgatcatttttcaagcaatggacatctggtgagctacttatgagaaatttttggtgtcacagttcccacctctgtaaaaatggcatttacaaactctggccctcttataaaaggaagcaacggacaatggcctcatgatgtatatgcatccatgtagcatttgacccagtgctcacatggaaatagtgcctcccaactggcccagcacagtactgacgttcggtaagcaaagaagacatttcaggccctctggtgacagagccctgggaatccatcatgctgtctatgattccagatatactttaagggttgtgtttttctccagtcctcagaaagtattggaaggggctttcaccgtaattgtcacttggccccaggcagaagccactgaggtttgctcaactgctcacccgcacacgcagtcccagtacatccgcccactcacacattctgtctcacccaagcagtcagtccctcagttggcacttaaaatttattcatcttcccaagatgcacttagagcatccagattatgtattgagtgttggttctgttaggttttggttttgcctttatagaggacatacctctaaaccatgacttcatcaaccaaacaccttgagaaggtcaccctgagaaagatatattcttcctgcaaaatccctttctccactagaattgaaaattgaaaattctatcacttttgttccttttttcaataatttttaatgaaagtcatatcggcacatggctaaaaaaaatgaaacagtacagaaacattcataattttttttaaaaaaacacagctctctgtcctagtcctttctgctctcaatcccttccttcaaaatgaaactttttaacaattttttaacccctggagtgctaagtactattattatattgtttattattcttattatttagagatagggtctcactctgtctcccaggctggagtgcagtggcatgatcacagctcaccgcagcttcgaactcctgggttcaagtgatcctcctgcctcagcctcctgagtagctgggaatataggtgcacacaaccacacctggctaattttttgtttgtttgtttgtttgtttgtttttgtagaaactgaggtctccctattttgcccaggctggtcttgaactcctggtttcaagcaatcctcctgcctcagcctccctgagtgctaggtttataagcatgaaccactgcacccagcctttgttgtcatttcttgattggtcaatcttagtgattatttgactccctactgtaatagatagagcttcagctcactttacatcatccacttctcctccactctccttctgttacagttattacagtattgttcttcctgtcttggtaccattataactttaagctgtacccatccacctttatttcctgtttcacccacaaaatgagactatgacacccatatcttttttcttctcctgcttcctcctccaattaatttcattttctaacatagaaattcttaattcatatcacttaaaaatgcaataacctatatttatgaatgtcccttgcgtctagaccagcactgtccaatagaactgtctaaagtgatggcagtattctgtatctgagctgtccaaaatagtcactagccttatgtagctctcaagtactctcaactgcgactagtgcaactaaaaagttgaatgttacttgtattttcttttaatttatttaaatttaaagagccacatgtgtagggtcagaccaaccttaatatacaagtgcaattcactaaaacaacctgactttccagcagaaatgacaatgatttctggcacatagttcttactatgcccagggactatgccttttgaactgatcatgcctagtggtactttcttagttgtcctataagagtgctacagctcaaacacctactgtaagaaagtgctagaaacctctaacctctgccctgggtactgagtaaagagtgccattctctaaagttcattcattcaatatatttttattgagccactactatataccaggtagtgtagacactaaggaaagagagcacctacattctagatatgaggctggtgagagatgaaaaatcaaaccaacaggagacgaaatgattttaggcatggcactgagtaacatttttacatactgaattgccttgacacacaaaaaaatctacatttctaaattgcttgggttagggaagtggaaaagggagcaaaacagcatcattaaccttgcagcagaaatttcaaaggccaaacattgaagtaaattttgctagccctttgacgtggtggtgtggtctgcagtatctaggcaaaggacaaaaaaaattaactcagagctcttgtgaagtcaaacaggcgggggtggagtcagctcatggagagaataaatcatttccttgattgtttttttcctttttttttgtgagagatcatggggcgctcgggcagtcactaatgcggtggtatctgttcagacttctttcttcttccatctttgagtcttacccaccagacttctgtttgcaaaaagggcctaatccactttttttttttgtctgtgcattgatttaatagtatcaaaccctgaggtcctcgtggtctgcacctgggttgctttttcccctaatgaagcaagagaagtggtttaagcccctgccgcgctccctatcaaagctgcacaatgattaactcaggtcccctttttagggccaggcagaagaaaatcccttagtcatcagcattgtgaaaaccccagaatggtgagtgctcaatgaaaagattaccttgggcacctgaaaaataatggaagagctcaatagagaaaccattaagcctgtctacactggctaagtgaggtggagggtcgaggtaattagctgggacattcaagccagagaaactattttggaccttctgcactgactcaaatgtattcaagtccctcatacattttttttttgagaagccatttaaggttacaagaaaaaattaagacttaaatatagctaattaataaaagtggtttcatagtttttttaaaaaaagaaactaaataataggatgataggcagcttagggaatgggaggtccaaagctgtaacttattagtcatgtgccttcaagccaagttgcttatctcttttagccttggtttcttcaactgtaaaatgggaatattaataggatccccctcaaaaggttgttgaggcagaaatcatggagcaagcacgttcatcctacagctcctaatgtggtacctgtacatagtaaatgttctttgtttcaggcacaggaaaacatgaacaattgctcactgacagcggctcttcccaattttatccttagcctccgtcagcctctctggatttgtgtctctttttctaagctttttccagaactggctctatctggagagtcggggacaagagggttcatgaatgctgctagagaaaagatatgggttgtcctaccagaggggatggtcagaaagcagggagtcccaggagatgaagttctgctgaagtcacagttcttgcctccctttgagggcagttgagaacctgctcaggagggatgccagaccaggtatctggggcaagccctaccccctcccctttgtctcctgtgccctagggtacatggctatggcttggtcctggagagtaatagattgtgttgttgattataacccagggcactggcctggggaactgccctctcacttatgcccacactcagtcatacttagcaaagagaacaggtctttgctgtcagcctcaacatttagagggtgagttctcagtgcatagggtgtcacagaattggcagaaagtatgccagactgagaatcagctcagatacctgttggtaacctggggagattccagaatcttttttatagcaagaaattgcccgtgggccagaggtggggagtgaaactgactatcaccaccaggctgaggagcatgtgctttgtctacaccggtaagccaatattaccagtaatgatgataagcacagctacatttagttgaaccctttgagtagcgttattactgtcccatttacaaaggaagctcagagaagttaagtaatggctagtcaccaagctaaaaaatggcaaagccagagttttaacctagctaatcctgaacccattctgtaagccacttctctagatttaaagttaaaaaagaaaagaaaattacacacacacacacacacacacactcttttaacaaccattgatggaaaaaaatacacaaagacaaaaagctactatattatatagtgcttttaaagaaatttgcgttttgttcatcaaaacaatatcttattataatgtaaaatagccttgtgtagatggtaagggctgttggttatttgatctagatacagtgcctggtgcatgcttggattttctggcaataattccaaaactctagtgggttgggaggatctgatcattcccttctacctagagtatagctggcaaaaagacatattcctatggatatggatatggataacttaagaaaaggtgatccttaaaaagggagcactgctgacattgtacaggaaaagattctcatcctggttctgtcaatttctccgctctgctacatttatctactgtaaagaatgtaactggtgacaacttcctacctctaaggggacttgaatcagagaatgaaaagcagccctagagataaactctcatgtaggtaaagaaacaaatccaaagaaaagaaaagaaaagaaaaacacgtccagagccttctacctagcctctgtttgagcttctccagtgaggtggaggtctctatcaccagaaatggccagttcctggctggagtgtgatagctgtttagacctttttctagggccctgtaattttacacattcattctgattctatactctggaaccattgtgaacaaattcaaacctgcactgaagctccttaattaactacatgaatattatggttttctttgcaattagcccatctttttctaggcaagatgccttttctttcactttccttatagaatatactgccagaatcccccttttcctcatcatcaatgtccttcttaaagttcaatatccagcggccgggcatggtggctcacgcctgtaatcccagcagtttgggaggccgaggcaggcagatcacctgaggtcacaagtttgagaccagcctggtcaacatggtgaaaccccatctctactaaaaatacaaaaattagctgggtgtggtggtgggtgcctgtaatcccagctactcaggaggctgaggcagtagaattgcttcaactcgggaggcagaggttgcagtgggccgagatcgcgccactgcactccagcctgggtgacacagtgagactccataccacccccccccaaaaaagttcaatatcccgaaccaaaaatgatacacacatgtctctaaataataatagaccacaatttaccctgggttattttttcctgttattatgggatgggaggaggatcaataagactaagtgcaagtcatcatttattaaataaaagaacaatcctaacaaaccgagggctggtgcatgagggagagtggatgattttcatttgtgacagaaacttgcctcatcttcccaaactgcctgtaaaggaatagaatttggtgtcattctccggattgtaactgcatgttagtagtaaatggtaaatggtgtgtttaaaggttgctcatttcagctgtaacaaaacccctaccaactgctaagcatcaacatcacagagtacaggaggcaatttctagctgagaagaattgttctgctagcacctgctctgaccaccgatgcttgaattcctcatacttttctaccaatattgaggagatcaagagttccaagggagaaagttgggctcagatgaccgcataggagtcttggcttctctgcctcctgtctgtgatcatgagcaaataaattccttaaattctatgggttttacgttctcgattgtaaacggatctgattgaatcaccccctttttgcagcgtggcttaaagaagaaactgtttgtggaagtgttttgcaaatgaaaaatatcacagaaatgttagataatagtatacatgggggagacatgaaaaaaaaaggcaagccaccttctttcctgaactaagttctagcatagcaatggcgaggaaagatttgaggtttagaatcttttagtagaaatgataattgtgcaaaatctggagagcctgcctcaaatccctttaaggactaagagtattctcctttacccaccagcctctgcaggcagtcacctttctatacaactatgttggttttcagactgatcagtgacgtggctccttgatgcaatcttgcctctgcttacttctcaatcatcctgaggccagaactggtcattagctttctctcattgcttccctctataaattttccctgagtttcctttctaagctggtaccaggtgaatcaatgaggagacagccatgagcaagaccaagatagcctttgctctcatgacattatatgggaggtagacattgcacaaaaaaaaatttcggctgaattgcaatcaatgctgcaagaacaagtgtaaggttctaagagaatctgtaacaggagactccaggaatcgtcttgggggctggcaatgattcaagaagatagaatgcattgccctctcgataattacctaattgatgtgtgttccttgctttaaagtttacaaagcactttctcatgccttttctcatttcaccaagctttcagccctgcaaagtacacagtattgtcaccttggtctagaaatctggaaaccaaggctaaggaacttggcatgatttccccagggtcaacgagttctggcactgaaagaacttttgactctatattctgggctctttccaccccaccctattggttcattggctgttttctcttgagagctgacattttggaaactagcattgagaaaagagcaacagaggaaatcactcccctgggtacttttctgggagacatttgggtgaagcttgattcctaatattgatctcagccaaattgcaggaggaagcctggctgagatgtgaaaagacatcctaactgctttttgtgcattgcagtctttgtagttcccagtaaaaacaggaaaccctctctgaccccaaatgtagctccttagtcttaattgtgcctagagaaacatgtgtgacctgagtcaaaatgaaacacacagaatattaaacatactcccataggctttatttctcaaacccagctgttcattgacttttcacagtactcagaactcacccacatttgcttatgaattcatcgtcttagctgccatttgttctgtatttacatcctggggctaagtgtgaattcacccttatcaacctgcggaaataagcactattactaataataactccattttgcagatgaggtaacagaggctcagagagatgaagcaacttgcccaaggtcacacagcttgtaagtggtagagttgggattcgaactgagatctgactccaaacttcatgctctcaaacataacactctagcacgctaccatactccctccccacaaaactaaaaattttataaccacttcctgcacttcccatctggaatttttagcacgtaaaagcaggagacataacggcagcctttgggcagttttgaaaggttctcatccccctacccgcagacaccatctccctctgggttgaggatgtccatcttcctcttaaaaacctgagttaatgaaagctgagaactgaggtttttagttatttagttaggacaacctgcagccaaattacacaaagacccaaggtaccagaagtaacagcaatcttagttgcttctctagactggtaagccccggactaatccatgtgggtttagctagtcactttactttttttcagagggagggaggaaaatgtaaagctcccgctccagcaacagaatctgaatcagtaaatttgcgtgtgcattctctctttctgcaaagcagtggctatggcttgaaaaaatagcaaacagattttattttctagtacctttctgtttttcctggtcagctccatgtgccagcatgttgttttgattctgatggggatacagcattgagcagtgaacaattaaacataaacaccagcctcacttccatcctcttctttcctctttaggtgaaggcagcttccaaatatgtggatgtacctgtgagtatttgaaaattgtttctcgtggggtttttttgttttttttttttttcatttttactttttgttttcatgagaattttgatagtgctactcatattaattgctgctagctaaactgtgtgttgctgacttggatcatcagaaagaagccaagaatattttgtagtagaatttttttttcagataagaagacggtatggtttctttcatcaggaagaaaggtcctgtttgagggtaaacccacttcactttcactttcattttcattggtttctctgttgtttcattctgttttcatcatgttcaccaaccctcctgtgtgcacaccttcagaggaaagccatgaagctagaaacttgcacaagggtgatagtattttttgttaggttgatgaaaaacttaattgtggttttgcaattaaaaatgtggaaaacataatttctttgcaccaacctaataaaaaaaacaaataaattctaaatttgttcattttggggtcaattctgcaattgttttaaggaaacctcacaaaactgcttataatttagtgcaggcctcattaatgaagagagctctcaaagttcacagataaagcactcgaagtttcccaaaatttacatttaaattgaggttaagtacaacacatgaatgctaaagtgtgggattacctgtgataaatcaggatacatttatggacagactttgccctgcctattagcaaaataaaattggagagattttaatatattccagtaaagtgaaaaagaaaatgattttgtttctccatttctaacaaaagaggtgtgagtctattataaaatattaaatttagagagcttatctcaacagccaccaagggtcttgtactaagcatttctcattctgaacgtggttaagtaccccccttgttcaaatacttatttgttaaaatttgtttttttctaaaaggatttgtattaacatttaaattcatttccccaggaagctaagtgtgtaatggtttactggcttatttctcaaaggaagacaaaatagaaaattggagtgaatttagcattagcatatattgtgtttgtttaatgaaagaatgtacaatcaataattatgctttgaatttatatgatacttcctatccacaaacctcagactccttcaggtagacagttcttataatggagaatagaaaaagctcacataactgcagcagggagagaacttaagtaatttactttctcaagcctccaaagtataaactttcccttcgtggggagctaactactcaaattttctggccctgtttctccatctttaaaatggagatgacgataatacctaagtcatgggtttgctgtgcaaattaaatgacacaacatacatagaacatccagcaccatacctggcacttattaggaatttcagtccaggagaaggacacacgtggtggtggtagtgtgatgtccacactctattgcatatagatggatgggggatgaatttgcagacatcagcgttgggctccactggtcttcaacagtgatagaaattgaaattctcggctttcgacccaaagatttggtagctgtggtctattctctgtaggatccagagcagagggggtatctcagccaggtttgaacaggtggcctgtagacaaggcccaaacacctagagaaacttgatccagccattggtactaacatcaggttatgttagattgaaccacatgaaattggcatattggtgaggtcaaagaagtcaaatatcagccatttcatatgattcgatctaataattcctgcaagctaggttcagatttattataaagatgggagggcagtaagtggactctatagcaaaatgcagggtgccctgatctgtactcattaagtgtttatggattaattatgctaaattagaagactcgttaggtgcattagtccattttcatgctactatgaagacataccagagactggataatttataaaggaaagaggtttaattcactcacagttcggcatggctggggaggcctcaggaaacttacaatcatggcggaaggggaagcaaacacgtccttcttcacaagacagcagaggtaagaagaatgagtgaaaggaaaaaagcccccgtaaaaccatgacatctcctgagaactcactcagtatcacaagaacagcctggaggtaaccacccccatgattcaattacctcctactgggtccctcccatgatacttggggattgtgggagctataattcaagatgagatttgggtggggacacagccaaaccatatgtcattaggctatgaggaaacaaattgaattagtagagttttcacactctggagggcagaagaagttgatgcagcatgttccaaaatgtggtacatttaccactgattatacaaaatataataactactattactgctactacaaccaagcgttataaagtactcactaaaacagtttacattttatcttcacaataacctcactttaaatatgaggaaactaaggcacagagaagttaatttgctcaggatcccacatcgggttagtagaagagctgagatttaagccaatgcccttacaaattctgccatactgcaagataattccagttagtgcataaacaaacaccttgatttggatagtggtaattattttagtgcatattagaaaaagtatttttttaccagctattaatgacttaggacaaagctaaatgttaagttgattaacatacgctttaatagctaataatattatagtaaaccttttagtaaataaataacaattttatagaaaacaatagtacataatacacgtatattctatatgtacattgtttatatatggtagataatagtaatcatttgcttctgaaatcaatcctaggaggggttaatattatcattctgttttatagctgaggaaactgaggcacaaagaggttaattagcatgcccaaggtcacctggtgaataagcagagtgtgactatcaggtgctgtcagttggaccataaagcctgcacttccaggggtgtggtagagtagctagcactggttcccaaggtcaattatgtgcatctctctccaactccgccttcaatgagagcacattggtagctcaaaattagccttgatgggagtatttacaccatgcaaattggtaaacactacaaatcagggtgttttgttttgttttgttgttggttttgaagagtcagtttatgccgggcgaagcagctcacgcctataataccagcactttgggaggccaaggtgggtggatcacctgagttcaggagttcaagaccagcctggccaacatagtgaaactccgcctctactaaaaatacaaaatattagccgggtgtggtggcgtgcacctgtaatcccagctacctcctccagagaggctgaggcaggagaatcacttgaacctgggaggcagagattgcagtgagccgagattgtgccattgtactccagcctgggcaacaagagcgaaactccatctcaaaaaaaaaaaaagagtcagtttaccagcataccactaactattacctattaagtcagcagtccccaaactagaatgtacagcagcaatacttggcaaaaaaaaaaaaaatttctggtttgtttttgttttttattaattaatatattcagcttttattattattttttaatgggcacataattgtttttgttttgttaatacagagtcccaggccctcacctccagagattctgattcagtcattctggggtggagcctggatattgctttccattaagttcttcacataattctgataagtagtacaagttgggaaaccaatggactaaatcagtgattcttgaccttggctacatattggaaactagggagcttttgcaagcattaatgcccaggtcacttgccagacaaaattgaaacagcatctttggggttcagggcccagacatcagtatttttaaagctccccaggtccttcagatttgcagccaggcttaagaaccatcagataaaatcatttctcaactcatttctatctctgaagcctctgagatcacctgtgtttccctgtgaggtttttgttagaacatttaatggtttagttccatgtgggcactagcagttagtcacctttgagatttgtctcttaactatccacactactggagggaagttctagtaccagtcacctaaaacattacatgatccccaaagcatatgtctttgttttagatgtagtttttgacccattggtatatgtaggagatttgcattcataagtagggctgacttaggatgctggaagtttgagctcatttttctcaagctcagaagtattccggtaggggcaagttcagattaaaatgttcttctttttctgagccacagggtagcttattcacaaattatgtcttccacacatggatgcagttaactatacagatatttgtttaagtgttttctaaaatctgtgtcatattcaatcagtctgtccaagccacatttaaaatacacaatgtcattatgagatattaaaaaacatctaaaagtttgtcccagtgtgtgcgggtagcacaatgatataaaagcataatttaatagtatcagctgtctggtcaagtatattttccagctataactaagggttagcttgtttgtgaacagtttttcttttaattgttttgattggaaatctacttgaaatgcattacacaaccttcttgcctttttaaacagggtactgactataatcttttctcaatgactcaggatcaccattgtgaccatgtctttccccagtggctgcatagtgacccactcccctccagggcctcccaagatataggggaggcttgcccctgccctcgatagtcccaaaccccagcggttggtgagtctgcatgtctggtgttgcagttgggcagcctcctccctcaccgtcaggcataaggaaaaatgatagctctctcttatctgcacagttttttcaaacaatccccctcttccctatttctgctccatcaagggatggaaaccaaacttgttggaattggttgggagtgggagcttgaggactccattatgagaaaactacacatgttttgtgctgaggctttatcatttttattttgacgttggctcctctgaggcccccttttcttcttggttctagagtagattctaaaggtaggtaaggctgtggaatggtataatattatgggggggggggaatcatagtaattcatgtttgtattacaatatatggctttcaaaacatttttacatacattattctagctgatgaccataacagtccgtggaggtaagtaggggagctgttagtaatcccattttatagatagcataactaaggcccagagaagtttttttttaactcttcttttacagaaaagtttaagtgatattcacaaattccaatttgtgggagatccagtaaaaatccatgcagtgtgactgaagagcttgaaaaaggaggagatggagaaaggatttgctcattcattcttgaatttgtccattcagcaaatatttactgggcccctactatatgctaggtaccattttgtatgctggggatgcaatagaaaacaggccaaacaaagttcctgggttcatggagcttatgttctagtgggataagagagaaaacaaatagtgtataatacaacatcagctattggtaagtgctattggaaaaagaagagtcaaaagggagcaaatcatggagtttcttaactacatgggtaagatgaaccacactgattttttaaaataccagagtttttaaaacttgaatgaagtgcccctttgaagacagtgaaacttcgtgaaaagagaaggagtggtgcaaatacgcatcattgtagattactgtttcttctaacattttgggttactgatagatctgccgcacttgactttgtaccttagctctaagatggttgcatgcgcccaggaaaaggccatattgccacaagcatcaccaggggagaaatagaaacaataataagtttctcaagtcccccaggtagagatccccatccctactgagaatgccctttgatgcacagttgccaaacggagagaaggagagaggtgcctgcttagaactgatagctatcacttacatctcattggagaacctctattgttttgtatcataaaactgcaacaattataggaccatcatggaacctgctcaatccattcgctgaaaattgtttgaaagtgtaacacttgactactgtggctttgggttgtcctcattgtttttcaaattaataccttgtcattgtttcagcaggtgttaagaaatgttactagcatcccaggggccaagcattggccctttgcatgataattgtttgctttgtatcaggaaaaaaaaatacagtcctactgtttctaaaccttcctcattttcaccctggaaattacacagaagtgttaactaacttcaatttacagtgcctgacagtcacgtctagtagagaaatgatactttgtgatctaaggtaaatcacagtaatgaaaactaatctttttagttattagcagacatatatatctactgtggaaatttgaggggtttgtggccactctcctaatgacctatattacagtgttttaataggtttctttggagataactttgattgtgacatctcaagcagagtgctttctgagtttctttttttttttacttccctacaataagtcatttcctaactgcaggatgaaccaccagcttacctttccagaaaatctgatttatttaaaaatcaaatcctctcctccttcccctgccttttgtttcttctcttcttcttcttctttttaatccttggactttaaggctgcactggaagcaaagacaaatggtttagtgtctcctctgagtgaactaattaattagcaaatactatatccactcaggttaagctatacacacacacacacacacacacacacacacacacacacacaatgagacttgggtaggaagaggtatagattgaaacacaattttttttacttagtactttctcaatattttaaaagaggaaaaaggaatgggaagttccatcacccgtctgataatatattaaggacagtggaaaacagtatgtttggatattctttaatgcaggtttcaatccaaggcaaagtcagagaacatctatgggttatgcagtaaagatttatccattagataaatttgccaggaaaaaatttatcatagaaaaactatttataaaatcctacaatctcaatgcccttcttagccaggcttgatttctggaaagaggaagcagttctaatatcaattcctaccagcccaggctgtggacagcaatcccatgcctacaaagctgatccagcagaagcatctcagggtgtgtgagggcaagtagagggtacaagtgaatggtaaacaaggaagagtggctgtctgaaaattcgttttcatgttttcctgtttctttacagaaacccgggatggacgtggccgacgcctacgtgactttcgtccgccattctcaggatgtcctgcgtgataaggtcaatgaggagatgtacatagaaaggttatttgatgtaagtaaatgccttctcctccttgaaaaccaaggaggagaccctccaaaatgtgacaaaataagagacaggaggataagtcacattttgagaaaatggattggttctgattcagactaaatcttttcctctccctctgccttaggctcttatctgtcttgtgtctgttctgaacccactctggtgtggcagtgtctcagtcccaatctgtgtgatacgtaggacggcacacagcctctcggcaagcaggctcattcctgcacgaagcttgcaaggcagctctctctaactggcaaagacctttcttggtcatggttttcctccttgcaatctggcctcactttagggagatattctcatcagggaggctgagaccaactccctctcctgggggtggcgcctccctgacaccagctgtggtgtgcagatgtgcagtaaatgtcgcatcgttatcacttcaaagataatttcattcctggaagactggaaatccttaccctgggttttggcaaacacttacattagagttgctcagtcagttgcagctttaaaccatggcgccccctgcccacccagccagctgataatttatgagaaacaggtgtacaaagaatgagtacattgggctgcggacccagatcaaacttcagaaaatgcagattaccaagggttaatcatttttgagcaatcttatttccactgagactgcatctgcacagcaaagcaagccactgaggcaaaaagaaaaaaaaaaaaaaaaaaaggaacctgcttcagtctcaaattgcctatctcttttaggccaaagcagatgaggctacctaatttagccagatatttcatctcgggtttccaccgaatttgccagtgtagacccggccagagtgcatggaagctgatgttcttgtctccctgtggctctgagtgtgcagcctacttctgtcttgtgaaacgtgagctcctcctgtccaggtttccatatttttagtgccaatgcgaacattaatgttttggtctactatggaatccatgtttctatttttttttttctgtgattgtgttcagcaatttacattgagtttgtgtgtgtgtgtatgtgtgtgtgtttttgttccacagctaagtgagctcattgttggcaccgctttctgattctgcggcttctgacttttatatgctttgacttccagctcatttgctttcctcgtgtgtagaaaggctcctttctttttttttcttttcttttccaatcgtcccctttctgtgcttgatacccctctttcccctgcatcacctttcctcgacaaaacccttcttactttttaattcccacccatcctctctcagataaaaatggaacttatctctcatgtcaaatgttttatcacattatatcaagtggcatgaattagaatcaaataatcttcctgtgtacatcttctagcatgacccacatccactgagaatgcctcatacatgcataaagctcaccagcgggtcctcccccttctctgcatgcatgccttatatgaaagtactgagcctagaatgtccggggcacaatcaccatccaataggcattgaaaacagagacaggcaggaccctcgggtctgcagttaggagtgtggacactctgcccatctccattgaattaaattccaaaccacaaatattcaagaagcctgtgggttgtccttttcaatgcctaggttgcctttctttttcctttgatcagtatcttccgattctcagttttatgtggcccgtgtgtacgtgtgtgtgtgttattgtgtgagtgtgtgtgaataaccaataaccttgtgttctctaaaacttaaatctagtactgaatttgatgtttaatctgcagtttagcttgttacttaattgacaaataatccacccttgcctctctttttttgaaattagaagtacaagcaaggtagccttgctgaacgcagcagggcacattatctcttttgtggctcttcttaaaggaaagtgcaaccaaatcttcatttaaaaaggaaaagtgcagccttggctagtacaggtggtaaaactggacttgcctgactgttgaagaccacaggcaaaattcaagccctccagcctttaattaattaattaattaattaatagtaaattaatagtaaaaagaaatattactgagaatatttttttccgaaagcaagttatagttagggacattcaaaaattcacaagtaactccagtcccttgttgaattccactgaccagcataaaatagcatcagtaacattgtggaaacccccacaatttagtctgatgttgtcccaatttggttttcccaacggagtcttagttataccctcctgagtatatctgatggtaaaggcttaactattacaatcactcactgcacatcactcccggccccgtggaaaaaaaaaaatttttcaggagcttatttagagataacaagtttctttgccatttactttcttactttctaaataacctgatctcctactttacagaatattggtgctaggcaacctaactgatgtagtgcaaaaaaagttattgaatctgtcatggatttaaaacatttgtcattttaaaaacccagagcttctcgaaaagcttcattaccatgcagccttagtaatttaattcagtacttactgtttttctataatctagcagcaaaacatcagattaccaacatgtttgattattttcggcttctgtttcctcaagcatggtgtttatttctttgtgtacatgctctgcaaatctcttgtgtccaccaagctaaacaagggaataggaatatcaaggcagaagggtctgtgaaagctgccactctaaatttcttgctgcaaatgaacttattctttaaatcccattccttaatgataggggtcctggggcaagtttctaaacaattggcagaaacctattgagaaagacttgttgctctgtgagatttttcttccaaatcgttgcattttgataaatggcaaaaatgaataatagcaaattaacattttgaatgaagaaaaaaatatatatctccgagattgtttgctgtttgggggttgttgattctgactgttgtgtcattctctggtttttagttcctgctggcatctgtcattcagaggcatgttctaagagttcctgttgtgtttttaactgtgtttcaagtctcagttttatttacctgataagtcctttaagttgttgctgtttggtattgttcctgtttttgcccttctgagtgtgcccttgtagaaaaggctggatggttttagtgtgtgtttgtatttgagaatatttggattaatagctggtcatttaacggtgcattttctgctttaactaggcccctacccagtgctctctgagctagttttctctctgccacgtcattgtacttttggctggaagtgggtgcttgtgggagattatcggcatagcatttgggactctatatttgatgttctgcatttttatctattttattacgtaacttaagaacaggctttccaaattcatcctcaccgattttttttgttttaaccaagcattctctaggtttattggagaaatacatttggacataatgttgcctaactgggttgcttttgccattaagattcctttgtttattaatataattgatttacctagtctttctataaaatactaatgacttttttgataacgcacctaagaaaaaaactaaccaatccaagacaaagtgctgatcagaaaagaatcggcaaactgtttcccataatatttcagatgtgcagctggacattttttatctgcgtttttatattttttcataaaaaatgaagtgtaattgtatattgttttcagttgctgcagaataacagtttataacattttgaaacaaaacaaactgagatttaaagtaagagaatattccaatatacacaaaaacaatgaattcaagtagattaaagatgctgaatttttaaaagaagatcagactgctgtgagactcaagtggaagcttagccttcttgaaaattattgctgacattcaaagaaaatataaaacatggatatgaaataatctccatattcctaaagcagcagctacagaggaaagcacaagctcaagaaataacttgaagacagtgatttaaagttggagtatccataaatcatgcagatggcttttccctccttctctagtgattaattcaacatcttccccaaaataaaaacatgctttttgaaattagagatcagatcatcaagagacgcacctaagatttcaaggtctaaacaaaaattaattttctttcttccttgtacttcttgaagacacagactgagaagaaaatcgggattaaaagagatgtgcttagggtgaattcatctgcttaaacctcacaggctcggagatgagtgattaaaaagccatctcgaacttggatggaatccacattggtagtaatgccgcatccgcactggctttcttcaggccccgtgtcattgggaaccaggcccagggaacatttgactggagatgatacatggattatataggtcaattatacacttaatctgccttctggaggattaagtatttgcagattgactctgcatttggcttctccgtggcagttatcagatcaggaaagggcctcttaccaaaccacctcgtaagaacttaatcaagcagtgtggtcagcttcggaaggggctgctactcagtattctttgcctcgcacggattttaatttgctgttccattttcaaatcgtgtatttgtccagtttgtgtggcagaacaataattgagtgtgactagttcccttgaaaagggtaatttgaaacatgaaacctttgcctgttaaaatatatttgctatatttatatatgaaaccacagatacccttattttaacaaccttattaaattactaaagcaccatacatgtgagcatatatcaatcaaagtaggaatcatcctgctggaggatgaaagtaccaaataataggctacaaggaggacatgacgctatatctgtaaggtatatcaccagctgtccaggtaagggaaaccacttccaaaaatatgaagtggggagaggtgcataggattcactaacacaataagttgcacttctaaggggctgattaaagaaattcaaggcatatggcattctagacactgagacagtgagttatctcctctctaagcaataagcagacgtgagtgccctgaatgggacttactgtgcagtgatcatgggccctgcctctggaaccttcagacctgatccttactagctgggtgaccttgaacaaggcatttaatctctaagagcctcagctgattcatctatataacagggatgataatcgtggagttattatgagggtgaaatgccatatgaatctgcagcatcgagctctgaggaagcattggtaagtgttagccaccaccatcatcatcatcactatcatcatcatcatcaaaatggaaatgcttttcccagccttctttttttccttgttaagcaaagtttcatattcatgttaaggtgctatgagtctccccatcactttaagacattaaccccaagcttgcttagaattgcttgatgtagagcagcctggtaccttttttacttttggtaaaacatcttcctgaaacaggcaaaatagtgatggtcaggagtggggctttgaagtaagacagacagaaggaggaaacttggttctgccacttttgagctttctaacctggggtcaattatttcacttccctaagcctcaatttccccatctgtaaagaaactggcttcttacagttttcgtgaggactaaatgatataatgaatgtagacagacgtagttaaaaattcaatgagtctcttatcatcatcatccttatcatctcatagaactacttgttccttcaagtgattttgaaatagcctagctctaccccctcaacaaaactacactgcattgccaaataaatcagaattaaccttcggaacttcagggttttggggggtgggggcagagagagggagggagtaattaataccctttactattaagatgcagtatatgtatattgtagacatttagaaaatatggctaaccaaaaaataagaagattaaaatgttgtgttcccagcacccacatatcattatcagtggtgttttttttaatctttttctatataattatatatatatataatgtactctttttctaaaatgagtaagcaaaaaaattgctttttaaagttaatggtcactatttcccatgccagtaaattttcctctcatacactgtattcaaaattacccacttgtccccaaaatattctttacagctggtttgtgcaaaccaggatttgatgcagggcaaggttgtgatgccccttaaatttattttgaaccagcactggcccttttttcatgatcttgacttgttatagggactgccgtgccaattgttctgcagactggaggagtttattactatctaaacatagaactgatttgctgagaaaaaaaaaaaaaatcaagctgaattcaaccaagtagttcttttaaacataattagtaacttagcagaattcaaccggggttttttatttaagctgttctctgtatgtaaggaaaacttctgaagctagtttaaaaaaaaaagattgagggggggctaaactgtaaaaaactcacagaggccagagtacaaggtggccatgtgaagacatacagagattttaactactggaataaggcacagctatctgagctgggtgggtaaatcagagggtcacagtccagcatttcttgtgtcactgtaactgctttgaagtcttagactggtgactttgacacacacatacccatactattgggaagggtcctttgttaattctaccgggattttccccgaggttatcaatctgaaattaagccctccaaatcagtctgaagctgagcttttccatactctttagatcaaattttaattgaactgtgacctcatctctatcctcaattatgaagctaaagagcatgtcagccaggctactaggacatcccttagaatctgtgagattatgtgtattgaaaccagaaagctaatccaaatgaactgggaaaggcagttacaggaagaagagacagttgattctttcatctattttcgagccccaaagtaaactctggcaattaagtcataccctaggccatgcattacagctgtagagtgtcatttcccaaaaagaatacagaaactggagacaagttggagggaaatgagaaacccatcactcaccttgattggtaacattacctactaaatattgttacgtaacgggtatctatatatatatgatatatatattttaaaatagggtgtgtgtgtatgtgtatgtatgtatgtaagatatataccttattagggagttaagtttccttggcagaggaaaaccatgtattcagtcccaatctaagctctgtttggattcttggaagtgaacctcaggatacttccaagctaaaattaaaaaacaatccaagttcgttttcatgacttatgccctccagggccactcgaattcccagtgtcttcatgctttctctaactcccaccatccaaatctgcttttaacagttttgataattcctcttctattaggatgagaggagatgaaccgagtgttttggtgcttttctgatgccctattgcagtgaatagtattcaaatgtcaatcccctcttcccccatgggcttcacaattacaagtaagtgataacaattaattactttgcttttggagtcttaggtatagaaacacatttccattccacatggacttgggaatgcttcactccatgcctgggtattttgaactttcagcaatcctgcatacaaaaaaagataaggggcattaacagatttggattaatcatgttaaatgggttattactatccaaaagaaactgaggggttttttgttggtattctcacagatttacatttctgtaacatatcttcaagtagttttctaatctagctatttccttccaaagccattcatagaaatagaactctcttaccttcaggcaaaccttacataaagccagtcttgaattttctctggagcttgtaggcaatgaagagttttgctaagtgtctttatcagaacagctttctgtgttccagaagacatttggtgaagacagttaatttgttttcctttccagaggagaatgttccattaatcattctaagaagccaagctgattgctctgttacgttaaggtcacagtattcttgttaacatgacccacacaatacttctgtgtcttagaacaggggtttttttttttcttatggcagacttaacggcatggaagcagtaagtgacagactcaaacacagtacacatgtacaagtacgcgtgtgcacacacacacacacacacaaacacacagagtagccaaagcacattttgtggaagaaatattatcacattgcattgcaggagacgagctgtgttaaatcctcaaatacttctcatttattaaacaagtaactatttctctccctgctgggctccagataggctatcaaaagatttcacgatcaatacctagatacatagttactgctctaattattttaatgagtgaatttaaatcttgcataggttctttttattcaaaatgtgatccacaggccctcagcatcagcatcatctggaagtttgtaagagatatatagtctcagccctaaccccagaccaaatgaatcagaatctgcattttaacaagagtctctttgattcaagtgcacataaaagtttggcacatagtgggcaagatcaattacttcaaacttatttgccccaactcacaatgagaaagaaattttacattgcaacccagtgtgcgtgtacacacacacgaaacaaaagtttataaaacaatatttatgtgatgcagtctgatagttcctgatattaccactgaatttcaaaaatttcagtggtaacaggtaaaatgattctactacacacaaataagtttacaatcctcagtttcaaaaatacttctaaagcaaagtttctcgtctttggcaccactgacattttgagtcagataattctttgttgtagagtgctagtctgtgtattaaaggatgttgagcagcatccctggtttctactctagacaccagtagcagccactgtccttctcaaaatgaagaaaatgtctccagatatggccaaatttcccctggggggcaaaatcatccccatttgagaaccactgatctgcacgaactagaaaagaggttaccactaaaagtatacaggtagcccttcctctctggatgtaatacagccccctgccactgccatcatcacacaaaaacgcgatgagtatgatgtagcaacaacaaagtcgagcttaggaattgttaaaatgattactcaagaagtccatgtgtccatctgggagttagcttgggagcctttgccagtctctgaaggagattatgtttggaggactccatgcaatgatgggaaaagcttgttagacatccaggaccctcttctcccctgactgtatccagagtagtcccacttagagccaaaagaaggaactggaacagcacgttagatcagcaatacagcttcccactttggcctcccttgattacttctctttcctttcctttttatagttccacccggacctcaatttaaaaaaaaaaaaaaaaaaaagtcttgcttccaccaggtggctgcaagttatttttgtgtgtccaaaaacctgaaaagaaggctcaacttaaatacttcattcattccaaattcccaattcagaagagaacagttaacagcctcctgttcttctgttaaactcctgctgagttgactaaaaatccagttaatagagtctagtgatttgcctccagtgtgaatattcctgtatcaaaaggcttacaatgatagtgtcacttgccatattgggctgccttgactgcctttggcagaattttccattctgaccatccctggactaaagccagttataccaacaaagctccaggtcttgcccaggatgggagtattattaattaacagatctgtatgccaaccaaggtataaagcccctctcattatttgtgtagaaaaaaagattttttttttagaaaagaacaaataatatgtaaagtaagcaaagttaaatgcatgagttgctttctagtgaaatttctttaaaatcatcttttaaggaagagaaatatcactcccttttgttcagaaaattcattctttgccctaggaaatcatcctgttaaagagaaaagactcagttattaggtgcttcattagtttggggaactctgagttagtgcttctaccggggggtgatttttgtcccacagaggacttttaaccatgtctggagacattcctggttgctacaactcgggggttgggggcatgttactggcatctagcaagcagaggccagtgctgaacctcctgtagtgcacaggacagcccctacagtaaaggatgatccagctcaaaatagcaatagtgtagagagattgaaaaaccatgctctagatgatacttccactgacacaaatcatttgtctttagtgaatggattatttgagtttaaatcatgagcatgatctgtgggactccagtgactgtctctaaaggatattctacctggtagatatctcgggaactcgtctcagaaatccttttgacaagcttcatccaaaaacatgtttttaggagctaaaaaataaaaagcaattattaacacctaattttgccaacttgaacttaacactcacccatctatagttcccatggagcattaatgcttcaacaaaaactcagatcttgtcagttcaatgagtcactacagcctccttctactgaaaggtgccctgtcaacttttcttttttttttttttttgatacggagtctcgctctgtcacccaggctggagtgtagtggcgcaatctctgctcaccacaagctctgcctcctgtgttcacgccattctcctgcctcagcctccctagtagctgggactataggcgcctgccaccatgcccagctaattttttttttttttgtatttttagtagagacagggtttcatcgtgttagccagtatggtctcgatctcctgacctcatgatctgcccccctcggcctcccaaagtgctgggattacaggagtgagccaccatgcctgaccgccctgtcaacttttcaagggacttgtttctttatatcgagcagatgttaggagcataggctttgcagtcagacatttctaagtttaattcctgggtctgccacttactagctgtgtgacatcgggtaagctactttaccctctccaagactcaattttcttttctgtaaaaaaagtggataaaaacagtaggtagctttttgaattaggaggactaaatgaggcgatgcctctaaagcacaaaccacagtgcatggcacatagaaatgactccatgaatatctcttcttattgttgtcgtcatcagtagtggtagtggtgtaaaaaaccaacacacggccgggcgcggtggctcacgcctgtaatcccagcactttgggaggccaaggcgggtggatcacgagatcaggagattgagaccatcctggccaacatggtgaaacctcatctctactaaaaatacaaaaattagctgagcatggcagcgcatgcctgtaatcccagctactccagaggctgaagcaggagaattgcttgaacctgggaggtggaggttgcagtaagccgagatcgtgccactgtactccagcctggcgacaaagctagactctatctaaaaaaataaataaataaaaaacaacacacaccccacaccctttcctaatactaaggtaggctttgcagcggagagaaaagtagcgatacattccacaccaacagggatctttaccagtgatgaaatgatcagaaaacatgatagcaagtagcagagagctcagttgtgccacagtatcgctaaaggaaatctttcttagactaaagtaatatcccagtgagatggaagcctcaaagaaggtgccccaggaggcaggactgggcttaatctacagatgtccaggatttggggaggcgaaagaggcaggagtctatgcttaggcactaagcaaggaaacattattgcttcctttgggagtgtccctgacttaccaacactgtatcttcattagccttaacagagcttctccttggaaatattctttcagaaattacactattcacttttaaacaaaggatggcttcaacccagttatgatgactccaatctaggcatgtaggtacctgctttgtaggcattcgctgctcgagaaacttgagggctaaattctttttatatgcgtgtaattttgtcttttaatgtttgcttcttaaccaggggtatgcatcagaactacatatgtacttttttattttaaaaatgtactcattccagttgtacattaaatattctgattcagtagatctaaggtagggattagacatctgtttttaaaataagttccgagagtttaatctggtcaagaaccactaatttagagcagtggttctccattgtgggtgattttgtcccctacagcacatttggaaatgtctggagacatttttgattggtggcgggagggtgctactggcatctaatggataggcggtgaacatactaccatgaacaagacagcccccccataacaaataattatctgcaaaaatgtcaatagtgctgaggtggctgaaccctgactctaaggataaaagatactgaaatacatgtttatttctgttaatacccttcctactttgtatcttacaagacttcataactttatttattctgtagcaacactgtggagagatgggaagagatagtattattttcattttaagacaggaaacctgaggtccaaaatgaacttgcccagatcctcagggccctttcttctgaaactatggtattttcatccccacctctgagagcactgttattgtctacctaattcaccactagtgtccggcatatgtaagccttcaataaccatttgttaaataggtattgatgacttcctagccctgatagtatcttgtgtagtttgtcaggtatattttcggtttccaattctaactcaaaaacatgaattaagtccttaaagaatctcactgtggatttttgcaattgtcagttgattttttgtaagccttgaaaatatagtattctggttcatgtaatgggtaatgaatcgctttggcccatttgattttttggtgaatttgaagattcattggaaaaccttttctgtttcgacaacttttgaaacaattttgtaaatgttttagttctgttttccaccttattgagcatctgaagccaagtctaatgctctgggtcaagacactttagaactcttgcttcacactacttaaccccaggtgtcactatccagtctcaaagatgttaaaagagtgaattatcaggccaggcgcggtggctcatgcctgtagtaccagcactttgggaggccgaggcaggcaaatcacgaggtcaggagatcgagaccatcctggctaacacggtaaaaccccatctctactaaaaatacaaaaagttagctgggagtgatggcacacacctgtagccccacctactcgggaggctgaggcaggagaatcacttgaacccaggaggcggaggttgcagtgagctgagatcgtgccactgcactccaacctgggtgacagagtgagactccgtctcaaaaaaaaaaagtgaattatccagaattgcactgcgagtaagttccccaactctggatacagtgctctttctgccatactctgtgcctctagaagatggggctacagtgtttgtcagcccaaagcacattctgaaagctgctcttttgatacaaatcccaaagagggcttttagggagagaaaaaaaggcagcattctcctaagaggaaaacacgaggaaagattccaattaattgaagtttctaataaatggctgtttaataataacaattataacatttatttagagttttctaaatgtatattttcctgactgtacattagagatagcagcaccatcttgttaaatgtgttatttcttttaaatcctcttagcagccctaggatataggaaccttcgtgatctccatgttacaggtattgaggccaatgagagccaatattcactgggcactatgtaccaggtactgttctaggcacttaagtgtaataatgcatgtaattttcatgatctccttgtgaggtaggtttttatagatgaagaaattggtttactgagtggcaaactgacttcggcaaattcagaagcctggaaaatagtcctagatccaacctctttctttctgaccacaagaatagccatgtaactataatatcttaggcaaaaactttacactattcaaatatgtgcttcctacccctaaaagcccccactatactgagtgctatgtgtcccaaattcatccactggggttcttactgtaatcactatttccctcatggatcaccgcaggatataagacagaaattgtgattctatgaccctctagctagaacgtggcttattagtcacagcttgtccactaacaatgatgggtgttgcatagctaatcagagagaccccttaatgaaaattcaaccccattagggcaggtcttttcgtgaatgtggggacattgtcactggactcaagctctatgaataccagcagaccctggtcctaaaatgatcccagaaagcacttctgtaacccacttcagggtgataccccatcctcagctgaaagagactacagcgcagtagggaatcttgcataccatatatgcttcaaaatccacttctacctaggcctaactaaggggtaggtctcagctttcagtctatctctccctctgtgttctaagatcttttatcccataagaataaagttttgtggtttatttggggggtaaaatgttggtaacacaatagcattacatcccagacagttaataaatggtttagggtagcagcttaagttccttaagcaaagcttgacacagtggtattattaaataacaatgctcaagattttccaatgaggtactgttgactcttttaacctacctacatagctaagttttcaatggcactatgaggtttcacagattagcaatactttatggaaaggggaggtgagtaatcgacagttatagaataacatggttatacaatctgtgcataatacaaatggagttgcaactaaatcattacgtggtcattatccaataatgcctaagatgtcagcaatgtgaaaatttgagatcaggtatcaccaaagtcctttcttgatttatttctaaccaaagcttacactaaacaatgtgacaaggtgatgaaagagaaaaaaagtaaggaaggaaaagaaaagaggaaagaaagaaaagaaagagaaaggaaggaagaaaggagaaaagaaaaaaagggagttgttttttctcttgaaactttaaagagctttcccgatagatcgtcagctgttagccaactcttgaaagtggcaaatcccttggccattggaaagtggcctatatgcattgtttctaaagagtttgtttattcaaaatatgtctggttttggcattcaggttgggggctcaggggcagtggctgaggtcagcactgcgtaccgtttaatgaagctcactcttgcctgtggtttctgaacaccatcaaatagtggtaactgaggcagaagggtaagtggatgtggacgtgagggaattcttgtaaaggctccccacttggcttacacagaattagagaaatggaggcctgcttgcatttgttggtgcacattagaaataaatttgggcattcaacttaaagaactcgctaacgacaagatgcacaaagaaatgctattatgtatttagcacagtctttgtaagcttagccaggcaaggaggcttatcaaaagaaatatgtaaataacacaacctgctttacaaaggaaaaaagaataaaattaatccaagacattcgtggcgtaatactattttctgccctcggcttttctttttataacttgagacatgcagcctaacagtccagcacaaacaatagcacactccaaaaaaacccagacccggggcatccctccatccctaggaaagaactccaaatgcgtctccagcctcacacacaatattattatgaaatctgacattgtcatagccaaatccttggcttgggcaaagtccccccttccccctcctttggggggaaaagggggaagcgtcaggaggggtgggggaacgaagccaatcaaagttaaaataaagtctctttctagcaagactactgtctataacatgttgttccttatagaaagtgggatatggtggcatttgcttgattaacttgctcgacaaaagtgacagctgctgtgggtgcatgcggataagctgcacggcgcagttccgcctttgtacatctgtcagcaaaaagggaagaataaagagtgaaaagagacaaattggtcccaaaagacactccattcaacttaggaggtttgccccattcaggcgctcgctgtgcgcctcaagtactgagagcttattcaatttcattcactctttcgaatgaacccacaagtgtttaatttcttattctgtcacctcaaaagggtggggggtgtggggaggaagggggagggagccttgtggacgagaagcattgacggcaaggcagagtgatccgggcctcacgtattaactcatggctaatttatgatttaactctctgtgctcaggccctagacccatctgaacacttcaatgggggacctgacgcagacttcttacctcctggctggtggatcccaaaccatctgtagctgtcgagggcacccagcatgttgaatgtgtatcttgtataaggacaatggtctgaggtttgtgccttttacagaaatgagatggctggctccccagggtaaggtttgggtaagtgatctggcaagtgtggtgtgtgtgtgtgcgtgtgtgtgtgtgtgtgtgtgtgtgtgtgtgtgtgttcgttctccctcccataaagagaaaaaaaatagagtcatatgcagtgagaagtagaaagaggagaatacggtttcctgagagtaaaaataaagcaagaggaaagggcgccattggaggcagaacccagctgtacatggtgaaaacacatgttaacttttaaaaagcagcactttgtctttattttcctcattcctgggccccaggcatcagaacctgttttctagactcccttaattgggcagttgctatggacacccaaatattccctcctaggagatcaagatgccctctccatccacctgtgctgcctgccatgctctccccaatctgctgccatcttccctcctccagccttcatgccactctgccttctcttctgaaacccaacacccctcccagctcctggaccaccatctgaatattgtccctgcacccagtccttgtatgttgactgctttttggaaaccactcaatgccatatccagctcctaaaaagatcatgttcttcccttatgagaaatcattccccaaagagctcatgttcattgaattgaaatagatctagtttcaaaactgtctagaggactttggaaagtgttcttaacccagttagagttgttgggtcttattgtcttcaaattctaggattccagacagtaccttttagatggtatatttgtgtcctttcactatctgcttggaaaccagctgtgtggtttaatgtaaagcattccatttacctattcacctgaatttttttccatgtaatagcctggaaattatgtacatacatagaccatgcttttgtatgttgagagtaatgatgaaaaccacctcagcccgggaaagcaactccctaaagtcaatttgaattttcctaagtaagaacttcaactttggctcacaaaactctaatgattcatgactctagaaagtttaatgtgtgcaaattatgaaattagccctaatatgattagccaaccctgttttaagacggcagagttggcactccactttatctttccgttctgtacatgagttactatccttattttagagtatgatttctataatcatttctatatggtatgcaaatttcttattcagttgcttacgtcaatctgcttgcgaattaatgcagttcactctaaatgcagttcccatacctaagaagcgatcaggggagtgggcagatgctgttcgtgaacaatctgaattcagttcatacgctgaatccttctcctacatcttaagttcttgtatgcatatcagagaatagttttcagataaattattcgcactgctcacaaggataatgggtggtaggatgtgccaccaaaactggaattttctttttgacataatcaagctttaaaagattgagacgacttgaaagtgcaaattcagattgtaactatacattttctcaaaacagtaagttcctttgagaggatggaggctaaaggcatgggggtccattttctcagtgcacagggaggcctatgaataaatcccccaacatatccagagaaaaataggccctaggaaaaaggtattgttaacagtggtcagtttgttaatgcccaaactgcacacctgccctgggagacacaggtggcagacaaggcctggttagaagctgattggggcttaatcacattgggctcattatttatgtatcttgaagaaagaaatggtcggaactgagaaattcaggtacataagagagccattccttttctcttacatatcacagtttcccggtttgcttgcagaaagtaaggtgtcagcttctgatgtttgctacaaaaattttctatgtaagtgtcacaaaatcgagttttcctgattttgctgtgatatgtcctgctgttgagccaggggtattagagcagctggtgtctggcccatgttccatttttcattcagggtttgaccattggttacatttttatttaatttcttagacattccgcagtttcagaagttctgttgtgcacaggcaagcacagatctaattttgacatctaagttagattctttctttcaaggcaggagggccttggaggctaatcaaaagagatagaggggggaaggtatattttgatatttgggcaccttgagttcaaaggtgggagggttttgaaggtttttgccttgctcttcatttaagttgatattaatagggcattcatgtagttatagaaaacattatttatcagccgggcttggtggctcacacctataatgccagcactttgggaggctgaggctggtggatcacttgagctcagaagtttgagaccagactgggcaatatggcgaaatcccatctctacaaaaaaataccaaaaaaaaaaaaaaaaaaaaaaatagggcatggtgttgcatacctgtagtcccaactacttggggtgctgaggcaggaggatcacttaagcctgggaggttgaggctgctttaagctgagattgccactgcactccagcctgggtgacaaagtaagaccctgtctcaaaaaaaaaaaaaaaaaaaagagagaaaaaagaaaagaaaaagaaaacatgtaacccatgggcttcccaatctctgaaggctcagaaacaggaaaaatacaataaaaattaaaagccaatttattacatatgaaattacatttccttttcttcctttttcatagagaacaaattcatataaatattatatactatagaaatgtaaaataggatttaacaagtcattacttcttaaggttgttaggagaagtaaatgagtttaagtcatatacactgcttagaatagtgcccgatatataataagtgctcactaaatattttcttttcttttcttttctttttttaagatactaggatctcacttgttgcccaggctggccttaaattcctgggttctagtgatcctcccgcctcaaactcccaagtagctgagactataggcacatgtcattgttctctgcctacttttattattattattgctaggtttttttttgtttgtttgtttgttttagagacagtttcacttcgtcacccaggctggagtgcagtggtgcaatcatagctcacctcagccttggaactcctgacctatagtgatcctcctgcctcagcctcccaaagtgctgggattacagctgtgagtcattgcaatattattaatgtcactatagaacttttttccaaatcagattcaatgagacataaacatcctgagagaatttaatgggtggctcatgaagaatagttcttctgttctggccaggtgcagtggctcacgcctttaatcccaacactttgggaggccgaggcaggtggatcacttgagaccaggagttcaagaccagcctggccaacatagcaaaaccccatctctactaaaaatacaaaaattagccaggtggggtggcacacacctgtaatcccagcaactcaggaggctgaagcctgagaatcgcttgaacctgggaggcagaggctgcagtgagccgagattgcaccactgcactccaccctgggcgtcagagcaagacagtctcaaaaaaaaaaaaaaaaaaaaaaaaaaaagagtaaaagaaaaatagttattgtgttaagtacatttggaaaaacacaaagttaaacggacttctctactacagaacttctcagagcgtttaatatgctaatgtggcacaacaaatcagaatcaccaatagtgttcagacagagtacagcatagagtatgcacacatgtattcacatatacattcacaggccagtgaaaaatgcgaagctagaaaaatgtatgcttagctgggcacggtggtgcacgcctgtagtcccagctacttgggaggctgaggtgggaggatcacctgagcccagggaggttgaggctgcagtgagccgtgatcgcgccactccactccagcctgggtaacagcagcctgggtgatgacagagtaagaccctgtctcagaaaaaaaaaaaaagtatattaatgtcacctttaattcctttttaaaacttagagttaaatccctctgagtagtcattttgtcctgtctgtgtttagcccactgaaatgataaaatagcaatggtcccccaggaagaacctccagttttcctcctaccaatctttgagagaccatagctggagacctgagtgggaaacataacttttcctgcagctgggaggctgctggtctctgatgtacacatgttcttttctttttattgggcattgttcggtgtcttcatgtttttgaaggcgtttcacagcctcaaatccataaacttcagaaccacctcagattcaaaaggtgaaaaggcccttactcaaaatttcaaaacaagttcttattctagacaaagagaggagtcgactctatttggagctttccagtccaagtatatgtcaccgtttaaataaataaaaagacacaaactgtctggattggtttagctgggctgggagccctgtgataagaggtcactggtgtgagttactatggtaattgagtagtatcagcaatagttttgctctcatgagcattaaagcacataataataggcaaacaacagtggttaaagcaagcaggtaggattactatgttcttttgtcagaagtatataatgtcttgtagtcagttttaaagacttctcaacccccaaatccaccccaccgtcacctgctgagtaattttgtgtgcttaatctcctgccctcaactccaagctctctgctaatttgaggcaaatgggtatttctgacattaaatagggcagcaaggaagctctgacctagaaaacccgcattctgaagcactgagaaaaatattctttcaaacaattttgttaagactcttttgaatgacgagggaaaaagaaaaatagctttcactgaaacaggaggttgcagcctcccaaggaagggtattttgcagaacaagaaaaaaggaaagaaaaaagaaagaaagagaaacttgcagagcatccccactcccaacttcccccataaaacttgtcacttcgcattgccatccgctaccccaacaataatcactccgtgcctattgctaattgcaagcacagctgaggcccagcggggaacccttgcacagtctcaggcctttatacgaggctcaatctgttgtatggcacttgttcacacacaaaaaaactaccagcaaaggcagaaagaggcagagtcacaggtttcttgtaatccctctgcctccccgctgacagcccagccctagaagcattcctggttttgtcctcctctttacaaaatctgaagtgaccttaagctacgagcatgtcagcttttgaatgtcgagttgccggcttcttcaggtgcattaaggagttgggggggtgggggctacatctggcttctgcgtgtctgtttgcagcacccctggggcgagctgtggcttcctgtaacatgtaaaatatgagtgtgaactcagggttcatggcaaggaacaggaggtcatgcctccattcagttctaagtaaagaaactgggagtttgcagatgtttttctgtatgtgtaatgacaccaaccccctccccagccaccgagcaaccgagcgccgttttttgataaaatgtgccacaatcagtgtgctacttgcagatttattcatatcaatttttgcaatttatatattcagagacaagattgctatttcggcaactttatgttggatgtcgtacgtgtgcgtgtagagaaagagggaaagaagtatggggcggggagggtgggcagagaaagaaaagaaattaagcctgtgcctcgggccaccagctggggtgttgtcaaggagacaaagcatcagacgggagggtctgtgtcccgcttttgcccagcggtcacttcctgcccagacttggagctgggatatctattgcttctggcccagaggaaggcccatgaatggctactttgaggggagagtgggtttgggggggttgggaacaatcccccagtagacaaggcccaggccacttgaagaaaggccttcccgtcctccctggaggtcaagaacaggtaggcccgagaagagttttgatgtggcctctatttgggcctagtggggggctcccagcccttccttcccaccttgccaccctctgagatgagaagggaattaagcctcctgcaaaattcccacttgcagaaatttctattcccagaccccaaagcctcacactgtattttcaccaacagaagacattggttgggcgaacagggagattaatcctcccaagcctggagaataaatgctcctcagtggggcagtgttaattgctgagcttggtgcaaagatcattttgaggcatttaagaaatacatgatttttattagtataactgttccacgtaggagttatttttcagcaaagggcaaaagctttgcctgccttgcattattagcctaattctacttaattgtttcctaaaataagggcttcctgaacacacattccaaaccttaataagtctgttgtggtgggagtgattctggatggagagctgttgcccttttgggcaactggggtctcagggctgagtattgcttgagcagatctggcttgaaaaattggagcgggggctggtggataagggacaggggagtctctgtgaaaacatatgaggtgatgtggttcacggtgtaaaaaaatgcatccttttcttgttgtttggatccagtcctctatgaggattctcagttctcatctctgggcttcatttaattctatttcacagatttagaaatgttggccccgtggcatgttttaaataaaccaaataaatgactgagcaaatgctaccagatttgttctttgttcttcataatctcaaaattctgtggagccttgagagcttgagaaattgcctcagtcctgggattaaatgaaatgactacactcatcttacaaagatttttttttttttttttaaagtatgtttgggtgtgccagattagaatatgtacattgctacatatctgttctttcttaggcaaagtttcgttttaagtatgggaagtgatttttatttcccatctttcttttaattgtcataaaatcacataacaaaaaatgtactgtcttaaccatctctaagtgtacagttcaatagtattatatagattcacagtgttatgcaaccgatctgtagacgtcgtttcatcttgcaaaactgaaactctcacccattaaacaactcccatttacccctccccttagcccctggtaacactgttctactttctgactgttctagatacctcatataagtggaatcatacagtttttatcttttcgtgactgacttatttcatttagcataatatcttcaagggttatctatattgtagcatgtgacaggatttccttcctttttaaggctgaataatattccattgtatgtatataccccattttgtttacccactcatcctctgatggacacttgggttgcttctaccttccagctattgtgaataaagctgctatgaacatcaatgtgggcgtatctcttctagatcctactttcaatgtttttgcatctatactcaaaagttccacttttgagtaagtataatggtacttactcaggttgtggaaaccggaaaagtggtatttgcttttgggttggaggtagtattcctaactgaaaattcacatcagtgcctctgctttcccatcttgtgccttcgtgtctttaagttggtatcaatgagttgaactttggcttagttttctcctttgaagatggtacaccatttccagcaatatcttatgattattaggaaagatagcctttctgagaccatcacacctcctcactgatgaccacccgccatattgaaaagtgggattgggtaggataaagggggattttgtgacttgttgggttttagacaatcagattgattcagaagcaacatacttacttgtattctggctttggctagctaaaaattccccactagatgtgtcttccagagagagacccctagatagttcatataagctaagctttggattaaactcccctgcttgatttgcttttagaaaggatccttctggactcttgcctccccttgaaatttcccccatgcaacaggactgacttgggttagaaggctgaaatgcattaagtcgggagtctacttgtggattcatccctttaatcattcgttagaaattttgatgctaaagaattacttattacacattttacagagttggaatttggtcattaatagataactgcttatcttaataaaaaatcaagatatttgggaccttcctaagggagttgaaataatgctcccaaatgttaaatcccttataccttcccacagaagcagcaaatattttaagcagtaataatttaaatatatcttttaaattattatgtcttttgcattatctcttcctaatgagaaaaggctaaaggcaaaagaggagctgaattctctcagcagcaggttatagaaagccatagtctctgaaactggttgtagcacgttgtctcagactcctccgtcagtgagtcctcagggagctgccgtccaaactttaggacccggccatcctgaaaagccacagcactgatagctttgtaaagacttcagtggcatgggttttcaggtatccaaagaattacggacgttaaaaaaaaaaaaaaaaaatcctaccctcaactaaaaatgacacttagggcagctgagaaggtcattctgattatctgtaccctctgattttggtgtctgtttagagcttcggtgtctgattatagctttggtgtctgattatagctttgtgctgttagctgcgcgtcctgaagctgtgactgggaaatacccatttctaagagcagttgttttgaagggtgaatcctgaattatagcaacactcaagtaaggcagaagattgtatctttcaacggcatactggttcttgaacgcatttggaggatatgcccttttagaaagtatttgttcagcccttgggaagctttgacaaatctggaaacttgctatgaactgcgtgccgtcctttagtgctttgcccacttggcatagacggcttgaacgtgccagggtttctttgtcagaccctctgtgaatctttgattagaacaccaaatacaaccagatccccggtaatcgttagacctgagagacccagggggctgtggaattttggcttaggctaatgaagctacagggactttggtggaagtgtaaagaaaccctgaatgatgcttttcccatgttcttaaattacccaaattgtaaggaagaaatacgcattgaaagcttcaaacataaaatatttcattacagtatttcaatatagcaattgaaataggttgtaggggttttttcccttaaataatagttcacttttgtcaccaaaaacaaaatgaagaacttagtcacatgggcgtggtcaaagtattatcttcctctttgactccttgccaacaaacaaaatgttatttcattagcccctctaggcaagatgctgtgccagtttctctgaggtgtggctgtgttgggttagagaaagggaactttccagagaaaatataaaaatcctccagcattcagttcaaaaacaccgattggttaccaaacagttaccaaattgcctgcttgctcaggcatttttagaaaaacagaagctgctcaaaaaggtggggtttgtttgtttgtttgtttgttttttcagagacaggggtttgctctgttccccaggctggagtacagtggcacaatcatagcactggaaccccaaacccctgggctcaagcaaccctcccacctcagcctcctgagtagctaggactacaggcacacaccaccatacttggctaatttttaaattttttgtagagacggtgtctcactgtgttgctcaggctggtctcaaactcctggcttcaggtgatcctcccactttagcctcccaaagtgctgggattacaggcactgtgagccactgtgcttggcctgctgctcagaaagttttgtacaaccctgagtagttcacactcaaggagttgtgatttcttatttgggaagcaggttaggacaacatggctcagataataatacccagtacttaggatgtgcctggcactgttataagcactcagcacctaaataactcatttaatcctaagtaggttttattattatctccacttaccagatgaaaaaactgaggcacagcggtgttaggaatttgtcaggatccaaacacaagtggtctgagtcacgtgcattttcttagccacaggttgcactgcctctcagaattttaagtcgatgttccatctcttgctagctgctagaccactttacttctgagtctcagtttcctcatctgtgaagtgaaactatggatgatgataaagattcagccacagcactgtttagaatttagacatgaactgcccaggcatttaatgctttgctttcctaatatagatggcttgaacatgccagtttcaaaggaatacatgtttagaaaagaactaacaatagaactcagttcctagtggatttcaactatcactcaggatggagatatattggactgagtcacaagttttcaatcaaagaaggtgtgtgaaggtgtgtgtttctgcatggtatggttatttgttcttaggccattatttttttaaagagctcatttttatgatattgggtgaaatatttccctcacttacaggcatggggtaacatatcttgttgggagtatgtgtgtgtgtatatatgtatgtgtgtgtgttgctaaaagtgatttactacagtatgtgtgttatacttcaataaaattttcctgtgaagaaaaaagcaacacaggaagaaccgagtttggattagactattttcactggatttgtgactttgcctaaaattcttctcttctagtgcttcctgatgacatctttaatttcacatgagacagttttttcccctgacatgaaaaggctctaccattttgctctccttattcactaaaaattgtaaagcctatgatatgtaatttttcagaaattttgatcaacgttatagcttttgtatctctaaaactctgttaggaatattcaatcattgtgatgaaggaaacttttctagtttcttccactagcaattgatgagttaccaacctaaaatagaagaggaggtaggatgataggggacaagaaaaattatgtcaatgctagtcaagaaatggtagccttcggactcattcacctttttcttatcatttcccttaagagtcagcaatgattgtctctcatccatcagttcttaaggctgttgagtggttttccatggggatgcccccgagtccccacactctgcttagcaactttctatcttcataaaatgtagaatctttccgacaccaagccaagctcaggctctaagagaaacagtttcaacagcgttgtcctacccacacacttctttgagaacttcaaagctgaatgaatttgctttagggacacctaggactagagctgtttctgtgtaaccaatccattacttctataaagtaccaagttgaatgcaaacaacttttatacagatttagtggtaaataaccaacttgaaacttgtcccaccacttactagttgtgtgaccataggctgcttatgtaacctatctatgcccttttctctcatctacaaagcaagactgttaatagtatcaacatcttgagttcaagtcaatgattaaactatataatgcttgtagtatatttcgtgtagtgcctgaacattataagggctccatgttcaatgagtaggcaactattcttatgaattgtacatgcacgtgagtgcatatgggtgtatattaggaatcctgtacaaaatagtactttgctgaaaacagtagactctaaagtcctacggagttgtctggtctgacaggggtttgtgtaagttaaagggataaattactcttgtgacaattgagtatgaaaatacagtcagtggttctatctcctctcagccactactccttgtttccactgccactcatctgtgatatatggcttgttctgaaaacaaatgtaccattaacagtaatgtctttgtaggatatcaaattaacatcaagatgttgggggtcaggaattaagactcatgtaaatgagagtggctatcatgacagaagacataaccgcagtagcaatcattgtagcaacactctatatagctgattagatagtatccagagttaaatgaaagcccattttctgtgaatcctataatgtccagtaaggtgttaattacccatcttctgtctcaagcctaatcccttccagggggtaaagtttccaggggaacagtgaacccaagagcagggctaggaagaggtaagtgagcaacttttctatcacaaaatttaagggagaaccaaaaaatatagtaaccaagataaataacattttaatacaacatttttataaaatcaaaattagtgcaaaaaatccatgatgactgaaatatcaaaattttcattaaagacaagatctgatcctgcacttgtacaaccctgccctactccctcaccctaatcctggccttggtgaacccgaatgttagagaataaatattttatgtttaaggatttctctacatgaagtcagtatgtttgcagggcagaatgggtgacccaagtgtatctgcatattaatgatctaagcttcttactagaaagggaggatcaaaaaaatgtctttctgtcacatattgaaagtatgtccatgggccaggggcagtggctcacacctgtaatcccagcactttgggaagccaagatgggcagatcacctgaggtcaggggttcaagaccagcctggccaacatggcaaaaccccatctctagtaaaagtacaaaaaattagccggacatggtggcttgtacctgtagtcccagctactcaggaggctgaggcaggagaatcacttgaacctgggagacagaggttgcagtgagccaagatcatgccactgcactccagcctgaacacagagcaagactctgtctcaaaaaaagaaaaacaaacaaaaagaaagtatatccatgatgtttctgagaggaataacaacagtgggtaaattttattgagtccttactatgtgacactcactctgctaggccctccacatacatgatttcttttaatgctcacagtaatcccatgaagagagtactggtattaaccccaaaaggagactgaggatcagagaattaagtaatttccttgaggttacccagctaataagtagccagtgtaaggtgaagctgtaactcaccccacagggtttgagaaatcactcattctgtgtctgaatctttttaattcaagacgtaaatctaggtcaatatagtttaaaatgtgctttatgaacccaaagtttgggtgatgatctaccagaaaaaactttacaacacaattgcatggttaaggggctacttgtgtgtcctataaggcatgcatacaattccagaaatattccaatgggaataattttcttcaccaccacatgactttccctggtaacgtgttccactttctcccttgtttttgggaatcttttaggttgagagagggagagaaaaaagagaagaaagatgatgatgatgatgatgatgatgatgatgttgattgcagtggtggaggtggtggtagctaacatttattgaggccttatcatgtgccaaatgctgttgtgagtgctttatgagcatgatttcatttacccatcagaaaaagcctataaaaggctagttagtccccattttcatcaggaaaccgagtctctgagaacataagtaacttgcccaagatcacaaacccaggtggatgttagagcctgtgctcttaaccactacactgtagaaagaagaattaagtggcaaatttttagataagccttccagcttcttttaaatagagccttcagatccagttcagctgctgaagaagttcccacctttccaagggccctgttgtctatgatgggcatccttttgggtgacaagttcaaaaccttcacagaattttccccagagggcatattttaaaggtgcccaggctgttgggggctttatttctttagtgctgtgttttaggattaaagtagctttatttagcaagtttcaaattaatatatttgaattaaagggaggcagtaaaggagtagaaattatacttaaatacttagtacatgtcgtcagcccacaattcttatttctacagacttagagtatattttaccgaaaagttagtgcccaggtgttagggtagctctggaaaaggcatatctgaaccaaggactaaacaaaatagggagcacttaaaatattttattaatttcctcctttgaagatcataacaaatctgctgcattcccatccatctcaaataaagcaaacccgattaataagcactgtgagccccgtgaggaagagcagaacaacccagacaccaaggattgtgctgataaatgtttaatgactggctttctgggagggagaaagccctggtttgtggcatttgccaattcccatgatgaaaaaatcccccacgaaggcctatttctagctatcaatgtgatatccctgaacgcggattcgggaagagatgtgcaagatcggctgtcatgaccggcaaacacactgctccatcccttagggaggaggaacggaagacagtccgctctttcaatgctgtggctatcttggagagctgctgcttccggaggcactcactgtgtgacattggcaagtcacttcacctctctgggcctttgtttcctcctctacaacagataacgtggaagatcccctgtacctctaacattttaaagttctagaaggcattgcctcctgttttttccgacatccaaatgccttgaagcgcctttctggaaaaccaagttagcactgtgctgcatccaaaagtgcctccaatttcatctcctgagcataaggtttggaaaggagtgacttactcccttttgcctctttaaatgtgtagccaatggggcatcatacattttttacacttcttttgctagatgtgagatccaggaaggaaagcatggatgttccagggctttcttgttctcctggggtgggaggctgcgtgtgatgcactgattcattgctgtatgcaatttctacctccctatcctttcggcagccgagcaagattgttgatagtctcctacctttttatttttatttttattttttactactagaagccatttacaagagtgggaactgcttacataaaatggaggggcggcagggggttgcgttattttatttttttttttttttttcctgaaaggtggcacgtctctcagcaaagagaaaaaggcatgttgcacaaggcttgctggcagtgatataagccagcgccggtttgcctgttgtcacagccaaagcaaaatgccacctctgcctagaagccagagtgccacactcctcttttgtgtccctgagatgtacccctcatgaggccctggaattgtaggtttggccaggagtttgccaggattgctcgaaggtcatcttccaatcccaggaggctgggggtaaggggaggttcatcatagttctcaaaatagatctgttgagccccccccccccagattacatgtcagctacaaccagtaaatgtggaatttgaggcctggggttagcacaagagagccctccagttgccaggagtaaggtagggctgccagaataccagtgacccagtgatcaccctgtccctgggccccttcttaacaagcccagatgcagtgacagcaaaagctccagaatcccaaggcaggaggtgccaaaaacaccccccaacaaccattaccaaaaaaaattttcagtaaaatgttctcacccctagaggggaaaacctgtccatgcctgaagcagcttgaccccagcaaacaccctgcctccatggagtgaactgcaaatctccaaaaaaaaaaaaaaaaaaaaaaatctacttcctacccctcctgctccctggggagggacagaaggttcctaaaactgacagtttcgcctccatgatctttaaaagagcagaagctggctgtgaggctgcagtgctgcctcgattggggtagtgtggtctctgttgcggctgggctccaaggagagccacaattggctctgatgaggaaggagcctagaaatgaaagattgcaaagagggcttctgtacgccatggctgagactgtgtcgtttcttgcaaggtgaaacttggcagttctaccttgcaagtaaaaacctaaattaatttttttaaaagaaattaagtcagaaacaaggcttcggaaaaactgtgagtgttaggcataaactgattttggatgatctttaggtgagaaagggtggagttaccatcagaaacatgtttttatttatgcttttcgaatccccactggtgtgcgatgtgtgtgtgcgcgcgcgtgcatgtgcgtgtgtattggttagcgtgagagtatgcatcatctcaattctctaaccatttctttcttttttgcatcttttctgtgcacagttcatatagatcccctataaataaatatataggtccatccacaccttttcattttatttgtaaattgtttggtataagcggcagagcgtaatgaaacctggtgaagtttaaaagattagattttttttatactgacacttcataacactgttcatatgtctccgagtgagatttatgaatatatgagcagtactgcaaaattatactgcaccagagacttcctgcaccacaggggtggcagtctaaagtgacacagcttcaagcatttttcacagacaagaagcaaaatttaacccccttaaggggaagtatgatttcaacagcttgaaatgagctcatttgtagatggtttttttttctctcatcttccataattttttggtgttaagattaaaacagattgcacagccaatataagggcacataagctgcccagagtacagtttggcccttaaagagaaattttcattcattgtctttatcagcactcctcaatcaggtaaatgaagataaacttgcccctaaattcctaaggctctcagcccaatttccagtattgtacttagcagacagggtgtggaattttcaaacggtaagtggcaaggaacatcaattaatccagtggagaagccctcatctctctggcaccaaagacagtgacattaggaaataattaatgtattgaatataaatggtgtaaaattaaccaataaaaaagagaatcagaagagcaaaagatggtctgtatgaattgaaacataggaaatgtctgtcgtggaagagttcaattagattcgaagtcctaactgtcttagattgtctgtcttggattggtccagtacccagtaccttgcaattttgtataaactaactaacgttcattaaactctatgctctcaaattctctttaaccattttgtttcctcctggaacagagtggggtactcaaacattgcctgctctctctctgccctataaatgctccatgatgtgttggctggagaacttttgtctcttttttcagcaatggtacaacagctccatgaacgtgatctgcacctggttgacggaccggatggacttacagcttcatatttatcagttgaaaacactaattaggatggtaaaggtaaaagaaaagattattattcttctttgcaaatagcttactgaaatatatttcactggcaagctgcaaagcttgcttaacacaaagaatattagtttacatataaaatagtatctcatacaagaaaaacctatgcaattgttttgtgatgcatgataaatgtgttactcagacagcaaagggaaatttaatacaaatgaatttgatatctttttccagagaggaaaaatacttggttttgccatacaaaaatacggcagaggccatcgtgtcctttgcattagactttcaaaaactggcttttggtgtcattatgttaatcacatccattaccaatttcatttatagtttaattaaataaaatgttgccgctattaatttaatagaaatatttacccccagctatttctaaatatgtcctgtgatcattatcagaatgcaaatcaatattgttctcatagttaattgaagtagttcgtcttacaatgcgtgtatacaatcaaatgtaaaggatcacaaaggtgagataacataccctgaaagtagctttttcccttgttcttgtgtgtgcaccttggactaatgataattatttcagcgtgaaatctcagtggtttacatgaaataataagatcacagaagggggtaaatacatttttgatcatttcagtttctatttgatgcttcaccatagagggttttaaaacatttgtatgcaaaaatctcattcaaagcacaaagtcctttaaaatattttaacaataaatgtagctgaatgtctatttcttaacagtttgccaaaagtccctgcaacacccactcctgggcaccccccccccccgcccccaccccgtttcttagtctcttttggatcagcaccatttcactttaccccagtgctgacttacaaccaactgctgttccgttgtgtgtaattaaggagaattattattatctgcatttgatctcacaaagcatccacccgggaaaggttatagacagcagtgtattacagctcttaaaaaacgaatgtatacacttagactatggacccagcctcattttcacatttttttacttcagttccttaggaccagctcaatcgtcaagtggtcgcctgaccacttgaattccattttctgtgcataaatgcactttggggaaattgtctgtttgacccttattgggtagacatgaaaagaagatataattgtcatacttaaaaattatcttcccattatttctatttccagattggtgttggaaattaacaatattttatgaaggaaaaatataagtcagaggggaggtttaatcttagccttttgccaaaacaaaaaaaaaaaaatgtggtatgagccacagagaagggatatagaaaagtcactgccaaaggaaccccttcactttagcaaaaagtgggttcagcttaactaatgccacaactcagagctatgaagcagaattcacaaactttaaaccaagaacatcacccagaggcctcctcctccagggcaaatttccaaggataattggctttctttcttgcatcaacagccacttcatttattcacccattcatttattattcagcaagcatttatttattcattcaacattggataaatattaggtgggcctctacttgtatattaccagatggaggattcagaaatgactagatgtggtctctgcacttaggcattgagagtctagttggtatacacgttgctatggaatttgaataaaagggagaatgctcaaatgctttttacctttattttcccccatcatattctggcaacaattatgttattctaagtggcaacagaacaaatgattgaaaagtacaaaaatttaagttaattgtgtagatatctggcccacaccatgcctaacatttattcagtctcttacccgtccccatcaaagtgaaaacacagttcaggtagctgtctagcttcctcctctcagcaagacttgcaggttgatgcatgattgaggataaccttataatttaatgtcaaaccagattacttttttgttattggacttcagtaagctgaactgggttcactcattaactctgtagtcattacaacatgtgaccttcaagaggggttgacattgtgattgttgctatcatgaccgcattagatggactattaaaaatagaaataatgggccgggcacgatggctcacgcccgtaatctcagcactttgggaggccaaggcgggtggatcacaaggtcaggagatcaagaccatcctggccaacatggtgaaaccctgtctctactaaaaatacaaaaattagttgggcatggtggcgggcacctataatcccagctactcaggaggctgaggcaggagaatcgtttgaacccagggggtggaggttgcagtgagccgagatcgatctgctgcactccagcctgggtgacagagcaagatgccatcttgaaaaaaaaaaaaagaaagaaaaaaaaaaagaaagaatgatgggagtggtgttgacgtatgttagcattccttgtcttgcccctttagcaagtttcctatatcaataggagaaacaaacagcagaatcagtagctgaaatgatatgcagtgtgatgaggagagttgtagttagagaccttttaaaaaaacaaaaaaaaaattacaaagtagacaacagctagatgcttctggtcatattcaattaacactgaaggatttctagaaaaacagtccttgagatacctaaggaaatctgagagaaactgcctgaaggaacaaagaaagaacttgtggtgcagtaataccaagccattgttcttgaaaaagagccaaatttcttccctgagaccataaagttgtgaacagaatagatacagttctttcccaaggagagaagaaatgagtcacatgtctgcaacatattgatgaggcattagcgctccatctttctcataattgccactgcctgtaataggtttcatataccaacatacatatgtctgtcttatgaatgagacagagggatatcagtacagcttatgcagttacaagactcaaaaatactaaaacaagactgcaacagaaatcacaaaataccataatcactcaatccattatttatatattatagccccttcctgtgtctatcatattacattacactaacctaagagaaagaaccagtccacaaaaaggaaccaaaacaattatggaacatttccctttatggaactgaataaacacaagcttatgttctttgctttgtctcatctaatatagtttatcctgtcactatttctcattttctgtcattcaaaggatctcagttttcaatacaagtgaaatctaagcacagtggctttttatttgacaatgcataaagtgtgatatttagctgaaggtcagtgctctcccacccacacctgcttttaccttctccctccccatcatggagatgagatctctcttatcactgtatcttttccttccttagaaaacctacagagatttccgattgcaaggggtcctggactccaccttaaacagcaagacctatgaaacgatccggaaccgtctcactgtggaggaagccacagcatcagtgagtgaaggtgggggactgcagggcatcagcatgaaggacagcgatgaggaagacgaagaagacgattagaccatttggtcctagagtctgctgggacagagtcctgtaatcagtgcatgtccttagtctgttagttaaacccattaggaattttctgtcaactaccatgcccatgagatgtttatcaatacaactgccattttagctatgtggtaccaagattagcaaatgaccttcatatccactgatttcctgatgtccatgtctatatgtttacaagcaatatggagcaccattctttaaatactgttcatggagaatacatagtctaaccactaggcgtgtccctgttatcagcaaagatcaatgatgcttcattcatgtactatgtatgcattggtggtaaatggatgtgagggcaagtacatcaagtacattcactctgtttcacgtatgtggatgccagttaattaaatgagtacgtaaataaattaattaaaacacatagatctgctttgtgtttttatttttattttttgaaaaacaaaaggcaagtctccaacaattaacttttgatgctttctgttcccctaaaaccaaaaaatgaaccccttgtgtcgttgttaacccatcctttcatttactcatataattagccaaaaaaaaaaggatggctacataccaatggattgattctcttaattgccacggcaagggggcgatcctatcatgacttaacatcaagcgcgcagttcaaaactactgtcttctgtcaaagttttctcctcttaaatgttattttgcttttacgtctcaactgtgtatgtaaaaaaaacgaatatttaaattacaaccctagactaaaaatgtgtttataataagatgtggatatttccttcagtagattgtaaccataatttaaattattttgttccacactgttttttatatctgtcatgtacattgcattttgatctgtaactgcacaaccctggggtttgctgcagagctatttctttccatgtaaagtagtggatccatcttgcttttgccttatataaagcctacagttatggaagtgtggaaaactgtggcttctcaataaatattcagatgtcctaagaatat

SEQ ID NO: 5 - DNA, 4816 bp, Homo sapiens
agcgagaaggagaaggaagagttggagcggctgcagaaagaggaggaggagaggaagaagaggctgcagctgtatgtgttcgtgatgcgctgcatcgcctacccctttaatgccaagcagcccaccgacatggctcgccggcagcagaagatcagcaaacagcagctgcagacagtcaaggaccggtttcaggctttcctcaatggggaaacccagatcatggctgacgaagccttcatgaacgctgtgcagagttactatgaggtgttcctgaagagcgaccgtgtggcccgcatggttcagagtggaggctgttccgccaacgactcccgggaggtcttcaagaagcacattgagaagagagtgcgcagcctgcctgagattgacggcctcagcaaggagactgtgctgagctcctggatggccaaatttgatgccatctaccgtggagaagaggacccgcggaagcagcaggcccggatgacagccagcgcagcctccgagctgattctgagcaaggagcaactctatgagatgttccagaacattcttgggatcaagaagttcgaacatcagctcctttacaatgcctgccagctggacaatccagatgagcaagcagcccagatcagacgagagctggatggacgtctacaaatggcagaccaaatagccagggaacgcaaatttcccaagtttgtatccaaagaaatggaaaacatgtacattgaggagctgaagtcatctgtcaacctgctcatggccaacttggagagcatgccggtatccaaaggcggggagttcaagctccagaaactcaaacgcagccacaatgcttccatcatcgacatgggcgaggagagtgagaaccagctctccaagtcagatgtcgtgctgtctttctcattggaggtggtaattatggaagtccaaggcctcaaatctttggctccaaatcgcatcgtatattgcacaatggaggtggaaggaggagagaaactacagactgatcaggccgaggcttctaaaccaacctggggcacccagggtgacttctccacaacccatgcactgccagctgtgaaggtgaagctgttcacagagagcacaggcgtcctggcgttggaggacaaggagcttgggcgggttattctccatcccaccccgaacagccccaaacagtcagagtggcacaaaatgacagtctccaaaaactgccccgaccaagatctcaaaatcaaacttgctgtccgaatggataagcctcaaaacatgaagcattctgggtatttatgggccatcggtaagaatgtctggaagagatggaagaaaaggttttttgtattggtgcaggtcagtcagtacacgtttgccatgtgcagttatcgggagaagaaagcggagcctcaggaacttctacaattggatggctacactgtggattacaccgacccccagccaggtttggagggtggccgagccttcttcaatgctgtcaaggagggagacaccgtgatatttgccagtgacgatgaacaagaccgcatcctgtgggtccaggccatgtatcgggccacggggcagtcacacaagcctgtgcccccgacccaagtccagaaactcaacgccaagggaggaaatgtacctcagctggatgcccctatctctcaattttacgcagatagagctcaaaaacatggcatggatgaatttatctcttccaacccctgtaactttgaccacgcttccctctttgagatggtacaacgccttactttggatcacagacttaatgattcctattcttgcctggcaaggctggttcagtcctggccaggtgtttgtactagacgagtattgcgcccgaaatggagtccgggggtgtcaccgacatctctgctacctcagagacttgcttgaacgggcagaaaatggcgccatgatcgaccccacccttcttcactacagctttgccttctgtgcatcccatgtccatgggaacaggcctgatggaattggaactgtgactgttgaagaaaaggaacgttttgaagaaatcaaagagaggctccgagttctgctagaaaatcagattacacattttaggtattgctttccatttggtcgacctgaaggtgctttgaaagctactctctcactcttggaaagggttttgatgaaagatattgttaccccagtgccacaagaggaggtaaaaacagttatccgtaaatgtctggaacaggctgcgttagtcaactattctcggctctcagagtatgccaaaatcgaagaaaatgtaggccggttaatcactcctgccaaaaagcttgaagatacaatacgtcttgctgaactagtcattgaagttcttcagcaaaatgaggagcaccacgcagagccacatgttgataaaggagaagcctttgcgtggtggtcagatttaatggtggagcatgcggagacgttcctgtcactctttgcagtagacatggatgcagccttagaggtgcaacctccagacacatgggacagttttccactatttcagctgctgaatgattttctccgtactgactataatttgtgcaatggaaaatttcacaaacacctgcaagacctgtttgccccacttgttgttagatatgtggatctgatggagtcctcaattgcacaatccattcacaggggctttgagcgggagtcatgggaaccagtcaagagtttaaccagtaacctacccaatgtgaacctacccaatgtgaaccttcccaaagtaccaaatctaccagttaacatccctctaggcatcccacaaatgcctactttttcggcaccgtcatggatggctgctatatatgatgcggataatgggtcaggcacctcagaagatctgttttggaaacttgacgcccttcagaccttcattcgggacctgcactggcctgaagaagagtttggaaagcacctggaacaacggctgaagttgatggcaagtgacatgatcgaatcttgtgtcaaaagaaccaggattgcatttgaagttaagctgcaaaaaaccagtcgatcaacagattttcgagtcccacagtcaatatgcaccatgtttaatgttatggttgatgccaaagctcaatcaacaaaactttgcagcatggaaatgggccaagagcatcaataccattcaaaaatagacgaactaattgaagaaactgttaaagaaatgataacactcttggttgcaaagttcgttactatcttggaaggagtgctggcaaaattatccagatatgacgaagggactttgttttcttcttttctgtcatttaccgtgaaggcagcttccaaatatgtggatgtacctaaacccgggatggacgtggccgacgcctacgtgactttcgtccgccattctcaggatgtcctgcgtgataaggtcaatgaggagatgtacatagaaaggttatttgatcaatggtacaacagctccatgaacgtgatctgcacctggttgacggaccggatggacttacagcttcatatttatcagttgaaaacactaattaggatggtaaagaaaacctacagagatttccgattgcaaggggtcctggactccaccttaaacagcaagacctatgaaacgatccggaaccgtctcactgtggaggaagccacagcatcagtgagtgaaggtgggggactgcagggcatcagcatgaaggacagcgatgaggaagacgaagaagacgattagaccatttggtcctagagtctgctgggacagagtcctgtaatcagtgcatgtccttagtctgttagttaaacccattaggaattttctgtcaactaccatgcccatgagatgtttatcaatacaactgccattttagctatgtggtaccaagattagcaaatgaccttcatatccactgatttcctgatgtccatgtctatatgtttacaagcaatatggagcaccattctttaaatactgttcatggagaatacatagtctaaccactaggcgtgtccctgttatcagcaaagatcaatgatgcttcattcatgtactatgtatgcattggtggtaaatggatgtgagggcaagtacatcaagtacattcactctgtttcacgtatgtggatgccagttaattaaatgagtacgtaaataaattaattaaaacacatagatctgctttgtgtttttatttttattttttgaaaaacaaaaggcaagtctccaacaattaacttttgatgctttctgttcccctaaaaccaaaaaatgaaccccttgtgtcgttgttaacccatcctttcatttactcatataattagccaaaaaaaaaaggatggctacataccaatggattgattctcttaattgccacggcaagggggcgatcctatcatgacttaacatcaagcgcgcagttcaaaactactgtcttctgtcaaagttttctcctcttaaatgttattttgcttttacgtctcaactgtgtatgtaaaaaaaacgaatatttaaattacaaccctagactaaaaatgtgtttataataagatgtggatatttccttcagtagattgtaaccataatttaaattattttgttccacactgttttttatatctgtcatgtacattgcattttgatctgtaactgcacaaccctggggtttgctgcagagctatttctttccatgtaaagtagtggatccatcttgcttttgccttatataaagcctacagttatggaagtgtggaaaactgtggcttctcaataaatattcagatgtcctaagaatat

SEQ ID NO: 6 - protein, 737 aa, Homo sapiens
MNKTASCGSRPCIGPRGSHTSLCPRPKSRNSTPREEMYLSWMPLSLNFTQIELKNMAWMNLSLPTPVTLTTLPSLRWYNALLWITDLMIPILAWQGWFSPGQVFVLDEYCARNGVRGCHRHLCYLRDLLERAENGAMIDPTLLHYSFAFCASHVHGNRPDGIGTVTVEEKERFEEIKERLRVLLENQITHFRYCFPFGRPEGALKATLSLLERVLMKDIVTPVPQEEVKTVIRKCLEQAALVNYSRLSEYAKIEENVGRLITPAKKLEDTIRLAELVIEVLQQNEEHHAEPHVDKGEAFAWWSDLMVEHAETFLSLFAVDMDAALEVQPPDTWDSFPLFQLLNDFLRTDYNLCNGKFHKHLQDLFAPLVVRYVDLMESSIAQSIHRGFERESWEPVKSLTSNLPNVNLPNVNLPKVPNLPVNIPLGIPQMPTFSAPSWMAAIYDADNGSGTSEDLFWKLDALQTFIRDLHWPEEEFGKHLEQRLKLMASDMIESCVKRTRIAFEVKLQKTSRSTDFRVPQSICTMFNVMVDAKAQSTKLCSMEMGQEHQYHSKIDELIEETVKEMITLLVAKFVTIGVLAKLSRYDEGTLFSSFLSFTVKAASKYVDVPKPGMDVADAYVTFVRHSQDVLRDKVNEEMYIERLFDQWYNSSMNVICTWLTDRMDLQLHIYQLKTLIRMVKKYDFRLQGVLDSTLNSKTYETIRNRLTVEEATASVSEGGGLQGISMKDSDEEDEEDD

SEQ ID NO: 7 - DNA, 4648 bp, Homo sapiens
agcgagaaggagaaggaagagttggagcggctgcagaaagaggaggaggagaggaagaagaggctgcagctgtatgtgttcgtgatgcgctgcatcgcctacccctttaatgccaagcagcccaccgacatggctcgccggcagcagaagatcagcaaacagcagctgcagacagtcaaggaccggtttcaggctttcctcaatggggaaacccagatcatggctgacgaagccttcatgaacgctgtgcagagttactatgaggtgttcctgaagagcgaccgtgtggcccgcatggttcagagtggaggctgttccgccaacgactcccgggaggtcttcaagaagcacattgagaagagagtgcgcagcctgcctgagattgacggcctcagcaaggagactgtgctgagctcctggatggccaaatttgatgccatctaccgtggagaagaggacccgcggaagcagcaggcccggatgacagccagcgcagcctccgagctgattctgagcaaggagcaactctatgagatgttccagaacattcttgggatcaagaagttcgaacatcagctcctttacaatgcctgccagctggacaatccagatgagcaagcagcccagatcagacgagagctggatggacgtctacaaatggcagaccaaatagccagggaacgcaaatttcccaagtttgtatccaaagaaatggaaaacatgtacattgaggagctgaagtcatctgtcaacctgctcatggccaacttggagagcatgccggtatccaaaggcggggagttcaagctccagaaactcaaacgcagccacaatgcttccatcatcgacatgggcgaggagagtgagaaccagctctccaagtcagatgtcgtgctgtctttctcattggaggtggtaattatggaagtccaaggcctcaaatctttggctccaaatcgcatcgtatattgcacaatggaggtggaaggaggagagaaactacagactgatcaggccgaggcttctaaaccaacctggggcacccagggtgacttctccacaacccatgcactgccagctgtgaaggtgaagctgttcacagagagcacaggcgtcctggcgttggaggacaaggagcttgggcgggttattctccatcccaccccgaacagccccaaacagtcagagtggcacaaaatgacagtctccaaaaactgccccgaccaagatctcaaaatcaaacttgctgtccgaatggataagcctcaaaacatgaagcattctgggtatttatgggccatcggtaagaatgtctggaagagatggaagaaaaggttttttgtattggtgcaggtcagtcagtacacgtttgccatgtgcagttatcgggagaagaaagcggagcctcaggaacttctacaattggatggctacactgtggattacaccgacccccagccaggtttggagggtggccgagccttcttcaatgctgtcaaggagggagacaccgtgatatttgccagtgacgatgaacaagaccgcatcctgtgggtccaggccatgtatcgggccacggggcagtcacacaagcctgtgcccccgacccaagtccagaaactcaacgccaagggaggaaatgtacctcagctggatgcccctatctctcaattttacgcagatagagctcaaaaacatggcatggatgaatttatctcttccaacccctgtaactttgaccacgcttccctctttgagatggtacaacgccttactttggatcacagacttaatgattcctattcttgcctggcaaggctggttcagtcctggccaggtgtttgtactagacgagtattgcgcccgaaatggagtccgggggtgtcaccgacatctctgctacctcagagacttgcttgaacgggcagaaaatggcgccatgatcgaccccacccttcttcactacagctttgccttctgtgcatcccatgtccatgggaacaggcctgatggaattggaactgtgactgttgaagaaaaggaacgttttgaagaaatcaaagagaggctccgagttctgctagaaaatcagattacacattttaggtattgctttccatttggtcgacctgaaggtgctttgaaagctactctctcactcttggaaagggttttgatgaaagatattgttaccccagtgccacaagaggaggtaaaaacagttatccgtaaatgtctggaacaggctgcgttagtcaactattctcggctctcagagtatgccaaaatcgaagaaaatgtaggccggttaatcactcctgccaaaaagcttgaagatacaatacgtcttgctgaactagtcattgaagttcttcagcaaaatgaggagcaccacgcagaggcctttgcgtggtggtcagatttaatggtggagcatgcggagacgttcctgtcactctttgcagtagacatggatgcagccttagaggtgcaacctccagacacatgggacagttttccactatttcagctgctgaatgattttctccgtactgactataatttgtgcaatggaaaatttcacaaacacctgcaagacctgtttgccccacttgttgttagatatgtggatctgatggagtcctcaattgcacaatccattcacaggggctttgagcgggagtcatgggaaccagtcaataatgggtcaggcacctcagaagatctgttttggaaacttgacgcccttcagaccttcattcgggacctgcactggcctgaagaagagtttggaaagcacctggaacaacggctgaagttgatggcaagtgacatgatcgaatcttgtgtcaaaagaaccaggattgcatttgaagttaagctgcaaaaaaccagtcgatcaacagattttcgagtcccacagtcaatatgcaccatgtttaatgttatggttgatgccaaagctcaatcaacaaaactttgcagcatggaaatgggccaagagcatcaataccattcaaaaatagacgaactaattgaagaaactgttaaagaaatgataacactcttggttgcaaagttcgttactatcttggaaggagtgctggcaaaattatccagatatgacgaagggactttgttttcttcttttctgtcatttaccgtgaaggcagcttccaaatatgtggatgtacctaaacccgggatggacgtggccgacgcctacgtgactttcgtccgccattctcaggatgtcctgcgtgataaggtcaatgaggagatgtacatagaaaggttatttgatcaatggtacaacagctccatgaacgtgatctgcacctggttgacggaccggatggacttacagcttcatatttatcagttgaaaacactaattaggatggtaaagaaaacctacagagatttccgattgcaaggggtcctggactccaccttaaacagcaagacctatgaaacgatccggaaccgtctcactgtggaggaagccacagcatcagtgagtgaaggtgggggactgcagggcatcagcatgaaggacagcgatgaggaagacgaagaagacgattagaccatttggtcctagagtctgctgggacagagtcctgtaatcagtgcatgtccttagtctgttagttaaacccattaggaattttctgtcaactaccatgcccatgagatgtttatcaatacaactgccattttagctatgtggtaccaagattagcaaatgaccttcatatccactgatttcctgatgtccatgtctatatgtttacaagcaatatggagcaccattctttaaatactgttcatggagaatacatagtctaaccactaggcgtgtccctgttatcagcaaagatcaatgatgcttcattcatgtactatgtatgcattggtggtaaatggatgtgagggcaagtacatcaagtacattcactctgtttcacgtatgtggatgccagttaattaaatgagtacgtaaataaattaattaaaacacatagatctgctttgtgtttttatttttattttttgaaaaacaaaaggcaagtctccaacaattaacttttgatgctttctgttcccctaaaaccaaaaaatgaaccccttgtgtcgttgttaacccatcctttcatttactcatataattagccaaaaaaaaaaggatggctacataccaatggattgattctcttaattgccacggcaagggggcgatcctatcatgacttaacatcaagcgcgcagttcaaaactactgtcttctgtcaaagttttctcctcttaaatgttattttgcttttacgtctcaactgtgtatgtaaaaaaaacgaatatttaaattacaaccctagactaaaaatgtgtttataataagatgtggatatttccttcagtagattgtaaccataatttaaattattttgttccacactgttttttatatctgtcatgtacattgcattttgatctgtaactgcacaaccctggggtttgctgcagagctatttctttccatgtaaagtagtggatccatcttgcttttgccttatataaagcctacagttatggaagtgtggaaaactgtggcttctcaataaatattcagatgtcctaagaatat

SEQ ID NO: 8 - protein, 681 aa, Homo sapiens
MNKTASCGSRPCIGPRGSHTSLCPRPKSRNSTPREEMYLSWMPLSLNFTQIELKNMAWMNLSLPTPVTLTTLPSLRWYNALLWITDLMIPILAWQGWFSPGQVFVLDEYCARNGVRGCHRHLCYLRDLLERAENGAMIDPTLLHYSFAFCASHVHGNRPDGIGTVTVEEKERFEEIKERLRVLLENQITHFRYCFPFGRPEGALKATLSLLERVLMKDIVTPVPQEEVKTVIRKCLEQAALVNYSRLSEYAKIEENVGRLITPAKKLEDTIRLAELVIEVLQQNEEHHAEAFAWWSDLMVEHAETFLSLFAVDMDAALEVQPPDTWDSFPLFQLLNDFLRTDYNLCNGKFHKHLQDLFAPLVVRYVDLMESSIAQSIHRGFERESWEPVNNGSGTSEDLFWKLDALQTFIRDLHWPEEEFGKHLEQRLKLMASDMIESCVKRTRIAFEVKLQKTSRSTDFRVPQSICTMFNVMVDAKAQSTKLCSMEMGQEHQYHSKIDELIEETVKEMITLLVAKFVTIGVLAKLSRYDEGTLFSSFLSFTVKAASKYVDVPKPGMDVADAYVTFVRHSQDVLRDKVNEEMYIERLFDQWYNSSMNVICTWLTDRMDLQLHIYQLKTLIRMVKKYDFRLQGVLDSTLNSKTYETIRNRLTVEEATASVSEGGGLQGISMKDSDEEDEEDD

SEQ ID NO: 9 - DNA, 4864 bp, Homo sapiens
agcgagaaggagaaggaagagttggagcggctgcagaaagaggaggaggagaggaagaagaggctgcagctgtatgtgttcgtgatgcgctgcatcgcctacccctttaatgccaagcagcccaccgacatggctcgccggcagcagaagatcagcaaacagcagctgcagacagtcaaggaccggtttcaggctttcctcaatggggaaacccagatcatggctgacgaagccttcatgaacgctgtgcagagttactatgaggtgttcctgaagagcgaccgtgtggcccgcatggttcagagtggaggctgttccgccaacgactcccgggaggtcttcaagaagcacattgagaagagagtgcgcagcctgcctgagattgacggcctcagcaaggagactgtgctgagctcctggatggccaaatttgatgccatctaccgtggagaagaggacccgcggaagcagcaggcccggatgacagccagcgcagcctccgagctgattctgagcaaggagcaactctatgagatgttccagaacattcttgggatcaagaagttcgaacatcagctcctttacaatgcctgccagctggacaatccagatgagcaagcagcccagatcagacgagagctggatggacgtctacaaatggcagaccaaatagccagggaacgcaaatttcccaagtttgtatccaaagaaatggaaaacatgtacattgaggagctgaagtcatctgtcaacctgctcatggccaacttggagagcatgccggtatccaaaggcggggagttcaagctccagaaactcaaacgcagccacaatgcttccatcatcgacatgggcgaggagagtgagaaccagctctccaagtcagatgtcgtgctgtctttctcattggaggtggtaattatggaagtccaaggcctcaaatctttggctccaaatcgcatcgtatattgcacaatggaggtggaaggaggagagaaactacagactgatcaggccgaggcttctaaaccaacctggggcacccagggtgacttctccacaacccatgcactgccagctgtgaaggtgaagctgttcacagagagcacaggcgtcctggcgttggaggacaaggagcttgggcgggttattctccatcccaccccgaacagccccaaacagtcagagtggcacaaaatgacagtctccaaaaactgccccgaccaagatctcaaaatcaaacttgctgtccgaatggataagcctcaaaacatgaagcattctgggtatttatgggccatcggtaagaatgtctggaagagatggaagaaaaggttttttgtattggtgcaggtcagtcagtacacgtttgccatgtgcagttatcgggagaagaaagcggagcctcaggaacttctacaattggatggctacactgtggattacaccgacccccagccaggtttggagggtggccgagccttcttcaatgctgtcaaggagggagacaccgtgatatttgccagtgacgatgaacaagaccgcatcctgtgggtccaggccatgtatcgggccacggggcagtcacacaagcctgtgcccccgacccaagtccagaaactcaacgccaagggaggaaatgtacctcagctggatgcccctatctctcaattttacgcagatagagctcaaaaacatggcatggatgaatttatctcttccaacccctgtaactttgaccacgcttccctctttgagatggtacaacgccttactttggatcacagacttaatgattcctattcttgcctggcaaggctggttcagtcctggccaggtgtttgtactagacgagtattgcgcccgaaatggagtccgggggtgtcaccgacatctctgctacctcagagacttgcttgaacgggcagaaaatggcgccatgatcgaccccacccttcttcactacagctttgccttctgtgcatcccatgtccatgggaacaggcctgatggaattggaactgtgactgttgaagaaaaggaacgttttgaagaaatcaaagagaggctccgagttctgctagaaaatcagattacacattttaggtattgctttccatttggtcgacctgaaggtgctttgaaagctactctctcactcttggaaagggttttgatgaaagatattgttaccccagtgccacaagaggaggtaaaaacagttatccgtaaatgtctggaacaggctgcgttagtcaactattctcggctctcagagtatgccaaaatcgaagggaaaaagagagaaatgtatgagcatcctgtcttctgcttggcctcccaagtgatggatttaaccattcaaaatgtaggccggttaatcactcctgccaaaaagcttgaagatacaatacgtcttgctgaactagtcattgaagttcttcagcaaaatgaggagcaccacgcagaggcctttgcgtggtggtcagatttaatggtggagcatgcggagacgttcctgtcactctttgcagtagacatggatgcagccttagaggtgcaacctccagacacatgggacagttttccactatttcagctgctgaatgattttctccgtactgactataatttgtgcaatggaaaatttcacaaacacctgcaagacctgtttgccccacttgttgttagatatgtggatctgatggagtcctcaattgcacaatccattcacaggggctttgagcgggagtcatgggaaccagtcaagagtttaaccagtaacctacccaatgtgaacctacccaatgtgaaccttcccaaagtaccaaatctaccagttaacatccctctaggcatcccacaaatgcctactttttcggcaccgtcatggatggctgctatatatgatgcggataatgggtcaggcacctcagaagatctgttttggaaacttgacgcccttcagaccttcattcgggacctgcactggcctgaagaagagtttggaaagcacctggaacaacggctgaagttgatggcaagtgacatgatcgaatcttgtgtcaaaagaaccaggattgcatttgaagttaagctgcaaaaaaccagtcgatcaacagattttcgagtcccacagtcaatatgcaccatgtttaatgttatggttgatgccaaagctcaatcaacaaaactttgcagcatggaaatgggccaagagcatcaataccattcaaaaatagacgaactaattgaagaaactgttaaagaaatgataacactcttggttgcaaagttcgttactatcttggaaggagtgctggcaaaattatccagatatgacgaagggactttgttttcttcttttctgtcatttaccgtgaaggcagcttccaaatatgtggatgtacctaaacccgggatggacgtggccgacgcctacgtgactttcgtccgccattctcaggatgtcctgcgtgataaggtcaatgaggagatgtacatagaaaggttatttgatcaatggtacaacagctccatgaacgtgatctgcacctggttgacggaccggatggacttacagcttcatatttatcagttgaaaacactaattaggatggtaaagaaaacctacagagatttccgattgcaaggggtcctggactccaccttaaacagcaagacctatgaaacgatccggaaccgtctcactgtggaggaagccacagcatcagtgagtgaaggtgggggactgcagggcatcagcatgaaggacagcgatgaggaagacgaagaagacgattagaccatttggtcctagagtctgctgggacagagtcctgtaatcagtgcatgtccttagtctgttagttaaacccattaggaattttctgtcaactaccatgcccatgagatgtttatcaatacaactgccattttagctatgtggtaccaagattagcaaatgaccttcatatccactgatttcctgatgtccatgtctatatgtttacaagcaatatggagcaccattctttaaatactgttcatggagaatacatagtctaaccactaggcgtgtccctgttatcagcaaagatcaatgatgcttcattcatgtactatgtatgcattggtggtaaatggatgtgagggcaagtacatcaagtacattcactctgtttcacgtatgtggatgccagttaattaaatgagtacgtaaataaattaattaaaacacatagatctgctttgtgtttttatttttattttttgaaaaacaaaaggcaagtctccaacaattaacttttgatgctttctgttcccctaaaaccaaaaaatgaaccccttgtgtcgttgttaacccatcctttcatttactcatataattagccaaaaaaaaaaggatggctacataccaatggattgattctcttaattgccacggcaagggggcgatcctatcatgacttaacatcaagcgcgcagttcaaaactactgtcttctgtcaaagttttctcctcttaaatgttattttgcttttacgtctcaactgtgtatgtaaaaaaaacgaatatttaaattacaaccctagactaaaaatgtgtttataataagatgtggatatttccttcagtagattgtaaccataatttaaattattttgttccacactgttttttatatctgtcatgtacattgcattttgatctgtaactgcacaaccctggggtttgctgcagagctatttctttccatgtaaagtagtggatccatcttgcttttgccttatataaagcctacagttatggaagtgtggaaaactgtggcttctcaataaatattcagatgtcctaagaatat

SEQ ID NO: 10 - protein, 753 aa, Homo sapiens
MNKTASCGSRPCIGPRGSHTSLCPRPKSRNSTPREEMYLSWMPLSLNFTQIELKNMAWMNLSLPTPVTLTTLPSLRWYNALLWITDLMIPILAWQGWFSPGQVFVLDEYCARNGVRGCHRHLCYLRDLLERAENGAMIDPTLLHYSFAFCASHVHGNRPDGIGTVTVEEKERFEEIKERLRVLLENQITHFRYCFPFGRPEGALKATLSLLERVLMKDIVTPVPQEEVKTVIRKCLEQAALVNYSRLSEYAKIEGKKREMYEHPVFCLASQVMDLTIQNVGRLITPAKKLEDTIRLAELVIEVLQQNEEHHAEAFAWWSDLMVEHAETFLSLFAVDMDAALEVQPPDTWDSFPLFQLLNDFLRTDYNLCNGKFHKHLQDLFAPLVVRYVDLMESSIAQSIHRGFERESWEPVKSLTSNLPNVNLPNVNLPKVPNLPVNIPLGIPQMPTFSAPSWMAAIYDADNGSGTSEDLFWKLDALQTFIRDLHWPEEEFGKHLEQRLKLMASDMIESCVKRTRIAFEVKLQKTSRSTDFRVPQSICTMFNVMVDAKAQSTKLCSMEMGQEHQYHSKIDELIEETVKEMITLLVAKFVTIGVLAKLSRYDEGTLFSSFLSFTVKAASKYVDVPKPGMDVADAYVTFVRHSQDVLRDKVNEEMYIERLFDQWYNSSMNVICTWLTDRMDLQLHIYQLKTLIRMVKKYDFRLQGVLDSTLNSKTYETIRNRLTVEEATASVSEGGGLQGISMKDSDEEDEEDD

SEQ ID NO: 11 - DNA, 4842 bp, Homo sapiens
agcgagaaggagaaggaagagttggagcggctgcagaaagaggaggaggagaggaagaagaggctgcagctgtatgtgttcgtgatgcgctgcatcgcctacccctttaatgccaagcagcccaccgacatggctcgccggcagcagaagatcagcaaacagcagctgcagacagtcaaggaccggtttcaggctttcctcaatggggaaacccagatcatggctgacgaagccttcatgaacgctgtgcagagttactatgaggtgttcctgaagagcgaccgtgtggcccgcatggttcagagtggaggctgttccgccaacgactcccgggaggtcttcaagaagcacattgagaagagagtgcgcagcctgcctgagattgacggcctcagcaaggagactgtgctgagctcctggatggccaaatttgatgccatctaccgtggagaagaggacccgcggaagcagcaggcccggatgacagccagcgcagcctccgagctgattctgagcaaggagcaactctatgagatgttccagaacattcttgggatcaagaagttcgaacatcagctcctttacaatgcctgccagctggacaatccagatgagcaagcagcccagatcagacgagagctggatggacgtctacaaatggcagaccaaatagccagggaacgcaaatttcccaagtttgtatccaaagaaatggaaaacatgtacattgaggagctgaagtcatctgtcaacctgctcatggccaacttggagagcatgccggtatccaaaggcggggagttcaagctccagaaactcaaacgcagccacaatgcttccatcatcgacatgggcgaggagagtgagaaccagctctccaagtcagatgtcgtgctgtctttctcattggaggtggtaattatggaagtccaaggcctcaaatctttggctccaaatcgcatcgtatattgcacaatggaggtggaaggaggagagaaactacagactgatcaggccgaggcttctaaaccaacctggggcacccagggtgacttctccacaacccatgcactgccagctgtgaaggtgaagctgttcacagagagcacaggcgtcctggcgttggaggacaaggagcttgggcgggttattctccatcccaccccgaacagccccaaacagtcagagtggcacaaaatgacagtctccaaaaactgccccgaccaagatctcaaaatcaaacttgctgtccgaatggataagcctcaaaacatgaagcattctgggtatttatgggccatcggtaagaatgtctggaagagatggaagaaaaggttttttgtattggtgcaggtcagtcagtacacgtttgccatgtgcagttatcgggagaagaaagcggagcctcaggaacttctacaattggatggctacactgtggattacaccgacccccagccaggtttggagggtggccgagccttcttcaatgctgtcaaggagggagacaccgtgatatttgccagtgacgatgaacaagaccgcatcctgtgggtccaggccatgtatcgggccacggggcagtcacacaagcctgtgcccccgacccaagtccagaaactcaacgccaagggaggaaatgtacctcagctggatgcccctatctctcaattttacgcagatagagctcaaaaacatggcatggatgaatttatctcttccaacccctgtaactttgaccacgcttccctctttgagatggtacaacgccttactttggatcacagacttaatgattcctattcttgcctggcaaacgagtattgcgcccgaaatggagtccgggggtgtcaccgacatctctgctacctcagagacttgcttgaacgggcagaaaatggcgccatgatcgaccccacccttcttcactacagctttgccttctgtgcatcccatgtccatgggaacagtcaacaaatgcatgtgtaccttagtgggctgccaccaaatacagaccctgaagggagcaaaactccctccccacctgaaccagaagctaaaaaagataccaaaaaggaatccaaaaaaagaaaagattccaaaacccaggcaaatcaagagctgaaaaggcctgatggaattggaactgtgactgttgaagaaaaggaacgttttgaagaaatcaaagagaggctccgagttctgctagaaaatcagattacacattttaggtattgctttccatttggtcgacctgaaggtgctttgaaagctactctctcactcttggaaagggttttgatgaaagatattgttaccccagtgccacaagaggaggtaaaaacagttatccgtaaatgtctggaacaggctgcgttagtcaactattctcggctctcagagtatgccaaaatcgaagggaaaaagagagaaatgtatgagcatcctgtcttctgcttggcctcccaagtgatggatttaaccattcaaaatgtaggccggttaatcactcctgccaaaaagcttgaagatacaatacgtcttgctgaactagtcattgaagttcttcagcaaaatgaggagcaccacgcagaggcctttgcgtggtggtcagatttaatggtggagcatgcggagacgttcctgtcactctttgcagtagacatggatgcagccttagaggtgcaacctccagacacatgggacagttttccactatttcagctgctgaatgattttctccgtactgactataatttgtgcaatggaaaatttcacaaacacctgcaagacctgtttgccccacttgttgttagatatgtggatctgatggagtcctcaattgcacaatccattcacaggggctttgagcgggagtcatgggaaccagtcaataatgggtcaggcacctcagaagatctgttttggaaacttgacgcccttcagaccttcattcgggacctgcactggcctgaagaagagtttggaaagcacctggaacaacggctgaagttgatggcaagtgacatgatcgaatcttgtgtcaaaagaaccaggattgcatttgaagttaagctgcaaaaaaccagtcgatcaacagattttcgagtcccacagtcaatatgcaccatgtttaatgttatggttgatgccaaagctcaatcaacaaaactttgcagcatggaaatgggccaagagcatcaataccattcaaaaatagacgaactaattgaagaaactgttaaagaaatgataacactcttggttgcaaagttcgttactatcttggaaggagtgctggcaaaattatccagatatgacgaagggactttgttttcttcttttctgtcatttaccgtgaaggcagcttccaaatatgtggatgtacctaaacccgggatggacgtggccgacgcctacgtgactttcgtccgccattctcaggatgtcctgcgtgataaggtcaatgaggagatgtacatagaaaggttatttgatcaatggtacaacagctccatgaacgtgatctgcacctggttgacggaccggatggacttacagcttcatatttatcagttgaaaacactaattaggatggtaaagaaaacctacagagatttccgattgcaaggggtcctggactccaccttaaacagcaagacctatgaaacgatccggaaccgtctcactgtggaggaagccacagcatcagtgagtgaaggtgggggactgcagggcatcagcatgaaggacagcgatgaggaagacgaagaagacgattagaccatttggtcctagagtctgctgggacagagtcctgtaatcagtgcatgtccttagtctgttagttaaacccattaggaattttctgtcaactaccatgcccatgagatgtttatcaatacaactgccattttagctatgtggtaccaagattagcaaatgaccttcatatccactgatttcctgatgtccatgtctatatgtttacaagcaatatggagcaccattctttaaatactgttcatggagaatacatagtctaaccactaggcgtgtccctgttatcagcaaagatcaatgatgcttcattcatgtactatgtatgcattggtggtaaatggatgtgagggcaagtacatcaagtacattcactctgtttcacgtatgtggatgccagttaattaaatgagtacgtaaataaattaattaaaacacatagatctgctttgtgtttttatttttattttttgaaaaacaaaaggcaagtctccaacaattaacttttgatgctttctgttcccctaaaaccaaaaaatgaaccccttgtgtcgttgttaacccatcctttcatttactcatataattagccaaaaaaaaaaggatggctacataccaatggattgattctcttaattgccacggcaagggggcgatcctatcatgacttaacatcaagcgcgcagttcaaaactactgtcttctgtcaaagttttctcctcttaaatgttattttgcttttacgtctcaactgtgtatgtaaaaaaaacgaatatttaaattacaaccctagactaaaaatgtgtttataataagatgtggatatttccttcagtagattgtaaccataatttaaattattttgttccacactgttttttatatctgtcatgtacattgcattttgatctgtaactgcacaaccctggggtttgctgcagagctatttctttccatgtaaagtagtggatccatcttgcttttgccttatataaagcctacagttatggaagtgtggaaaactgtggcttctcaataaatattcagatgtcctaagaatat

SEQ ID NO: 12 - protein, 1228 aa, Homo sapiens
MRCIAYPFNAKQPTDMARRQQKISKQQLQTVKDRFQAFLNGETQIMADEAFMNAVQSYYEVFLKSDRVARMVQSGGCSANDSREVFKKHIEKRVRSLPEIDGLSKETVLSSWMAKFDAIYRGEEDPRKQQARMTASAASELILSKEQLYEMFQNILGIKKFEHQLLYNACQLDNPDEQAAQIRRELDGRLQMADQIARERKFPKFVSKEMENMYIEELKSSVNLLMANLESMPVSKGGEFKLQKLKRSHNASIIDMGEESENQLSKSDVVLSFSLEVVIMEVQGLKSLAPNRIVYCTMEVEGGEKLQTDQAEASKPTWGTQGDFSTTHALPAVKVKLFTESTGVLALEDKELGRVILHPTPNSPKQSEWHKMTVSKNCPDQDLKIKLAVRMDKPQNMKHSGYLWAIGKNVWKRWKKRFFVLVQVSQYTFAMCSYREKKAEPQELLQLDGYTVDYTDPQPGLEGGRAFFNAVKEGDTVIFASDDEQDRILWVQAMYRATGQSHKPVPPTQVQKLNAKGGNVPQLDAPISQFYADRAQKHGMDEFISSNPCNFDHASLFEMVQRLTLDHRLNDSYSCLANEYCARNGVRGCHRHLCYLRDLLERAENGAMIDPTLLHYSFAFCASHVHGNSQQMHVYLSGLPPNTDPEGSKTPSPPEPEAKKDTKKESKKRKDSKTQANQELKRPDGIGTVTVEEKERFEEIKERLRVLLENQITHFRYCFPFGRPEGALKATLSLLERVLMKDIVTPVPQEEVKTVIRKCLEQAALVNYSRLSEYAKIEGKKREMYEHPVFCLASQVMDLTIQNVGRLITPAKKLEDTIRLAELVIEVLQQNEEHHAEAFAWWSDLMVEHAETFLSLFAVDMDAALEVQPPDTWDSFPLFQLLNDFLRTDYNLCNGKFHKHLQDLFAPLVVRYVDLMESSIAQSIHRGFERESWEPVNNGSGTSEDLFWKLDALQTFIRDLHWPEEEFGKHLEQRLKLMASDMIESCVKRTRIAFEVKLQKTSRSTDFRVPQSICTMFNVMVDAKAQSTKLCSMEMGQEHQYHSKIDELIEETVKEMITLLVAKFVTIGVLAKLSRYDEGTLFSSFLSFTVKAASKYVDVPKPGMDVADAYVTFVRHSQDVLRDKVNEEMYIERLFDQWYNSSMNVICTWLTDRMDLQLHIYQLKTLIRMVKKYDFRLQGVLDSTLNSKTYETIRNRLTVEEATASVSEGGGLQGISMKDSDEEDEEDD

SEQ ID NO: 13 - DNA, 5068 bp, Homo sapiens
agcgagaaggagaaggaagagttggagcggctgcagaaagaggaggaggagaggaagaagaggctgcagctgtatgtgttcgtgatgcgctgcatcgcctacccctttaatgccaagcagcccaccgacatggctcgccggcagcagaagatcagcaaacagcagctgcagacagtcaaggaccggtttcaggctttcctcaatggggaaacccagatcatggctgacgaagccttcatgaacgctgtgcagagttactatgaggtgttcctgaagagcgaccgtgtggcccgcatggttcagagtggaggctgttccgccaacgactcccgggaggtcttcaagaagcacattgagaagagagtgcgcagcctgcctgagattgacggcctcagcaaggagactgtgctgagctcctggatggccaaatttgatgccatctaccgtggagaagaggacccgcggaagcagcaggcccggatgacagccagcgcagcctccgagctgattctgagcaaggagcaactctatgagatgttccagaacattcttgggatcaagaagttcgaacatcagctcctttacaatgcctgccagctggacaatccagatgagcaagcagcccagatcagacgagagctggatggacgtctacaaatggcagaccaaatagccagggaacgcaaatttcccaagtttgtatccaaagaaatggaaaacatgtacattgaggagctgaagtcatctgtcaacctgctcatggccaacttggagagcatgccggtatccaaaggcggggagttcaagctccagaaactcaaacgcagccacaatgcttccatcatcgacatgggcgaggagagtgagaaccagctctccaagtcagatgtcgtgctgtctttctcattggaggcaatcagctacactatgaggaattgcatcttcgtgctagactggtcccagcatgactggtacaaacctaacagaagccatcagatacctgttggttttctctgtagcttctcatttgtgtattttcctctgggcgatgctgccaggggccttgccaataacctccattatgtggaattctcttttcaggtggtaattatggaagtccaaggcctcaaatctttggctccaaatcgcatcgtatattgcacaatggaggtggaaggaggagagaaactacagactgatcaggccgaggcttctaaaccaacctggggcacccagggtgacttctccacaacccatgcactgccagctgtgaaggtgaagctgttcacagagagcacaggcgtcctggcgttggaggacaaggagcttgggcgggttattctccatcccaccccgaacagccccaaacagtcagagtggcacaaaatgacagtctccaaaaactgccccgaccaagatctcaaaatcaaacttgctgtccgaatggataagcctcaaaacatgaagcattctgggtatttatgggccatcggtaagaatgtctggaagagatggaagaaaaggttttttgtattggtgcaggtcagtcagtacacgtttgccatgtgcagttatcgggagaagaaagcggagcctcaggaacttctacaattggatggctacactgtggattacaccgacccccagccaggtttggagggtggccgagccttcttcaatgctgtcaaggagggagacaccgtgatatttgccagtgacgatgaacaagaccgcatcctgtgggtccaggccatgtatcgggccacggggcagtcacacaagcctgtgcccccgacccaagtccagaaactcaacgccaagggaggaaatgtacctcagctggatgcccctatctctcaattttacgcagatagagctcaaaaacatggcatggatgaatttatctcttccaacccctgtaactttgaccacgcttccctctttgagatggtacaacgccttactttggatcacagacttaatgattcctattcttgcctggcaaggctggttcagtcctggccaggtgtttgtactagacgagtattgcgcccgaaatggagtccgggggtgtcaccgacatctctgctacctcagagacttgcttgaacgggcagaaaatggcgccatgatcgaccccacccttcttcactacagctttgccttctgtgcatcccatgtccatgggaacaggcctgatggaattggaactgtgactgttgaagaaaaggaacgttttgaagaaatcaaagagaggctccgagttctgctagaaaatcagattacacattttaggtattgctttccatttggtcgacctgaaggtgctttgaaagctactctctcactcttggaaagggttttgatgaaagatattgttaccccagtgccacaagaggaggtaaaaacagttatccgtaaatgtctggaacaggctgcgttagtcaactattctcggctctcagagtatgccaaaatcgaagcttcatatgcaaatttgaagctggagcactgcttttttctaatatatattataataatggtgataataataaaatggctttatgaaaatgtaggccggttaatcactcctgccaaaaagcttgaagatacaatacgtcttgctgaactagtcattgaagttcttcagcaaaatgaggagcaccacgcagaggcctttgcgtggtggtcagatttaatggtggagcatgcggagacgttcctgtcactctttgcagtagacatggatgcagccttagaggtgcaacctccagacacatgggacagttttccactatttcagctgctgaatgattttctccgtactgactataatttgtgcaatggaaaatttcacaaacacctgcaagacctgtttgccccacttgttgttagatatgtggatctgatggagtcctcaattgcacaatccattcacaggggctttgagcgggagtcatgggaaccagtcaagagtttaaccagtaacctacccaatgtgaacctacccaatgtgaaccttcccaaagtaccaaatctaccagttaacatccctctaggcatcccacaaatgcctactttttcggcaccgtcatggatggctgctatatatgatgcggataatgggtcaggcacctcagaagatctgttttggaaacttgacgcccttcagaccttcattcgggacctgcactggcctgaagaagagtttggaaagcacctggaacaacggctgaagttgatggcaagtgacatgatcgaatcttgtgtcaaaagaaccaggattgcatttgaagttaagctgcaaaaaaccagtcgatcaacagattttcgagtcccacagtcaatatgcaccatgtttaatgttatggttgatgccaaagctcaatcaacaaaactttgcagcatggaaatgggccaagagcatcaataccattcaaaaatagacgaactaattgaagaaactgttaaagaaatgataacactcttggttgcaaagttcgttactatcttggaaggagtgctggcaaaattatccagatatgacgaagggactttgttttcttcttttctgtcatttaccgtgaaggcagcttccaaatatgtggatgtacctaaacccgggatggacgtggccgacgcctacgtgactttcgtccgccattctcaggatgtcctgcgtgataaggtcaatgaggagatgtacatagaaaggttatttgatcaatggtacaacagctccatgaacgtgatctgcacctggttgacggaccggatggacttacagcttcatatttatcagttgaaaacactaattaggatggtaaagaaaacctacagagatttccgattgcaaggggtcctggactccaccttaaacagcaagacctatgaaacgatccggaaccgtctcactgtggaggaagccacagcatcagtgagtgaaggtgggggactgcagggcatcagcatgaaggacagcgatgaggaagacgaagaagacgattagaccatttggtcctagagtctgctgggacagagtcctgtaatcagtgcatgtccttagtctgttagttaaacccattaggaattttctgtcaactaccatgcccatgagatgtttatcaatacaactgccattttagctatgtggtaccaagattagcaaatgaccttcatatccactgatttcctgatgtccatgtctatatgtttacaagcaatatggagcaccattctttaaatactgttcatggagaatacatagtctaaccactaggcgtgtccctgttatcagcaaagatcaatgatgcttcattcatgtactatgtatgcattggtggtaaatggatgtgagggcaagtacatcaagtacattcactctgtttcacgtatgtggatgccagttaattaaatgagtacgtaaataaattaattaaaacacatagatctgctttgtgtttttatttttattttttgaaaaacaaaaggcaagtctccaacaattaacttttgatgctttctgttcccctaaaaccaaaaaatgaaccccttgtgtcgttgttaacccatcctttcatttactcatataattagccaaaaaaaaaaggatggctacataccaatggattgattctcttaattgccacggcaagggggcgatcctatcatgacttaacatcaagcgcgcagttcaaaactactgtcttctgtcaaagttttctcctcttaaatgttattttgcttttacgtctcaactgtgtatgtaaaaaaaacgaatatttaaattacaaccctagactaaaaatgtgtttataataagatgtggatatttccttcagtagattgtaaccataatttaaattattttgttccacactgttttttatatctgtcatgtacattgcattttgatctgtaactgcacaaccctggggtttgctgcagagctatttctttccatgtaaagtagtggatccatcttgcttttgccttatataaagcctacagttatggaagtgtggaaaactgtggcttctcaataaatattcagatgtcctaagaatat

SEQ ID NO: 14 - protein, 758 aa, Homo sapiens
MNKTASCGSRPCIGPRGSHTSLCPRPKSRNSTPREEMYLSWMPLSLNFTQIELKNMAWMNLSLPTPVTLTTLPSLRWYNALLWITDLMIPILAWQGWFSPGQVFVLDEYCARNGVRGCHRHLCYLRDLLERAENGAMIDPTLLHYSFAFCASHVHGNRPDGIGTVTVEEKERFEEIKERLRVLLENQITHFRYCFPFGRPEGALKATLSLLERVLMKDIVTPVPQEEVKTVIRKCLEQAALVNYSRLSEYAKIEASYANLKLEHCFFLIYIIIMVIIIKWLYENVGRLITPAKKLEDTIRLAELVIEVLQQNEEHHAEAFAWWSDLMVEHAETFLSLFAVDMDAALEVQPPDTWDSFPLFQLLNDFLRTDYNLCNGKFHKHLQDLFAPLVVRYVDLMESSIAQSIHRGFERESWEPVKSLTSNLPNVNLPNVNLPKVPNLPVNIPLGIPQMPTFSAPSWMAAIYDADNGSGTSEDLFWKLDALQTFIRDLHWPEEEFGKHLEQRLKLMASDMIESCVKRTRIAFEVKLQKTSRSTDFRVPQSICTMFNVMVDAKAQSTKLCSMEMGQEHQYHSKIDELIEETVKEMITLLVAKFVTIGVLAKLSRYDEGTLFSSFLSFTVKAASKYVDVPKPGMDVADAYVTFVRHSQDVLRDKVNEEMYIERLFDQWYNSSMNVICTWLTDRMDLQLHIYQLKTLIRMVKKYDFRLQGVLDSTLNSKTYETIRNRLTVEEATASVSEGGGLQGISMKDSDEEDEEDD

SEQ ID NO: 15 - DNA, 282455 bp, Mus musculus
  misc_feature (1)...(282455): n = A,T,C or G
cttttaggatgtctcgccgcaagcaagcgaaaccgagatccctcaaaggtaaggaggacccccccgccttccccccccatccgtgagtgtcactgtgggtagcggagcgagggctgcgtggccgcgagtcgtgtgcgcgcgtgagtgtgagtgtgagtgcgggtgcgcgcgcgctcccctcccctactagcccccaggtggagtgaggacgaagtgtctgagtgtgtatgtttgtgtgttggggggtgggtggggggtaaagccgggaggaggatccccaaatggggcggcggtagaaagtgggtgagaaaagacagcatcaaaaccaaaaccaaaaaatattaatttcaaaaaaaggagaagaaaagagaaagaaacgaaattacccgaagaggggctggagaaaaaaaaaaatcttgttggagatctccgtctgggctgaaagaaaaagtttctggggtgtgttttcttaaagaataaatatgcagaaactcatgcggcagttgtattttttnnnnnnnnnnnnnnnnnnnncggcagttgtatttttcttgctttggaagaagaagaagaaaataaaaacctatggacaggagcgaggagtccttgcgtattaaaaacgtggcccggggctggggtgcgtacacaacagccaccaaagtctccgggtccgcgcccagctcgttcgggttctgcaggtcttgcctagcttctgccggtctggcggccgacgtaaacaactgggcccggtgcacttgggctgcgggacccaggctggatcaccacggtaccccttctagatttgcccggaaagttgaccgcccttgtccctgctcctccctccttccccttagggtatcagggaaggggtgcctctctgtgtagtccccgtagcagaggaagtttgcgggtgtgtgttgtgtggagggaattggggtgcactagttggctgcggcggcggggttggggggcggggggcactgaagttatcgatctggtggctgtgttggaatgtggcgagcagagtcacgtggcggccactacctcctcctccttcaccttcccctgccttctccggggtaaatcaaggagccgagaggtccggcgctctgaggcccagagccgaggcgcgcgaggaccggagaaggtgcgagcaggcagggcagtggaccgggagaggccaaaggggcgacagctggaagcagccgaggcctctgcgaccccggtggcgaaggacaaagggcggcttgtgctcccgccggagcccgcagggtcccgccgaggtccgcgccccgccctctggtccccggcagtgcagcatcctcttcctcctctgctgccgggtgttggtggtggctccgggtggctagggttcttgccaccggctcatagaactccgcaatcagcaaagggggatgatgggggacagaatcgtgcgccccgagccctggccccctggccaatgagtatttatgaactcgattacaggaacccttaccgcacacacaaagccctttcttcagggaaaggacagcgtagggggagggcctcacacactggaatccttgctttcttcttcttgttcttcttcttgttcttgttcttcttctttttcttcttctcttctttttcttgaagtgcacaacttttactttaaaaacgaggcgaatcactgacaagtgtcttcacacagtttgggggcctgttttgtatttacatgggacatacattgtctagaaaacctagacgcagagccagaaaaattcccaagtctggatggcgaataaatgatcgcaggggcatgcacgggcgtcagggtaactgtggaccactgttgctccggggaaacttgccaggagtctccatttctttaaagtaacggtggggaacgaagtgccaggctgacctcttcctgctctctgggaaaggagaactttgcgatttgaataggatagcaacatgcagtgccaacctctggttgaagggtttcaaaaagcgtctaaaagcttgtgaaggaattaggaagccttttattttcaaaagtttattaaagtttgtagatttggtcattttgctaactcaaagcttctaactgttcttgttcacctgcttctggaatgaagtcacagtgaaagttttgttgatggtgaatgcatgtgtttccccagcttctaaggaggatttcttttgcatgcatgaaagccattgagcgaagctgtactttctgggaaatgttggttaagttaaactgtaaaatacctagacagggacctgtgtagtttttgggctagtaagggaggaaagaccagtaagcagaagacgtttttattcttttgttttattggtatgttgcaaaaaaccggatccaatatctccttcactaagacacagcctctgggcttcagttgccaagtgctaaaataatatctacattaaatcaaagagtgtgtgtgtgtgtgtgtgtgtgtgtgtgtgtgtgtagcacagcagtgttttccgtcagctctgcttggacgcctcccagaagaggcactggcctcaggtgggctggctaggcttttggggcgagaagctcaagactggaataaaaatagcacagtcctcgctgacgatcagtcttgtttttcttcagggtgtgcatttgcctggaaaataacatatttgtatgaagctgtgtcagatgagggactgtgatatgactagtgtctggtagagctagactgccattccggatggttcctgttaagtaactgctcctttcttcctgatcctgggtcccctctgtcttcctggaaggatgcctttatttttcaaagtgtgttttaagagtgttccgagtccattctgttgttcagaaggtcacgcttgaatccttgaaaagccagcaagcatttttttttttttttaatgacagatcagctggtatttgtaacagtaagcaatgggcaatcgtttgttataagcaatgctggagagatggtgtagtagtgtagtagtgaattgaacgtcctcacataggaagagctgattggtaattttaccatcatgaaagataggttctgattttaccatcagaaacatgtagattttgtgataaccaacatgaaaaagatatgtattaaagaccatgaaaaaaactgtaaggccttctaaaaaccacaaagttctgcattcagtttctaatgtgtctgttatttctttaacaaacagagttttaagagatagttctgatatggctgtctcttatgatatcatttcaaacttgtgccccaggagagtcatttccattaggctggtaaaaaacattaaaacaaaatagtggttagtctggattcttatttctatctagatcctcaaaatgtgctttcccaggaaatttctcttaccagatgcatttattttaagtaattcttataatttggggactttgggtagataatcatgcctacttaaaaattacgcatttttaatgtcaaattttgggggtcgattgtctagttagcccgcctcctcagtctggtttccgtttctaagagccttgagaaggcaagccttgctggagttacctactccgtgtaatctccagtcagactgcgtacattcaggtacttgtttctctagacaacatctgacattggaacatgcaacttctttacccttctcgacgctcaaagcctgtctgccacatagaaaccccgaagacctcactctctgttaatactgcatatctttagagtgatccttctgactaatgacaaagggttaaagccagtatttaaaggaatgaatggccagacaatttaatgagtccctcccttctatattatttagatatttgtcttcatccctgagaattgacagtggtaagactacctcactgaaaatagtttactgtcagcttatttttagggccagcaaatcagttgtatcaaattggccaattgtgacctatttctatatttcttactggctctttattctatttctttcggcacttgtttgatggaactttctcagccattttatctgataatattttttttttaaagttgactccagaaagctcagttagaaggaaaaagtggtctgctgcataaaggtgtgagatactcagtgagagccaagttataaagctggaaaggagagaggggagcgcttaggcatttaaatggccaagttaaacaggagacacagccaggctatctggaccctcaggtgttcataaactcataccggggacctccagagagggatgggggaggcaggaagaatgtgagcccccagtgtctactttaacttgctgtgcccgatgctgaccctttgtaacttggcacactctgaacttagaacactttagatataccttttccccaccagctccttttgtaacttataaatggattcttaaaaggaggaattctttctttagaaatataatgaagtaacaaagtctcagctcacaatgtaaagaagaaatagaaattagggaggttgaatgaaaagacaatggattttaagtcccgagcctttggaaagtcagaattttgctgtttgctctagtgcaaacactgtaaacattttagatattaaaaagtcactacagggagttttcttggtcctcaaatttaatagaagtattaaaccctacagtgtttcatgtgcttgccttttcaaagtacatatatgtatatatatgtgtatgtacacatacacatatatatgcatatactaattatatatatggattaatagaaaggtgagatataagatataacaataacaaaaaatgtttccagtatctttcatgtccttgctttcttagaaaaaacaatcttttttttccagcagtgattcagtttaggtttggaaatgatgctatagaaaagaaacaaaggctgaccctggattttgtgtgagaagcctaaaaggaaatagaatattttgcttttaattataagcaaaatggcttttttttcctgaaaactgattttctgatatgttagctatgactcttgttgataattagatcttaacttacgttagtttcaagaaaaattaaggcacacatatgtgtatatttatggatacacattagatagccaaatcaatattcctttttttgtaaggaattttgtaatttgatttgtaaaggcaaagtattaattgcatggcatgcagaaatttatgcttcgatgtttttggatttgcgtacaaaaagagaggcgggggcaatggttagaaacagagctgaggtttctcctgccactcagacaccctgtgacaattgtccttctatttatctgtcagtcagtgactctttctccctccaccacctctaaattatactgactagatgttgaagtcattaaattgattatagtccaatcagcagacaatccgaaataaacaaaaacagcaattacagttggcagggatcccgagagtcaaagttccagagctgctggtccagcagacctctttcagagctcggtccgcacctttccatttctggcagcccttcctcaaaggaactgcagcagacttctgatggtctactcagtcctctaaacaaaaacatctgtctgaagagtgagcaagagcacacctttggcctttattcacctggcccaaaaagggtaaagaaaatggggtactgaacataaaagcatacatgtaaaatggaattacaaagggagttgagattagctgctctttatgaagcaagctgttaattttcctcttttggttgttgccggaagattcccagatcttactgacagcaggagtgcctgacatggtgacagaagtttccaaccttgtttttccttttaacttatttggaggaggccaagagctgaaggcccattttgaaaagatgtctgtagcatcctttctcctttctttcgaaaggagctttgttgcggaggcttggctactctgatacagtctgcaggtttctcagttaggttttgccacaaactgaaacattatcctcactcctgtctgaatgcttattttgaagtaagagcttgccacaagaagagaggtttggggagtggaggagagcaggcctactgagatcagcataagagtttctggaaggatccatccttcctcttactctgcttcattaattcacctggctggttcccatggctgacttaataccatccgttttcttaccaatgacttcctatctttgcctaaatggatttggtgttaagtttggtagttatttttaagagaggagacagcaagatttgtgccatttgtaccatgtttagcagccctctggcttcttaaaaatgtaaatgctctcatgcaatggtatgctaaagaatgcttttgaattgtgtgaggttttgatacaaaggcagctgctcaaaatcaaccttcttgcgtgttttctcagaggtgcttattctttttctccatcgatgcctggtgtgctgtcaacggttgaagttagttctttgggtgtgtgtgggtgtgtgggtatgtgcaagggtgtgtgtgtgcctgggtatatgtgactctctaatctcatttcaattaaacatgaagtatgttgctgtggttttatatgggaattcaatggtgccctggtcagaatcacgtctaccttgcctgttgtaattgcctattttaaatttgtcttgctacaatgctgtcataaagcaattaaaacttaaagttaacattagttaatttaaacagctccgttataacattaatcaaacagggtaaggagagcttttacagggtttaaataattatgcaactcttggaataaaagcctgacatgagataaatgttggaaaactaagaatcttggtctttttttttttttttcaaatacttttaatttcaggcagcatgggcctttgcatgcatcacattgcacctccagtaattacagcagtttagtaattattagagatgaaagaaatcgagtaagatgtgaattctttaaaacttcagcagcttcagtccttgcacggctaatgatcaagcagcagtcatcctgccacctggggaccctatcacagctacggcaccaggctgatcttggtggtatcattatgatggtagaacacaccacagttagcatttctcctctggatgtctgcgaggaaaggtttgtaatttgggcattaacaacacaaaaagtcagaatcaaatatgccttccaagtaactatgttttctaggaagattattttttgaagatgaatgtatacattcacaaattatttttcatactctatgtactttaacaagatagtaaatactttgaaaattcctgagaagaaaaatatgtagtcattctcatttgttcatgcatatatatatatatacatatatatatatatacacatacatatatataacttaaatatatattaaacttcatatatatacatatacatatacatatacatatacatatacatatacatatacatatacatatacatatacatatacatatataggcatgggttaaatttgcatctagttttcaaatgaagataatttggtttagaatacatttactatttatgttagcttaaggtgttccaaactaaagacagacaaggaatcaccatttccatagtagtgcaggttggttggttggttggtttgtttatttgttttaaattacattgtggtattgcttatgatttttttttcaagtatgaaaccaaatggttttagacatttagttagcacaatatactgcagaacatacagacacatggtatgcacactcaccagcagactttgatgtctatatgccatacatttcccatatgttaatcacttcttaaaggacaaaattaaactttccccaattaaatttggtatcattttaaggaatgtaaaagcacttatcttttgggttcataacactgtttttataacctctttattattgccatttggtcttgttattagtctactaaggatatatcagtatggacatttatttacctggtagggacaaagttcccctctattgctgactggcttatatgttaatacacacgtcattgtacaaacctgtcctgagctggtctccatggatgaactagaaattgacctgtcatactgttcaatgcccactattaaaaagaaaaaaacggttacagtgacctaaactttgttatctgtagagaaatttcccaaactttctgacatatttagtgttcttgtccttcacaacagaacttcatgagatccagtgagagcacgtgaataagattaaatattatttcagtattgctaaggatttagcttgttgtagttttaactggttttgagcagcacaatcagtactttactcttttgcttatttttataccttagaagagggaaagggcatcaacatttcaaaaatgccattccaccaagtgctaatgaagtccaaacatggctattgctcggaaggctggcaccatcttgggatagttggcttttgtagggagtctgcattacctgtcagtaccggtgtttccagggagtatctgaggctacagtagtggacatcaggtaagaagcaagaaggtctgtaggcccaaagggaggcacatcagtgcttggagagagccaaggacaaaacaagctgtctcgggcatcatgttgccacttggatagtagtttaccaaggagacgtggtgagctctgattggctgtgcatattttaggatgttgccatgttagatagtagtttaccaaggagaactgctcacagtagtgagctctgattggctgtgtgtgttttagagggaggccacttacaatctctcttaggatttggattttaggcttgagacttgagagggcttattctcatcattttactgctcagctccccccccccccctcctaacttgtgcctagactttggtcccaggttccacccttagctctgaggatccatgtgccatcaagacaagcattatcttgctcttgtgagccctccagtcatggaaactgaacgagactttagataccttttccatggcttttaaattgttggaaggagattctgtaaatgagaaccttacattggtgtgctcatgttttctgtctgttgcacaatggaagcagttgatgaaatgatgctcaaagtgtttgatgtcatgtgtttggcgagctttcctttataagagtgaaacattttgtttttccttacactcaaatggtaaatatgagcacttaggtcaaagacattaaatacatagaactttcccacctccatttggcttgattaaactgtcgttcctttcctcctcctgaaactcccagagagtagttttgaaaactaattgtgcaacagtgaaactaattatgttttgaaaaaatttgaagaattcctaatgttaattcatatattgattggaggatcatagagaatgtgtgaggtgcaggcattaaaacctagttgtactaaatgcttgacatctctgctatccagaattgagacaaaaccagccataaggagtttgctatattgcatattcagcacagaatcctgggagaaactcagcaagttggtactgaaaagtgttcttgcacaaatttgatgagcttcccaagagatacaggtaaatgatctgagaggagagtttctcaaaccgtgctgcgtaagtgtatgacaattcaaaggtgatcacattgggtgtcctggtggctttcctagccagagatgtgagtggcagactgggcggaattggaccaaagatcaaggcaatgagagtgaagtcagttttgcccctttcagcaccactgagatcatttacagtggaatggtagcattatggcaaattctaatcttcaaaataaagtcatcataagataataacaccactttacagctcctgttacatgtaaccagttttcaccgtgctgatctgcatgttaagaagccagtgctgggctctgggtggccgctcagggagaacccttctctacctgacacctgcaccaagttctggatcagcttcccctgagcccaggtcacttcctcccttaccactcagctgtgggttcagagaaactctgcagctacttctggctctaacattttagaattctcacattaagaaatcatggttctagctgggcggtggtggcgcacgcctttaatcccagcacttgggaggcagaggcagggggatctcttgagttcgaggccagcctggtctacacagtgagttccaggacagcctggaacagagaaaccctgtttcaaaacatgccctcccacccacccccctccaaaaaaaaagaagtaaaagaaatcatggttcttacaagtggataaatgagccatgccaacaaagtgagcatcctttgggtggtgggcttattagcagtgtatctgaagcaaaaccagactagctggaatgtcctcacagaggctagaccgtctggatttttgctgaatccccattttgggactgatggaagaagggaagcaagtggatataatgaatcattctcggggtctttatcagaaatcctgcccccttggagcctgcacatcccacagagcagtttgaagcttctgagtcagagaggaccctttgcccagtcaactcccagggctttggagatttttcctaatgagcctagtagccaatcctgttacggacttgacattgtgtgtgtggtcactctctagtgacctgagtgtcaggtgtactgtagttgatttattttggtgtgtgtgtgtgtgtgtgtgtgtgtgtgtgtgtgtgtgtgtgtgtgtgtaggtgtagatatatgtgccatggcaggcatgtggaggccagaaaacaacttgtgtgagttgattctcccttctaccatgtgggtcctaggaactaaactcaggtcttcaggcttagtggctgtcaccctttacactagagtcaagttgccatccctcaagcatattttggattgagctaagtttccccccaagtattagcaacatatgggcccaaatcagaagtatggttctttaagaatagctttggaattgggttcgacttacttgtagaagttacctataattcatccttgctcattggtacaaatacatctgtgatttctatacagcccccggtcccagacctttaataatatttgaggtttcttcttgaaccctctataggcacaggttgtggtttttcatactaggtttgtgtactaataaagacttgtatatcactttcacttctgacatccctgtgctggttctgagctggtgtttaaagatacctttttgtgcagtgccctttaaaccttgcagggcatagaccaccccagattgtccatcaccctttggaaagcaagcatgccatgatcaaattattggtgatgaacatattagcagatgtctccattcatttgcttatgatatttttgcacatttgttatgtctcgggatgccaggagttggagatgcggatcagatagctctgtcttcaatatgatgggcagtgaaagcacattgtatatgagagggaggctttccccatcaaggttctggatgcaggcacatttattctgtaccacatgggttgtatgatcctagggtggctagacatgcagcctaacacatttgtgcgtgacattgcattatttgtccaaagcctggatgttcttcacagtggtagcactttcaagccaaacgtgaggctctataagtttcagtttgaaaaatattgaacatgatcatgcattctgcaggatttctcattgggccccagataggcactaggtatatcgaaagtggtggaaagggctgtacccagctgggtctatacttctagtcagtgaagatgttaggcaattcctttgcaccctgcagggttgattctagacagtattagtttcacaatgacaatgtattttcaagtcacacttgcaaggggcatgcttttggtattattggcacatgactcacgtggacatgttttatttgggggcccagtttttctcttctaagtaagctatctgtactggtgtccactgagctaggtctgcttgctcttcaggcatctgggtttattctaactttataatgcttcctaacccttggaaggagttacagagacaaagtttggagctgagatgaaaggatggaccatgtagagactgccatatccagggatccaccccataatcagcatccaaatgctgacaccattgcatacactagcaagattttatcgaaaggacccagatgtagctgtctcttgtgagactatgccggggcctagcaaacacagaagtggatgctcacagtcagctaatggatggatcacagggctcccaatggaggagctagagaaagtagccaaggagctaaagggatctgcaaccctataggtggaacaacattatgaactaaccagtaccccggagctcttgactctagctgcatatgtatcaaaagatggcctagttggccatcactggaaagagaggcccattggacacacaaactttatatgccccagtacaggggaacgccagggccaaaaagggggagtgggtgggtaggggagtgggggtaggtgggtatggggggacttttggtatagcattggaaatgtaaatgagctaaatacctaataaaaaatggaaaaaaaataatgcttcctaaataaaggacaagttccttttggcattagaagacaagttaacatctgtcctctctgatgggtcaaatgctagtgtaggaagacagcagtcatcagtggtgccgctgacaggctttcaacattctcttcacagttcccagatcagctagcttggtggttgtcactgtggggacagtgctcaccagtggtcagctttgacttcagagagaatggtaagaaactgcagaaggttatacaaacaaggcttccctaagagcactttattgctttgtcagttccccccttcttttctctcctttattttgttgtccttttgagacagggtctcctggcatagccagacgtcctttgaacttcttctgtagcccccaccttgacagagcaaagattacaagtttgtgtcaccaagctctgctccactcctcttctgcttttcaacttacgtgtccattgtttcaacctgagatagtcttatgcggaaagagagagagagagagagagagagagagagagagagagagagagagagagagagagagagagagaagagagagagagagagagaatgaatgagggagcgagggggcgggagagagaggaagagagagtgtttaagagagagagggagagagagaaagagagaggaagaaagagggagagaggaagagagaggaagagaggaagaaaggaagggagagaaggagagagggagggagggagtgagggagagagagaaagagagagaatctctatgaagatatgtttattactccaagacccactaccatctcaatagttatctaagtcaggttggaatgagatgtatagcttccagggacaggctaaccaggctaataacataatactccttccaactgctcttaaaatatgtgtttcacaggaatctagagaggacaaagtacttaggcagctatctgctctccccccgccccccgcctttccaagccataagtgctttaagtatatgcatggttcacttagtgctgctgtaacatagacccaatgctgggtggctcatagagcacagaggcttactcagctcaggtagagtccagcatagtaatggatggtaccccgtcttttgctgtgctatggcatggtggtggagaaacagaaaaataactggctataggtgaaggcaaggatcactttatgacaggttactcttgtgaataataatctgctctaggagactaacatcactctctttccataatggtcttcagctgcttacaggtcgcacaatctcatgttcaagtgtctagctcacgagactgtggagacaaactgtcaaccctagcatctcactctaaccctagcatctcactctaaccctagcatctcactctaaccctagcatctcactctaaccctagcatctcactctaaccctagcatctcactctaaccctagcatctcactctaaccctagcatctcactctaaccctagcatctcactctaaccctagcatctcactctaaccctagcatctcactctaaccctagcatctcactctaaccctagcatctcactctaaccctagcatctcactataaccctagcatctcactcctaacactagcagctctctctaaccctagcagctccctctaactctagcagctccctctaaccctagcatctcactctaaccctagcatctcactcctaacactagcatctcactctaaccctagcagctccctctaaccctagcatctcactctaaccctagcatctcactctaaccctagtatctcactgtaaccctagcagcccactcctaacactagcagctccctctaactctagcagctccctctaaccctagcagctcgatcctgaccatagctaccaccctgcttatcacccccttggcctgctcctctttattctttaacacccctgccgtatgacagattgctgagcagtagctcctcctacatccctgaccatcaggatgtttctactcagttatttgttggtttagcttatcacatacaggtgatgcctcatttaatgccatgttttcttgctgacacacatgattaaaaacacacagtatgttcttgaaaactgaagtgctagttacagagaatgaatatatttaaatttttgtcagggctaataccagtggtgttattagccatatggctggagagtagctgtgattctgtcctttgtttttactaacaggacttgtggacaaactgctgctcgggacactttgattaaaggtgctgtagctaggaggtggctgggccatcttctgtatttatttttctgacagttgtccttttctttcctgggttctttcatcgtcccatttgaaaaggcctttcttatcactaagatggttagtccggagactgttagaaatagtcctcctcctttgtcttctgacttggcgcttagtggtttgtgttttgccatgtaggagcgagaaagcttttgttcttgttgtgattacctattcggtttgtttattttctgttttgcattatatttatgctattgcatgttaccattgtcctttttcccctcattaattaatttatgtattcacatcacaacctggtcacagcccctccctcctctcctcacagtcccaccctcacaccccctcccccacttccccatcccatttacctcagagaaggggaggctcccaagagtaccgacccacctggtacatcaagtcatatcagggctgagctcatctcccactgaggccagacaaggcaggcaacagagtaaggacaccccaccctactctaatcgttaggggacccacatgaagaccaagctgcacatctgctacatctgtgtagggggcttaggtccagaccatgcatgctctttggttggtgcttcagtctctgtgggaccccatgggcccaggttagtttactctgtatgtctttcgattgtctccctcaccatgcctcttctacaagactccctaagctccacctattgtttggttatgggtttctggatctatttccatcagctgctggatgaagcctctcagaagacagtcatgctatgctcctgtctgcaagcatagcagagtatcattaacagtgccaggggttggttctctcctatgaggtgggtctcaggttggaccagtctttggttggtggtgcttgaacttttagactgtttcaatggtaccttttctgtctaagatagatagtgtttgtgttgtttccccctaatccattcaaggtttggtcaaagattggccactactctttaaatagaaagatcagcctggacatagcctcagaaaggagttagctgaatgtagggatggcttcatccatcacttctgtcatcgatgagttcattcttaggcattttcttagacccagagtggcttctgtggcttccagatgcagccctgtgtagagtgaaggttgcagagagctcgggactgcttgccatgcgatctggctggctaggctcagcctcaaccatgtagtctggctggctaggctcagcttcagctttttgtttattttcaatcttcttttgtggcaggctttatggacgtttctctctcctgagccattttcctgcttcagtacactgcctttagttcccacgtttgttcagtgaccagccttcctgtctcctttaattcctgaaagtcactgccagccagatacatcctcatgcagagcagtgacttgctcgcctctctggctgtccctttggtcctcagagacccttcctgttggtggctactggctgaccttggcattcatttgtctaggaatacactttggtgcacactgtcttcccttgctctttgtattaaaaaactgccctaaagttgactttccctacaaactctaacactttaatgtttccaatcagacgactttcaagtatccatttatctttcttttgtcaattttaatgctaaatgcaggcagggaaggagaaatagaaatccgagagggtgattccctgaggactgggggaggccactttgacagtgatgagtggaataccctccagtgacagagagtgacagaggacatcccatggtggaatcactttaaaattttgaaaatactttataaagagtgtagttacgttttctttttaaaggtcagctaggagggggctgtcttcttaggaacgagacctgtaacactgtgcaagggtgtgagagaggatgctgatggtgagactttggaataggggcaggatgctctgggacccatcagaattgaaatattatcttctcagtaaaaccatgagtctgtgacaggtcaggcagggacaactttagtttgattttcattgtagaaatttccttccaggatcctacacattctggtgaaggaactatgactttccacagctctagatcctccttttccccctcttccttttctccacctccttcttctcccactcctcctcttctgaactcctctctctatgttagaggatctcattagaccaggttggttagcctcagtcagtaagtgacgaagggttcactagaactcctgcctcttgcctctacctcccaagtgctgtccttacaggcgtgtgtaccactccctgctcctctatcatcctcatctcctcctcctcttcctcttcttccatttatgtatggagactacttatgttcctagtgtggttggaggtatagggtgttctagacctagagttaaggatggttgtgagctaccatgcaagaatggtacttgggttcttttgcaagaacaacaagcactctgaagtgctgagtcatctttctgagttctatttctattcttacaagccacagccatgagtatcatctctttcgtttgttttagcttctcaatgccttagcttctatccatcacacacatgtcacagtgaagtgatataaaggactgtacacttagaacccaagattgaatcccactcacagaagtgtgggaagcctcagttttcctgtcggtaaaaatggtaggcaggagcttagactagctgcatcagtaaaccaacatgagctgtttaagaggtgcctgggctctgccaacaatctgctggctctcatggtattttctagctgatgctcactgaaggagtgacctctgatgctttgggttggttttgtttgttttgttttcttttgtttctactgtacaatcttttggggatgaggtgacacacttttatggctgctagctgtaaaaggaaatatttccccttctggagaaatatgagagacttaacatttgcattatccatagtaggaggtgaccacaaagctggaagagcccatgctcattacaactttcctaatgtcttactgggcacctgtttgtttgtagagttgttacccttaagtgaatcctcagttggatgtcattgtggccttgtcataggtgaggaaaaggagactcattcctggcatattcatttattaggcctgaagctgcaaaaggtaggcttcctcatttgaaatgcagtaccattcagaggcttggagaatatgttccagatcatcactgtggtgagacctcaggagacctggtgcctgccagaggccaagaagccttagaggggtggtggggggcaggaggggaagctatgaagtgtgtgtgtgtgtgtgtatgtgtgtgtgtgtgtgtgtgtgtgtgtgtgtgtgtgagtgagtgagttcaggggccagctgaggtcagcaaagggcatcagaccctctagagcagagttactcatagttgtgagctgctctacatgggtgctaggacctgaacttgggtcttctgtaggaatggcagatgctcttaaccactaaggcacttctctagctcctcagaggcacactgctgatggtttcccatgaagaccagccagcttgctagggtggagattcagcttgatttgcaggaacaaacgacggtggctgggccacagccttattactcttctaagacaaaaaaggagacaacgttagacggcagctcagtgacaagaagagaccccaggctccatttcctgctatcacaaagaaaaaggcagacagcaaccatgacaccacacctcaaaaaccccagaaaagaagatgtgaaagtcatgatatatgtgtatagaatgttatcatgaaatccatcattttacatactaacaaaatgaagaaggcacagaaatgcagaacacccttgctctcttgccttttgctcccctgcgccccctctctccccattcccttctgccttctctccacatggtcatggttggtttctgcttctctactctcttcctctctctgccattctctgcctctactactctcttaactcccctaccaatgccctaagtaaattctattctataattaaaaaaaaaatggaaggagtgaaggagagaagaaaaagcaatgctggtccttctggttatcttttgaggaacttctatatgtaaacacatacacacatattctaactaaagtagatgttggaaaatcaataaattaaaaacatgtcagcatttaccaacaatttttacccccatgtgatcaacttacttgcttttactttgttcatatttagaaattatatgactaaaaattattttgtctaatttacttatataaaaatattttatttttaggtgtgtgtgtgtgtgtgtgtgtgtgtgtgtgtgtgtgtgtgtgaatgcatgcaggtacctctggaggtcaccctcttcagatccccagagctcatttgaggtggttgtgagctacccatcagggtgctgggaaccaaacttaagacttcagtaagagcagtgcatgtccttacatgctaagccatatgctcattgttttgaaatggagtctcatgtctctggaggctggtttcaaatacactgtgtagcccaggttaggctggaatttcggatccccttgcctccaccttccaagtgctaggattataggtatacattatcagaccctgctgcaaaatgcatttatgtctcatgcatactgtaaaaacatttaatgtatgatcacaatctcctggtaagcccagattgagacagcataaatgggatcatgtttccataaacaactattaatttatagtagctaagataatggcacccacattctccttggttctgtctgggcagctctgtaaattgtgtattgattatgcaaatggacctagtgtctttattactgctctgcagatatgtgcagatggaatgaacatttggtaagactgtcaattttataggaaaaactgcattttacaggttttttttggggggggggagaaattgcattaaaactaacctacaatttattagtaaattcaagaaattatttgtgttctaggaaatcagaagtagagttaaaaagtttaaagggtgctgtttaatttcctttgtttccagctcctcaaggaaggtgccgcagaaatgataccagatcaataataatctatttttgtagtttatttttggtcgtgtggcttttcttgttttgcatcaggctaaaggaaccttagacattgtggattggttccatttttacattcattaatctaactagacgaagacaaaatggcctaattttttcatcccacgaaacatcagttttcttatcaatgacattggtttgtaagtcataaaccacaaccccgggttttattcccatccttttttgcatacacatataccttattttatagtttttttcccttttcttcttttgttgagtcattgtctcaccaaaacatttgttcagattcctcttatttttctaaacagatcacttacaaatgaggagtcgctacttgtgtgttaggttggaaaggaaaaaaatagctgttttctatttgcctaagaataactttccacactattaattaattaatttagtcagtgtatgtgtgtgtgtttatgtgtgtgcatgtgtgtgtatgtgtgtgtgtgtgtatgtgtgcatgtgcatgaatgcaaatgtgtgtgggccagccatcctcagtgctgggattacagatgtgtgacgccattcctggatggttctggggaccaaactcaggtcttatgctgcttgcaagacaggcatctgaccaactaagccacctgcccatccctactgcttcgcttcccactgtggacccagcttaacctaatactgaaggtcagaatgctacattgacactctctacacaaattcatttgtccttgcctttcaggagtagcactgcattttagaggaggaacatccaatgttccaaaataaaacaaagaaataagaaaaggttaggagtaaagagaactgggtgataatgctgggttggtttttgtggatggatttggagctcagctttttctcaactggcaaaggaaaggactgccctggtgtactagtactgttacattgccgaggccagtgttgcttgtttaaagcactcctttcctaagctggtggtgcagtaatccttgagatagtgtaaatatcgtgctctgaaagatggacgtttcactgacagtctgcagtgggcaagatatcggaaccattggtagaaagtaccatatgttcactgggaactttctgtcctggattctcattggatggatgtagcactgtcctgtaggtgagactctgtgaaaaaatggataccgtgaagctcttcctccagatccttgtgtctaaagtctagcttctaaacagattccattcatgaatgtggctgttttaagacacatcatttagtccacatactcaaggattacacacacatactttccaaccacttatttccctccacactgaattttcagacttttaaaactattttgctgtagagaagtttgtactatgatacctggctgttgaaaatatctctttgtgggggctggtgagatggctcagtgggtaagagcacccgactgttcttccgaaggtccagagttcaaatcccagcaaccacatggtggctcacaaccatccgtaacaagatctgactccctcttctggtgtgtctgaagacagctacagtgtagttacatataataataaaataaatctttaaaaaaaaaagaaagaaaatatctctttgtaatgtttttcttctgtaaaatggaagagccttcctttaagatgggaatgttgtctggtctctggtttggtttgatttgtgtctaatgtgtccgggctgagtgaaagatactagatggtaggagtggagtggagtctggtgagaaggagtgttcaaacaaaggcaaaagcaaagtgtctccaaaagaaagcaaatataaaaatacccaaacaaacaggctaaagcaacccgatgctaaccacaaaagaaagcaggaaagtaccctaaggcagcctcacttcagatcgagaggatgtaaaactttctcctttcgcaatcagccaggcttttccttgtgaggcctcacagacctgagctttttctaccaccattgcctgtcgtctggcttgcctgtcgtctggctcgcttctatgcttgtgatgactcttggtcacgtcttgcgtgttcttctgcaggttctaggcattcttgtgaggaacatttcacatggtccttcgccattttctcttctcagggaatgtgagtttggatcgtttatggaggttttttgaaagttcaaatatcgtagccctgttcaccaccctagggacaggggtgtatatcacattgttctagtttgtttatatgtcttttgtatagaggtttattttattgtattgtcttttatttcatttttcttcagacagggtcttcttctctatcaacggctagcttctaattcctcaggtaggaaaggatggcttttagttcctgaacctctcgccttggcactcttggtgttggatgccaccagctaggtttatggggtgctatagctcggaccagggtttcctacatggtagggaaaaactaccaactgagcccatgccctgctcgtgtgcatggttttattttatcgggaaggatcatgaacccgagtataggatcatctatttaaatgaacctctaatgatatttaaaaagaaaagagaataagggagatccaatacctatttttgtttccagttaaactttatatttcctctatttgcccttatatatgtttgaaataaaatgaaaaagtaaaaatttgtctcaccaaagacttctgaggtcctgaaatatcttgtccctggttaagaagttgtctggtgtgcccctgcaccccccccccccccacgttggctttctgtctggctctggtgtttattttcgagcatttagatatataggacaatgatctcaagataaatagctgggtaagtcagacccgtttaggtggacgagcccttagcctgactctgcctgctctcttggctctccaggcaggccaggaatttaagcacttgcctcttactgaccactgtcctctcccaccaaccatctagcgcccgtttcctttctgctccagacttgggacttggtttgggctctccctcttcccttgtttatgttgtaacagtcacagcagttccctgcttcctgacatgctctttgccagcacatcctctctgtgaccagtgcagcatctgaactggacccatctcacctgcagcttagaaatcccgcactcacttctggcaccaaggttagcatgcaaacctcatgatgtctgtagtcctgtccccagctaccctccagcttgctgggctccaccactgccctggtttgcctggtggagaagcacttgggttttcttgaaggcagcatgttgcttttggcatctgtgtccttggtttgggaactggagttctacttgtattccttgtttttttgtttttgtttttgtttttgtttttgttttttgtttttttttccctaacaagctgctctgtgcctacttagccacatcttaacctccttctgacctcaccgagcttttggtttttctctctacctctatgagtttgctatgttcaccacgccatgacatgggaaaaatgttttcaatggcagacttgggtaaatggaccaaggggtccaaggccctaggaaacatttgtagcttctagccacctcagcctgttcctgtccattctagatgctaaaagagaggcactaccaaacctttgaaactgctcctgacctaccactttggaaatgagggtagattacaagctctgtcgaggtgctcaggaaatatttgcttgctgaagttgtgacaaggcaggcatagagactcatcctgaaatagttgagcttgaagtagggcgatgcttgtaacttctcttatttaaatgctggacccttgacattgcttacctctgttaagtcttttgactaaataacagacaacagaatggagccagggaatttagagagggcttctgattgggatcggagcttcccagttgttacaagctttgcatgcatgtgtgcttttaaaacttcttccaaggcttaccccaccccgcaacttagcatcctgaacaaagatggtcacatgtcctggatggaatgaggagataaactcacgtctgaccagtttgtcttcatagggatgcttctgtgatgctcctctttggtcttctgggagcctgacagacttgagaagagtcaattaacaccgcagaaattccaaatatccaagcgatttgttgtaatgcagagggaattctttctatctgaagggatttgtagacaaaagggataagcagatgaaagtggttccccctttcttctagaaagcagtttcatgactagaaacatgtaattcagagaatagagaaggtagaaagtaaacatggaaaagagagtcatccattttgggtcaggggacaaggtcttgctatatgtatctcaggctgattgccaacttgtgaccctcctgcctttgcccatctagtactgaggttacgtttctgcatcatatcactaggctgaagaaattctatgcttttaaagatttattttattttgaataatgtgtatgtgtgagtctgtatgtgtgtgtgtgcacgcgtgtgtgagtgtaggagcctgcagaggtcagaagaatatctcagatcccttagggctggaatcatgagctgctagttgtgtgtgctggtatctgagctctggtcccctgtgagagcagtgcatgctctttaccagtgctctatctccagccccaagagcgcagtcccaaccttgaccattcgaggatagccatgcggtacatggaatttcttgtctcttgtctctgcgatggtggaggcagggtagaggccacaccttcaggatacttgagattagatctccccaccccatccttccatccccccatccccattacttctattttgtttaccttgatttgacagactagaagtgagacagctgccagcaggcgattgtgtgactgacgcctggctgcccagtctggcttgctgcactctttcattaaggcttcctagccactgtgttaacagtgtacaagttagtttccccaaatctgttttcatcttaggggatttcaagttaaaatgaatatctagagttcagaaatcacaaaataatgttcccgccttttagtttttgaccaccaagaaggtttgctgcctctggttaaggaacactaacttatagtgagcatggtttgaaagacaactttttgacagagtttgttttaaacagatgttctccgatcttctcctcagacgtctaaatatgtcaacagagatgactcgttattgtgcacttcatttcatttatgtattaatttatgtatatttgctttttttcaatttttattagctattttcttcatttacatttcaaatgctatcctgaaagtcccctataccctccccctgccctgctcccctacccacccactcccacttcttggccctggtgttcccctgtattgaggcatataaagtttgcaaaccaaagggcctctcttcccaatgatggccgactaggccatcttctgctacatatgcagctagagacatgagctctgggggtactggttagttcatattgttgttccacctatagggttgcagaccccttcagctccttggttactttctctagttctccattggggaccctgtgttccatctaatagatgactgtgagcatccacttctgtattttccaggcactggcataatagtctcatacgagacagctatatcagggtcctttcagcaaaatcttgctggcatatgcaatagtgtctgcgtttggtggctgattttgggatggatccctgggtggggtagtctctggatggtccatcctttcatctcagctccaaacttttacgtgtatttgtgtgtgcttgtgtctgtacacatctatgatcatctatataaacaaaggtaggtgtgcgtgtcaagtacatggatggagtcagaggacaacctcaggtggcaatcctcaactttgaccttgttagaaacagcatattttggttgtatttttattgacacctgcagcttgctagccccaagtgcttctgatatctttccacatctgtcctgacctctgtttccccacgggagtgtgttactgttacagttgttttcgaccagcgactggcttttcaatgggttctggggatttgaactcagatcttcttgctttcaccacaatgcttttacccactaatctatctccccaacccacatataaactttaaatacaaaataaggttgtgaattatcacttagcacaagtagtgatttgtggaaaatatgagtacaaattatgtttatatgaattattaattaagacatgggattttaatgctgagtctttgtagaaaatatccttccttccttttttacattaaaaaattacattacatcatttagtgtgacattttatgcgtgtggtcgagtgttttcatgcgtgtgtgtttgtgtatgtgtgtgtggtgtgtgtgtttgtgtgtgtgcatgtgagtgcatgtgcccatgcccatggaatcttttgtgccatagcatatatccatcatattggccccagggatcaaactcaggtcatcaggtttagtgacaagggcctttacctgctgaggcatctctgatcccttttttttttaaagatttatttacttattatatgtaagtacactgtagctgtcatcagatactccagaagagggagtcagatctcgttacggatggttggagccaccatgtggttgctgggatttgaactctggaccttggaggagcagttgggtgctcttacccactgagccatctcaccagccccctgatccctttttaaatactttgcaatggagcaaacccttacgtctttactctccagctttactgtagtattaggagcaacatttttggggggaagatttagtttttaatgcctttaactaattaagttctccatggttatggtcatgacaatgaaatctatattatctggaattcatagagataatcatattttagatatcaaatcaaccctgattaccaacttacttaaatactacattcccacaaacaaattgaactcattgtgttggttaagattgagcagttcacaccatcgtttcatttggtgaggagctagctatgcccaagtggacgagtattaggaagtggtctagtttgaagtctgtgcccatgcacacgtgcaaggtttgggcttaatttatgtttcaccagtctctgtggctaagtggtcttcctgcttttgtatttacagcatcactagaatcttgtgtttttgccactctcataaaaaccaagtctgctttttaaggtagggcttcatgcatggaattaaccagggaaagcctcgtttatatctcctgcaaggaggaccagggcctgctctctctctccctgccagaagtttttatagtaatactttgtatctcggctctggctcttaccattaaatgtgctttttatagagtagcaagttataaatgtagtgcagctacggcatattaatcttactgcagagatttaatgaggcagttgttttgcgatggacactattgggagaggagagcgacagagttttacttcatcaccgagctgcagaaatattccttgcctggtaataattataaccacatgatctcttcatttttctttcttttgctggtgcttttccatgcaaaagtggcttggaaggaggtccatttctgggcagcagaatggctcggaaattgggctgttttcttagtagtttgacattttagctttgatcaggcatggaatccttgttgcaaagagagaaatatgtaagatggtgtcaagcattcagatagtccctgccaggccactgagatggcttttaggtattcattacttttacttgacttttatataggttataaaaaagtaaatgtggtgaaacctcatttttacatggacagaatagaatttctgctggttggccttaagctgatcccacacttgaaattaattgaagtccatacctttattgcctccaacacttttaagccagggcaatttttcattttccccaaagttgtaattttattaaaccaagttgaagcaataacagtccttgagaagaagaggaaggaaagaactacctgccagagaccataatgagaggaaaatcatgcctctttcaaatcctcatttgtaggtaatgttaacaaaactggaaacagaatgccaccatttattgtagtaataacagttgtgcctctgttccaaaagtgaacctttagttcagatcagaacactataaatccagggtcccacagcccccttcgaaaggatgacctggaatgttgggttagcaagtgagatcctttgtgatggaggccacatgttggggtagcatcatttggggtagcgggagagagaggcgcctgaggtacagtgtgctttgcagtggccctttagggggcatgatgggggctattttaaaatcctgccctgtgagagggtttataggcaacaatgtggttggaagaacaaatgtccctcaggcagcagggctgggggcagggcgacacttacaggcatgggtcttgtgtttataaccccttagactgaagtcaggggtttgaatgactagcagagtaatacaattattttttatgattggatctcaaaggactttataaaaactccatcactgaggccatgtgcaattactgaagtgtagccacctgtgggaaagaaaatggttgacaaggcaagctttcaagatgcttcacacacccactggcatcaggaccagggacccctcacacaaataaacacatcttttcaatggccaagaaagaattcctggagcaagtggaggctgggggaaaaatgtctcatcacaaagaaagagactgagaatctagtactccctacacggaggcctcataggctataatcgaacccgcctcccagagggtcccacttaagtgttgacctaaaaacaaatccgccagttggctggagcatgcatcctaaagttgcagcacaagtgaataagcttgactgacttcagtccccaaagggttttatctgtgaacccagaagtgcaggcaaaacatttttattagtcttaaaatgaccctcactctaataaccagccacagcgatggaagcgcaggccggagctcctcctcagctctgaagagcagaaactctgtgcattcatatttggttagtatctttgatatcagatttttgtagaatactcacaatactgaataataaggaaagagacgtatcctttctctctgcatattacttaaagtattcagtctctttacttacaaacaaacaggcctgtgagtctgctgcctagcatctaaataaccacattaacattcagaccctaacacccacatttccctgaatgctgtcagttttttcagaaactgaaactcaggctaaacaaggacgaatattcagcatgtgcatcctgcccctagcaagcatttactggcgtggggtcactttttcgaagtgggacagttatttccttttctgaattgccctctgggttggcagccttttccttcttggctttggtctgtgagagctctctggaccattaccaacgtgttgagtctgtaactccagatggaacatttgaaggcaggaaacgccagtgaggtgggtcataacgtgtcagtcttagagaatgtaggtatgtggacgctttttagatttggaggcaactggtcccttcccatttacaaaataccaagaaggggccctttccctccttctttaaggcattctctgccccctcttcccattattaaataataagaggcactcacctggagatggtgctgggctgcacagagagtgaggcgagagagaaaggtccagttatatttttccccagagaggatctgtggaaacctcagtcaatatattgagatgggtagtgtggtaggtgttgacataaccatatttcagatatcaaatcaatcctgattaccaacttacttaaatactacattccccaaaacaaacaaacaaatgaacgaaccaacactaaatggcctactgtttggggcacttgcctctttcatgacccagtgagattacctatacattgaaattaaagtcgactttggtttttccaaatcatttgaaggatagtgatgctgttacattaatttcagattcagaggaaggctttgaacaatggccagacagaaagggacacgcagtgggcttcctcagagagtgtgacctgcaagttagcaggcagcccacagtagaggcatctgtgaactttccaagaaagatttggcaaatgcagatcttgtagattcttggctgtagaatttcaactattcaatgaaatatcacatatcatgtatttaaataatccggtatagtacagtcattaaaagtaacagagtcatatcgaaaatgtgactttaggtaataaatttgttaggtaccttgatacaacccatttgtaactgacatggattagacaagatcttaagataggaactctgacctggggctatggccccgtgggtaggctgctggcctagcatgtatgaagccgtggattctatcccacaccacacaaaacaggccgaggggttcctgcctcttagcctagcactgtggctatgaaggtagagagaacagaagttccaggttatcctcagctacatagtgaatttaaggatagccaacactttatctaaagacaaaacattgaaagtatggtgtatatctgattgtggaggacttttctacagttagaagttaatatcccccaaattaagctttgatgattctgatttcttctaatgtagctcccgttcctcctccccttcctgcatgcctgacatccatttccttctcttattcctctcccctttatcatttctacaggaacaaaggcattagtgtatgagggaggtcttcctcttctttgccacccatccatccatccacccatccacccacccatccacccacccaaacccacctctctctctctctctctctctctctctgtgtatgtgtgtgtatgtgtgcctgtgtgtgtgtgtgtgtgtgtgcgtgtgtgtgtgtgtgtatgtgcatgtgtgtgcgtgtgtgtgtgtgtgtgtatgtgtgtgtgtgtgtatgtgtgtgtgtgtatgtgcgtgtgtgtgtgtgtgtgcgtgtgtgcgtgtgtgtatgtgtgtgtgtgcatgtgtgtgtgcatgtgtgtatgtatgtgcgtgtgtgtgtgtgtgtgtgtgtgtgtttctagttctggtgatggttggtttctctatagtgaaccaaagtgacagcatataagcatatataatcaatatatggaagttttcagtacatacagtatctgtgccttgctccttatctgtcctgccatttggtgatcattcttatgatacagataggactatttatggtttgtacaatgtgcagctttgccatcctgataatgtcactttagattgttgactcgattgtaattataatttttgttcgtatctatggggttttttttctgtataatttggaaatccaaaaaacagaacaacatgtttttgatggcctttgtgcttggaaggacgcttgactgggtggcggagcttgctttgctctcactacatcacagataatagagtaactgtgcattttgaccagtttataagcagaggtcaatttcttgcctatggtaattagcttggctgactctgggcttttgtatggtctgttaatttcccatgaaagaatatatttagcagaaagaggttcattcttagaagtagtttctttttcctttgcattgaagactgtttatttttaaagtgatttatctttctcttttaatgaaaaacttctaaaaggcagtttaaaaacacaaagtgaagtttaagcatggtttgtttgaaggggcggtgtgtgacaaggcctatacagttgggagaaagcctctgctaataataccaatggacgcttctgatcctgtgtattacattcggagactgagccctctgttgcagcttccagggaaataccgcttctggttttggtagcaagaagatgaaatgcgactttacgagaacccatttttaaagctcatacttacagtctcaattttctttcagaccccaactgtaaacttgaagacaagattgaagatggggaggcagtagactgcaagaagaggccagaagacggggaggagttggaggaggacgctgtgcacagctgtgacagctgcctccaggtgtttgagtcactgagcgacatcacagagcacaagatccatcagtgccagctgacaggtaaacagtgccaatgctgtccccactccccatgctgttctactgatgattttttttctttcagtttgtccttttgtgtggtttctgcctctaattattttgctctgtacagttaagaccctaggaaagctgaacagggatgtggagacatagtgaggccatctatgaatatgttgtgctgggttcttagccagctggagatgtagactgttttcagggtggttggctggacaatcctgactaggtgtatttttctaaaaattcctgaatggttgtctcgggcagcctcagtgttgaagttctttagagtatgtattaggtatgcgtgtgtctatatgaatgcatatacttccatatatacacttatttatatatacacatatttatatatgaatacatgcatataattttgcttactttttttctgaaatgttgggaatacagtgggatattagatgactaaaataaaacaagaactcttttaagtagttttctaagtttgctaacatctattaacttattttagtttaaatatcatctcttcagacaaaccttctctggatcctgctctaagtcagatgccctttcatattcttttgaatgaccacactttaggctccagcatttcttttgttgttactcttctgggctatcgtttcattgttgctataataaaacactgtgaccaaaggcaactcaggggggaaagagttcattccattgcacagcttatagtctatcaagcagggaagttgggaacctggaggcaggaactgatggagacgtcatcaaagagtagagtgctgcttaccaacttgttctctgtggcttgcacagtctttattcctattgcacccaggactacctgctcaggagcagtaccatccacagtgagctgggcagtctcatcaatcatgaatcaagaaaatgcctaacacagtagcttactggccaattcctacagagaccttttctcaatgaacactccccggtttccagatgctgctactttgtgtcaaactgacataaaaactagtcaggaccagtagcaagtgaggacttcacatagatggctgccactgcgttatttacctaacccttactacttaatacctgagcactgcagttctcaccaagggggttcatttcctgcctccatcattagactttgggcttatgaagggttagagctgtgcctccacccttgcattggctgagcccagcacagtgttgggatattacttagctactcactaaggctgccatgatactttgctttgctgtttgctagaagaggaaaatgtaacactcttccgaaacacagcatgttcagtgtaatgactgaataaaactggaacttgtagaatatattcctcctcagaatatagttatctttgatatgcatggatttggtgtctctcaattctaccacctgttcatcaaaagtatttgaaaaacattttgttcacaggtagactctattctttctttttcttgtccttgttccctatatgataagaacaacggctcacctagcacttatattataaagctagtaatagagacaacttagagtatacaggatgatgtgtgtgggggtgcgattcttctatgccatctgcaagggacacctgtgaattgtggtatcctctagggaactatggttgatccctcttggttacggagggtgagcagataccaggcagggatgtactctgtgtgttggttggcttggctatacgaccatggaccacagaatgtcttgctcactgttgtctacgtcatctttcactcactgaaaccgccacagcctctgtactgtgtgggcagacatttccttctctgtctctctctctcttcccagcacagtctttctttcactaaggatggtcaggggatgtatttggtagacaagttgctctcccactgttttcctagaatatttatatttgtgtaagattttaatgggtgtttcattttaacaaggtttcctgagcagattattgtggcagagttgggtggaatccaggaaaacagaattcgttattaaagtgcaccgtggctggtctcttcaaggggagagaactgtgaacaactttattaagctgtgtggtctctcttgtaggaaaggccccctttttaggatcatttgtcccctactctcttctttgacatgaacctgacatggcctgaacctcacagagatctccctgcctctatctcccagatgttgggattagaggcatgtggttagaatgatgtgtactgaccgttttcctatttttataactttgtaagattttagagtaacttttattgtagtattatttcgaatgtatagaaagcttacgaggaatttgtagacctcagtattagttaattggctatgaggtgcctatattctatattatttgtcttctcctttcttctcttgcttgtcttgcattgcttaccatgattttcttactatttgagtagtctcaaaatattgaacccctagaatgcagcttctgtatttctaggggaccactacatttttccgaccaatgtgtagttactagattcaagaaagtgaaaaattgtttaaaaacaaattaatgctcatcttattatctctgatatctgatctataatccaaaattatttcaatattgttattgataaccttctctgttttgcctaatcctgaatacagcttcatgtataactagaatgcagcttctgtatttctaggggaccactacatttttccgaccaatgtgtagttactagattcaagaaagtgaaaaattgtttaaaaacaaattaatgctcatcttattatctctgatatctgatctataatccaaaattatttcaatattgttattgataaccttctctgttttgcctaatcctgaatacagcttcatgtataacttgtaattgtcaagactcttgtgcctgttctaatcaggaatttttctccaccttcctttgtattttgggggagggcacttttatagagtacctgacacactttgtaggatatccatctgagtgggtttgattgcttcctcgtggtcacgtccaggttctgtgcttgtggcaatgccactagtctgatgtcaccccctctttactattgcaccctggtcgtaaatagcattagttcattccagtgatggtgacgttaacaccgaagacttgctttccatggtgtctaccaatcttgttcgttgtaacttactgtgaacttttatttacagtgcagggacacgtcattgtaagatgctgtcctagctctacgtcacagaacttcagtcactgttggtctccattgatgtgccagagtccttgttacctggctcagtagtatttcttttcttaataattcatttatttgtatcatcattgatttttagattactttactcagtgattcattgttcattgtatgtatgtatatatgtatgtatgtatgtactaactgtctgtatatcatctggtcatctattgatccatcatctatttgtctgtcttcatgtccatacatttactaatcatctgtctgtttgtccatccattcatccatctatctccatccatccatccatcatctaactatctttgcatgttgagaattacaaggccatatgctggataggttcttactaccgagctacatctccagctctctgtcaacttttcagtgtaattactgttctagatttagccaatgagaataattttcaactatatccttaagtgtcggtttaatatgtttgtcattatcggaggacctgctttatttctgggacaagcaaaacttctggatcaccagggcatggtagcgcacgcctttaatcccagcactcgggaggcagaggcaggaggatttctgagttcgaggccagcctggtctacaaagtgagttccaggacagccagtgctatacagagaaaccctgtctcaaaaaaaaccaaaaaccaaaaaaccaaaacaaaacaaaaaacaaaaaaacccaaacctctggatcatgttcttttcttgtctagtcatgtcctgcgatctttttttcttgtctagtcctgtcctgcggtctttttggtgattattaccattttttttggttttggttgggtagtgtgatatctgggttaattttaggaagtagggtgtttagaagtcaagacttgacaactgtgtgctcagtgctatatcttactgtctatagagctttccgctgactgaaccagtacgtgtacaaatatgctaatatgatttgtaatatacacataacaagacctgtaacctactcccacagaagtgagcacacccatttgtattttccttggagtctaacaaaaatgatatttccaattcaacctaaggtctcaggcacaccccttcctttcttctgtctctgttggtcactgtcttctgcgatgataaaaacctgcctgctgccatcctcagtgaactgagtcatttgcttgagcctagaatacaccttaagtaatcccacattagctgactcatataactgtgataagcatgtcaaccgatttcaacttaatatcttctgcagttggtaagtatcttttaatgcagtctttgcatagaatacaattaacatgtgagtgtgcattgtgacttcttggcagaatgcactgtatcttttccacatgcagattttctctgactttctctgacgttacagtctgttcttccctgtcttcctcctcagtctccaccagaagtacccaggtcaggagttctttaaccatagacgcattcagcctgctataaatgggagtgtacactgtagtcactgtgaactcttctctgcatctccgtctttggtgtctgtgtcacgggaactgtctggagaggtttgaaagtctgtggtttttgtgtgtcgcctttgagggtgttccgttgtgtgcctgagctgcactgtgtatcccctcgttttgttgccggatactatgattgctttctctgttctttgttattctgaactaggctggagtgaacatctgcctttctttgggttaatctgcttgggttgctggcaggagtggaggggctgggtattgaggaggttgaggagggaagatgcctgtttgtagagacatgttcaagctggttcccaagatgttttgtttgtttgtactcctggcagcagttcctggcagcagtgggcgacttccggtgaccatccgtccaggccagtgttcacactcccatcttctgaattctgtctttcttttgggtatgaattgaccttccttgtggatgtgcttacagttgccagtttatgtgcaccaagttgactttgtctaatggctcttttccttagaacacagatttttgggaaaatccaggatcttgctatggctggcccataacttactatgtagaccaggctggcctcagactctctgcctcctgagtgctgagattcaaggccagttccaccaactccacctgagagtcctactacacacagacaattagtaagacactgttcttatgtggaaagctggtgcgttagatgaggctttcgctcatgtagaatagtgcttatgcgagcacagccttggatgtgcactgaccagtgtgaacagagccagtgagcaagctcctctaaggtgagaagttgctgtccatcctgcttcgggattcattcattcattcattcattcattcattcactcaaccattcattcctttgtttaattcttcattcctgtggtatttagaatcatatcagggttccatgctgtacttttgactagtttgtggattcttcattcttctaccttctccaccctttcaactccctattactggataggagagaaaaaaagatagagaggaaagggggcgacattatcattagactacttcttgccgacttggggtgtcgggttctttggggcaagtttgatctttgctgtcaggatattgagtttcttcttcttacccctttgtgcactgctacttgacaaactgcaaaggacagcgtccaaccaacactgggccatctggttgttcctgcctgggctctagcatttatatcctctgaaacgtcctctaaattctaaagtcacatactagcaaaaactatcaacagctggcaaaatcacgcccctgctagatagagcacgagacaaatcatactcagctgctgttgacagtgtgaagcagccatgtatccccacagctaggatttaaactaaaacacatcctttgtggttttgtttttgttttttgtcttttaagaaacccaaatcctcacaacaccatgtttggcaaaccttccaccactgagctattacacacaccccccatcctaaagttactttaaaagttaaacattgaaagccagcactgcattctccttactgagcatgcgcttcctatggagtgcctggctgacacttacccttatttcagcttcacggaccagagagaaagcaatcactcctgtctgactttaatggtatctgcagaacatggtatggtgtaggacagctaatatttatgggttaaatactgatttttttcctttaaaagtaatcaaaatttggtctctcttgatctaaggctttgagaaagctgcagtctggcctatgctcacatagctcaacattttaattaaaggtcaaagaacaaaagtgacttactgaatgaatcatgtcagaaaaggacaaatctaatgggttttgtttctgtgtacaaaaaaaaaggaacaaataaaactgaagaagaaaagagtgattgatggttctgatgatgatactggtggtgatgatgatggtgagtgtgtgtatgccagtttttctcaacctgtgggtcgagacccctttgggaggtccaaagtccacttacttcacatggggtggcctaagactgttggaaagcatagatattttcactgtgatttttaacagcaacaaaattatgttagtaaattgttatgaagtagcaatgaaaataattttatggttgggggtcaccacaacataaggaactgtattaaagggtcccagcactaggaaggttgagaaccactggtgtgtgcatttgtattggtgggtgggactatgtttagggatgtaaagccagagagggaagagcagaaatcacaataaccacattagatgaaggtgtgtgagttgaaatttgccttagctggaggaagccgtccagtctgctcaggagaagattaaagacaggaacaattttaattaaaagggtgatgttgtgccttttggtggaagttaggagacggtgctcctgagttatcttccagctgctgtagtcaactctagaaaccacctgtttttaaaacagtggtggcacacgcctttaatcccagcacttgggaggcagaggcaggtggatttctgagttcaaggccagcctggtctacaaagtgagttccagaacagccaggactacacaagaaaccctgtctgaaaaaaccaaactaaaccaaactaaaccaaaccaaaccaaccaaacaaacaaacatccctgtggatagaccaagctgatgtagcaaagtggtattagtgtttcttcttttctctctggtccacgtttaccttcacttttttgtttcattggtttggtttttagctttatctgccctgtttgtacatttgttaccttgcctctggttcttgtccattctcagactcctgatttccttttctatacccacccctttcctattttgtgcctctcatcggctcttaaggagtctccagtcattctgtgatgcgtgtggactcatcccgttaatcttgttgcctttctttagctgcttgcccctgcccaggtagactgcaacctggaggtatttccacaaatcatttgtgtgaagaaagagtgactctgagtggtgtgttccaggactcaaatatagagtagaattagggaaaaaaataaaagtagccacatgtctcctggatttataaaacagaacacaggtgcctgatggtctgaggcctgggggggggggtgtcacacaaccccaaggttgctgggttgttctgctgtacgacagccatagaaatcctaccttggctctttcgttctcttgactacaagatttcttggtaacttcacatctatttctttggtgacttttgtctccaaaaatgatgcagattttttggccagtctgccccagtgaacacaggttaccctataccaacaaacttcagtcctggaggagctagcctgagccaagctgttccaggtgatgagatagcagagtggccttgactggtgcaggaaacaacgcagggatggaggaaggcacgaatgtgcatcagggactctggattttaggaatgttttggaatgtcaacactgtttctaagtagcagatttgatctagagtttgaccaaacagcccaaacatagccaggggcgagtggcacctgtgcagatgaggtttttcttctttgtctcgtggtactgttatttttttttttcttttccagtctgtaatccagcatgtataagtaaattacatagcatccttgcttgaaggaagagggacaaaggtgaagacaaattcaaaccccactcttcagctggagccatagacggcagccacctgcctggccctagcctcgctgtgtattcctggaggctgggacgggaggagacccagccctccagtgctgttgagactgatgcagaagatagattatcaaaatatatgtttacagaaggaaaagcacagagaacctttcattgtactaatccacaaaccctatcatttcttgccagttccctcagggggcggggagggctgcgagccagaggagtctcatcacaggactcaacaaagctttaatagcagggtgctgtggcgaaggctgagattacgggactttattatgcttacaaaacagagtaggactcagcactgtaaatcatcaagcctaagctacacttcacgggctaaatgtgtaaagtgcacttggtaatacggctgctcctccttctgagtcctttctctcttgtcttctgctaatttgcaaactcgaactgtctgctgagtgctctttcacatcattaatgtggattgcttggatgcagatgcagaaaatgccaagtagatggtgtcagctcttcactgaccggcgcccgccatgctgtttggtagtccgctgagtagaaacccacaggacaggaaggttatgtgtttgtgagaagatatatttgcaaatcagattcctaaagctctagccagagctgttatttttttcaagtttttgataaattaatacatgattactgtatttacagcatttccacctccttcctgttccagctcttttcatgccctctttcaaattcattatctcttttcttaccaccaccaccaccaccaccaccaccaccaccaccactaccaccaccatcatcatcatcatcattgtgtgtggatgcaatctattgattccgtttgttgttgttgcttgtaggtgtgtgtgcttaaggatgacctctagggattgtaaacataccaggggtttatcccttgtgaagactaattatccctctctcaggagtcattacctgccctgccctccctccctccctccctccctccctccctnnnnnnnnnnnnnnnnnnnntccctcccctccctccctccctctttcctcccttcttcccttcctccttctcttgctgtttatttttttttttttctgaactcgggctatactggtctcaggtaagtgtcatactgctgagctgtgtctccagtacacacggttgttgttattgttaatcttgagataggctctccctaaattttttactattataaccaaggttggattccaacttgagatcctcctgcctcagccttctggtagctggcgttgcaggtgtgagctgcatgtggatcagctgtttttaagcacatagtgttcctgaattggtgtaggctttgagaatgcactgagtacatgagtgactggtgtgtaaagcagcatgatggcttgattttattttcaaagtgaggctttctaggatctttgcacagtttttgagaacctaaaaccttcagcagattcatggaactttgtgataactatttgttttgttttatccagagagaatcttttaaagtgaaaatgtgtcaaaggtatctgtctacagccttggtaaactaaacactaggtggtccctctcctgactccagttctgctggcaggacgatgaagggaagcgtgactttgtgttaaaactgcatttagaactcatttttgccatttttctcagaaagttgtaagtggaagtaaactgcagaatcaatgtgctgtttaaaaaatttagttcatggtagttgaatatgaggcattgtatgttttatttgcatatttccatattaaactcaatattaattcattatgtctttattaattatttaatgatatctatactagttagaccaaaggtagtataagttttatttttaaattcccttttcttagatgaattgtggcatcctacctaaaatctttccaaactggtagcctagccacatattgtcccaaaagcctggttgaggacagtgtgcagtgcctcgtggatagatttttgtttctttctttttaaaaaaaaattatttattttatatatgtgagtacactgtagctgtcttcagacacaccagaagaggacatcagatcccattatagatggttgtgagccactgtgtggttgctgggaattgaactcaggacctctggaagagcagtcagtgctcttaactgctgggccatctttccagcgccaataggtttcttacatggcccttcagtgtgtgcatatcatcgtggagactgtgccctttagacctttttggacaaaagtatgcattttcatgtgcttttactgatgtctccccgccccccacccctgcccccacacgcacagatggacaaatgcacagaagtagaaatggagaaatgatgtaaggatgagataagcatggtttttctatgactttgcaattttagactcccagactgctttctcgttgttctggttcattaactttgcccttagacctgaggagacacacctcacaagctagtgaagagaaacgaccacttgtcctggctgtgttattctctgtagtgggtgtagcctgggccttgtctgacttcccagttattttgtcagtgttgttcggctggtcttttacctgcctggatgaaatcatctccttctccctccttgttcacacagtagctagctgataaagcttctttctgccaggagtgctgggcagcactggccatgttcttgtagattacctatgtttggccatcaatatcttgcagttcttttcacagcacttttgaagtcagttgtgaaaatctgagacctaaattaaattaaaattaaataggatgctccctgtatctctttctctggagagatccgactgtacccttatgagaagaggcacacaggggacagaacatgaagccttccactgagtggactcaaccttaccttgctttcaggaggatttgttctaggataactttttaaagttttattaacttctgtgggtggcgtgtgtttgcccatatggataatctcagcttgaatttccttcaccttggttttgagacagggtctctcattggtttgaaagtaaacatttagactaggctggctggccagctgtctccagggatctctgcttccccaggactgggctcacatggtggatcagggctcctggatcttttttttacagggcttctttggatggtactcagggcttgtgtagagggcactctacccactgaaccacctcctccgtccctgaagtggcggattatgaacagtgtcttctctgatggaagctaactgttcagaccacgagctctactgtggagcaaagtaccctctgtgtgctgcagaatggttctccttgttatcacatactccacagtatgagaacaactccagaacctctgctgctgtccagtttagagaaagtgcttcagccagccatgttattctcatctaccagggcggtgactaagtcagctatgaatttatgaaagagtaacccataattggttagcaagtaaactcctttctccaattttggggagtctgttcgctttttaccttctgtaaacacttgctatgtcagcattggtgtcctttgctatggcagattaaaagtaagtatgttgttgtttgtaattgtgtgttggcggtgtggctcttaccacagtacacatggctgttataggacagtttggaatggttgattatctcctatcactatgtatgtcttggggtttgaattcaggtcgccccattccctgacaagagtctttatccgctcatccatcctgctggccctttttgtttatatatttggttttttaagagcagttttaagaagtagaagttccgtatctgctgctctcatgttaacatgcttgcgatgttttgtccttaaggctcttagaatggtttctataatgaaatgtataatggtttctataaggagccaggacaatgaattatgttttcttactgtagctgatgatacattgcatgtgttagctttattaaaatcaaatagctcacgtgctgagagggcagcttagaaaaccaccctgtcctgcatttctgtgtcatctcttgctcggtgttcatattctcagcctgcttttcctaagttgtgcatcacaggacagctgtgtgtaagcaggatgctcctgcaggctagattcactgaatggaaaatgaacggtgcatccgcttagctctaacaagaaaacctaagtggactctgccattagatggaactgtatttacattaatatgttctttgattaatttgagtatttaaaatggtacttaagagtgttacagtttcagaaaaaaatgcatgaacccatgtgttcaaaagtcttacctttgaacatctgctaaaacacggtggttttataaaatgactttcccttcattgtataatcgagagtgaacattatgatctaatctctgtataattgggaatgaatatctagtgatctaattgtctggtttcaggattcatttgccccaaacttgtaaataaaatgtcaagaacacaaaccatgggagaatatcttgaagaacttctagcctgttcttgatttccattgctagtgattaaagctgtcagcatgtccctatggatatatgtaaaaattgtaaaccaagagctctatttgggacataaaagctgtggggtcttttgtggggaagatgaattaaaagagacccacaatttccaagtcctttgcagtcatgccgcccactgtgtccacaaggacggggccatgtgcacagaacggctctctttccatgtcgccctcctaggtgtgaaatctacactatacaacgagacggtaaaaatttcacatttttgcctgagcacacttgcttctgttttaaaggtcattctccttaagttgctggtaactgacatctctttatcttttagactatgagttgccaaagaatctataaaaagtagatgctttccacgtcctgctctttgtgctaagcccccctgaggagcctgacctcagggactggcccaggtgtcacagaggtcagggacctcttaataggtcttggaggcaaaagcaggaatccttctcccctgcgccccagggcttggtttctttaaacttcaaggagttggactgggagcctccttctctccttcagctgtaccttcaggggaaattgatcgattagaagtgattattccaccaactctgaacccttcccctccctctttgttccaagtggagcctctcgaagtttaaagggatcgcgcctcctgggtaaacagtaggatgaatgtaggtagattactgagcagaactctttgaacacacattagagctgctaaaaaatatattcctaacagtagggactatctgaaagcaaaaggggtgaggaaacatttgtttctgtataattataaggtaattatgtgggatatttttgggcacacgattagctgttagaacgtagaatcacagtagcagctcaagccaggaaaataaccggatcagcacaaggaatggacaaacagcagactgagggtggtgactaagcccctaccaggactgatagcagccatgaaggactgggtgtgtccatatcatctgtaggcactgcgggggtctagccactgatggcttgcattgtcttctaactctttgtttaacaacaacaaacttatatgcatgtattgccttgcatgtgcgggtactttggatcgtaatgcattaaacatatctacatgaagtttttggttttttttaatatagttctttgactctatcctctgctcctcaaactgtctttgttccgctcctttgttgactaaagagagctgtggtcaaggatggccaggctgctgagctcccacagcttcgagtcttacatggatgcgtagtagacagagaaagatgcgtgctagggccaggtcccagtgaattctccatttgattcttgagagatgcccattttaaagtcagattttctaaatgaaatttcaattgatctggagacacatctactttcctgcctgtttctctaggtgatggaggctggctagttcattgtgtgtggtccctcgcgtgtagaggatactgggatgaagagtggttcatctgggtggggcgatgagtacaaaagcagcaaatcagagcaaggtcacctgccagctcctgcctccccatcactctcaaaaaaggagatggtttatagacaaacttatccttgttcggatgatttgaaacaacaacacatgccttgagaaaaaaaatctaccatgcattcgtacacaaagctgtattttttggttgtatcaataaaacattttccacttaatttatgaattatttaaagtgtgtatttttattactcagactgcctttaaacttaactttctatagtctaatttatgaaaatgttccccattgtaattaactgatcgggctggcagtctcctgagcgtgcttttgtaatgtgtttgaaatctgtcaaagctatcatatacctacttcttctacttaattttattttctatgaaaagtattttcttttttaccaatgttttatagttactatcaaaaagccatatctgctggctatacaaattggtttaatatttcatatttgatattttatattatcatattttcaaagagaaatctttaaagtgttctatacaagtgaacatttgaatatatttacttagtacccttcctgttcagacatttttttctcgctgtagctgagcactctgaccagcccttcctgttctgatgtttttctctcttagtttttcttccatttgttaaggttttttgtcagggcacagaccttaggccagtggttctcagccttcctaatgctaagaaccttcaatacagtttctcatgctgtggtgaccccaaccataacattatttttgctgctactgttatgaatcataatgtaaatatctgccacacaggatatctgatgggtgacccctgtgaaagggttgtttgaccctcaaaggggtcttgactcacaggttgagaaccactgactttagtccattgcttccatccttcattttgtctctctatggaagtacccctctgtactagacaaagttcagttctctgagcacatgcccttctctccatcaccttttggagccagtgcgtcttccagagctgttgtcatcacgctgctgtttgtcctgagactgccgatatcagacccattactctgtctcctgacttccaccactctcctttccttctgtaagcaaactgcctgccctttgtagcccccccttgtccatcagaaaaaaagaaagcaaagaactgttatctccaccttcccttctgtgagtgatcacacacaggtagagctcaagttgattactaacagcgagagtgaacattttcttcttgtgaccaatgcccatggataaaaatgttcgtacatgaattagatgttatagcagggtttcactaaaagctgtcaagtgcccacttctccatggaaacacctgcaccaccagcagcatgcctgcccaaagtcctctgtgcatttagcagaatttcagtgcaggacatttatcaagatcctgttatttgactcttttagcttggatcatgattttgccattgtaaaggtccaggaaaaaccacaagaaggtggtaaaaaaatgaagaagtgatgcttagtgggaagttttaggtaaatggggctgtgctctggtggggattgtaaagtcagagttctgtcctgcttttttttttttttttcctggtgacaggctggaatgttttgctttgatgggttccctttgccattgtcatctgacaccttgctgagaactttaaaagtacttggtctaccaaggcagggtctaggatccttctagttagagtaatgaaaaaactatggcacacaatgacatagcctacactgtgacagggtaggctcttagaatatagggcccaggacctttgggaagaatggtgtagggaaaggagaccaggaacagtctggagtctggagcttcagggctggcttcggggagcacatggtgtctttgcagatgaacaagatatagtaaggtaaactctgtgtgtgtgtgtgtgtgtgtgtgtctgtctgtctgtctctgtctctctgtgtgtgtctatgtgtctctgtgtctgtctgtctatctgcctctgtctgtgtgtgtctctgtgtctctgtgtctgtctgtgtctgtctgtctgtctctgtttctctctgtgtctatgtgagtgtatgtctctgtctctgtctgtctgtctgtctctctctgtgtctatgtgtctctgtgtctgtatctctctgtctgtctctgtctctgtctgtctgtctctctctgtgtctatgtgtctctgtgtctgtatgtctctgtctgtctgtctctgtctctgtctgtctgtctgtctctctctgtgtttatgtgtctctgtgtctgtatgtctctgtctgtctgtctctgtctctgtctgtctgtctgtctctctctgtgtctatgtgtctctgtgtctgtatgtctctgtctgtctgtctctgtctctctatgtctctgtctctctctgcctgtctgactttgtatctgtgtatgtgtgtgtgtgtaagggttgttgaggcagagctagacaagttctttccgacagaagagaaaagtagagcagtagaagtgaaagccgaggatcgcctgggcagcttcggttggatccaagacgggatcgttgagagttcatgtgtttcagctatctgttgctgtgtaacagactcagagtttctgcagatgacgatgttgggagcaggatgtcttggaaattattactaggagttacttaggaaactggactgaggtactgatcaggcttggagggtttctgtttagctcagtcgtagagctgctgactggagacctgacagaggcctcggcatctgaacctctgtggaggagagcacataccatagtaaggggctttccacaaagaacgtaatgaggaagagaatgagaaaggagaggtggtggtggcgaggaagactagaggaggaggtcaggtggaagagaagagggaggaggaagaggcaaggggtggagagaggaagaagagaagaggagaaacacaaggaggatgaggaataggaggaactgggggaggaagaagaggcgaaggaagagggaggggagaaggaagggaagcagtgtggagcatccacatgccttcctgggtatcttcctactctggtaactaacgtatggtatgaacccagggctgatatgaaagagaatcacacaggtttaagatggaggcggtaggggtcattggggctatactgtgggctcttgactgcaatgaactaggaagagaagttggatcttatgacaaaaagccaagctgagaccttccatgtgagtctgtcctctgcatttcaagcatccattatgtatgcatagtcatggggagacaagttagcaggggctctctgtttactggtactgtgaagtcaaggcagggattgtcctacattctaggaagatttgatgacaatattaagcttagagatgggtggatgtttgataattactgttttgagcaacaagtagctggggcaggttatgtgtacaaagatgaacgtgtgttcccattggtctagactgcacagagcagggtagactggagaactagagcaggcattctagataggaagctcttgcaatttgcgggcgggagggtggggccaagtccaagcataggtgaggaagaccacacaataactaggaggcaagactgctcaggtgtactgattggttggtggtgggcatgggaacaaggtaggaatggtttcagagccctacactcctagagggactccagtatggagcagttgacaccaacaccaaaatgagaatggaaagcagcttttcaagctagggtggtggcagtcatttttgccctgtgaaatttgagactctcctgcctagaacttgggtgtgtccttaggccagaagcaaaggtggttagcagactcctctctcctcctcttcttgaatcacggtttagctttcccttcactgttttctttcccacaataactctacgtgtgtaactctttctgatgcagttttacaatcattaacttaattttcgcatacatacatacgcacatacttacatacatacatggatggattatgcaattatatgtacggtcacgtttatgtgtgtgggcacaattgtgcgtgtggcacagtggtgccagggcccaaggttggcactgagtgttttcctcagtcactgcccactgtgtatgttgaggcatctggctggacctggtgcttccctttccagcgtctccagggactgtggttctgtgtcccttatgatggggttgcagggggcccccacaccaccatggtctgcagtgtgttctggggacctgaactctcatcctcacgcttcggtggcacctcccagttcatgttgttttgttatgcaaaatgtttgttcaggttgataagtacctgagaattctgttctgaagagaaggctcctgtcgctagggtgatttcagcaaatggacaggagcaccccacgtctctgcaaagggcatgcacaaaggagggagctggctagtgctcttgtctttccagagatggggatttcaacaaccaggcttactgcctcaccgaaacccagcaaattgattcttcactcccagaggattagcacagcgctctccccacacccctccttgtctcccctcccctccccggtcttcctctccctctcctttttcactaatgtccatctctatgggaaatcttattaaggaatcattagttttggccagaaactgccgcccccttctcctccccactaaggagagagagagagagagagagagagagagagagagagagagagagagagagagagagagaagaaagaattacaaggcagaattaattttactgttcattgcttggaatctgtgaccaccttgtgaatcttgacacaccacttttatggctgattttcagactgccgttttcccatcctctttctttgtattattttcattaaaaattccattagctaaaaaaaaaaaatcaatgtaatcattttggtagtaattaattcttagcagtcttctaaaggagaaacgaaggaataaaactagaaagtgttaaaataagtagaaagtcgtgagttctctcaagggccccttagaaatgggggtgtggatggtggagggggacattctggcaatcggtcaaggacggtggccaagccagtactgactgtcacccgagctgcatggctagaagctttcttctaaagcctgcgtatcttgaaggaaggtctgcaatgaagcactgataaaaccaccctttcccagagggccaccactccctctgtgagttttactgaagtggtgggagcatcagtctgctatagcatttggcacctgaagggggctgatgaacatcctgtgtattattgatattattaaacttgatcatggttctgtgagagaagtcatgggagtcagattccagatttgaaaatattcccgaagagtttgaaaagagaaagtgtgagcttagtatttagtgttgtaccttaaaacgtcccctttaactcagaagtactcccatgtagagcacttgcctggcttgccccaggctccaggttcagccctcagtactgccaataaataactcagaggggctgaagcatcctagatactgcaggaaggggcaaggaattctactgggttctctgtgtgccaccttgggaagatctgtgtattcgactttatcagaacagagaataccatgtttgggggaagaagaagaagaaaccctgcttctttctgttatggaaaaagtgctgaccctgcagtttcattctctataacccaaccccgcctggcattcacctttcaggtgcactctgtgtattgagcatgtgatcatgcgcagtgggcaccactgaaaacttctgccctcatattttacttactgactgccatagatttctccccacgcagacttctagagtgactttaaaaggtctctctccagttttatgaattagctcaaaaattagagcacattaattttcatttagtggagtttaaaatattcatatctcatgtttagcagacaagcctaagtgtcttgaagttggtctggctgcagtggaggtgccagggagcaatggtttggaaaaccacctgcgcttggtgtatttgtgttttctagggaataggtcggaacaaaatgtgtttgtgcatcaaatgttcagagacggtaggctgtttttgtggtgcgcctggcttattgaagcaacatatttaatggggatgtggtagcttgctttgctgagcaccatgaggggggcaaaggaaatgtgtcacgaactctactccaaggatcgaactgtgcactaggagaacaaaacactcttgtctgaaattctaatgttaaatgtggcagtgtgttattaaaaggcagaatcattaaaaggggcaagtggtgcgtgtgttcaggagaggtcttctggaagaggtcagaggtgagagctgcccagaggggtcattaagaagtgaatgggcagggaggggctgtgtgtggcaaagctagatagggcaatccagggcggtaattgctgatgtttaaaaagactccaacttcaaatcctgatgtctcatacagacaacagtttcataagctgtagcattctgtcacagcaagttgcacactcagagcattcaggaattccagcagggcagagtgcataggaaaagtgctgtaggtatacacaaagcaacctccataaagccaactgctggccggccagcaagattaacaaaacaggctttacctgcggtcctctgatgagagagcagcttgcagagtccgagagagtttatgcacagctgttaaaagtgtgttaggctgcttcggcagcatttgagagcagccagagacacctccacaacatctttaagatggaacaggcagtgcggactctcacgcaaatgtctttacacaccagaagtatggttagccagtctccaagagacaacacctatggcagcactgattacggaaatacttttgttgaaatgtcctggagatacttgagatacttctcaaggcttaattttcatttaactttcactcttattatgccgtgagcctttggtgcccatggaatgtaaattttctctagtgatggaagaaatcactggcattgcttttaatagcttaatgaaaagtcttgttgcttcttaaatttatattttcttggtgattgacaataggtcaatattttctctactttttaataagaagattaagaaatcaaacacttgcttgagtcctcccaacaacctcattctatattgggtctagaaccagtgggtgtagtattagtcttatgtttagtgaggtggtaatcttggtacagggtgaatggctacatttcccatcagccatacagtgtgaaaatccagttatcccaggtggaagttcccacttaacaagtagacccagtcagtaggcacagatgtcttctgttgtttgacaggaagatcctctttctcaccttctctgccccatctaaaagtctgtggggactttggtcttcagatggtggcactattttgggaaactaggagatggggcttagtggagtgaggtgggtcataggtgaatctttgagatgctgtcctatcctaggccttgacttgatttctttctctctttctatttctccaccaacattcttgataacttgatgtatcaagtacaggaggcaaagcagccatgggctgaactgtctgagatcgactcatcatggaattgactccttttacattgttctgttagtgtattgtctcagaagccatggctgatggacagaaacagaagaagataaagtcataggtgaaatagtattctctaacagaaagtccaagataaccatagcctacttgacaatgacgtttctttatgtcacttgggtgagaagtacagtggtaaataattgagagtgggcttgggagccctgggggagccctgggggtcttcagagaccaaggctttattccctggtgctccattatctaggacatgactggcattttcaagtaggaaaacatggctgctagagtttgtatcccatgtccagcttggattcagaagagagaggaagagaagagttagctgtgcctcctgggacagcttctcctgagagagcctgcccctgaattccacagtcacctctcactgacctcctattggaaaggatgggtgtggtttgagctacacatctggcgatttcacacacagttgctgtatttgattttttttattttacattattttataatattttatattcctagagataatgtctcttccaaggtcatgtataatttaaagaatgtgctaaaatgtaagagcttttaaattcccaatgtggatggacctctttctctggctgataacttacatgctttaattatttaggaaaaagcacatcacatttttccagtgaagaggctgcagtcaaaggcagagctaggggcgaggactattttgttggcctttgtcgttgttattgttttgagcacacagtactcctagagagaaaataaggaaacacgcctttatcgcagctgaaatgcttgataaagccaagtcaggcatgttatggatatatgaccccagggagtgttttctgaaccagggtacaacattggaaattctctgttcccagccaacctcaacactttctgatagatccttaggaactctatttcccatgaagactgattgtccttgtgtatgggggtaaattaggtgaaagacatgtcacttctgtaccttctgtatgtgatgttcatctaagcactgttagctttccattgtcagcagggggacagacacaccaatagggtgcaaccaaggtagaaaccgatgcctgacgtctgaagcttcattactaagcataccatggacttcaaagtactgtccctttagcccaatccccttcgtctttatggacctgcccagaatcacttgtgataaaattaaaggggttacgagagaatgccattttttcagttgttagtaaagtacacagggctagaatggaatgttccagaacgaaagcttagagttgggagaccctgtgtactcacctgattgagagcttctttttcatagaaaagaaaactggggaaatgacttgtctgtaaggtgcctgctgtgcaaggatgagggactgagtcttggtccccaggacccacacggaaggttgagcatgatcatgtgagtccctgttatcctagtgattcgggcaggagacaggtggatccctgaagctcactggctagccagtgcagtcaaactggtgagctttaggctcaggtaggaaccctgtttcaaaaactaaatctagagagccattgatgcaagacactgcagatgtacgtgtgcactgtatacctatgcctccacccccatccctgcctatctaaacaacagtaatatgtacacatatgtgtggacacccttctcctgaaaagaagaaacaaacttgagaatgatggtctgccaggacttagacattgggcttctgtctccaagtccagtgttggtttggcccagaggtttagggttccatgaacagttgtcgacaccacaagctcttacccacaagaatagtctgggtagaggacttgctaagaattgacacttgttccggagtttcctagctacacatctgcaagaggacaaactctaggaaactcttctccttttccccctaccacctaatttgaatatttccaccattaccaaggttctcccttgatgctttggaaccactgggagagaaccttactgatatttcagaaggactgtagaccactggatgcctgcacctgcaacagggtgctattttgtttcagtccagtggataggccatgaggctggtcaccattttgccattagagtaggctttctgggcctctgggtatacctgctgatctcagcaaggaaaagtctctccctaccttattgtggagggtgttacccaaagacacgaggttggcttcttgtattctgtgccctgagtggacagaaaggagggcactgtggttcttctcagcttctttagtggccacaccacacagtacccatgtcgtcttgtgtcctcatcagctgttctgctcaactggacacttcagatctctctaaccctgtgtgaagccttttccagattttaataaacctctaatgtgtcccccgtgtatatcctcggaactccataaaactgggaacagatatgatggaagaaaaagcaaattccggctgccagtagctcgtgcttgctaattggaaaagttatgggtgctttcaaaataaaagcaagtttatagatatcctttatagaatagctgttacattgttagagaattaaaatgtatgtcatcgcaacaatcatccaccgttatgttagcaaagctctggagaagcataaatgtttctcaacattgcttgatgcttgcaaattattaatatgtacacgtctgtgggcgggaaggaatttgacggaagaaccaaagggggaaaggaggagcagaaaggcttgaatgtggatatgggaatatacgcctctttcgacagcatcctggaaaacagtgatttgcacatctgtgtgaagaacctttagtatttgtaatgtaatttaaaagttatagtggcttctttacagttgctttggtgatattgctttggctttgctgaaacactgaaaagttactggttatatttagaaggctgtaaagaaacaccaaagtgagctttctgttttgcttctgcactgttcggtcaaaatgcacattttaaatagcaactcctgtaacattgccatctcatgcatgcatgtgtgtgtgtgtgcatgcatgtgtgtgtacattctgttacattgtcatcttgtgtgtgtacatgtatgtgtgtgtgtttgtgtgtggacagaggggggagagagagagagagagagagagagagagttagtttcagctacttattttacactgtcatctcctgtgtgtgtgtgtgcccattatgttttgtattgttgcaacaaagtacaatgaatgacttcaagggttgttctacccatattctaaatcaattatgaatcttaactatctatctgtataaacctatatagactttttcttatcattattccataaataacatagcataactatttgcatatcacttaccttatatttgtttgacaggtattgtgtagatgatttacagtacgtaaagaagtgtgtaggtcggataccatatgggacttgagcatctactgaaatttgtacccaaggggattcctagaactaactccccatagatgctgagctatgactacatgacagaaactgttgcaatttttgttgctgaataatgaaccactataaaagttaataccttaaaaacaataacaatgtattattctttcagactctgggttaattaggtggatcttcccctttgtatgagatgaacttggaggtccagtgtggtttcatctgcatggctggtgctggctgctccattctggcatcaggcttctgattgccatttatagaggccacctcccttaccatagctagggtctagctttcaagcagaagtgtgcccaggtttcggctgcagcctggggaagctcaggctcagaagaacactgtgttgctgccatcttcttctactatttcaaataagttccccatcttactcgggaatgagcaggggacatcaacgccatggtggtgacaggagaaggtcacactgcagaagagcatgagggacaagagttattattgtggtcaccttgggaagcataatctaccagagaaatcaaagcccttcttattatcacttcttttcttccgaagtctgtcatggcgttttaattgatctcgtgcctctccgggagagccgtggagcatggacttatcaagtgtaatttcttaaatggtcgccttttgtccccatatagcatagatccccttttgagagtggaatgcacttaatagccaaccccactctgtcctgtcaccagcattctttattttttaaagagatggtcatcaatatatagtggtttcttaccttgactctcatggggcaaatgcctattgcaaggccttaaacacctgttacaagggagtctgctccttcttttgcataaagtataactgaggatcccctaaatatttcttcctaggtgaacgtagtatatataattggtgtcatttgaagtctccaattctggctgaattacaaactgtccctcactttctgtctgtagcacacttgtgttttaggtcatctcacagacttccttgctctccttccctggactcaggagcacgagttcgtgtgaagcactccggctgtgttttgtggccacaggttagccttgacctgctgtggttgtggccccaagagccagcgtttactcagcagaggaaagctgctcctgatagagatgagtcagtttccgtctgcatcgagatgtttactcgtggggacaaatgcagaggatgacaagcctggaccatgtgaccacccgggattgtttttcctctctgggtttccacgtgggaagctgttgtagtttagagctttgctgcagctgagcccaggatgtccgctgtccaaggtgcatccatgtttgtcggctgcttctgtggctcagagccagcagcacattcttttgagatgcattcactctttagaagagggacaccatcctgtgtcttcctggaaggctggatggagccataggtatgattggttactaccagtgaagggccctcaaggtcagcaaattacagtgccattgccttctgcagcatattgtgtgtgtgtgagtgtgtgtgtaagtattaagtctaaaattatttctttgtggtaattgggaggcatacacctatgtgtatttatataagtgtataccttattagtttcattatcatagttgtgtctggatatggagagcgaaaagcaactccagaagcatttattttggcttattcctcaaatacacttagtccaccatgatggaaacacgtagccacaagtgcacaaagcagctggtcaccttacttctggagaagggaagagtggagtgtggcaaggatgtggagtggggcaaggatggaacaacccttccagattccctgttcccctgtcacccatcccttctactgacgcttcacttcctacagcgtccacaactttccaaagagcataacccagctgggtgcggggatgtcatgtgttcaaacacacatttccatgagtgacatttcatatttaaaccatagcatgtatatacaaacatacttaccgaagcatgagtttcttgcctaagtcaatacttgagcatgtaggtcgggtttgtattcagatacatgtgcacatatgtgggcttaagtaacagtgtgttccccggttagactagatcaagtgtgtcacggcaattacccaggtctcctatttaaagtatgtgatttagatgggacaaatgagtgtcacgggcattgttatggaggagctgagtgacaggggaactgtcaccatgctccccattctcctgagatgggcagggaagagggatatggaatactatcagacctcttggtttgagccttccatttgctttagcagccgcaggtctacaaagaagtgcccgaaggtctagtctcagatttactctgactcagtccacatcccataatataggcacaatgtatttgagagggactctggttctatgattggtcccagagttcatggagtgacagattcctttggcttggaaatttcttgtaataactgacagaaagtgttgaggatgtagtctgaaggctgctgagaatcccatattcctgtgattgtgactactgcttttctgtgatttcaatgaaatgccagtggtctacgtttaatgaccaaaccctataaacccctggtggatgaatgattgaatgtatgaaatgtctcattagaaagaacagaaaagatttcttctctaagatgcccattaaggagttatgaaaattcttatgttgaaaataagagactctgaaatttatctaaatcgtagtcctacagaattaaagaatgactgcctttagggaaaacataccgtaaaatgtgtgggaaaatgtttgatttatttcagtttgtagtttctctggaacctgtggtctgtgtttgtgcaacatcctagtgcacatggggctttgttccattgactattagctcatgtagtcttaagcagtgtgaacttttgtagacctgctacatgtagtgggagccacacatatcccaccttctagcagaaagctgtggtctattcctaatgttcagaatactgtctcaagaatttatgttaccctctagatggggtgaagtaaagaagaaggttttgctaagagttttgaatattgtaaattgatcctgtccaacaagatcctctctgagaagagaccatctggctagcatgtgcttgctatctcccctccttagcaaaactggactataaggaatacacgacttaaactgtatacatgatggatattttgaaagactttctgccttaaagaaagatgttcatgttttaggttccatgttaatttattgtaagtctgtcatgcttagtgatatcagggaagggaaaagaaatggtttctgtttctatattcttttccttcacagagtaaccacacaggcacacacaagtacagaaaagcacaagacattcttgtgaccattcctgcattcaatacttacttcccaaactgcaggtgccgtttctttgactgaataaatatccttgaacatgtttagaaatattcctttctaggatcctgttaacttgcaattgttcttctaattgtttttgagagagagagaggtagagacagagagagagagacagagagagaggcagagacagagagagagagacagagagaaagacagagagagacagagagagagacagagagagaggcagagagaggcagagagagacagagacagagagagacatacagagacagagagaggcagagagaaaggcagagagagacagagagaggcagagagagacagagaggcagagaggcagagagagagacaaagagacagagaaagagagagggagacagagagagacagagacagagagagagacagaaacagagagacggagacagagagagagagagaatgcacaaacacctgagtgtgcatgtgtgtggtgcatatgtgtatgcagtgtatatggagctcagtgggaagtgcaaggccttctgttccccattcagacactgtcttgttgtttgtcactgcatttgccatgggagcccacctgtgagcttaaggagcttgctgtgtaccctcctcccatcttgacataggagcattaagattacagactcctgctatttcatctcacttgacttgggtctaggagtctaaactctgttccttgtgtactttactaagtcatctttctagctgcctgactcaggatcatgaaaggcagcaaaatatagggagacacattttaagtaacacagatacttaggcaccaagtgtgaatcccagatttgggaactttggtttcaaaatgacccactttatagcaagggagacttgaacttgaccttgaagaaaaggcgatattgataaagataaagaagttagacatgcgttttaatacagacatcccacaatgggatcttagaaggccaagactactatctattgtttgttcaagaaagtgttctaattccttttcctgttccatatgactttaccaactgacaccgtgtcccatttcaaggccatcggcaatggcgttctgttagactatagtatgatgtagtatgatgtagtatgtagatgatttcctgaacagagaaactaaatggaggttcttaaatcttagcaagttcattcaaataactctctgcttcttgcataaaggagtttgattcttgaaatgtgcaaacccatctctaaatagaaggattcagggttatttacaattcctctgaatggaactgtatctgtagagaatactaattgcaggtgacagtcacttcactttgtgctgtagtgcctctgtcaacaaggatattattaccaaaatcatagatctagacagtatatatcgtattgtaaggctcttttctttttgaaatgaaataaagtaagaatgtcatttctaagtcatatgatcagaacttatcaaggaatatagacagaactgtagtacagaagacaagaagggaagctttaagccactgctgtgttatttgagcccctatgccttaaagcaaagtaatgagaaatcaaagcttcttagctagacatccatcagcctagctaactgtggcagttcccagggctggtcagaatggggcaccatggagaccttaagattctgctcatgggagtgaaaattggtaggaaaccaggatggtcttgtctaacaaattcaaagacaagtgtactcttcagcttggcattttcagttttttctagtttggagcaaagtaactgtgtgggaggtgacatgtgcttgcacatggatattcacagcagcacggttaacactgttacctggaaacagcactgggggcacagttaagtagataaagtctcatccacacaagcatgaaaacttgagttcggatgtccaggatccaaaaataagccagggatggagtggggtcaagtaggggcaactgcataagtggggtcatagggtaatcaatgagctcttctttagatgagaggctatcccccaaaagataaggtagagagagatgacaaaagataccaatatcaacctctagtctctacatacatgcacaaattcatgcttgtccacatacaaaggcttggacagatgtacacatacacacacacttgtgaaagcagcctagcttcaagccaatagagtgtcactatgcatgttcacatgccgggatgttatgaacaatgaagagaaatgcacagcaggtatactccacagggcgagggctcccaactctggagaaaatggagagttgactcaagaaaatagacagcaaatactatagcctgaatgaatccatccacacagagtcaaaaacttcgattaacctggctgctcagttgtctgcataggtggaggtagatgacaaacaccatcacaaaggtcacgctcactctgagacagccggaatagatgatgtgagtggggttctcggtggtctgtgtaagtgctgccagccttgggttgcttggggtgcagcttagctgccccaccactgaggaggttttgtctttctcgttgggtttcttgtaattattgactagattgcccatttgctttcttgtaactatatatatttctcgaaatatatagtatatgtacatatgcatatatacacatatgttttctttattttatgtggaggagataaagtaaggaagaaatagcagtataaaaaaagatttctgtcataaaatttcttaaagcacaagatagttctaatagaagcgtaggcacattttctaccaaatgtgtcattgttgttagattctccagtgaatggggaactacagctttactactagaatctaatactttcaaataagaagcctcaatttttctagggtctcaggaaaagaaaaggtccaagattttcaaaattaaacttggtaacaagctttcctctagttgttttctttcaggttgtatatatttggagatggcagcaggccattgagtgtcacttgcacggaaagtggctggagaatcagcagaaacttaacaatgaggcagggaatgggaattcttgtgttatctagagaaaccaaaaactttgtgttgctcttattatttcagaatcacctgtgaggtcctctttaaggaaagccttcatcagacctctgttgtacctacactgcagagtattacgcagtaatgaaagggaatgttaataaaatcatttctttttcatgttgatgtggatcaaagttgtgacttcaaaatacagatcataaaaatgaaccttttcaagattcttggttcctttcattagatttgatgtcccatgctctgcattaaagacatttatttgcaagtaagcaaaaccaaaacaaaaaaaaataccccaaacaaaaataaacaaagtaaaatacacacttcagttgtaatttgctaattataaatctattttttaaaaacaagtattttgtcttaaaggtgaatttttaattcaaatatgtgataatcacaatgaggcagatggatcaaaagtgaaggttgtgtctgcaagaaaggcttgaagcaactttgctaaaagcagcctaccaaattggcttattttctagataaagccatataatactatttaagtaactggattacaaaaacgaatgttaacaaagcagctgacaatttgacgattgagcataaagtcagctcatgttttggagagtatcctgaattcctactttaagaagctcaattaaagtttggaaataataattttcttgttaagtctctgaagagcagcaatagggagactgctgtgagggagaacctgaaaaagccagcattaaatattggacccctggagcaaagattcatggattcactagtgtcaaattattggtaatgactatttagagctctctaagaaatttgggagtgtgcatgtgtgcttgtgtgtgtgtgtgtgtgtgcttgtgtgtgtatgtgtggtatgtgttgtgtgtgtgtgtgcaagtgtgtgagtttgagtgtgtgtgcatatgagtaagtatgagcttaggaacttttaccattgagcagttctgcttggagccctcacttagacaaaagataaaagtgagaaaagatgacttatggtcatttctacaattatatttatgatttgtctctaattattgattaaaatgatccataagcacaggagactaactagagtgtctgtattttttgttgttctgctatttctttattttaatttatttatttaacattgaggaagtaaaatattgactgggaaaaagaagcaaattgtacaggagggaactactgagcactagatctggacgtgaccttgagtcctcactgagctgggtccaccccaggttcatgaaccactgagactcctaagactccaagatggaaactctctggatttgaataagatcaactttccttgtgttcagatggggaagttttatgaattttatgtatcttgaaattctgcttaataataaaaaagatagtttgaagtccatagttttagtacttaaaccacttatattagtcatattctattgctataacaaaaagtccaaggcttggtgacatataaagaaaagacgtttagctcaccattttggaggcccaaagatatgatgttaatgtgtacaggattctcatgaaaaatccttgagctacatcaaatcaccagaccatatgtgtgtgaaagatatcataaggtaggagaggaagctaggaataatttggtgctcagacttactcatttataataacctagtctttaactgtgtgtgcagagtatctcttaagagcattgcttgtcaagagaaaagctgatgatggcccatgacatgaggcaggaactaggaggtgggacattggcaggaggagaggattctgggaaatagtgagaggataaaaaggagacttgtctgggaactggggggcaggggatgtgtcagaggtaaaccagaaagtagctgaactgaagttagaataaaaagagcgctagatgctgagggagatgctgtggagatgcaaagaaagaaacagactgggacttaagagagttaactaaccaaatggtaggcatagaataacttgactgcgttaagtaagttataggccagtcatggaatgagccaaagcttgtggtcaatgcatttaataataaataattagtctcagagttgttattgttgagtactaagtagaaaagaaaaaacagatttaatatttttcacaactgcgtctcacaagagctatcatagttctttcaggggacagtttctccaatgacctaactagttcccactaggctccaccctttgagacagtgtctctctatatagctagtgagatggtatgtaacctatggtggcctcaaatgtgtcttgattttctgcaagtatcaggtaagaggtataagaggagatgcaaaagacctggtcctacaaggatgctgtggggagctttgcagaactcaacagttgcaaaggcattgatgaaagaaactttttgttttgcttttccagactctaatatattcacttattgtgcccctgcatgtagatcactcattggaagtctaagctccataacactgtatagatagtgatgaagacccaaagaacaaggcagtaaaattagcaatgtttgcacaataattgtgtgaatgctgcctggacagtgtgggtgatggtagggtgagggggactccagtgtaatgtggggtgctgtcaggtgacatgagtaagtgttagtgtccatgctcatctgatttaattcaagccaaaatatgcctttgattttctaggcagatttctttcttttagtaaaaagaggctcaaggatccttaactctgttcggtttccctgtcttccttctattctttatttccataagtcctaagcaggcaccgcttatgtatcaaatactgtcaggcactgcatcctttgttgttccataagaagttttgatgtgttgtttttttttttttttttttttttttttgaggtagatggactacaacttctgaagaactgggattaaaataatgctacgaatcaagcatcttccagttcgttgttgcatctagaagagatactaatggtttccttctgcaaggcccaagtttccaatttttctgtacagttgatatagggaaattctagttctacactcagaactagtagtgactgcagcatgcttagggcttaggctgcagggtggctggcgtccactgagagttgaattgtctgcaggagtgttggcatctgttgactcaaggatccttgggtatttgaaggcaaaagccagaaagctgacccgtgtttctcctggtgggagaaggagcttctattttaactaactccacacaaggggacccagccatcttggaattaataagtggcagttgtgatcctgtattatctcaagatcaaatcttcaatctacttttacatgcctgagcttaatccaactgctagtgggattaatttctagtgccctttacaatacccgggaatagactaagatgtccacatccagacatacttctgaggggtggggatactttccctagctgaagcacttaatggatcatgcatttattctgtctagtttaatgaatagtatttaaaagtgaatgtataattagtcacattagtcaaatatttgtacttttgtgtattttcacttttcataagatgctgaaatggagaaggtgctgtgactggtaggtagtcgcctcaaagatatttttcctgactcattatttataattgaatgtgaaagagtgtatcttacttttttaaaacgttcatcatcattatcatcatcgtcatggtggtggtggtgtgtctgatgtgcatgttagtaaggcaagtgcataccagggagtgggtgtgtggaagtccaaggtcagttgtggagagttagtcttctctttctaccttgagttgtggatatctgccttggaccgtcaggcttgaacagcaagcacctttacctgccgagccatcctgcctaccatcttgttggcttattgttgagtaatgtcgtgataggattcttcagtagtgccctggcagttgggcaaacctaatagctttattgggtgtctaatgttcctaccgtactttccccctgagacatctagaagctttatatttcatctgaatcagatttggacatttattagcaaaatagactacactaatagcaaagaatccatctatccatccatccattcatgcaaccacccatctttttattcaagaatatggcctactgaggcactctgtacactgctcttaggagcagcctctgtctagttgaggcctgttaggaagcaggatagtagcaccctgctgtctaagcagtttttgttggttctctggattctcagcaaggggcctaggaataagagcatggaatgcatatttcacaggtgttaatgcttggcctgattgatgaaatttcaatgcagaatgatataccagctttctgaggcattcctagctatctcagtggtctggtaggaactcttaggtaagttctgagggacaaagaacaaggttggaattggcccttcctaagaagatcagtgtcttggccagggtgttgtgaattctaaggtacagttcatcttggtatctttactcatccaagtactctctctgttactgcagatgcttataaactgcagacagcatgccgttcatgaatttggctgcttttccattgctgctatgaaaattgcaaacaaaattgcttttcattttgctttgacaggcagttttaattttattcatcattttaacaaactgtataacatttcagctatatgcagcttgtcttttgtctttttctgcactatatttatgccgaaaatatgaaaacaaccataaagaagagcccaataatagcaagttatagtaaaaagggcttattaaaaggatattttctgccagggtaaaaaacttccttgaacacatcataaatagtttataacgcgtagaaccgcacactttattgtctgcagaagttgattgtgtagctggccacattttaaaaattaaaaataataatctctctgtcccaattttgaatttatgttttgttgactcagaccttgtcacagcctaattagataatgattatctgaagtcacccgaaagtctcttcagcctcaccagagagttggggagtgagtgggggattctgttggttaggaaagatggaagatgctcataggatttatctgataacaacgtgtgtacattttcattttgtagaaaaatgactaatgctatccgggccaatgggcttgcttttattatgtgctttccaagctcttcgttgtagcttcagcaatatgaggagccctgcaagcaagcaataaaaacagagcagctctcttgctcgccgcctcattgatgtctctcacacaaggcaaggtctgttcaaataatcactcagtgctggtggcatgctctctaaccttgacttccagaggactggagtaggaagagaatcctgtctgccagcagtttgaaagaaaatcgtgtttattcacaatgctctttaggacataaagacttttatttaagattttcaagattgctggtaggatgattcataagcaaagtccagttttccttagggactaagcaccacggtttgttttttgtttttctagcatagcaactgaatttcatcattcattctgtcatttagcaacagaagacaacttcaccaaagaacttcacagtacgagtaaaattggaagtaaatggaagccatatgttgttgctgtaatttccaaggttaaaaaaaaaggctatagtttaggctatagccttttattctaagtggaaggaaggtaaatgcttttattatcaatggccttaagttgtaaccaaaaccaaaaaaaaaaacccatttattttcttaatggcagaacaagacacaggtgacttcagtgctcaaagcaaggctgatgtgtggcggtaatccatttcttaacttatgtacaactgtgcagttattaatgctagtcaggttatgtggaaggattcaggaaaattctttattcctcattgactcctgacagttattgtacctaggaactgggtaacgtgttctgaagtgagcaattatggaaatgtttacttcactggctgcatgtaaatgtgtgcagagaatgtaccagactttctccttgggggtatttaattctctccagggcaatgaaaatcaaatgatttctttctttctttcttttttttttttaagctttttttttttttaagtgttctaatgcagctgataatgatggatgcagtggaggaaaaggagaaaggtaggaaggaagaggagagaaagagggagctgccaacagccctcgaaagcggatttcccaacaggagagctgagaatggaggcagacagaaggccagccctgttagagatgcaagtttgcaggggaaatgatgagaaatgactcttctaatattctgtggcagtacagtggcagttgtcacacatttatctttgcaagaacttaagctccgtattgttcacatcgaaagccatcccacttgcttgttaatgaaacacagaagcagttcttcccatgaacagtgtgtgtgtttggggggcgggtagtccacacatgtatgtgaagttctggaatttctaaggatgcaaatgagcggggcatagtcacagccagattaccagtggcaaagagatttatttcttggttttgttttgttttttgtttttttgttttgttttgttttgtttttttgctttttgggttttttttttctcctcttttgagaagagggtaaattgctgagaataagatgagactcaggaggacttgtttttagcctggggagcttcaggctcggacactttctgcgagaggccattggagatggatccaaatagatacaaggtggtcttgggcctctgggtgcgaaactgagctgtcatagtaaaactgtttgtgtgcactgtctgaagaagtctagttgggcaagaacaattctataaatttcatgcaggtttatttattatttatttattgtcctgacgatagtgaaagtaaatactgttcaacttggcctctgcagtcacatgcctgtcactagagttgaacggcactgagaaggcatgctgactggtctttatactctctagttttgttttttttttcttttttcttttcttgcctggaatttctcctgaatttctcaaggaggggtttcataaaaagggtttttatgtcttgcagaaaattgagttttgtagacattacctaactcttgatttgtcacaccgggatcaataacatttcgctgctcttaaacacacagaatcacaggggacacataatgttttttataagtgcagtaaagttaacgtgttgttgaaacaaaaactcctctgacagtcttgtaataagtacactctgcaactagaaaattatctgtaatactaggaaaggcaggaagagcgcttaagagtacaatgtgtacgttgttggcatcaggcactgcaagaataagaaattagcatctgctgggctcggcatgtcagaatgattaccgggagtcactttcctcagaagagaagccgccggtccccaggagtgatgcctgccaccacgtttcaaccaagttccattgcttatgtttggtctctttgttctttgaggatattctgtattggttgcagagagaagccctttccttacagcaaagaaagtattggaagcaagaagaggggagcacattttctaagactcttcccaaaagtacacgcttcctggtccatcagttttcttttggaatctcctatgatattctaaagatgccttcagccagtgaaagtcccctatgatgtaatttgtaaaagctatttggaattgaaatcactcttggatgtgctttcatttcctcagtccagggagccagagatcctgggttacattagcctaggtgggcactgtgtctaaccgatgcggtgcccctgggccacgccacagtgtcttctctcaccccctttccacctcattaaatttcctagtccccctttcagctgcctaaagctcccctttttgtccatattttcatttttagttaattttatgagtacagtattattttccctctctttcctccctccaattgatgtgtcctgttctgtgccttctcaaattcatggtatcttactctttaattattatatgtgtatgtaaattacatatgcaaattacatatgtaaatttgtaggaacatactacctgctaagtccctctagtgatgtcctatgtctggtgtagtggtctggccctgtgggcttggatggcctgttagggagtcggttcctggagatgtctgaacctccctctctccacatctggtgctttgctccccgacttagattcccaggggaggagcactatggattatactgtcttagggagcgatgtgtagtctgtctgtcactgatgcatgcatgacctttcttcccttttggcaagcgtctttctctgtctgtgagaataacatggtagcctgagcatggccatgagttgaggtggagaggaggaatgggccttcctggtggtagagtggtcctccctgtgcaggtaggtagggatggcagccggttgaggccgatcttgtcacatccgttgccttccttcttcctccagccctttgctgaggaggtagctctatgttcatttaataattacccattttgctagtgcttgtcgccgagagcttcttgagccccatcaggttttcagagaagcaccactcacgctcttctgctgaaaatgtttttccttccctcccttctctccatcgcactcttccccttatcgacgctctcatcagcaccagagctcttcagtattccactcctgtcctttgtgaagtgattttgcccagacacgtctggctcagggtgaagtgccctcccctgagagcacgcactgcagccccaggtcgccagcaccatgaatacattattatcccaatttccatcctgttgccacggcagcacttttggagcggctgggttattaagtcgtacatcactaataccctgatatgagcagaagttggatttaatatcggcctttgatcagattacctcccaacagtcagctgtcattagaaaattcctttgctccttataccctcggagctctggcctccgtagcagaagggtggcaggcctgatacatggaggcaattttcagcccaggccctgcactgtacacttaattcattttctgacctttttgtgatttggggagattccatccctgcctcagtgcatgtgagtgtgtgtgagtgtgagtgtgtgtgtgtgtgtgtgtgtgtgtgtgtgtgtgtgtgtgtatgtgtgaatgctcatgagtgaagtataactgtagaatccatcttccatcctaggaggtggatagaggtgtgtgtgagaggtggcttgtcttttgccaagtgatactatactttgttggaaagtgtctgttttttgcctgtcctcgggtaatgtataaaacatggtgcttcaggtagagatgaagggtaaactgatgtccccctaaatggccagcctgtgtatgcacctaacacttcactgagcaatctgtcaacatgtcagcaacacatgttttataaaaagcctccagtgggagcaaaggctcctgccagggcttaggaaatgctttgaattcagcagatttctattgctggagtcccccgaggttccttttacaatgcctacatttcagaaatttgaacttgggacccttagggggttctctccgaatgcctgaaaatgtagagttatattgttgcgtgtccccaagcggtctttactaatacctgaattcggagaagctggaaattacagagctccccagggggagctttatccacaccaggaagaagagaataactctgcagggagattgcttaatgcattgctgaaataaaagaatttgagagagatgggttgaagtgttttttttttcccccttctttttctggccactccttcagcttagctaagtccttaaagacaaagtcagggaaggaagcagctgggctctttttaatgaaattttagatgtggcttttgaaatagtcagaagcctgatgctgcgcgtgtgcttgtgtgtgtgtgtgtgtgtgtgtgctcgcgcacgtgtgtgcgtgtatgttcgcatgcacacacatacattcaccactgtcttctcgctctctggaagccacttttgtttacatgcagaaagttgctttcaggttttaggcacgtcatcacttctgtgttgttttctttttaatgctcccaccgtacctgtctccattctttggacatatttcttcctctctctctcctctctctctcctctcttgctctctctcctctctctcccctcttgctctctcttttatggcgcttcccttttattacatctgcctgtcacactttgtacactccccctttcataacttgggctgttgccatcttccttgccaacttgtgctactttgttgaagtctctctttattcctaggacactccagttccttttttattgtctaccagccccaagtcccctctcttcttagcttgctgggactccgtgaacattttgagctgttttctgattaaatacatttcataacatttagtagtgacatacccttatttttgttgctgttgaatttcaagagagtcaggccacttgcacagtttagaggacatgcaagatttcggttcatgaatgttctaatggtgggtgtggaacataatgaggtagtgggctccgcgtgagctaacaaacagaacacacacattcacagcctgcacgctcaaggtgagaaatgcaggggctggaggagggggctctctcatattaagtgagtaaggaaacctctagtccatctctgctctttattatcactggaaaagggaaagaaaaatatcctccttgtgtgtgctccttctagatctttccttggctgtcttttgacaccatgtcacctgaccctatcaggagggggctgggggctggagctcatgtttacccagggtcctcctgggactgaaccctacctccgtgtccagcgtcttccagctccacagacaaagacaagggagcattctcacagagcttgctggccagggtaaaacagttccagctgtggctactcatgaatttttggggggagggaaaaatggtcttggcttgttttttaggtgtggctacattcgtaggcttgtctgcagccatcaatttaaaaaaaaaaaactgatttagtttaaaagtggcctgggattaaaacactaactgttttggaatttggcaaattataatattttatactgtggtaaactatggtaggagagagtagatttttttttttgaagttaaaatgtttcagatgtctttaagattagccaaatttgttctagacacaacgattttagtaatgtattgtattgttttgttttatttttttaagtttaaggtcatgttccgctattgaatagttttcccaactgtcttgttctcaaacgctttctagtgagacattatgatagtgaattaattgttctcagtgcagacacataaacttggaagagtgcagttgatgtttccagctaatgttcttgttgatgcaacagcgtacccctgtgaaggtttatatggggtatttattgtggcccagtaattagagactggcctcaggtgtgaattagcctgtgctggacggtagaccaggctgagctcttgaattagactcaggtggccattattgccaagtactggtaacttcaagggttaagtttagaacagagaaagcctgcctgggtaatgtgtgttaaccgagtagccaggtgttcatcttctgaggacaggaggaggcacaggttcaaagtagactccacgaagggaacagatcctgcagagtagtgatgtctgatgcatgttaggagctcaggctagccttcctgtgagatttccacagtcctttcagtggatggagcgtttgccctgttccttacacagaggtaccagctgccttttagcacaatgcaggctgactgcggttacagtcattctctgggcacttaatgcatttgagtgggatgttttgtgcttaagcacttgtgagtgtccaggggaacacttggattggggaccctaaaaaaaaatttaaggccctttttatctgtactctgtgtggtgccttccactgacaatcttctgtggtctttgatttctttgttacagggaagcattttaatcttggtggattttcaagttttgtttttcttattggcaggtgtccctggtaaaaggcagggagagaatatcaataatttttttctaaatatttctatgctaagtgtggcactcttacatgatttaaattttttttctatttagggctctgaatagccttttcaaaatgattcttgtgttgtttcaccacataggaatggaatagcattctgggcttgtccttgttgcccctcatgtcctgtcttaccccaccgtgagtgtgagcccagactctgtcacatctgcgtttgggccaggggtatgataaagctcacccctacagaactcctgtttctaccaactggacaatgtgatttcgggaccaggctttgtctccccaaaggctcccctgtgaatgtgcagcatgaaccttgctctgtcactgctagtctgatgtcctggtcccacactgtctggcctccctgtggctttaatctgcagacttctgctcttctccctctcagaggacagcccttctcctggtcagtcacctggacacccaactgtttccctggctttgcattcttggctggctttggctagctgcaagctcagtcagtaccatcaagaaaagttgctctaagtattagcgaaagaggacttgtaataaaagtattcaagggtgttctttgttcacaaatccacccttaatctatgccctaaaaatgatgaagtttgcagggatttttttccagaaacttttggtatattagtccccaaaagaggttcttaaaaaagtcctccaaggaagggtagaaaggttgattttaaatctttaccaagtctttgcccagcggaggagaggaatcctgttgtcttgtgggtttcagttcagcagcatctcatagatgttcatacccaggtgtctgcctctgctcctctgaccacacgctttgttccggacactccctgctgcccccagagtccccgtgcactcccgggacctctcatggtatttgctcagtaacactgcatgttgtaggagttgaagggcagtcagatgcctgagcatgctttctacttcctcttcctagtgcttgtgtgatttgaaatgttactctactccctgagcgttcttgcccatctagtgatgggggcagggggcaatatgctccccacacgaggggccttcaaaaagtaatggcagttaagcatctcaaggctattgtcagtttagaagccacagggatgttgcggggatggtggctgatttcggggaccttctgcatagcaaatgaatgcttctcctactaaaccacaaacctggccacagaaaaaaggcttccttcctatagaaagttgaaactccccacacttgatcctctatgtccaagaacgaagggaacatccctcactttctcattagtaattagtatttctattgaatggcaataaccaagccaaagtaggtctacataaacaatgttctaggttcttagaatgattttttttaatcttttcttttcatgactctattcttagtttcccatggaaatatgtggtgggtaatggaccatgaagactagttcataccctaggatcagagatgagtggctgcggtacactaacatgcatgcgtgtgtgtttgtgtattggtgtgtgtgtatgtatgtgtgtgtgtatgggttgatgtgtgtgttggtatgtgtgtatgtgtgtgtgttggagtgtgtgtatgtgtgtgttggtgtgtgtgtatgtgtgttggtgtggatatcgctctgtgtatctatacatgttgtatacttagttcttcagtgccaggtcctttgttcataaccgtgaaatagaaacaagtagtatgaagacttcgaggtgatggtgtcagggaaagggtagggcataggagaagttaaagcagcacctatggacaaagtgttagttgatttccattcctggatcacttcttggagtcactggatggaaagaactctgtccccagaaggctctccttctcaagaagacactctggtttacttttgttttgattcacatgggagagctgggcaggcacaaatgaagctctgtcagggtttagtggagaaatcctctccattgcttgagattctttgcccttcctcctttgttttcctcgttctaagaagcctggaactgtagatgaggtagtccgagggactttctaggtgtggggttaggtaaagatgcgcaagccagatggtttctatctgtagaaatcacatgcctttcaaccttggggataggcagtaaaggttgaagtgttcactactgtgagacttgggaacgtcaatgcttgtgtaaatgtaatataattaatttccaaaggaatacatgttaactaaaagtctgtaaatatgctactaggccaactttccaacatttataactaatttttaacctttaagaagctttattatatatttctttgttaatagtaactaagcaggaagcttctaaacacaaataaatacagtttatagaaaaaaaggacatacagactgggtaatggttattgtattgtaagagcaaaggaagggacacaaggaagtttggagctcttccatcttttcctttcttacaatccttagcaatttgtatttaaaaaaactgaaatgtgtgtatgtgtattgaagagtgtcatagtgtgaacattcaacctttgtgtatgtttctagtattagggccacattgcctgtgtacacacagaaggtcccctcccattccgactgctgtgtgcagcgctggatgtgttgcaggcaggatggccatctgtcatgggtgtcgaacaggcatgagggtggaggctgaaggaccaccaactatgtcctctgaggagccctccagcgccgagcctgtgagtctgtgaaataacttggccctaatgtagtgccagggacattctcttgaaacttaatgtgatatcatatcctttatcaatatattgtatcactgcagtttgcgacattatgctgtaaaatgctaggccataaaagcttataatttataagcctatgttaggtacttactttatgtattgtagcctgatagccttgtaatccaacattgcctatcatttatcctatatataattccatggagagttctggtgacattataaaccacaaaagcagagctcaagtggttagtcattagaaccccaagatagaaataccttgaattacattattcggtattcattattttctatgatgtgaagttaaaacacttgcatctggaacattttctatttacattcctcatcacggtattcatatacatgtcaatcatcagggctttgcttcagttccacatcacaactacatagagccttggttttgtagaaaatgtgtgcttctcgcgcagagccgcgttgtccatcattctcatcgtggttctttcccttggctgcttatcaagcaggaaattctgctgcctatccattgtgaagtttgttgttgttgcctgttaagttcaagagcagcagagtgcatttgtttttgaatgaagtctaaatcattcatacagagcccagtcaaaaataaacactccacaaggttcttttacacaaaacctgctgtagctggggtcatgggccaagggccacagtcgtgctaaggaatgctgagtccattaaagcagtatagaatgctgtggagtactttatgaggtctttgtctgtccaggcttcccatcatctgctaacatttacccaatagtcctcttctttcaagatttgttttaagtgatgggaattggtcctggtgccttatacatttgagacaatcattcgaccactgagctgttgtaagtttgttcttgatttataaacaatgccacactttcttgtgcgcctcatcttctcccttgtgactttttcttctcagcaacactttgattataagagctataggtggtgaggcagatgatggtcacagcagcagctggtctctttcacttgatttcagaatgaaaatttcccaacctccccctccacagtccgagttccttacagttgagctctattttttttcccttcggatttttagagactcaaagtttggagaaagaaagatgaccaaaagctaataaaagaaccaagttgtaaagaatggaaggcaagctactgtaaaaaaagaaaagaaaagaaaaaaaagagctgctttataacggagttgttataactattcacaggggtacaaaggtctgcagagggacagtggttacagccacttgttatttgttggaatggaggaagagaggcagagatttagacacaaaaagagaacacaaatgaagagcagtgaacagacagctttccctttaaatcgtgctgtggtttctctcctagtccatcagtgacttgaaagtattgaaagataaacaacccaagcaagggccttggaaccctgccatatgctaggatctcaattaagggatgaaattgcaggacactcttcagttagatcacaagggaggctgggatggggggccatccagcaggctgggggctgctttgggcatgggctgtaggggctcctagggcataactacctgcattagcattgatggctcttagtggcacaaatctcttcaaatccataagagaatagacccccggaagggaagaaatggctggagagtgggggtttaactttgcttgactcctctttgtcggccctccttgcttctttctctttggcatttgctaaggagtaagaacagcaggccaaggggggggggtggatctcaaatggaaataactctgatgctgtgtaggggcctgagagttttaagtgctattcaaaatccaagttgcagagaatcttggcgggcgcgtttggggcacttgagcagtgagtctctccatttgtgctcatttgcatcgctgcactgtcatattgtgctgtggcaccgttcgctctaagcattgcgttattgacttaaaaggtgtcattttccaaatgacagaggtatggaagcacattttccttatttcataatttgcacacagactggagaagacttatccattgtcacaaaattcggctatgatggatctcgtactttaactggatggtgggtgtagggaaatgtaccagtgcattaattttaatggaagactgtggcatcactgaaaaatattttgaaagtcaagtcatgttaatttccttccttccttctttcctcatcgttcttgaggcctgaatcattgttggctttttattgtttcgtgtcgccaaggaaaagtgttgatcaagataattgaggctctagttttatttatgttttgtgtgtcttttttccccattaatatgttgtgcagatagtagcttgttctggacttgtgaggaatgcagtaattatctttcttttacttattttcaccacaaaagtttggtatgtacacctgtccacactttcaggacatttgggtcatgaggtcttttgggcaccaagatttctgctctcttcacttgagagcgtggagggtacagaggtacagtctccaggcagcccaccacggaggttaacttagaaattccagctagacgtagattgggggttttgttatttttttattagtattcttattgtttatgttcagaatcaaccttttttctttctatagatgagaagccagctgggttaggggtatgaggaaggcaagggaagtgtgctggtgtgaacttactgggttgggggatagttggataattgagagcttgcttagcgtatgtaaggccctgagttgaaacagcaaaaataaaattaaaagcccagatcagctactggttgaatgaataaggaaagtagaagattagtgtatttggctttgctccaaaagtgtgtgcgcatgtgtggtgtgtggatgtgtaaatttctgtctgtttgtctgtctgtctgtctgtgtgaatatgtatgtgtgtgtgtgaatgtgtatttgcttttgtgtatgtgtgtgtaatgtgtgtgtatgtgtgtgcatatgtgtgtatatgtgtgaatgtgtatatgtatgtatgtgtgtgaatgtatatgtgaatgtgtgtgtgtgtgtatgtgtgtgtaatgtgtatgtgtgtgcatgtgtgtgctactttatttcagaccttctgaaataactgggtcacttactattgataatatacaatcccattaagctttcagtttaggataaatactcactaattgggattctctgactacaaaattaagatgggggaaatgtgtctgagtttgtgctgttagaacctcttcaaagacatagaagacaacaatcttccttgaaccaggcagaaagccgtaatgcatcatttctatgttgagcgagatgggacctaaacacttccttcacccttcagatgcctatctactctgagggaagtccgtctttgccaggacagaatcggcagtacagtgatgttgtttaaaaagttccaggagtatgtattgctgttgtacaggaacaaaataagtcaagtttctttttctgggatttcaaattcttcccaaggagaaacaattaatattaaggcctttacagtgggattaatttagtatatctctcaggagtatattaggtattatatttatacattataaagtatattttgatatgccttaaattaataattttctctcttcagggtgaatgtagagctcacagtttctgtctgtgtgatgggaagggagcaggaggaagtggggaaagatggaaaggagccctggactgtgtcctgctggcctgctggttatccctactgcagtcggagccttttctatgctagctgagcagttccaaaggtggggtgtcctaagtggcagggctaacaggagacaggccattttctctaacactgctttcaaattttacttttgaaatgtagctccttaaaagtgtgttcttcccatggtggccgtgaagaattgctgaactttttctgtctctgccatcacagtggctttcctggctggctcttagcagatgctgtcagctcctcacctccctcactctgacttcatggatggctgcatgtgctggtgcttctgagtcagggggaagggcacagctgcaaagagggtcacccctggagactcaggcttcctgcctctgcagggctggcaaccctggtccatcagccctatgacctgtctcccttccccttctcagattcgtctggcaggaaagcccattggcccccgtgcagaacgctaaacaggctgatgagggagggagagagagaagagaggaagccatctctaagaacagaacattttgacaacctatatttacaagactggacattttgaaagtcagccgtgtttcttactgtctaggcattcctcttagctgtcttaagcatataactgggtagcttggttacaaaccctgccagtcctgtgtgattgttcacctgcatggtctgcaaaacaaagtggagaggctctgtctgtttatttggactcactcacaaggtctagtccattggaactactcagcccacagtatcatcgggttgcagcaaaaatgctgctgtgaccccatttttctttcagtcgtgccgttaagttctcctccagtttcccttccttgttacaccacacacagcccaggatggaagaaattgccaagctcctcctctacaaaacactcccttacatgacagaaaggattcttcaaatgcctgtcatatccaagctagctttatcacagtgggttccagtagcctcacaaatctgcaggaaacccaccataaatttttcagttgcttcatgactgaatgtttgcactatagcaagatttttggcaatattttacaggttggatacggattttgttttgaacaaaagcccagataaggcttctaagtctttctccttttcttctttatttccaatttttcccctttggggttgaagcatttcttcccctgtgttctctgatgcttggatgaacagtatgatgctgaggtagttgtgtgcctgacagacataaagttaaatatacaacaacgatgaagaatccagggaacaagccgttaagtcccacaacaggctttaagatgttgtaaatatattcaaatggcaagtctcccatccacgagacacaacatcttatttcattttgaaaacaagtctgaagaatgtcccaagaattttacatcgaatgtctggcggagtgcaagtatttcttcattattccaaacttcttgcccacaactgtatcataaatacctgcagagttggctgcattgaactttgttacattttccttcacatcagaccgttctcttctctcacagtgttgtgctggtagaagctccatttttctattctgtgtaatctttggaaaagataccagtgcctttttattcataggcaatgagccattctcagcagatgtataattgtttggaacaatatgataatagttgccttactagtcactgtgtttgtgtgtgtgtggagggggggtatggggtggggggtggattggggcaaaacccacctactcaaaagggaggatttgttgactccagggtgatccaatcttttatggcaggagaggcatcgctatggtgatcatactgtgaggtttgggactcctgatcactcgatatcttggaagaccagagactgcataggaagcagagtgctatctaagactcaagtgtttcagttaggttttacttctgtgaagagatgccatgaccatggcaactcttatagaggaaaacatttgattgtggggtttgcctaggttagagatttatggttcaggtcatcatggtgagagacatggcatcactcaggcagcctgtcctagagaggtaactgagttctgcatccagattagcaggcagccagaagagagagtgacactgggcctggtatgagtaattggaaccttaaagcccacctccagtgacacacttcctcaacaaggccacacccccttataatgccactccctctgagtttataggggctttttcattcacaccaccacaccaaggttctcccctcgcctctgacctgcttcctcctgttacactcagctcctaatgcttccatgtcactctacagtgccaccaactggtgatcaactgtttaaacccatgagtgtgtatgagtacattttaccttgacattgttaaagctaacattcaggagcactgaatgagaatcgctggactctgggatgacttcagcagtggaactgagacgcatctggccatcagtcatctacacagggactgcctccagcccttttgtaagccagggtgaaaagaactgcaaggccactcacccacccacgcgcttcttccatccccattttcctctctagctctgtctcatgaaatatgtaactgtaattctttgagtcactttgaaattaaacggaactttcaggctttcattgaattaataatgaaaattactgcaagaaataatcagcataaaaataaactcaaagagaatgctgattgagccccataaactttggttctgaaacaaaccaagagaagaatgcaatcttttcagatagtgaaggtctgcaggtgtgaactgtggaactcaagcctgggtgaaatcttaaaagcttactgaatgcctgatttgaacaaaattgataaatgaatatcttactattatgtaattttaataagaatgagttgatcccagtgaagatactttcagtgacataaggatgaaaaggggagaaaaataacccataatagtagttttctacaatcagcatttgatgaagggatttaatcaacttggttggatatagcccagaaattccttatgataaaaattcatcagtattggcaaaatacttgttaaaatgcttatattcaacatttttagatcgaaaatgctggaacaaaatggcagagtaaatgtattggtgataaatacctattcctgttatcccatcttcataggtctacagaacaggtggttaggaccttcctggaggaggagttgaaacctataaacttcatgaaactggaggttcataatcagggtatgagttctaaatatcagtcctggggtggaaacaccttttcaggagaggtgttggtgatggtcacgctgatgctgatgacaatgataattgcgttgacttggatttttgaagatggagtcttgctttgtggcttaaggtgggcttgaacttctaatctttctgcctaacctcccaagtgctaagaatataagcacatcaccatgcctagaccttacttacaatttaaatatccatccaacaagagcaagtctggatataaacacacttgaaaaaatagctctgctggttacaaatgtgatatgttaatgcaaagaatgtagcttaggaaataggttttacatatgcactaggaaaatcattgaccttattttttttcatcaattagaataactgttaatgtaccctgatcactggtgttaaaggtggataacatcactagcttccatatgccagtcccaggcaaggaagtttaactgtcctagtaaccttggatgcattaatatattttgttccctggggccaaatgaattcagttcttaccttagttttgattaagagatgtgaaacttgtcacaatgtattattataatcgaaagtagtatctgactggaggatttttgaaaattgtccaagccagtagctacaaaacagacaagagaaggtttcagtgaccacttctgacgcttcaccgtgtggctgcatcaggttacctagcaggggtctccaagtcaagttcaagttcagagaatgttcaaaggagacaaggctccttcttagcactctccttgctccttcctcctgctctgtctacttcatggttctcaggtgctcagaacaactttaactcaccctgagttaccatctctgtctgccatactgaggccccagcaggtctgctgcctttcagtggggcacattctagccaagaaccataccacagttctcttatttctctgggttcacggaatcaacaaacttgctccttcgttatcttggtgattatccatcaccttccttaccatctctatgaaagtttaggttctctttttctttgaccataaataatgcttagtgcacatttatagagagataagatgaactgttacttagaggaaattgatgctataatctaaacctcccaagtggctttaacctgctcagacatctttggttttagaaggaaacatctttgatttaagtaagctaaaagatgacctttgaatgggccaatagaatgaggaacattatcgagtatcaggagagaatgcatttaaggatacaatagttgctatggagaattagacaacatgaatgtaagaccccagaaaagttaggtccttaagctgttactgtttacaaagaaagaaacaagaagccattcaggttactccctgcttctcctgttctgggagcagaggagagaagagaatatggaggccagaaggagtctttacacattgtctatctgtcttcgtaaggctaaacctttggttcattgtgtgccaatccctttagttgttgctttccttaactaagggttttatagccctagtgaaaacataagaatttagggtgtttgctagaaagcccccaatcccttagttctgtgagaagaagggaggctgagtcttaagctctggctcttgacttcaggcctgggcattactttagtctgtaggcctctgagcaagagctggctttctttatgcacgtaacatggagtccctctgacaggcaaggccagaggatctgcacctagagcagccagggaagttcattgtgtggcttttaaaacttgagagaaatgagagagagtgtgggaaagagaaggggaaggagaagggaaaggggaaagggaaggggaaggagaaggagagaggaagtggagagagagcagagagtgtagcttcctgggcagagaagagctgttcttgtcctcttctgcggaaactgttagaaccatcgaccctgcgaacaccgtactgggttagggaaaggctagagctgtggtgtcagtctgagcagaacttgtcctctaggaagcaggtctcacagatctgacagcctgtgcatgtgtcatggctgctacttcatcttttctataacattacagctttaccacaggagaagcggagagaaagctcagtgtgtttctccctggtttgataaaactgcaaataaatccctttcctttatcaatctgagtcctgggcagatgcagcagggttttgagtctaagtaccccatgacagatacaacagaatgtgtgttgtgaccagagaaatgaggatggtgggccgcccgtggaatagacaagcccttctattgggctcagtcagtgtactgcagagtataccctgacagggatggaaaatggcataaaattataaaatcgagcagagaatctttctcttagcttcagcgggtccagggtacctcaggaataagcagacagagcgtgtacacagattgagcaaccagatttcaagctcatctcaccatccttgcttgtgagacagggaagacctagtcctaaaagacctgtactcaatttgctcaggggctatgacatggctgacggtgggctagactgaggctatcccgaccatccatctctagagatccatctcccctactgataatgccatccacacgccccaggatggcaactcacaggcaagcgcctgagaaaagccttgctccacaaagtgtcctggacagaagcttttcataataggtcatttcagtctgtggaaactgtgccttcagtagaaatgaaatgacagtcatttttgacccatgggggttcacctcagggcccccacatataatgcaacctacaatggtcaatcctatgtataaaattccataaactttgcatataatctatgtatgtattcttatactttatgtctcatcgagacaagggtctatcctcaaactcaggcaatcctccacccctagtcctgggttacaggggcacactactatgccacggatccatccccctagtccttatggactttataaaacagatccataggttgaagcgtatttatctgatggagatgttgatttcatgagggaaacaagctcctgtctgtttttcttcctttcttctcaccttctgaaccctgtgctgagttggccaactttccgtctttccttttagactttattacttccccccacatacgctagtctccttatccaaatagcttgcttctttctaccaaccaacagtaagagaggtagctaccagttttacttgtgtaggttgtgtttggttttaccattctatccacaaagacaagacacgttcacatcgtaaataagacgtagtgctgtgatctgaacccacagcaccatccaattgagaagacagttgtttatcattctgctttgcagtctctggaccagtcttgcagtcatctctgcaggccattgggataaatgtcagcatcctttgtgtgtcttctgctctgcccctccccctctgtcctctgtgcttgacaggagccccacctagtcctgatgagttccatccatgttggcctcttatgctgcctgtctgcttgggagtcagggtttcccctccatggtagtttcatggctgtttcttctgggcggtcgtcccagaaccctgtcttaagtgcgtctatggttgtgtgctttgaacttcttggttgttgtttgtcttctgactgctgtgagctccataaagtctgaaactggctgcggcatccccagtgcctgcacagggtaggcacttaacaagtcctttttatgcaactcatggaaagaatgaatagtcctgactttcgagtttgcccagacccctggccccgcctccctgcctctgcagttctgttttctgtccactcacttcagcttctcctggaagtctgagcccacagtatctttaccagtcattttggaaatgacccagtctgatcccagccagatattagcccctccagtatgtaacagtgtacgtatttattggattgaagcaaattgataccataactcagtcttaagaaggtttattttgccagggtcatgagaattgaatcaaagggctgcttcaaaagtttcttttctgctaaattacaaatctaaacttggctgagacacgtagctagagtgagccaatttaaaataagctcctggtctgctcctgctcctggggaggaacgacctgcctctcaggtgccctttagagaacccagactgagttggatcagggagaagacagacttttcttatcgtagatttaattgcctcctctacctctcttttgctttctccatccctccccattctctctctccctcccttcccccttccccctctcatgtgtctatgggtgtgtgtacatgtggaggccagatattagcctgactactgttcctcaggtctttttgaagcagtgtctcccactgaggcctggagttcactgagtagactggattaagtacccagagaaccccagggatccacctaactccacctctccagtgctaggactcagtacatgccaccacacctcagcttttaaaacactgattgtgagaccaagcacaagtcctcagtcttgcatggaaaaccctttactgacggagcttccgaggaatagagatgcagatggtgaatcttaaccacatgggttcagatctgcctgttgacattctcctaggcctacccatgctatggcatatagcccgcggtagcatgcatttccttcagcttccccagctcaacagcctttgggacttgatataagtgaagcacgtggtaaggcacttggctcaacttaattgctgcagaagtgatgctattgcttttattatgctgctttaaatgtgaataatagttggtgtttttaacaccaatgtctgagtgccctggaggaaaccctaggtaggcatttgttctaaacagggcctgcatttcttgtatctctcttgccatttttgaaaggctccctgaaacttcttttccttggttgaatccatagacataaaaaaaaataagagaggagggctggggagtcagtctccctcctttatggccatatgacctttcctcctcgttttctatttcctgttttgttccagtttcggctaaaatgccctccagcctctaggcttccaatgcatttcttgggtacctagtcttataacatattgccattaggagtcttttcttgatctaaaacctgaattttcctttgcttaatttaatccctcctcacatacacctcggacctctttaaataattcttctccctcgctgccatttgcacctttcagttacttgtagagagttgtcatagctcccttcgggcctaatcctatcactgtgattcatgttgggcaagctgtacattttgtactagtctatggacacattcttagactgctgcttggctgaaataaagacaattctccagtggtatgatccggaccttatcatcaataacagctactaaatgtgaaacaaagcaagcgactttttgagaaaacaaagaacggaataaagaggaagccgtcgcttacccattctattattcttatcaatgatggaggtgccatgtgctgagagtggtacaagtcactgtcttgctttgatctaaattctgtatttataggaggcggctttatgaatagccacaaaggtagtgtgacctacagatgttttgttttcaagagtgtgaaagcctgtgggtgactgtgcaagcagtgttttcggagcttatgctgagtcttttacagtgaaaactgcttccgttaaaaagccgcaccctttattatgggctatggacctcctcctgtctccaaggctgcagctctttagagatctaggtccggcctcagtgactagaaaagtgatgaggaatttgaagacatgccctcagtgacttgcaaaatgtctctgagaagttgcatgtgtcttggggaggtgagggaccagggccactgctgttacgtttggggaggaggattggaggagaccttcctcttggctcgtggggctcagctgagctacaggcaagcagagaagaggtggcttctccactgaaggacttcttcctctaaagcttaggacttctccctctaaaacttaatggctaggtgacattgtgggactctatctatctcctcctaaaagcaccaaggtgggaaggcaggactgagacagtggccacatgtttagtggtcagaggacctttcctagcagattggcccttcgggggctgatagactcgctcctggctggacggtgctctttcaaacctgtgtcaaagctcattgtttatgttacgtttacgtgcccagctctagaagcaaattagaaagttgactgaagttgacatcctttcaacccttccagaagagatcttccgtgagttaactgggaaaacttagactttacttaaattagtgtttatttctgtttccctggaagcagcagaagtatttctacagactaccatggaagcccagcccccagccttctgaaggacagtgacctccctctccagatgcgtttcctgctggcctttcccacctgtgtttttttgtttgtttggttggtttggttttttgtatgcttttgcttcatccagaatggtctctatggtcattcggggaagtccttttcgacttaactttcttacaaaatcagttcagtggcatgcttggttgtcttgggccatctggggacctgccacctctgacacttgtgctccttactctgcctagtgggcccgcgtcttctttcagtcacatgcacactaagcctcctagccaatgccaccctcctgcctgcctctatccctgtcatttgtccttggattgtcccctttggcagagtctgagcgtgtctggcataacctggcctctaagattcttttgtgtgcagtggtcctgggtggtttcagtccttcacagcatcagggtggagctggggactctggatgttaaaagccctcaaagcagctgtacacacctaccaacctgatagaatctactttcttcaaatctcctttgcttccctttaagatctgctggttctctttctttgcatagtttaatttcatagtttaatcgctcacttgaacaactctaattgtggcaaagtatacaaggcctggaagtctaccgtcttagttttgaggtgtacacttcagccgtcctgaacacagacgcttctgctgtaactggtcgctgtgactcttttacttgcttgttagcttgtttgttttctgagaaagggtcccttgatatagctcacagtgacctgtaatttactttgtatatcccagggtgaccttgagtttccagcaaccttgccttagtttccctagtgctgggcctgcaggttgtgacctgcctatgtccacatccaggacacttttcatcttgtagaactaaatctctacagattaagcacccgctctccagcttctttctcctagcctcaggaaaccactatcctgtttcctttctctgtgaactcaactcctctatgtctctcacataagaggaagtattatgagatttgactcttaatgctggcatatttcacttagagtaatgtccttagtgttcacaaagattgtacattaaatgagactccccgttttaagactaaataatcgtccactgagggtatgtgtcctgatttttccaaccgtttcctcatcagtgtgcatgcaggctgctttctcctctgatggccatgagtaatgctgtacagaacatatacctggtgcagatccgtgttctacaaccccttctgtttctcttgagtgacttcccatggattgcatggttgacagttctaaagtctggggtctcatgagccttgaggtgagtgactttgtcacatgtatctttgtagcttcacagtttccagcacagaacttagtaagcaacctgctggatgagcaaatgaacgagtgttttctaccattggcctttgagtgacttgtattaagacattctttttgtttaaatcagaattcaaataccagggggatggatatgctgagaagtatagccagttactatatgcctgccaaagagaaacgagaagcactgtgtacattcttatatagtggttataacaatagttttatgattggtgggtgcagctttatataaaattgaaaaaaaaaaggtattaaagttccaccttcacttttactctgaacataaagagctataactcactagctactaaaattccaaattgctactggtaaagccaaagtcactgtaacaataataattgtaaaatgtaaagtaatcgcaagcaggttcacgctcagtgtaatgatcagataacgtgagtaaaagcagcaattatgtgttcctggaccacactggaggcagaacacaagaaaggcgaatgccgtgcacgtgtcattactaagggagtgctttgtatttactttgcacttgaaagtttgaatgatccagctaacagaaactgacaatacctgtactttgtggcacattaaaattgcccagacagtacgacaaattgttattttacagccatcccacaatataggaactacttaacttctagttgaaatcataataaatttgcataactcttactgagagttttccttgtgctggttcatttctttcaaaccctttcttgggggtggcaccaccccattatgtcaaaggctcagggtatactatgaaaagaaaggtgggatggggaaggaatccagacaaagcctgtaatcaaacaacacccccccaaccccctgccaggcagagcaggtcagttggtagagtgcttgtctcatgtacacaaagccctaagttctgtccccatgctagcacgtggttgtagtttcagtatataggaggtagcgacaagaggatcagacatgtgttgtcatcctcagctacatagtgagttcgaagtcagcatctgggctagatgagaccatgtcaaaagaaccatgctagacattgagtgtccatattcagatgtcaagcccattttcagagtggtccactcctaggtccgagttacaagaaatctattccatactcaccactttgtttcttgtaaagctctctgttagaacactaagctcagacatgcttctatagaggtaagatgtggagacaaagatctacatggtcatgcttgttggtctatagagggtatctggatatgagtgcaaatgaccagggagaaggacttagtaaatcaaccataaccaaaagtccgccagcatctgccaggaagaaacttaattgcttgtaaacggtattaggctgtggataattaagaacttggtgaagtcaccatcagggccaacttccctagggacaactgatgaatatactgctagtgtagcaatagagaatacacatttttacctgaagacttaccttggctctgtaaaggaaaatgggttaaagtataattcaagagagtatgcattattaacaccaaagaacacacattgataagcattgtgtgtagtgtactcgccttgcttgattgattttgttgcatggttcaggctatctttgtcgacacacagttatttgctgttatctggtgatgataaagagagggtagaacccaacttaaagctttcatcattagtatggctctgaaggagcaaagaacctgatttctttggtccatttgacagctgggcatgttggttctgatgttcatagctgtaaagcactgtttttcagtgttatagcattatatggttatcttgctcaatggcaagtcagaccgccataccatcacaataactgcaaactaggggcaagtgtttgagttcatgtgtgaaaattccagaagtgtgagttgctgctaataattgggccatacttctgctacaagcccttgaggtacagtgtaagccaacactggcatgccctacccccaagagtgagttccaagcaagtcaccaggctgagtttccccttgctgttccttcctgaatgtcctgattggttaggaatgtgcctcgaacagatgagtgcttgcacagcaggcaagaagccccacattcagtttgcagcactgtacaaaaccatgtgtggtagtgcccacctgtgcctgcaacactgggtcattcccagcttcacgtcaagtaggagtccaagtggttactctttgttgctatgcaaatgtggggatttcatttaattttgacttctttttattttttatgtatgggtgttttgcctgcatgtatatacgtacatcaaaagcatacagagcctgcagcagtcagaaggggcatcataaccacttgaactggagttatagacaatggtcagctgccgtgggtacgaacctgctcctctgcaggcgcagccagcatgaacgactgctgccctgtctctccagcattcacttttgataaatcaattgtggattagtaagtgtgttttcttgaagcataaactagatagaaatgtgcctttcctttcctcttttcttgtctttgtgtatgtggcagggtatgtgtttgaacacatgcatgtataggtgcattcatgtggaaatgtatagaggccacatgtcaaataccttttcttagtcacttctccacctcatcattattatttcttccccctcccctccctctctccctcagcctctccctccccttccccctcccccttctctctcctcctcctcctcttcctcctcttcctcctcttcctcctcttcnnnnnnnnnnnnnnnnnnnnnnnnnnnnnnnnnnnnnnnnnnnnnnnnnnnnnnnnnnnnnnnnnnnnnnnnnnnnnnnnnnnnnnnnnnnnnnnnnnnnnnnnnnnnnnnnnnnnnnnnnnnnnnnnnnnnnnnnnnnnnnnnnnnnnnnnnnnnnnnnnnnnnnnnnnnnnncctcctctctcaccccccataactaggttacatgtatttgtcaggcccctggcttatatgtatggtcaggggatttgaactcagatcttcatggttgtgtacaagccatcatcccagcctagaactatacatttccactgtaacataaggcattttctctttcaaaacaatcaaaatccccaatatatacatttctttgagtacatttttttgtaaaagataaattcagtgggaataaatatagctgattttgctatctgaaattagtataagccaagaaaaaaaagagatgggaggatgggatgggtctaaggcgtttaaacaccatttgttttcattgaattgtcccagctataacagacttgctttcacattctccaatgtcacaccaatttggcagtgcagagaaatggcaatacattagtaatttatacttcagttgttagggatcctggtgcccagtcagaaaaagaccatgccggggaccaacacagtaatttctacaaacacaggcctttggaattattgagttgaatgggacatttctttctgttttttccccctcttttttctgttattgtaggagtttatggatttgattgatgaactcggaatgctgtaaataatgaaataataaaatggtatgtcagcgagggataaagttactcagagaaattaaagtgaaattaagtaagtcgctagttcacttcggaaagtgcttgttcctctcagctgtgtggcggtaaataccgctctaaggagcgtggacttccttatggataggtttttataaatactccaaatggcatcagcacacacccttggaccttgctgggttttgttgatccttgcacatattttgaaagctctgctctcttgtaggaggcagtaggaggcaggggccttgcacagcgtttacaactcaatgtaaagcttttccagcccttcatgcctgcgctgtggggtttgaagttaatgggaatgtcgggtcaaagtgggcagcactatctaagatcctgcgcatgatgtgcggtgagaatccaggagaggcgagaaatgcaagcatccagccttcttcagatagagtgaggggaaaacacccagtcttagggacaaaagtgagggtgaatgtgtggctgggtttctaggctatgggattttcaggatccagattgccttttttttttcccccacaaaaatcaaacagtatgagtaagtgaggtgcagtatttttccattaagcattagttctttgtataatgtgtgcataatttttatgaatcagaacccgaatcataaataaaatgttaatttgtagacacatttaactgtggagcagatggaaaaataggactgtgttagaaagctaggtatttgcagaagctaatgacgttaattggtctcattcgaccaccttcttttccccaaccccctaaagaccaggcttttttatttctttaattaaaaatgagtttggtatgttaatattataacctttcatattttcctagttttctatataaatgccttatttatagaaccacccttaggagtccagtgttagcaagaacattagtaacctgggagcagcgagcagggcgctgttctacacaaaagctattagccacatccattggtgtaatgtgtgcttatacgccttgttattacttcctgtcctgttacttgtgattacatagagaaagagctattttttcctctagcttgaaaatggcacatgttaaaaatgcataaaataatgatcactgaatggaatttaatttttaaataccagtactcgaacatattttgattgcttaaattgcctggtaaacgcccactgaaatatcaccagtgtgaaatcagagaaatcaccatcttgagctaatcaataccatatgtgtagacaatgttcctgaaattattctttgtgtaaggcaaggctacagtgcacagcgtttagctccttccctaaagagtcctttatgcttcagctaccactgtggagtacactgtctctagaaggtaccactgcctactacagagggtcctgggacatggctcctctaatgtcatcactcgcatattgcatttgtatcgattgtctatgatttctgtatatggatgattgggtttgagcaaactacttagggtttcaaaggatttgggtaatgttacaccatggggttggaaatctctttgaatattgtattgcagagggacaaagtcatcatttctgtgcatttattaggcccctgctgtaggaacagaaacaataaaccatcttttgtaagttaagagatcttggaacgggcaattctaataaatcccggcttaaggagaagggtacgtgctgaggccccaaagttgttgaatcatctggaatgtattagaatcttgattaataagaatacatctgcagtcctacataaagaacagagcgggcagtttggcagataggagtggaaacggggaagaaaggaagccacagccacgatgcctattgttcccttttgggcaagtgttgttattcctaatagagcaaagcagctgccccatccccaaccccaaccatagaattaaacctgtggcttgaagaagagataactctgagtacgtaaacaggaaggaatttgatcttacagaaaatctgcatatgaggaaaggctcagttaatcagtcatctaacttctatgatgtcagatatgcataacatatacgtccagatctgaaatacgacatttcaccccacatgtcctgtttaatacccttttccccagggaccccatctcttattctcataatcacttaaaatttagggacatgatttctgcataagataccttcatgtttggcttgaatcagcttttggaaaaagactccagaaaactatagtaattgtaaagagaaatcaaaccccaaacctataaaatttgtataattcatatatcaacaggatggcttcctaaatgccagagcattttttaaaaggagatgataagaacagagctcaggcttgggacataacatatttggcaataggttctgaagagtctgacatccatacagacattaacctctcaggccagccagtgaaatactgttaaagtttgctgaaagaggagattcatgaaaaccacttccgttctgttaggagcaagatgagcaaggtctgatcaatgaaaaatgcaagttttagaggaggaccaagacacaggcaaaagcagcttacttactttcatactccacaggaaagagatgtggacagtgcgcgatggaagctccaggtagctttctgttgtgagaaacttgcagaagctaaggtgcgactgtttctggctactcagtcgtagccaactaaataataataccaagtgggttttgcaagaagttgggcttcataggaaagcatgctaaaccttgcttctcaaagataattgaaaattgattgaatgttgacccctccaatctttagcagtattatatttatctaatgataaaatatagtttacttcagcacttacctttacccagagtgtgatatttcagtaattttaggcatcatttagttgctttcttttagcagaagtagaaaacaaagacatatagtataaaaaaagttcattcttagtgcatgagaggaaaatgttaatgcatgataagatggtgaagtgatagcttataattggtattggggttgccacttatctatggtgaaagtctagttgataggtttgttccacacgtggtttctgccacaatcaggcaggtctgctgtattgagagagcaactcatgcttggtctgtaaatgactgttcatggctctgttccaataaaactttatttataaaagtgagaacatttggtgcacagcttgtaatttgccagaccttaaaatgtattggataaacatttagtggggtttctgtaagtatttggtgattgagaagaaaaagaaatcactatgaattttaaagaggtgcatgcataattttatccatatgtgacagaagggaattgtgtgcatgtgtcagtgcccacatgctcttaccatgtttctactttgtttataatgacttgttattgaggtaaataaatggaaggaatatggaaagatttttacgagactctttgggatagtgcttacaaagataaaaagtatggttgtcatcatcactatagcaccccagcactctgtcccaattgaaagaggaaaagaaacacacacacacacacacacacacacacacacacacacaaaacatagtttaacttttcctaatttttttaagtgcagacgcctactttgtttcagattcatcaaactgtactcttggctggcttccctttgaaacctgggttcatgtatgtcatggtaggtgacctcagtggcccagagtacaggcatcaccggaatccatcccagttgtttcttatttagaggattccaagtactgttcacatttgctccagcagccttgggttgagggtagtgcgacctgtgggaagtagttggaaagagtgagcactgttggggcctctcctttcccgtcttgctgtcgccattccctgagtgtttggctctgctctcctgggggaatgaatgcacccccacaatatcactgttgccaccccttttctccatgatgacctgaggcataacttcataactgcaggctttgtgtccagctttcatccagtccttcccagtccaggggagtctgatgcgaagtcagctctacagattaagtctctttcccagctctctgctgcctacataatggttcagagcccttacttgtagggaagtccacccacatatggcttcatttcatcccgaactctatcccctgtgcactggtgcttggtcttgattccctctgagcatcccctaggcaacttctctaaatactcctctaagcctccacctcagctgcacgtactgtgagtctccagcagggggataaaacattaatacgttttaaatgactcccaggtggttttaatgcctcgctaatgttgagttctcctttgtagtcagtcacttactggagtgctgattttctggttgcagagttttgctgttgtgtatacaatgcttctactgagtaaggccggttttcttctttacctggaacatcccagcttattctttgatgttgaactcaaaaaagtacacccagaggtggcctttctgtgtcctccagtatgcgcctgatgcttcccacagtacttctggagggagggtgctgattttattctgtcatctcatgtcagcaaaccattcagcaaagctactgtggcattattgacttcatattggctccagcctatactagggacactgaagtatatgatcaggtcagaagaaccagactggagtgatatctagggtatgcctgaaaaagctctcgttcatgttctggacaccagagtgatgatctttgtcctaggtatatcagaaaaaaaatcacattgctgaataagagaatccatacaatgagcacactatgggagcctctgggttatggccatcacaagaaaatcatgtgaccaatgccaaagtaatgactagagtcaagactgggagagaaggatgagaaggtgagggataaaaatctcagcataactgccctaaaccagctcttaggagggggaggaagccatgtgtgcgtgcacctcattctgaggcaataagctagtaatgacatcaagaagaaaggttgatacagtcactagaaagcaagatgttgcttgaaaagttgggacaattcaagaggtctacatggtacatacctagagaaattactgaggtcccaaaagatcactcaaagtcatttaattgattataacttgaacaacagtgttggtgtgagggatttcaagaaatcttttctttcttatgtaaacagtcttaaataataacaacctgattgactggaaacagggaaaaaaaaacagaataaaatgggaagaagtctgtatccggccaggggtgaggctgggggtggagttcagcagaagaaagctcatctagagtgcacaagaccttggcttcagtctccagcactaaaagtattaatagatcataaaagacatatacaaaatataaattttgtctgctttatttttatttgagtgtagccttggctatcctgaacatactacatagaccaggctggccttgaactaacaacaaccttcttgccttggtctctggagggctggaactataggcattataccaacatgccctactaattttactttatttaaaaatatggtctatccatggagtagggtacagaatggataaaatatgtttttcacaaccaatttattgcttctttgtaagttcttttcacaaaaaacactggtcttaaagatgtaaaatttacctctctcaatggcctagttggtcatcaatgggaggagaggcccttggtcctgtgaaggttctatgccccagtattggggaatgcctgggcccggaagtgggagtgggtgggttnnnnnnnnnnnnnnnnnnnnccgtgtgtgtatgtgtgtgtgtgtgtgtgtgtgtgtgtgtgtgtatgtatgtgttgctagcaatggagctctgagctctgcatgtgcaatgcagcactctactactgagctctaccttcagcctgagtgtgtaagcttcaacagccttatacatactcagacaaagccaggacgggtgggtgccacattttgtatgtctttttatcttcatgtctagcaaaatgtccatttggtgactgaatggatgagatggtgaatacctgggctgggactgaaggcttgcaaatgactggtctgtgtgcagaaccagtttctctccagcttgcagatcctacttgggtagggtttggaaaggagggagttaccttctgctctgtctcccattacccatcctgccacaagctgaaagtaggaagctcaaattcaaaagcacaagccatcgaagtgtgcaaattcagctacatcactgtgaaaacgctactctggtggtgtcagcagctagatgcgagctctctgctgtctgctcaagttacttgtgagccttacacatttttggacgacatattaaaaatataatttcaggggctgaagagttaaaacagtatttctcctgaacaggaccttcagcacccaggttaggtagcccacaaccatctagaagtccagcttgggtgtccactgctctcctccagactccatggacacggatacctgccctcagctctatacattccccacacaggcacagatagagccataataaacaaaaatcctaaaaagtaaattcagccaaagaccaactcattataaaatataaacactaatgatccataataaaatgaatgaaatataaggaattttccatccagaataggcatgtggatactaaatacctttgctgtggcaataaaagtttgctagagcagacccgatccttttgttgactttagttttcaataatgccaattacaacttatacaaccccatcaggtagtggggctcatacatttaatccaaccccttttgatacagaggcggaggtatgtctgtgagttctaggccagcctagactacagactgagttgagatccaggatagccagggctacacagagaaaccctttttcaggaggaaagaaaaagaaaaagaaatcaaagcaacaaacgaaataaacaacccccttcaaaacaaataaaaaacaccacaaacaaacaaaaatcccaatcacaacannnnnnnnnnnnnnnnnnnnnnnnnnnnnnnnnnnnnnnnnnnnnnnnnnnnnnnaacaaaaatcccaatcacaacaaagctatagaccatccccagctgataaataagttaccttctaaagtttagttaaaggttggttaaatgtggggctgtatggctcggttgtgcttgtccatcatgtaagatgctttgtttaatcctcagcatagcaaaataaccaaccaatcaacaaatgcctaatagtgagataattatttggaatttatcatggatctttccaaggttaggttcttggtataaccaaccaatcatccctctttcattcttctatccctctgtccgtccttccctccctccctccctttcttcctcttttcctttctatggggtcatgggaaatggctgtagaacacagctctgcagtttgtacacttcacagtggtccacagcagtgctacagggatgaacatagagcagtggtgcagctatctgcgcagtgaggaaggccacgtttactacttctctgggagaggaggccctttttctctgtacattaaatgcctctggctggtaatgggtcagaacaaagtgggtaacctgttaaagaggcacatgactctgagctttccttaagacagtgagcatgtattgtctccagcccactgtaggtgcagagaccctgaggatggaccttctctgctgatctagaatatgtcctgtgtcagttttgtgagcaccatagcctctgctcattagggtagctgaggagaggcaacatatgggcttcctattgcgccagtctggtgtcaaagtaggaaaataggattctaaagcagttttggtctttaggagttggatattctgagagggaatgcgtgtataagcacacatgttcatagctgagcatttggcgcttctctggggaggtgaaagcaaggcttctgccctgcttaggtgaaaaccatggagtggttccatggaggtgtctaagagacttgatatagacaggatcatttctttgtgcctccttgggccatggtgagaatcctgctgaaaagaacaggagcggatgtcccatctgttctttcatctacagcactgcgcacttgggcattttggagccagtgtttctacagaagagttgactgattcttatcactaatctgttttaaacactaggaatctgaatgtacaatattcatggtggcagagggaaaaactgaaagaagggcaagtaagtccagtctctcatgacgccaaagcaagtaagcccacagtctcatgatggtgaggtcttccaagctgaacaaggctagtgcccattcatcaggacctactccaatgatacaaaagaattctttttggaaaacagttctttgcaccaatttgaatgtgtggtatagtaataatattaatcagacaaacaatccacactaatcagtcctgcctcaaaatcagatgcataattagcttgatgatctaagccagtggttctcaacctgagattctcaacccatttggggtttacatatcagatacactgcctatcagatacttacattactattcataacagtagcaaaattatagttatgaagcattcgtttatgtttgggggtcaatacaacatgaggagctatatgaagaggtcacagcattaggaaggttttgaggaaataagtttgttttggaattcaggaaaagaaaagaaaagagagggagggaggcagagagaaacaaagaaagatagacttacatctgtcttatttctggaacttaacatcagatcctagactgacagagaatgactctgagctctgaatttcacctttgaacaagaatgatccctgtcagttgttgtctctagaagagagaagagggaggctccttaagtgtcagggtttgtaaagaccttttcttgtgttgtctcccttttcctttcagagaaaaaaaaatgtagttagttccctctagatagcaatctgggctctgtttgctaaggccaagtgtgatgtagaccgcagggcatattgtgggatggaaactggcagtagggattggtaagttttccgcagtgccatcatacttaaataaataatcaaatcaattccttgtcctttttgaagtagtgcatgtcatcaaggctgctgtgctgtatctgaagctgagggctattgttctatgttcttgtctccatcttccctgttgcaggttcctctccatgcacagtgcttagatgcccttacattggttctttcagctggtgtttgccagcattcttccattcagacaggtcatttgtagacacagtgtagattaaagatgaacactagatactgtaaggagtgaatggggaaacagaaagtcactacctgctccagtcatagttggaacaccagtgtccataaaatgacaaactcagcgagtgagcgagattattgagctcaccctagtaaaaagagaaattgaagtcatttttgcaagaaagaatcagagagtgaattcacagggtaaaagaagggtggagtgacaagttgggccatgaacggagatgagttattgttctgggtcaacaccaactctatttggttgctttcctaaaagactgaagggttttgtttgtttgtttgtttgtttgtttgtttttagaataaaatttccagctcagcctgagctttttatcgtacatggcttggcagatgtgaaagaaagttcaagaactcagaagagtcatgctagaagcccctctcagaagagaccttgggtgtggatttggtgatgacacaggccattgagtcctttcagagaattgtttgtcttccatttttcaatggctttaattcctccaaattgctccttgaataataggaaaaaggcagtttgaattccagtgacagattggacataacaggttgcagctattaggcctcattttaccagactgagaaataaaattgcctaaacataagcatcgaccactggtgcagtaaattaatttgtacagaaaaagtagtttagctgcagtgcacattaaacataggaaaattttcaaaattactgctttctgaattaatttgtacacttgtttacttgttaaaagcatgcataaattctttcttccaaggcagtgtggctcaaaatgagcaggaaagaacataaaaagtgtccaggaaatgcagatatatggaagacacacacacacaggaaatgcagatatatggaagacacacacacaggaaatgcagatatatggaagacacacacacacagtgtcggggtagcaaacattctcatcttttgtcttcagatgctgtttagaatatggcttggctcagattctgtccgttagatcactaaagaggcctccgattccatgatacgtgggatgctttaatggatttgacttatatttgctgaggattgagctatggtgtaattaaaagagttttatcatctggttgcaggatgggtttaagcattcacaccacaagtcctctgatttagactgttaactttgtgttcatgaataaccaactgatagatctctttgtactaaagcacaaaacaaacaaacaaacaaaaccaaacaacaacaacaaaagccactggacacattttcattgttacttgtaactctattatgaaggatgcaagacaaactttggatagtatcttttcggattgttccagccaccatggaactggaccctgcaatgagggcagtctgatactatctcctgcccactgttttcaagggcagtggttcgatttaaatacaattctgataagtggcaggttttcgagtctttaatgccttgacaagggcatcactctcaggagagcgaggtgaaaccgttcagacagggatgctgcccctctcctttgtgctgacacactaagataatggacaattaagagaaccttcacggcatgagaaaggatagggttatcactaatgtaaaggagcctgtgtggtgctggggtatggaggagaagaaaaatggagattttttaagaaaggtaaataaaacacagatgagttgcctaataacagttactacattgctctgttacgtgtgatcatggagtgcttagcattgtttgctgtccctaaaccgaaagactagctcactgcctttgacaaagtgttgtagaaaatctacccccatgctggcctacctaaaataaagtccacaagtccagcagctactaggtttgctgttatgttctctggatggatacctccttctgtggtcagtggtaggttgtctcctgacagttggaggtagtccttgtcaaccctgcctgtattcctatgaactcccaagttcccaggggtgtgacttaatgggtctcagaagggatcctatggttttcaaagcacccaagatttaaggcatctttaaggagttcagaactgaagcccaggttccttaataactccagtgccctgccagaccatctgatgatttcacaaattgaaatcatcatatctgtgtcactcttagagatgactgtgtggcatctaacagccatctcttgcttctgttcatcttgaggtttaaagctggctcgctgctgagggaagtccctttatctggactgctgatcccatcttccccctctgcactcaatttctgcttttgtccccttagtagatgagtagagctctcacctgtttaccatcatggataaatgatcaggaggtaccatggggtgtggcctggatgctcaggtaaaggcattcatgcagttcagaatctagagctagtacacaaatgtgaccagcagcctctgtgtacttagtcactctactccaatgtgcttcatgtcctgtgcacatggacttttgaagggatattgctcatagccttcattcccaatcaaggtgagacattactgaggtatttatgaatggagtgctgaagagggttaactgactgtcttttgacttaaattatcatttgtctcaaacagcctgcaagggagtagagtgcagtgcttccgataactgtgggctctcctcagcccgaggagatcctgtgataagataaggagcttgaaaaaaatcaccagcttgagggagtgggacaggaggagagggaatgtgcttgctgctttgactgctaaatatcccctggtagccagagataagacactttgagctactcagaaaaccttaagcaggatgtaaatgaaaccaataaaaaaaaatcatttgagatcaagtcctgctctgttccctctctgcccccagcctgacagcagaagacacactttactgtagggctgccacatccagcagaccagtaagtgcccagggattgatagaagtgcaatcaaaggacaaaataaatatctataatttctagagatgtccaaacttgagggcatttgatcagcaatcctatcggcctttcctgacgggaacctgaactcactgctgattagccaaggttcccttccccttccttgctttctagtccaggtaggtattcacttcatatttagttttaggataaccttctattgccaaagtggttgaaaaggctcaaccacctttaatggtgtattcgcatctctctcgcagctcgaacatcatgttcagcaagggtttagagacaatggtcatgtaccccttagcatcacttcctcagaggataaacagcattggggctataccctagtgcccaggagtgtagtcagtcaggcacaccatctttgttcagtttgtagagttgcattcggatgtccccagagcaatgtggatgtatttctcacactgtacctttgttttaaacaagatttgtgtgtgtacgtgttcacatgtgtgtctgtatgaaggagtgtgtgtacatatggaggacagaagcccagtgccacagccagcagcatgatcattgactcagaatgacatatggtcttcaggcagtaacatccagcctttatgtacttggaactttatgttttccaaattgttactgtcttcttatagagaattacaagctacattttacagtctttctgcagagaggaagtgacgtggtggagctagctgaacagtatgaggaaaagatctaaggatgcagtcccaccccgagtagagggtaaccgtgacagtctgcagtgtgcgatgatttcactgccttaccatccaaactgcctcctagagctgggactcatttggtgtgtggatgtggcaaggcatccttttgtgagtgtgttctagggcagaccggccccatgcaaattgctgcagggtagatagtgctgccaggtgtcggcatttccaacagctactgaagcactgggagatgatgtgatcccatgctagcaaccagtgctgtggctcactgttcattcttagtatgttgagctatagtggctgcaatactactcaagaactggtgatttaaggacgaggtggcaagagctttcttttatccgcttggcatgaatgtgggggaacatgttcctggtgtctctagggaacatggagagatgaagtagccacttgctgctttcactgttccttttcttctgttttcatttgtcaagattgggcataaccaccatacagttacagagaaatgggagtgcatgtgcatgtccacatgtgtgtgtgtgtgttttcacccgttcgtgcatgcatgcacgagtgtgtgtaggattttctatccagtctgcagaagtaaagataagctaagcagtgatgagccagctcagttggtgattgtttgttgtgctcacttactgaagaacttgtgctcagatcaccagcactgttaacgagacacaaaggatgatgtgtggctgccatttgagagctgaaaacacaagaatggtccgctagagttgcctgctcagaaagtcttgccttgaaacatggggagagcttagaggagtgcgtttgacagaggcctctggcctccataaatacatgcatgcatgcacatgtgctcctccatacatgcacacacatgagcatgtacaaatccatatactcagactgttgacagagagttgtcagttcatctaactcttgattgctttattgtttccttatacacgtgtgaacacatgccaattagcttgagttagttttgcaatatgagaacactattttttttttaaatagacaatgttcaacatcacattaaacttatttgcccataaaaacatggcagctgagcattttggtttttgtttgtttgtttgtctgtttgttgtggtttgagtaggggatttccattcttgttagttcagaggtctagcacgtagctgtggttactgatttgtctgatcatctgcaaggtgagcattccttttgctggccagatttctcactgttctcagcccccctgcaccgtgcctgtgggcgggcggctcagggtgagagctttgccttgttttgctctgtgcaagctgtggagattctttgctttctttcctttgatccctcgagtgtgactgagaggtaggtgcagcctgtgccagccatcacttaggctcccaggaaagagtggagcccaggttcagcaaggttgtggcgattcagaaagtggcctttggtccatgcagcctggagtcagcatggtagccttgagtgttagggctgtgcttctgtgcatgttcctgtctctatcacctttatcagacagaaagcattgccattcgcttccctatggaaatgaccgtttagacttgacatgactcacatgactgctaagagggttcttgtcacacgccttaccatcagaggagaacctctttctttttcatagcgtaaccatatttaaccccctcatgtttcaggctgctgtcatgtgctgggtgccagagggccaggtgtcacatgttttcgtgggataagcacagatgggtctttatcttcctccttgactgcagtcagatttgtcaccgatttagtgctgtggccacaatgactgtggtaatcttcttatatagttatttgttttatggtcttttagatatagacaaattaaatgccataatatggaggcatcacgggatttctgaggtctgactataattattattagaatttttagcaagacagttaatgttaactgtatatttgtacatatatatattatgtacataaataatgtacatataaataactatatataaattatatataagcatatcactgaaaatagcattgtactattgttacctaaagtaatgtttcattaaatatgttttcagagataggtacttatattaagtggcaaattactgtaattagctcttttgtaatgacacatctaaaatctttgaaaagttgcttttatataaattatgtgattgattttgaacatttagtgaacgttagataaacataaggtgtgtgtacacatggggcattgtgaattttatctgataaacttgtgtgtgcacacacactcagtcctgtgatttcaactggtgaacacacaatttatcccagtcatcctaggtccaggtctgtttcagagaagtgactgctgaatcaaaagtaggatgactctgtggaaagtccaccatcttcatctctgcgggacttctctgcagagctccattcatagtttatataactgggtagatgaaaatattaatctctaaacttatttgatattatatgatcagggcagagctattttgtatcccaattgaaagtcatttccaaggaatagttctgtcctttgcgggacattcatgccgtttatagccacaaatgtttaggcccgtctcccttgcactgaaggaacatttgacatcctatctcggctgcctgggatctagtctcactttgcaatttcagttgtgttgagatgttgtgggaattctatcctcccaggatgctttgcagcatccttctctagaccctttaccaacactgagtttcaaggtcacagtcttcaggatctcaggctcctcataccacagtagcctgcagcatctgaagaaaattggagaaaaccggggtagacacacaaggctcttggcgtcgacgttacatgactgcatgtagaaataagtctgtgccatcacaaaattcaaactgatggtttgccacagatcctaaccattcctatcacatattctgcatggggatgtcagaagcaagagcatgcaggtcagtgggtttcattgtggcaacctgatcatcgtggcaatatgtgcccccccatctctgtaacagctttttctacattaacaaaccctatttatcactttactgcacaatgaatccacagggggtgctaattgttcattaattaaattttagcctttcaacacttttgtattctccagtggcctagtctgcagtgaagtacacagagtggcctttttcaactgccaaaaattcaagttggtttttactgctgccatggatacggtacaggtaaatttcagggcagcagacacattccagtattcttgtaagtctctgtgacccaaagtttccagctttagaccacagcctttggagttaagacaaaacccagaagaacatgacataacggtcaatgctggccagtttggaataaaattcgaattgtttttgtttgtttggacatcctgttgctttatgacaggctctcaagaggttgtaaacatggtggaatgaggtgtagactttctaagacccatcattcccaaggaagccatttcaaacttggttttctctgagactcttccttagtttcagttttcattgaagagattaagttaaagatcacaaagttgggaggcaggtagcccagttggtaagagctggctgtgcaaacctgaggaccaaagaccctctgcagcagccatgcacagatgtgcatgacagcatgtgcttagaatcgggtgccgctgacacaggtggattcctgagacttcctggcctgctaaagctcatgtcccagagggagactgtgtctcacagacaaaagcaaacaaacaacaacaaataacatggtgggtgacctctggtttccatgtaaagtcatgtgtgtacatgtgaatgccatgtttgtccctcacaaacaaattcactaataatattagtggccctgtgaccgttacagaacatttctcacgggatgtagctgttgctttcatgctgcctagaccgtaatttataagtgtaggagatttcaaagcaaaatagaatttgtctcagggattttctaaaaacaaaaatcagaatagcttggcatgtggctgtctgttccacagtggagcttttgttctaataaccaattaatcacgactttccagagtgcacagtttcgaagcactgagctagcgtatattggtttttgagaaatctgtaagtcacattcagaagtttagtttgactttttttttcattttctgttaaatatttgtgttatttagacatttaagccacttaaaatgattgtcctcccagcatgagaagaacaagtcagctctgctgtcccatccttttctgtgcttgtcactatcccttaggacttagggtaacaacagctcccctagtatattagttgtgttcatttttatatcttagctcagatgtcatatttgctccttataatactaacagtgaggtagactaaaaatatttctggtattatatacaaggaaatttttaaaaatgtaactgggaggttcagggttaactacaaagcctgaacacacacatgcgcagtgttaatacattttagttaaataaatgaatgaactaactaaacaacaaatatctgcttgagaaattacttgtgcaaacacgagactatgtagtaactaataaatgtcttgcatgtcacagtagaagaggagaggcgaagctctctactcagctggcagaggcctgggatagcaagcaagcaaagcctgagactgattcttagaatccgggcctagtggcatgtatgtatagtccccaaactaagggccaggaatagacggacccttgactgctgtcctgctgtccaactcaaatcggccagtccagaccagtgggaggcccccatctcaaaatgtctggggaaggccacccaaatttgacctctggtctctacatacacaggcatacatgtacaggtgcacacatgatcacacacatacatagtagggaaaaagaatagagagaatatgccgtgatgcccgtcattatcaaagcaaagataaacatgttgacatgtttaaggatttcactcactcccagtccttcgagcagatgtgctccacaaggctgcctgctaccaaacagccagaagttggtgcttagcattagtgacatatagttttaatggagccaagagatcggaaaagcaaagccgttctcacccctcctccccacctcaaaccggcatcactggaaacgactcttccttctgtctggcttcagcaacacccgccttggtttccgtgagacggtaacttttcttgaactggttttgtgtcagctttttcctcatttgagaggtggagtctgagtgtgaactgcttacgaatgcgctgttcactgtttaatttggctggggaagatggaattcatcaggcaccgtctgttcagatgaactttaagcaacggcaagcaaagcatttgtggtcctcaccccacactctatgcacatcgtcttccaaacactgaagatgtgaaagtccaggatcacccaagaagagcaaagaacacgtggcatcttatctcctgcactgggttatctggagtgcaaagaggttgttagagggaaaatgagtcactttttaaaaattaggctgtaataaaactaaaaagaaaaaaattaccccagagctcttttatctggaatttgtctctaagactgggttaaaatgtgcaccacaattccctgcctcttctgtagttatgggggaccaccctttcccccataacctgactgttaatgcatttaagtagtccttccagaaccatttggaatattacacaattttaaggcatctgtgaataataaatatttctaaagttcacacttcagactattcattgtcagtcagttaaatacattatatggtatagaagtgaatttaatgtggagctgttggtttcaaaatgagacaaagcaagtaccccccccccccacacacacacacacaaatattattaaagctgcagttttccatagccatggacattccaatcgagaatgaaaggaagcagttgttcaagaatgcaaaataatttatttaacatgacctcatcctttaggaatttaaatcattgctgtaaaaatgcattgcgtgatttgtttaggtggctttaataatgatgtaaaagttgttaccatgatggcactggaagaaacacaagcacccttgtcgcctgtctgctaagcacacatttcaaatcaacgttctttgttagtgttgcgtagccatttgtttgcaccgggtgtgtttccctcaggattccctgcttgtgttaaggtagttctggtagctaatgaatgggggtggagggaaggcctgtgaacgcaattcaataaagaagttaaagcccactgtagtagactgcgggcaggcatcaagaatcaaatgaagaaccacgacaaacctggaaatccactttggtcttctgttctaaacaattgctcaacacatgcaaaaataatctactaaattaacttattatggtgtgaaataatgcattggctgtattgctcatgttttaaagggaaggaaggtaatttcaaaattatatacttagcttcagaattacatagtaacgtacttgttccaaggttacctatctttaaagacccaagattatatcctgtgtatgataatttagtgcttggaatatagcatgaatttatggtccattgatttttagctgttgccagctatgcctgttttcttgtcttgctgcctgtgtacactactgcgagtgctccaggcactatagatttccactgggccactctttagaactcatattccaggggttctattaaagaaaagaaaataggaaaatgtgtttatagtaaatatgcggacatttgcaagggaacaggagcaagtgccacccttctcagtctccctatttatgtgagtagctttttttctagtagattatttttgcaaacagtcactaatctttgtaatactctggagggtaagtagtgagaattattatcttcatattgcaggtgaaatacttaggtaggggcagattaaatgacctggccaggtcactctccaagtcagttatggagctcaaaataaaactccagactcctgattctcccttcttctgactcatggcacctggcacatagatactggcctatgagtatccttcacttccagacacttcagaaggaaccagtggcctaaagcctgactgtgctcaggaaccctggctgtgtggcatttgcacatgtgtgatactgagcctatggtgagatgttctcagggtactctggtgattctgaaggtctattagagagacagggaagctctcactaacctggccttgggaagagctagatgtcacacaaggtagatgcttgctctaactgctatgatttcttaaatgcatgtaatgtctttagcgttgggtggggtggggtggggtggggtatgtgtgggggaggcaggaagtggggatgtgttatgagtgtgcacgaatgtggacgtctgaggttgactttgactcttcttcagttgctgtccacctttttttctggaaaacacaacaaaacaacaacaacaacaacaacaaaaacaatctttcgctgaacctggactacatggatttggttcaactggctgtccatcaagctcgggaatccttctgttccaacctttgagattacatgtgcacataagcctagaaccatatccatcattgcctctatctatctatctatctatctatctatctatctatctatctatctatcatctatctatcacccacctacatgcctacctgaggtgtggtactggggactgaattctgatcctcaggtttggacagtagatgctttcctcactgagccatctctctagctctccatttttttttttttttttgaaattaagagtgattcagtccatcttataacttttgtttcttcttaataatttcatattacctatattattagaggtaaccctgaccttggcctcagaagccaagggtcttacaccaagacctgattgggccacactcacactctcctgagcacagcctcacccttgcttttttggcacagtatttttacttttggctgtatgtatttagcttggacagctaacagtgtctgggacctccagtgcttctcttctacaaaggcaggctataaacttagactatcttgctcctttggatgacagggtggccctgccaagcattcctgtggctccatatgcaatagctggaatagaagtcccctccatgtttgcttgctgcttccagggtggtgtgcgaggcccacatcacaaccacactctgtgctccggagcctgttagctgaggtggaagtttgagttgacttcactgttctgttggtgtggtaagcacttttgcccataatatggccgaacaggtgttgttctgctgctaactgagtttccagctgtcctcctccacacagaccatgcaggatcgggtattctgtcctctcaggcgggctggaggctcattgagcccgagatggaggtcttccttgcaggatatggccatatcgatgccagaagatggtcgggaaagcctggctggctaacaaagacaggccttcagcggctgggtgtagctccagttctacatcccctttggcagctgctcagaggccactgcagtgtggccagccagcaaaattaggaaataaggaccccttttatttactcaggctgctgaatcatgggcattcctgtctgcttggagagaagtcaggcggctctactttccacggaaagtctcgggagtgctggagactttcatctccaagtgttcacacacttgttttaatgtgctttatggaaatggtgaaacttagcaagtgcagtcactgtagaaaaacatctgcactaactaggctcacgcttttgcatctttaaatagccgtttaggccacagagtgggctcccagcaaactttccccccaattgtaagattttgcctcggctttccgtgagttaaggagttaagtgactgtttccaggatctaaaatggacatgcagaaggacctcatattgtaatgcaccacacgagttgccagaatacagacagacagtaagtgacaaagggagaaagttccagtagattctgaacctggacttgaaagaatccaacatggctttcccatgaactagaaaatgcaattgcacttcttgagatttgtactgacaattgaagcactcctttgcagtgcttaagttaacaaggataggcaattctggaagaatcggtagagctcagaggtggattggcagactgtccaccaggggaggcttgagtgaacaggacaccattagcacgtggaccaagccctgggcagtttcgtttctagttttttttttttttttttttttttttcctgtgcctgcacatttatggcactggccagtgaacctcttaccatcttgattccaaagcagaaataaaccttttagagaaatggccttcattctcattcattcattcattcattcattcagttacccatttattcattcattgattcatattctctctgtccctcccttcctgcctgcctgcctccctccctgcctacctattgagtaacactcttggatgtaggttttccctgtcctgtccccctgtcctgagatgtgtgagttttgtaggtgattcttatgttcttaggctacagggataaggctgggttggaacagtggaaaagctttccagtagtactctgaattccagaaaacaaaatgaaacaaaacaaccctcgaccctaagttttttcttttataataatggctcattgcttcataattccttatacaaacctggtggcaggaattgtacactttactttttacatggcctgttgttccacagctattcatacatctacaatgatgatgcatcacacccagacacagtgtaggatttaatgataaatagtcttgctaggatctcgggctcacggttcatctcttacccatctggaagcatggtagatgctcattcagtgttttctctgaatgtgcaaatgtgatgatgtgcttaaagatattttaaaataaaacagcaagattcagaagtaaaactcaagtgtgaaatatggcaggatttgcaacctcaaacgctgagtacatttattaatgattggaactggaaggatctataggaatcttaggttatttcagataccaagtgtacatatcttttaaagggaaaactcggtcattgttgtgttgtttttgctgttgttatcttgactgttttgtttgcttgcttttggttaggttttgctttaatgtactgtgtcatgggttgagcttatctgcatatgtgtttcatgtgtccgtatgactcttagctggtaacattcacgcctgcttgaggctgcacacatgaggggctgtggagtcctgtaagcaaggagacagaatcaggaggttttcagcttgctttgttgcggtgggcagggatccaggaatggtgtttggttgttttctcagggtgagagggctgccatctggcctcgatagtgagatggccttgtcatcggtttctccatgcaggaaaggaacgatcctcatctgtttcctgtggataaggaagaggctgacaatctagtaaaatcttgttaccttaaagaaagcagacatggaattcgtttcataaagtcggcctgtttctgctttgtgtccaccatggtgcatatgtgtgagccttagtcctgaatgaagctctgaactttctggattcttttctcatcaaaaacttttagaatatttcagtcaaacctgtacttgtaaccaaatgctgtcatctgctctcccagctagcctgcattgtctttaattatctctatctttgaaaactattatcttttggattttgaacacttttgaaacttctggctctgagagagaaattataaaacgtaaaagagattttacaacatgttttgagacagtcttacttttttatttgggtattagggaagcaacaggagaaagggggcgtataccatgtaaggaaaaaaaaacaaaacacccccgaacatagatgtaaggcagcgttccttcacgcatcgcatgctaagccgtatctggttggcagcctgtttgtctgctctttgttgcacataaatctctctgcatttaccataatcatttatcacttttcctgtttccagtttttcacaagtcgctttgtctctgctcacctcaaagctcgggccctgtttagctaaggaagtccgggccactgatgcttttcacagaaggaagagatggtgggccacctcttgaacttttccaacggagtgcaagattacgatctggtcctcctgaaactcacaattttttttcttgatcctggatgatcctagctgtatgtaatatctcacagtgccttctaacatttaataatccattttttggcctatggtttctgaatctttcagttattgaggaaaacctggttgtctttcattacacaagacgtaattattattgtgtttcctgtctccttttatgtgcttactttttaatatttttttgctgaaagcaataaggtctgtatcaataagaaccccaaagaagacttttggtctgcagaattgcctttttatagaaaaacaagcaaaatgcagagggagttttttattaaatattagacatctgggttgactgcattaattttaaatcactcctgtaatatttcctcttttcatttgctccttcacatgctcacagaatatgcaaatcattgtagaatgaatacaaaagaaacattaaatatattaaaatctgtattttaataaaattgtcaatgtgtaatatatgcctcacttctaaggaaaaatgataaaatgtaataacggggtaatttagacatagaactctttaatatctttttgtattttacaaaccagccaaaagcaaatgaagagtaaaagcttggggctcagatctgcgatgctcactccttcccctcccccgagaggctcaagatggctcaagtgtgtgtccatggtggcgcggtctgagttctcagcacgtgtaatgatatgttcctattgctcctcactgcagatggcgttgacgttgaggacgaccccagctgctcttggccagcctcctcgccttccagtaaggaccagacttcccccagccatggagaagggtgtgatttcggagaggaagaaggtggccctggactgccttacccatgccagttctgtgacaagtcctttagccgcctcagctacctaaagcaccatgaacagagccacagtgacaagctgcccttcaagtgcacctactgcagtcggctgttcaaacacaagcggagccgtgaccgccacataaagctccacactggggataagaagtatcactgtagcgagtgtgacgcagccttctcccggagcgatcatctcaagatccacttaaagactcacacctccaacaagccatataaatgtgccgtctgccgcagagggttcctctcctctagctccttgcacggacatatgcaggttcatgagcggaacaaggacggctcccagtctggctccaggatggaggactggaagatgaaggacactcagaagtgcagccagtgcgaggaaggctttgacttcccggaagacctccagaagcacattgcagaatgccaccccgagtgctcccctaatgaggaccgagcagccctccagtgcatgtactgccacgagctgtttgtggaggagacgtccctcatgaaccacatcgagcaggtacacgggggtgagaagaagaactcttgcagcatttgctcagagagcttcctcacggtcgaggagctgtatagccacatggacagtcaccagcagccagagtcctgcaatcacagcaacagcccttccctggtcactgtgggttacacctcagtgtccagcacgactccagactcgaacctctcagtggacagctcgaccatggtagaggctgcaccaccgattccaaagagccgcgggaggaagcgagctgctcagcagacctccgatatgactggcccctctagtaagcaggcgaaagtcacctacagctgtatttactgcaacaagcagttattttccagtctcgcggttctgcagattcacttgaaaactatgcatttagataagcctgagcaggctcatatctgtcagtattgcttggaggtcttaccctcactctataacctaaatgaacatcttaaacaagtgcacgaagctcaggaccccggcctgattgtttcggccatgcctgccattgtttaccagtgcaacttctgttccgaagttgtcaatgacctcaacacccttcaggagcacatccgatgttctcatgggtttgccaatcccgcggccaaggacagcaatgcgttcttttgtccccattgttacatggggtttctcactgactcttcacttgaagagcatataagacaggtccattgtgacctcagtggctcccggtttgggtctcctgtgcttgggactccaaaagaaccggtggttgaagtctactcctgttcctattgtacaaattcgccaatattcaacagtgttcttaaactgaataagcatattaaagagaatcataaaaacattcccttggccctgaattatattcacaatgggaagaaatcccgggccttgagccctttgtcccctgtggctatagaacaaacaactcttaagatgatgcagactgtgggaggcgggcctgcccgcgcctctggagagtatatctgtaatcagtgtggtgctaagtacacgtccctagacagctttcagactcacctcaaaacccatttggacaccgtgctgccaaaactgacctgccctcagtgtaacaaagaattccccaaccaagagtccttgctaaagcacgtgaccatccactttatgatcacctcaacctactacatctgtgagagctgtgacaagcagttcacctccgtggatgacctccagaagcacctgctggacatgcacaccttcgtcttcttccgctgcacactctgccaggaagtgttcgactccaaggtctctatccagctgcacttggccgtgaagcacagtaacgagaagaaggtgtaccgctgcacgtcctgcaactgggacttccgcaacgagaccgacctgcagctgcacgtgaagcacaaccacttggagaaccaaggcaaagtgcacaagtgcatcttctgcggcgagtcgtttggcaccgaggtggagctgcagtgccacatcaccacccacagcaagaagtacaactgcaggttctgcagcaaagccttccacgccgtcatcctgctggagaagcacctgcgggagaaacactgtgtgtttgaaaccaagacccccaactgtggcaccaacggggcctcggagcaagtgcagaaggaggaggctgagctgcagaccttgctcaccaacagccaggagtcccataacagccatgatgggagtgaggaggacgtggacagctctgaacccatgtatggctgtgacatctgcggggcggcctacaccatggagacgttgctgcagaaccaccagctccgagaccacaacatcaggcccggagaaagcgccatcgtgaagaagaaggcggagctcattaaagggaattacaagtgtaacgtttgctcgagaaccttcttctccgaaaacgggctccgtgaacacatgcagacccacttaggcccggtcaaacactacatgtgccctatctgtggagagcgcttcccttccctgttaactctcacagagcacaaagtcacacacagcaagagcctggataccggaaactgtcgtatttgtaagatgcccctgcagagcgaagaggagtttttggagcactgccagatgcaccctgacctgaggaattccctgactgggtttcgttgtgtggtgtgtatgcagactgtgacctccaccttggaactcaaaatccacgggaccttccacatgcagaagacggggaatgggtcctccgtgcagaccaccgggcgtggccagcacgttcagaaactgtataagtgcgcatcttgcctcaaagagttccgttccaagcaagatctggtgaaactcgacatcaacggcctgccatatggtctgtgtgccggctgtgtgaatctcagtaagagcagtagcccgggcctcagtctccctcctggtgccagcaggccaggcttgggccagaatgagagtctgagcgccatggaaggaaaaggcaaggcggggggactgaagacgcgctgttcaagctgcaatgtcaagtttgagtctgaaagcgaactgcagaaccacatccagacggtgcaccgggagcttgtgccagacgccaacagcacacagttgaaaacgccccaagtgtcacccatgcccagaatcagtccctcccagtccgatgaggtaactcgccttttctcaagcttgctatttcccccctttaaacacgacccccactttatagtcaagcttgccacggccttatctacttttgtcacatgcgccaagagatgcgtagtttgaaatgcaatgtttttctccctatagccattaactagcaattacttggttcctgataagtagcattttggcttgaatggtgcaaaataggactaattccagtctccctaggacactgtcttctctatgactgaagagactggctctcacgcttagcctactgagatctggaacctcactgtagtttcacacgcattgaaatccccagctatgacttgtgcgtatggcaaagagataatgacacatgagtacagtagtgtgagccaacgtgttggcttggactctctctctctctctctctctctctctctctctctctccctccctctctctctctctgtatatatatatgcacacacacatatctatagatagatatatatatagagagaggtaacaaattaggtagggtgtctttaatacatgttgacaacactcactgtttttctttgtcttctgggtagtgaggaaaaatactttgcacaacaggagtttttcaaagctcccatatttatctgcttaaagacaccatctcagaggctttactttctgggttctaaaacgagtgtttattaccccctcagttccagagttctgcatctccatgtttcctttggcacaatatgtaggagaagtacattcattaacagtgcaattgtagttttatcaactgtcattcctccttcacagaggagggctctgtggaatattattcctgttggctttatcacctccacttccctacctgctcctatctggagatccatccaaatgaaaaccccagggaaaaccttgtcccttgcaggtgtggttcctgtaagtttcttatcttgtccttgcactcaaactctcggagggctcccggcatctccccacagatagccatcaggcagccagtaggggagaagggagcaggcaacacagagcccatcctcacccaaggtggcgtctgtgtaacaggcagactcccaaactttgaagctgttcttcttctgtcttccctgcccgagtaaatctgcactatccttccatttaaataaatgaaatgcttttagactgatggagacagctggatgaacatagcttggatagtggttcctggctcaggtgtcatgtcctattcagcagtccctgaaacaagccatacgtagaaacctatgaaatttctttttctctcaaaacttcattttagaaatgtttaagcttgtattaacattaaagagacagcatggtaaatatgtgtgtttgtgtgcttgtaggaacattaaagagatagcatggcgaatgtgtttgtgtgcttgtgcagtttaccagaccaggacaattttgtcccctctctccttcctgtcacctctcttcttccctttctcacttcttccctccactggtttaaaaatcagcctgaaagtacattggagatatattttgatatctccttaaacattgatatttcttaaaccgcaatgtcaagtttgagtctgcatttttttaatccattcttcttaacatgggtgctttgaaaatcttctgttgtgcaaaggattttctccactacccagaagacagtgtgcaattgtaggatatggctaatggtactattagccagagtatcattggcttaaggcaatagaaatagctacattagcaggactcagactcaaaatatatttgtaaataccttagccatataactatgctcttctttaactagatcataactaaaatatcccagccactacactctgccctgtggctggttacctgtgcccaggtaccatgtgattgtctcctcacatcgccccaggtagatctctcagtgtttcctcaaatctccttcattctatactttttatttttcttctaagacctgtttctggttttctttctacttttttattagtatcgttaaatgtgttagccatgagcttcggttcataccctgaacagctcataaattattttaacccaatcagtgtcttctacttggctagttcagtcctggcccactttttttttcacatttccttttcatctcccttagttcatctacctactggtttacaaacttgtcctcagtctgtctttcccacgttctcctttttaaactctcactgcttcccagaatcctctttcttcctgcctgtgtcccacctatgtttttgccttagctcattggccatcagcttttctattggcaggtgttgcttgtaagagattctctctacaatctagaatctctattacaagagggtccatcttcaaatgtctagattgctcctaagctgttttatgattttaaatgttacaaaatcaggagctgcggtgcttgggcgatgagcttgcagaacaagcataagaagcagttaagatcctcagatcccctggaagccaggtgagccaccggggagatgatggagccgcgaaggtcctaagtagactcaccagcgagcctagctagaacagtcagctccactgagagaccctgtctcaaagtatagggtggtaaatgatggaggaagatactcaatgttggcctctgatctccacactaatatgcacaggctcttgcacccacacatatgtgtacaccccccacacaaattaaagattgtttttaaagttgcaaagtaagcgttcttaaaacacttaagtggagaaccgcttgtctcctttttatagaagttagaatgacttcattctcctgtgcgtgtgtgtgtgtgtgtgtgtgtgtgtgtgtgtgtgtgtgtgtgtttaactgtgattttctatgttgacaatcaagactggaccggaccggaccacttgcttcttagtttgcttctgaaaatgtccatgcgtgtctttttccttcggccttcatagcttctacctctgatacttataaattgcactatttatttgtttcacttgaaatggaattacaaaatgaaagtagacatatgaagagcatggacatattaattcagttagaattgcttgtctggaaaaacgctcttggcctcttatttttttttctaaagcctcgtgcatcctaggccggagctgggtcactgaggtaaatcctcaaccagaaagcttatccttaaaccatgcctgtctttaagtattcctaaaatagtaatgttagaacatttacttgtagtctgaacttttataaatcaccagaatatttttaaaacacttacatccacatgatagtttttaagtacttagctatcaatagtcacaacaactttctatgcagtaacttatctccctttgaaactgtatttaaaaaatatcttgcagagatggccttccttgaccagatattaggattcagtttataaataattttcataacaatctgaatgtttttccaatatgatcattacgattactattgctattttaaaattcattattctatttcagttataaaggtgtatgtaattaatactttctcaaattacgaatatacatattatttggaattacaaaaaattgcccaaaacacataaagatttctatttaaataattctaccactaataaatgttattgggaagaaatgatattatataatattttatgtaataggtatttgtttacatctgtggtcagttatgttgaatttgtgattttccagtataaatgatgtgtaatttggggagggtcacactgggtaaaagagaagttactatatgtctttaccaaaaccacaaaggtgtatcatttgggggtgaattttacaaccaataaaatgtaagatccatgactcttgtgttaaagaccttgggttttctgaaggcctccaccaccaagccctaagggagctattcccatcttttctctctgaggcttcaaagtagagaggaagatgacaggagacaagagagcccagacacagattcttgttttgagagttcagatttacggaaccatgacttatgaccacatagggattcacactcaccttcatatgtcggagatatatgcatatgtgcatatgtgcatttgattggtactagattatatatttgaacagatttaaatttatatataaatctagagttgtgatcctattcagtcctccaaatggatgcaagtcaaggtatgtgacagtcaaggaaggctaactgcaggcagctgtcacatggtggaggtatctggaagggaacttaaacccatttcccttgcttgatgtcttctgactttgaaaaaactattttcttgaagtttgcccccatgattattaattgaaattttccgctagactttgggattcagtatttgaggagagcctcaaccttgatgctcctcaagggttgactgtgatgtatttttgcatattacctatcgtgttcaggtatgggagagcctatcagagaggaaaggtgttagccatctagctttaactacacacaggtgcctttccaagttcctgacatttgcaatgtgaataaatatgagctctctgggttcattgatgatggcccgaaactcccatcagtacctcagaagggtgtcacatgaccttaaagttcttcaatagatgtcgggagaacatgtctgcagggtccttctgcctctgttttttgtttagttttatttttaggatggtttgtaggtttctccacacatcatttcaactcatactatcccaaccagtacgttgaaattattctgcaagggacatcattatcactggaaggggcagtggtggctatctgattcagccaccgcattttggagacagacaaccaggctcatataaattgaaataagctaaaaccacagtggccttgaacttactatgtagccgactgactaccctggagctgctagtcctccttcctccaatctgagcacaagacttacagacatgtgccatcatatcacccgaatgtctcctctttgcagttccaggcactttgttctaggtacctatcaagcccaggaacttgtcaccgggtccgtagtatttccaagctctcttctgccatcagtcatttctcctcattgaaaaggttcctgagcatgtctctggtctgctgacttctctgtgctctcctctggggccttagttattattgctattaagtacttgtcacaggtagctcttgcctttttcagaagcccctgtgtcccttcctggctcaactcccacagcctgctccttttaaactaccataagctcttgtttgcattgctattctgccttggcatgctcttttcctgtggccccagccactccccctcctacaactaccacactacactgatgactctccaaattgtgcctccagagggcagggtgcacctcttggaactgacagtaatgtgctaaagtttgactataagccgggcgtggtggcacacgcctttaatcccagtactcttgaggcagaggcaggtggatttctgagttcgaggccagcctggtctacaaagtgagctccaggacagccagggctatacagagaaaccctgtctgggggaaaaaaaaaagtttgactataattttggttattgcctgcatatttctgtcaatactcactggatgtgagtgcattcttttgtatgagacttgtatctcagtgaagatagtattaattaatatggttgtttctgtgtgcatgtattatatatgtttgtgttgacatgtgcacgtaagcgttcacactgctctgttatatgtggagaaaagagggagacaccagatgaattctcctctcttttcatttgagatgctatccctgcctgagcctggctaggctcaattagctaggctgacaggccagctagtctggagacccagctacccccattcacctccaggctatgctactggtgtgcaccaccatgcacattttttatgtgggttctggggatccaaatttaggtccttgtgctgtacagacagtacttgacccaccaaatcatctcctccgctctctaatgaagcctacttttaagaacagtggtatcttcaattcaaatcctttcactgaggcttggactcagtctcagttgtctgctggacacttgtggatgtcaaatttggcagattcaaacttgaacccattatcttcccaatgaatctttgtcactgcagcatctccttgtctcctcaggttcttcctctgtctccacatccagctgtctccatatatgttttagtggttctccacctgctgtctccatatatgttttagtggttctccacctgtgggttgtgacccctctggaggttccttatcagatatcctgtatatcagatatttttattatgattcataacagtagcacaattatacttatgaaatagcaacaaactaattttatagttgggggtcaccacaacttgggtgactgtattaaagggtcacagcactaggaaaattgagaaccgctggcagacatatttgagcatacatcaaatgcatatattaattcatagatatactgattgttttgccaaaatgtactttaatgttttagagtcagatgtaatgtcagaatgctaaattaagctaaaagttttgaagtttctattaaaaactcatcttaaacataaaggcctgcttcaagtggcagagagccaaaattctatcaacatacttcttgtattgaaaggaaactgtacataagaaaatgttagaaggtaatcaatttctagatttatattgtttttatattataagaatttccatattaggctgaaaaatagaaggttgagaaaaaagtagttctttttgatttcatgttgttggtgctagattttatggagctgatgcacaaggaacaaaagataaatggttacgctttctctgaataagccacatttaaaacttaagtagaaaatttatatgagaaaataaattcataagactcaagacgttcttggaatacattaaattgctttgccaagtgcaatctgccttccagattcactgttatgtgtaataattgtttggtatctacaaaaagagctaatggccttggcagaagtgtctgggtgtggggcctacatgctcttgaccaggtcatgctctagtctttgttcccaggctccaaaccagctctattgaagtagcccaacatgcaactccagtgctctggttgtccgtgcctccctccacttctgaatgttttgctcagattttcactgtgtttgcattgtgctctgagcagttcaaagttaagaaagtatttgtgtacaaccttgcgtgtaacagctggctttcagttccagatgtttaaagttaggaatgtttttgtgtgcaaccatgagtgtgcagcagttggcctttggttcaaggctgaaaaagcttgcaatccctgtatgtagcctcggggctctatctaggaggagactttaatatttttactgtaattgagtcaagatggaagtaattaagtgttcaagaagtttgttgaaaaatacaaagatgcattctgaatcatgctacctaccatgtggcatggatacagcattttgttatattaactttgaatttctagaaatttaacattttatgtgtgagaactcttccaaactcttattttttattacatacatacatacatacatacatacatacatacatacatattattatttgtatgtctgcagaatgcatacacatttgtatattcacatggcatgtcttctgtacaatttgcaggagttggctcttttctcccaccatctaggttctgagacttgaactcagattaatctggcttggcagcaagttcccttaaccaccgagccaactcactgaccctctgtcaagtacttaataaggagactgaatagtgggttccttgagatgttacttggttttgacctttaaattgttctcacctatacataagtccctttgactctggagctggagagagagcccagtggttaagcacatttgctggttccgcggaagacttgggttcagtttctggcatccgcaccaggcagctcacaaaccacttaaaccaggaggcctgtcttccacagacatgtccacgtacagacagatgcacatttacaaaataaaactgagaaatacgaagaatctgaatgttttgaacttctggtcttaatcactcttgttttcccaactaccattccatagaaatctctctcccctttgaaacggaatcaccctagtgcacatcggcacttcatcctcaggtccaactggggccgttgcactccgctcttggagaggattgtgacttttcctggccatccctgatgctggcctttcttctgcttcttgtgtgagctccatttccctgcactccaggacaccctcgctggcccgctggtccttgttttactatgtcttttctctgcatcttatttctacacaagagttcagctgtctcagtcactctctcttcccatctttaaaaaaaaattctcagcaaatttcagcattaaaaaccacacaagtcatattcgtgcagaataaaaatatattttaaacaagagaattatctttaaaaatcaaattttcaagttaaaaaataaacataacacaaagcttaaaagtagtatttaaaaatacttagatctggtagctgggtgtggtgcatgcctgcaatagcagcattggcgggttgcaggcaggagaagcagggttgcagaagcctcacgctgcattgcaagccagcctggtctatgtgagactccgatgcaaaccaaacagaaacaagcaaattgttcaaacgcatatgactaatacaggacttagtaagttatttggaaaaagaattataaagggagatcagccaatcctgtgtgaataactaccagttagtcacattgttctccagctaaaccaagcaagttaactacagtaaagggagtaagatatcacccactgccatggggacctggctaaagttaaacagcagccttttttatgcctgtcagtgcattcctacaatcataagaaatgagtatgtgtttaaatgagtgctgaagactgtctatagtggttttatgtatacacacttccaactagcataaaccaaagcactcaattgcatggagtgaataaggatagttccctaatgatgtaatccatcccgtttgtaatggagtagtactcagtaatatagaatgacctgttattatacagcagcccaaatgactcacagacagtgtggaaagatggaaccagagatacacaatggctcactctagtcgtgcagaatttaagaatgagcaaaagtaatctaggatgattggtatcagagaatagttgcaccaaggctggaagcaccttggaaggaacaggaagaatccacctaggtgagtgctccggccctgttctggatgactattaatgggggcacacacacacatctgtgaatctatttgtaagcactgcttggtttgcatgagccctgttacttctcattttaaccattacccacaaagccaaataataccccattgtggcatatgtttatgctactagcccaaaagtttctattgtatggaaaaggagttagcataatgtaagttatcaaaccaggctaggtagaggccgagagagggagaggaagggatcggagggaaaaatcccaccaacattagaaggtttaataaattcttgaaaatcatcccacaaagacagtaccagatccaggtggcttttagagtgaattctcctaaatgcagacctagacccacaggtttggcagagtctgaaaaagggcaagcattcgctgttataatcttcatatcaaaaccagaccaacatggcggaaaaaggagagtcaaagtaagctttggtcacgattctcatcctaacattttaagcaaaatgtcaataaaatgaaatcccctgtgtgccaaaaataagggtttgttattataaactggatttatgacaagaactcaagatgggtttgagctgatgtaaatttgactaatttaccacatgagcaaattaaagaagaaagaagattatatgttcatctctagaattcaagacaaaataaacagaatcgtcttgtgttttaaaatgctacattaggaaagaaacaagactttcctgtacctaatgaagactataacagtgtcaccattagcaactagtatgaaacaatagaacgttttcatgaaattaataattcataaaaccagtaatctggtttgtaggtaacataactaagacaatcaaatattgaagtctagctcaaaaatggaaaccagttaactgtcacatacagggggtatggtttgttttgtgtgtgtgtgtgtgtgtgtgtgtgtgtgtgtgtgtgtgtgtagaaagtactgaaaagtatttgggcaggccatgtaccgcagagctgcatccgcagtaaaacttaagctctgtgtgatttgttcaccaagtcacaaagcaaagaccaccaaaatatcaattgtaaataattttgtttacaatgggcaaaaagtcgtgtatattcaaaaacaaacttataaagtacataaaacatttatatagaaagggattaaatggttttcagagatgattttaaaggcctagatgaataatgaagtacagtttgttcatggattagaacactctgcatcacaagacattcgcttgcccaaaactggtgcagtgattcttgcattggttatctcagcaaagttttattgtttgtctctttgttttacattcatgtttttaatttttggaacttgaccagcaattctaaaatacccatgaacaagcgaaagacccagaggtgtgaacactctgagtactgtggcagagtcgtaaactcagtatggaggccataggaggaggtttgggagcttgggccagcctggactacatagcaagacagtccactcagaatagcagaaagaaaccatcagcaggggataaaccatcagcaggggagcacttagtcagtttataaccagtctttagtaattagtagaccccaaataagatgccccaatgagatacatagctgaaacctcaggacagcatgtagctatctttagttatcattgaggaagcagataaagtattaaatacattaactatttggaaaaaaacaaattcttgctcatatataaaaaattagttccaggtggtttatgtacatacagatttgaaagataaaggcataaatcttttgaaaaagtagagaaaatatttttataaacttcggttagggaaatatttttttaaataatgtaatgtgaactacaaattaaatgattggtatgttcatcttgattaaagaaataactgaagagaactcagagatgcatgatgatgataacatattatcataaatataactgaaacaaatatcagctttaaaaatacctttaaaaagagccaagagttggtaggagatcacaaaccatcaaaaaagaaaatgagaaaacaacaagaagatctttatcagaagcaggaagtaaacgtggagatttgaacatgcacagatttgaacatagtagcccattggacttatgggaaatgtcaatttggaggccaagaggatggaggggaagaccccttaggaagctaaggcaggggcagaggtttaatgtatgctttttatatgttaggtatattcaatatgttcatcataagcatttagtacttaacaataaaggcagaactgtaaatgcagagagtgcccttcactacacagagaagacaaatgtaaaaccagcactgtgcaccgcagcccaggttaaaattcatccctgcccaattcagggagcctggaagctcttccttcactgttgcacgaaagctagccaagtgtggtttataaaggcattactatgtggctatatccccgttagacttactgtgtggctgtatccccgttagacggcttcctctcatgtgctacttgaacaggtgcgagcgagttcctggtttggggggacatttggctataatatgcatttgtttcagttcattgccttgtaagataataactgaattcttgctatgtccagaacattgaggtgcaaagctgtaaagagaagaagctttatgcaaataaagttcttggaccagtataattctgtgattataatcatatgctataggtattcatataaattagctatacatttttattctcaatgtagcacctggaaagctcataaggtaattaatatatagcagtagacacagacaaacgccattctagaggcgccttatgttgagtcttcagattttgttggtgaggaatagccgttgtgggcagttctgtgcttcgacagcaccaagacagagcaagcggcctggaaggaattcacttttcatatgtctgtgttagacatcaaacagacttgaggcaactgccacatcccaagtcctgaggcaggaggtgagcatctgtataaagggacaagcacggtagagctgtgtgggtcaggacgacaccacagcgaaagcagttgggcatgcattgcggaagcacgggttggctaagcatcctcacagctctcagagcactgacttgtgcttcttgatttcttaaaatgctttcaagtgaaacttggtgattaacgcaataggcaccttgaaaaagatggaaatattttcttgagaactaaatattgatactatagcctagaactgcacagaaatagaacataagatgtcttataagtatgtaatgtcctttgtaattcatattagaaagagatgaagaggcagatgaagtcttgtaaaacacctcatatcatggtaaataatttattttatggaattaaacatggcatcgcctaagcaagccatcaactgagtccgtgcgggttttgctgaagaaacgtggtcactgaggggaatttaagggtccagtatagtaagagaagatatttgttaggaaaaaagttcaaataccagttgataaaaatgtctatgaggcttccaatcctgtttctttattgatacaatgggctttctgcccacactgtgtgtgtgtacacatgctttctaaggttatcttggagcacagctgacacatttaaacatgaagattcttagtgaacagagaaagcatgcacgcgcacacacacacacacacacacacacacaatacatggttatcattatgtattatgataccagtgtatacacacactcctgtttattcatgcatgcatgtaacttattcatgtaatcttttttcaattaatttagtatgacaatattaaataaggctagaataatggcttatttcatcatattgtatcttacacaattgatgaaatagaaaaacataattgttaatagcaaatctaggagtgctgaaaatcaaagaacaaagggaaaaacagaaaccacaaaaattaaaatcttattttatttgctttgaggttagaggtagtttcagtaagtacaaaagatgtaacggcagtaaacttctgagcatgcaaacagacaaataaccatgggcaggtaaggagaagtgtccagtgatgggactggagtaaaacacatccccaaaggcaggaaatttaaaaaacgcataggaaacaacatttaagacaagtagaaattgtctgcgataagcatagtaaccaaacacggaagttagattttcttttttaattattctaagtccagaaaataaatgagtcacttgaaaggcaattaaagaacttgattgtgtgattggaatccactggcattgctttctgctaatcatgtatagaattttcactggaggggcgaagggaaaaagtggtggcatttttatatttgatttttataggatttataattttgatacatagtcttagtttattttaaatgtatatttagattactaatacatgattaggggtgagttgctttaaagcaaacatttcatgatctaaaaattcaagtgttactgataaacttaacttacaaaatctgttatgaacatagcgcagcttaccttggaatgactttggaattcttatatttatatttagtttgtcatgggctgtaaggaaacaaaaaggagttctaataaaagcatgttttctgaaatagttggtttataggtagtgaacatgtctttcgtaaaggttatttgtcttctaaaaatgagaaggatgagagggaaggagacactgaggatgggaagaaaagatgagggataaatacctaaatgggaggtcagaaaatctgtcaggagtatcaaatatcaataactgtagctattcagactggaaacaaaatgggttttgtagaagatgaatctgttttttaaatttatttttaatcaagtgtgtttgtgtgtgggtatgtgcatgtgagtgtaggaacccatggatgacaggagagggcactgcaaccttttggagctacaattcggggcttttgttagcctcctgacctgagtgttaggaactgagctctggtcctctgtaagaccagcaagccttcctaatcgctgagccatctctctggccccagtggacagattgctttagtgccttaaatggctatggattgaaggtttttgttttgttttggttttgttttttgtttttcttgtcattctccaatttaaatcatgtcaaaacaggcatgttattctgtctagattgagtcaagtcaagctgattccttcttttaatcaataccaatttaaatgcatactaaatagcatacattcaaaagagacgagtgagatgttttcaatgtttctcttggtagagactatagccttcagagaactgctctatctttatatcaccaaaatatccactggtggacaggtgagatggctcagcaggtgaagatgtatgcttccaagcctgaggaggtggtccctaggacccacatagtgcagggagggaaaggacttcctcaagttgtcctgtgtcttcaacccatgctctatggcatgtgcctagccaaatacagacacagaatatacatacacacccattaaacgaaataaatagatgcaatctatttttctttaaaagataaccaacaatagaattccaaactgtttttctaaacaatgaccaagttgttgtgtgaacttataacagcaaaacatcatagaagaaaggaaccatagagagtgttttgtaatattttctatttgatacaatcatcatttttttttgatttccctgattcatactctattccatgaagacctttctcaataggtcaattaggaaaggacactgtaatttccccactatcatattctgggtcattttcatatgattatttctagttttatgagataagttgtcaggaatagttgcacagaagttttccaggtctcaaatttacatgtctgggggtaatctgctggtggtggcgagagcctattgtcttttatgatacaagatctaaaattgcttggtgatggtagtcttgtccccttcatgacattttgggacatcagatccctgccatatgtctcatgttctgacaggcagtgttttaaagagagaaatgggcattgcccagtgggcatcaggaaatctatgactggagtgtgcatatatgttttgatcatgtgattcaagcatctaaaaatcagatgtcagaaatgtgctaagattattctcactaccaatgtgacaccatgaatgacatctgacattgtgggcagggtcatagttaaaatatagggcattaaagtacaaaaaactgtttaggataggtgtataaaatatgtatgcaaagcttatattaattttatatttaggatgttgaggcataaatcatgacctcaaaacttctctgcatttaggtatttcaaaaattaaaaacaaacaaacaagcttttgaaatacttgtcatccccagaagtttgaataagccattctcaacctatagagtacattttatgctgaactacgtactgagaaatcagtacattcaaagaaagcagcagtcagtcacaagaagtgtccatagagaggtgactttatagggctgtctctaccctctgaacccacaggagccttgagaaacttggacagccaacttggcggtggttaatgaaatgaattgtatttcttctggagtccagcgactgtgtcaacaggtgtgaacctgctcatgccgctgtgttctcgaatggcttggtgactttctgtgggtcacgttcaagatcacttcatctgctctctgatgggaaatgtgaaataggatgagatcacttcctttttccactctgagcctccatgcttctctgcaaagaataatatctgtgaaatatgaatatcatgctatcagagttttgggtctgctgaacctacagaaatgccaagttgacatggtagcctgctgtcatttcagacataggatacagagacagaggatttcccagagtaaattggccagagatactgtccaggttgccaaactggctttatctgaactctgggtttgagcctcagtgactgaggtggaagtgttggtgactaaggtgcaagtgtgacaaggtaattcctgacatccccatgcatgctcccactcacccttgcatgcgtgtgtgtgcgcgcacacacacacacacacacagaaaagggtgttcattttttaaatgaatgaggaagaatttcaacaatctagacaatttcaattcagttggggggtgtggttaaactcagccttccgtcatgtgtctaatacactggaacagcacaaaacattttggcataggggagctgaaagaaacaccaccgtgtcctaaaaacagtatagacaacaggaataaagaagccaacatccacagcactgtgtgggtgtaattgttaactggcttttcgactcgggtggttttagaagcaatttgaaagaaatgggaagggtcatctgacatggctacgtgggaaagctgtttgagtggacgggatggacaagaaaactcagaactctgtgtttgtggtgtgagagagagggagagaggaagggggaaagggagggagagggaggaggagagagtagacacctgagtgtgggtgtggacaatacagtaagctatttcaaagagataacagtaaccacagacaggtaatctgcacagcgctgccaacagctgcaaataccagatgaaaggagagcatgtcctgtgggtgggacatgaagctgccagaagaatagctggaaggatagaccaagaatagaaacaaaggaaaatggtcaggctgcctcaggggaggccaaagagcacaggaaggaccagagatatgcatcagtgagaatgcataagcgcagcatgggcaaagtcatgggttcaagcaccacccctaccaaaacgtaaaaagggttaaataaccccaaacttaaaagaatatacataagcaagaggtttttattttatagcaagcatatgagttgtacatatttatttatcataaatatgtctaaataatcagctatattgcaatagatatgaaatgaatgggttaaagcctcctgtcctcccttaaagagtgaatatccccattagggcatagattaacattgtagaaatagtcttgataaagcatgtaagaattaacataagaataaaaaggaatcatgatctaacaagaagtaaggttttgtgttatcttttggatactgatgatagttatctaagttctcaaagtgctagtaaacctagtatattccttgactctcttttatgacagagattatataacaaagtgtgtgtgtgtgtgtgtgtgtgtgtgtgtgtgtgtgaacaattatcaaagttttctaaagacccaattatttcttgagttttgactatttattatgtctttggaattaaagtatcttagaactattttatctaatatttaaaaattccaataaaaagtgaaaaatttattttaccccctctttggtttttgaaattgtgatagcttaaattttaactttgtgaaatatggattttgttggcaaaaataaatatgctcaaacaattattccctgatacctgaaaaaggcacaactctgttgcataaagcaatgatctgcatccagattgtgcatgttttctgtctagccagttggctatgagcaatctttgaccctgtttcttttctgagtagttctcctcagtctatccaatgccgcccaggacagtcggcaccgcaccttgcagatgataggcactttgtattattccattttagatcatgcatcacctccagggctcttttatttggttggtttggtttgggttttaaattttttcctgactcttccagggcatattaaactgttcctaccagacttgttttagctcccatagctggggaccaacaaagatgcttggtcctgaactgtattgccatgttacttaggcaaaatctgagtaggactctaatgtttgtgtgtttccttttccaaagtgtgttctgactccttgaattcaggatggtgtcatttcctcttggtggttaagggctaccatgtgccaggcactgtgcacagtgatagtctggccacatgattacaccatcaaacactaaagcttccatttttccttgggttaggtatcagttgattctgttgcattttggctactttcccctctgcgctgacttatcttcatatcaattcactattatgttgaaaatgactaagctaaattagtaagttgtctaaatttgtacaaagctgtgagctcatgacttaccctcacatacaatatctacttgtttgacaacaaaatcctgccaactaaaggtgttactctccatatgtaatttgtaatataattgtttttagaatgataatatatattgctgtagacattaacaactcttttgtttgatatctttgtttctcctagcttgtttggagtggttttgtgtggataatttgcataaatgtgtgtatgtattttcacatgtgtgtggaaacacaagtgtggaggtgtatatgtatgtgagttcttgtgtatttggaatttggaggctggcactgtcttcctctgttgcttttcccacttgtatattaagggaggtgggccagtcgctcatctggagctaccactcagtgatctagccacactacctagctttttccagggatcccgtgtttcaccttcagacgtctagaatcatgtgagctgcagtgcctatgggtgctgccaatcaaacctccagtcctcacgcttgcatagcgagccctttacccagagagccatcttcttgggcccagtttgaatcttttacagattgttctttaaatctcttcctttctgtcttcccacagttgtcactaactgtggtgtcctttatactattacttactgagcttttacaaatagattttagaactcttaatggacataaaatctaaatctgtgtattttaatggaaagaaatgttaatatgatcccgaagtcacctctggaactcccttggtaaggatctttgtgtgcctgctagtatccttcccttacatcccataataacctgtcaagtaaagagcaacaaaggcagttacttttgagcactggtttgttcactctgggcatggtctaggcatgttcgtatagttctcgttccacatagaactctaagatgtaagctgtattgtttttaattgacagggaaggaacctaacactcaccatcattcaatgacttgtagctcagctgaatgatgaagccacggtgtagcgactgattgtagagagaacattctagagggttttttttcctactaagattgctggatataattgggctgagtgagcatttgttttataacattgcattgttgactgccccttccatgcttgaaactgttggagtagagtgagccgtgggctgtaagacagctaggagaagtggtccaaacatggggagtggtgatgaaggagaaacacaggaacctgtgtagacatgtccttcattcttccagtgcagaaaccaagtaagacattggggatgaaggcaagggtctgtgggtctgcaggtctacagggtctgcgggtctgcagggtctgcgggtctgcaggactcttgcaaggaaatactaaggtttcatccttataagacaaagccagacctgctacttattcatttatctgtttctaaggtttttaaaaatggcattgctgtaaatttattttatttattttatgtgtataggtgttatggaagaatgtatgcctatgtaccatgtatatcctggtgtccttggggacaaaaccccccaaaggactgacattacagtgtttttagtcaccatgtgggtactgagaaccaaaactgggtcctctggaagagcagcagtgctctgatccactgagccatctctccagcccctgatccatctgccttgtatggagtgcttgcttagcattgatggctctgaggtcaggcctttccttgtaagccaggcaggcgtaggtgtacaaataaataaatgaacaagaaacaacgaataagcaggaacggcaatgattccttcctcttgccggagagactggaaagtaaaacggtgctgttgatttctgctttgtatttcggtttctccctagacaattaaagaagcaggaagaggggcaggttttggacttaaaaccgaacctgtgttgtttcttctatccctgcagcagggcaggtgcacaggaaatgtccctctgtgaggatcaagtccagcagcctggcatgaccttagcgaggcaatgagcaaaaggcattcactccaagtgggcttcaaatcaaggcttcaaattctgtgaatgagcctgactctgatttaaaagaagaaagggggaggaggagtcgggggaggaggagaaaggggagaaaggggagagagtcagagacagacagagaaaacaaccaccagaaagagactttgtcagaaaagagactatcagcatttgcaatgaaatagtaggtttaatagttttaaaaggtgaggacaatttccactaagaaaactgacaaattttaagtaaatctaagcccaggaatatgtaccaaaagccgagataatttaatgtttaaaataagcagtggaagctagttgttgaaatgatgctttggtagagatgacaaactcagcactgaagagggggctcccctgcaggagagctcagatgttcatgccaatttgttaaaacatgcatgcaagagcaattgctataggagagaatggtagaaatgcttcagtgccgagcttctggaaggttctgggagaggtaaggggagactcaaaaactgtgttaatttagccagatgaaaattgtgggaattaaagacattcttgccatctcggaattaaactgttcttagtattgaaataaacatgtaattaaaatacagtgttgaaactacagaacattgagaaaaaacaaagccctgcattagactctgggagatcagagcctcttctacactgagatctaagagaaggatctgggatgggacttgagagcaaaggtgcggaaacaggccctgccttgtcctgagctgtttctccatcatctctgacattccgtgttccacaggaggaaagcttgcttctccgctgtggtctcagcttttcttgcagagtagaagctgtgtttaaaggcagggagaaggggctgagtagaatcctggctttgtttagggtattcatgccctgtgccttcggacaagtcacctaatttatctggatgactactctttctttatccgctcctaccacgttattgcaggcgacctcagtgcacagcgattctccataaactgggaagtacgagacataaacagggacttacattacttgattttagaaatgaatgcaaactgtaattcccaaattcttacaaatgtatacgttagattcatgctcaaaatttcattaaaacagcaaaaatatttgcaaagctacttataacctctaaacagaaactatttggtgtatctttcatatagatgtggaaaaataacacacctggacatgatcaggatgtgttccgcacaagaaaacaccatgcacgttgaggcacttgcatttatttctctgtccctgtgttttctctgacagtcacccatgcacctggtgattgctattgtcatgtagctctttctgctttgcccatatctgtgttatttgtgtattgtttcctctggtgttgtgagagttcacttgtgagtagcataccacttcgcctctataccaatgatgtgactctcctgacacaaaggacattggcctttcctacatactatcatcacatccaaggaagatgcccattagccaccaataacatccagtaccaaatggtggtcacttttccccagttgctcaaacactcctggcccctttatcccaaagccagaccgcataagtgcatttaatagatgaacctctttgagccacctgagaatagtctcctgtgacctggatgttttaaagacaatagtccggttctctaaaaggtctcttcagggccttgtttattcttctgtctctgtctgtactgaaacctaggctgctacctctaaaggttttatgacattcaacttagtattttggataagtttctttgagtgtgaagaataatctttctctgcaaaggcttcagctactaatgttttccaaatcagtgcaaaatggtggctttctccattctagcattccttcttctttcccttgcatagccctcctatcattaagtaggcatggactgaattccctcctggaaaagcttagtgtttccaagtctttgactgccaattgtcagaaaaagaaatttgcatcaccaagcatgtggaccaacacacacctgcaatcttagcactcaaggctgagggagagagttccgagtttgcagtcagcccgagatatccgtgagattctgtttcaaagcagtcaaaaaagaaaggagggaaagtgacctcacgcttagagacttatttaatagtgaccatcatagcaactgagattggctttctaccttcgagggttactgtggactcactgatttttttttaatgaacttattatattatttttttaaaaaagcaatctataactccaaaacataatttttaaaaattcacaacttatatttaatttggtaagacaaaatgtagtttaaaagctaatgggacagagatcaaacagagagaggtaatcagaaaaggaatatttaatactatatgttattagagatatttaaccttttttttttaacttatgagatgctcttttctgaaagtctccgagtacctgaacagagtatagctgaaaacaaaaaatgtcaaagaggcacgtttaaattgttctcaaaatcaatcaaatataatgaggtgctgggagaaagttgtatccttgataattacatctatcagtatcagaaaacaaaggagaacaatcaggaagtgacagtccttctcccaagtagctcatttaaaaaggctaatgaaaaaaaaaagtctcttttaaaaatgggactaaattagcatttcaagtaaattgacaacctaagcgttgatcaaggccaatgtggggcccaaacaatggaagttctgtttctacttcacctgcttttaagagaaattatctcacgtgacttttttgttgttgtctttgatataaatggaagcaattgtcctgagggaggtgacagtcctcttgcactccggcagcaccgggtcacccctcaggcatctggcttcacttcgggatctgtttatccttaatgactgaagaaagctaaccatgttggaaaagccactggacagtctgttgcgaggtgtgtgtccctgctctcgactgagaagggggctaatgagaccgtctattagacaggagattcctcctgctccttagagcctcggccgaggtttgggaccaatggttgaaagcaggaaaagggaggatttgggcctagaactagggcaactccttggtaatgtcagttatgcagagctctcccagcaacagatttacaggtgtgtgttgtgtgctcagtgagtggtgtgcaggtatgcactgccctcagatagttagataagaatctattagaatgagtactttatagaccatttcaatttactattctaaaaactggaaagtgaaaatgttttttatgtatgccatttgcatagcatggctttgttttgaggaaactggggcagaggttgctgagctgggtgaagctgcagtatttaggccttatggtgtcttctcttgaatctctagttggctgcagatttgggcacatgtagataaaaacatggctatgtcgatttaaaacaggagaaagcattttagacaccgtgagggtgtagagaattagctgtctgaattatcaatagtgacacaagcattttctttcaataagagaaaacttagaagggtctttaaatgtgtcagctcattttgaagataggcataagtgctgccattttattaccttggcttttcaagtggttttgttctttattagtggacgagaaggaaaaaagcccttagtatattcaagcaacctccttatcagtcataatttttggagacagttttcgacatgttctgtgttttactgtgctaacaagagaaaagactagccattaagtttatgtttctttgtttttcagcaaggtcacatatcaggaatgatgcttgaagtatgctaataaacaatatataatggaggtcatcagggagtaagaaatattttctaactagttctaaagggaaatatagttacaaaagggatgaatgttatttacacaggacatgttgctctatgcgtcactgtcaaagggtctcacgaacagctccatgcagtaaatcgtcttccttgattgtcagggtgtgggaagccctggctaggtttagatttggtacactcagtccactggtttctaatgaacaaccactactgggttatttagatatgtgcattggagacatgcctgggcttttagggtttgctaggtataatgtcccttgttgtagaagaaaatactatgtagattataacaaataagaaatacttacatttgtggcacttatcctttgtaatttcaagtgaaattacacttattttcatactttatgtttttatgtcctaaacaacttgagcttttcacaatgtgctataatttatgattcatattaacttatgactcctatttcatattaacacctgtagcaaaacatgttatagcacaccaagtgaaataataatctttgggaattattacaaccaaacattacgtgtacacctttacagatggaattttcccacatttacaagtgaactattccttaattgtttatttcatcatagtagatttcatttttcaagatgttttttgattgtagacagcgtgtaatgcgaagggatgtatgtgatggtgtgttctatagaacccctcagttctttcgtcactgagtcaaccctacatgcaccgagagagaatcagtcttgagaacagaaagtcacaccgcatgcttcctttgagatttgagagacattacttcttttcccgcttctgtgtcacagtgacatcgagtgtgtctgagtttgtgtgtgtatgccctaacccctatcataaatactctgctccatctatttcactggacggtggtgttttatcttgaacaatttcctaagaaaagaaagtacatattcaaatgagaggaattagactctcagaagcattacctacacttctgactgcacaaaaatacctaccttcttagaagaatgatatgggttttctgtatgtgtgttagtgttttgcctgcctttatgtctgtgcaccaggtgccacgtgcctgtggaagtgacaaggtggccactctcctggatatagaattacagggagttgtgagcatccaggtaggttttaggaactgaacctgtgcctactgctacagcagcaagtgctgttaactgctaagccacctctccagccccattgtctaaaatgctacgagtcttaacttactagtcattttacttctctatttctgggaacaaaactaccatgattttagtgagaattaaaacatgtctgatacctaaaggcattggtttttgaaactgagcccatgtgttataagtactttgaatactagggtctagttctgagcttaagagcacctatattattttgttatcattatttcataatgtggtgcctttgttccttgtaaatgtaataacgtgtactgctagctgtcaactctcagtttcttggtaagatgctcatggtgctttgtcagagaaatccacagaatgttaattagccacatagacaaaaccaacatcgagggaagaccgttctgtggtcagaggttttccctcggtttgtgttgggtgggagcatttctttatgcacatgtgtctaagcaaacgcgttcctccttcttttctcagaagaagacctaccagtgtatcaagtgtcagatggttttctacaacgagtgggacatccaggttcatgtggcaaatcacatgattggtgagtgagactccgccccttactactcatccatttttctcatatgtgtgtacatcagtgcctatgtaattaaacagcattaagaatgaattaattgttctgccatcaatgctttacctaggcgtgattgattttttttttattcctcttattagacctggtaaggcattagcgcgttttattttctgcaagggctagtttagacttctgcagaggattatctgcgttctgccagtcaaagcacaggtgattagcaaattaaacttctaatcatttttgcattattgaaaactaacaggaatggttaatgaactggatgttagctttccatagagttttagacaggttttaatttcagaagttattatgataatggcactgctgtgtgttgcttaagcatctttgtatcaaaccctgaagtggtgagttttgtgatggggaaacataaataatttaaattgccataaaatagttttataagtatggtttcagcagcctggaaataataatgatcataaagatcatgtaaagaattcaggaatcagttttttatttcccacgaatttttccacagatctttgtagaagtggatagggagacctctgacgttactctaggccagtgattttagaatcgtgcatgtattagataggctggaactaaagtgacagcttttccacttattcatggtgtcccattatccacccattcctcaggggttactgcctggttcctgttttttaatttgataatcacttagtaataatgctaagagttgtaccagccaattaaactttatcaagcacatcttttgctactaataaaatgacaattgctattattgtgtactatttttgttactcatttgtatttttataccatgagggttttgtttatttatttcatacttacttcttggtgttttataaacccatatataagtagaatataatattttgaagtccgattagccctatattcacctaataaaaattttgtaatatagaaaaacaagtttaacatttttagacatggaatttgtttccagggttgggggactatcttgtattgcacagcaagaagcagagctctaagaaagtacattccagggtgactccaactgtcacccctgctcagggaaggctgaccatagcagaacttgcaacatatttgattaaaattcaggaccatgttggaaaaaattaatatcttctcaatagccttagctttttttttcaatgattggatttttttggacaattgttacttataaataaaatggtcacctgcaacatatgcacggcagttgaagtattgatcagtttacgtctttgtgttccatatttaagtatgaagattattagtgatttcttatgccttaagataatatattcgttgccatggcgggatagtattaagaggttttcttaagcaccgagaagataagcacagcatggaagggattcagagaatgttccgggcaaatcgcctcctgttcagaatcctggaaaaaaaaaagttcatgtaaacttccacaattgccttttttttttttttttttttttttttttttttttataagaaaaagggataggaaaacctgaacgatcccttccacatggtacctgcccatagttacatgtctccatctctttactgtggcttggtggcagcagtcacagattctgcctcatgttacaagttgcaatagtctcgaccttcaagtgctccagttacaaaaacgtgtagtgagtcctgcttctctccagatcccttcagtgtaaatttaatctctgggtttctaatttatccacgttgctaatgagaatacaggaagtatctcagccactgtgttaatatctctgccacaagtaggatctagactgaatattgagtgtgaaggtacacttggctttcccatctcactgtcaatctgtgactcccactggctcatccccccactttctctatcccctactcttcctgtttatcttaggttcctccagtccttcattagtgctctcccaagtctaccccctctctgtaatagtggattaatatgacactcacctcctcttgggatttgagcatttaacaattcaccttctttcagagatgaaaatccctttcattttcatggagggcctgattatttaatattcaggctatttttttaaaataataaaatatgtgattctattgcactcgaggcctaaacaaatgaatagcatccacttaattgctctgtctgttgaccaggcatccaagttcttaaactccattctccttgttaatatctagagagaaaatgtgaagcaggagggagtcgccaaggctaagatgcccctttttaaaatcccagtgtgatacttagtctttcaaatgaggcaggcagcattattttgttggctaaaatacctccattgaggctgggtatttttagattgtgtatcagtgtgtattttttatctaataaaaaaataatctgaactagacatttagtacaggaagagggattagagactgtctgaaagcctcttactctgttaaaagggtgggtggtgttttgtagctttcattttgcaaaacatctagaggaagagccctgtctcctgacagaaacatggtctaaggacgcctcaatgagctgggactcaaaagccccctatagcctcatcctttgcttttgggggtggggtgaagcaataagtttttcaagtaacctccaaacctcttctttctggagacgctggtttcatgctattgatgagggacacttgagaaaggaaacccattgatattttcaccaggagcatgagggaagtgtccttaagttctgtttgcagctaggcgtggacacatgatctcagttgcaggagtaattacttgacaaaagtgtgccagggccttgtgtatgcttattcaggaaaacatgaaacctttccatttaccacattttgacaaggttttgcatatttatgaatacatgcgcacacacactcacacacacacacattcagaccagtaattacttaattacttagggtttttcttctttgcacacacatatgcagagagtgagggagaggctgggggagggagagaactacagaatgttttaacaactttcctagaacaggttagctaacttctgtgcagatgagaatgtttttgtcttcctttgttcctttcacacagtctttgttcatttttaccataaagaagccattgtgcaccgtgacttttaatgcatatctacccttctatttctatcgagtggtaaagatttagtgttattttcctctgtgagatttcaagttactattatttggtacatattaacaacaaagaggtggaaccaggaaatctaaatgtgtttaacccagcgaagggattgcctcatataaaattacgaggctccaccatagtagagtaaatttgtaagtgcttggaataaagggttgttaggcatgagatgatataaagaggtggcattgccaagaactgtttacgaggagcttaattttttcactctgataattcttgaccaataattaccagcctctaattatctattttagttagaaagaaattctgttcactatggaggttggcactgccactactaacacataaatccctaaagagatgaatgtgttccaaacagccacacacaactgtctcatgaacgcagtgagcaaattgtgagtggctggtgataggcaaccagcagtatgctcactatgtagggccagtcagcctgacaaagaaatgaccaaaggggagagaggccattatccttggaatgaattattgcggctgctaacttccgagagaagtagtgaagatacactgtggtcatttctagccctccttccctagttcctagatcgattgtggagaactgaacacagagcatacacctatgagttactttgaaaaatctacttagaaatagcttgttttcatttcacttatcttttcatgtttttataagattgtattgtaatgattgcacgtaaagaatcataatatccccattttggtattttaaaaaaactggaaaatttcagatatgctagtgagcttatccttaaaggtcaaacatgatgctaattagcattctaggaagaaaatatatttatctcttagagaaacaaaagtggaaattagtataataaacattagctggcctgagaagtgcaatgcaatgatgttggctatttttatcctggtctctgatactcagtatcttctggataattatttttaaaccatgaagcgactcaacacgtgtacagtgcattcaggaatatatgtaccccatgtggtatggaacatgcactatgtcaagacaacaagagtgtgtaaatcagtttagtggaatggtgacactgtagtctgttcttacagtaagtggcattcatatgccttgtagtatgtctgatgccggggtgacagggtatcgccaccccttctttgccagatgccttgttttctaactgatcatgaaggtttgatggggaagttctgtgtcatctctgaaacacttcaacttgagacctcttgctttagaaaacagaaaacctaatacattgggctctaccatagttttggattttacatgactttgagagaaataacaaaatattttgacctttgcatatactttaaattctcttctttcattggcagttataaaactaatgaaaaaatgaatttgtcataatatttataggtatgactatatgtatatgtgaggtgtgtgtgtgtgtgtgtgtgtgtgtgtgagtgtatgtacctgaaagagatcattcataccatcgtaaggattacaaagtcattgagattctttggagcaatgatttacattcattctaaatggggctattggatttaaaaaaaaattattcatttgattacctaaaaattcagggaattaagaaatcaagcatttgatgttgcatatgaggaaatactggcttatttcatcaagggttggattaaaaaagatgaaatctgggcagtttaatggtaagagaaagctaccctcatgtgggcaatgctggcttatttgaaaagcccataaagggtttctgcatgggccatacaaaaggggtactttctctttaatagccatctgtacaggagagatgagaagtgggccaggtcatctctcctcagctgtcacgatattaacgtaggtaatggagcaagctcagcgttctgctgggtgttgtttttcatagatgttcatcgatttacacagataattctatttatttcttagagttggtccaagtgagccaggcagaataacaaacaccaaagcatttcagatgactttatctttgtttataacgttaacttttgtctaaaaaaaactggtgtcacacctactgtgcagatggccgcgtgatctgtaagccagccaaaacatttaaacaaatgtgtgatctggggatagattaaataaaggagaaagtggagtgtgggccacaaattctaataatcagataattttaagttgtgtgcagtgttgagccacggccacagcgatagctgggagagcctgccaatggcagcaaggtgccgcagagctctcaggatggagtcggtggcctggtaggccccggcttcagaagcacacgtctgctgtacagctggcagctctgtgtggggacatcagataaaacttatgtaaaatgaagtgttattgcttagtttgaaattattcagagagggaatttttagacagtaactgaaaacagaattcgtgttaccaatgaagcggactggacgtatgaagaggctttaattatctgcgcaatttaacaaaaattcaagatgtattcaaaaagggcggccagtagcattatagctgtgctgtttgttgagagcaaagagggctgtgggaactgcccaaaccttgtctactggtagccttcctgaaagcaagggcaatggaaaagaaaagtacccttagaagaaggcagagtcttcaggagcccagctgagctgtttacagtcacaagcttcaaaagattcagagtgacaaactttgtgcttggtccctacgtggagttaagttattaaaatgcaaatcgtgatgtttatcctcttgtgtttagcagccatggcttacaagagtaataggtattagcagttagtgtagtgtctgacttaccccaaagaacacctcccagacattccttatgttaacttcctgtaagaaggaaggttttcctgagctcatagacagacccacatttcatttccctgtcaccttttaggatatgctgcctttacagagccacaaaagagcctagctctcgggcagaatggccgatagcctggcctggcctcctgatctctacagtgggtaggggcagtaccatgcagttttgcttcacagtctcattttctcctcactcttgatttctgtagtctattccacatgaagtttgcagaacatttctgaatggaggtgtgggaattcatcagtaatcaataaattaatcagttcaatgcaagcacacccatacaattgaacccacgcaaaggcacgctcaagtgcatatcattcatatggatcctgacctatttacacaggatccaactgcacccagccaaagaaaaggtctctgatgacccgtttagacgggttatttcttagttccgggggccattgaaagcagtaaacaaaggagcggagagccaatatggagagtgggtgtcaacttcagctgctcatattgttgcatttggagagctgacggggtttcgtaggtcacctttagaattatgcctatgacagcagtagctacctgccaagattgcaaggtatctcacggctctcaggatggcgcctgtggcccggtaggcctcagttggaggggtacacatttgctgtacagctggctgcaccgtatggggcagccgtgtgggctgttagggagctggaaaggagacaagcatgaaatttcttctaaccccaactctgtttttctgtactgttggctgcttctcagatccttgacaaaaaaaccaatcaggcaccctttaatccgcctgtgattaccactggtataaaaagagaagcataatgaggaaaaatgcctcgttttgttgccttcaaaagccaacaaattggagttaacttgacaggaagtggcttaataattagattatttatttattcctgacacatatccccctgttactagtctcaggagaccctgtagatgctacgattttcaagctgccattacttcgctgtcttctgcgaacaaacaagctactgtctatcagtcaattaaatgcagtctttaagcagcggctgcgaagtcctcaatggagagagcccagggacattgtggctgatgattcctttctctgtactgtacatcactctctgaacgaaggtccccacagagacagaacaaagtcatgcattaaaatatcacttgttgatttgtttgctaatgaagagccattggactgtttgtgtatttctgtggcaaaaattgttgataaaagggcccacttgcaagtctatctcagttcatctgccctgagtgcttgtttaagagttattaaaatgaaagtcaacaaacagcagaattggggggtgggatctctgtagtaacaagtatcctcactctttccatccaattcagcccacaagggcaggaagcatgggcaaacagtgtccccacagcggcgttcctgtaacacacacacacacacacacacacacacacacacacacacacacacacacacgtgcacacgcaggcacacatacactttcttttctttcgtaggcaaatgccctttctcaatgtttaagagtgctacctttctgttttgttttgttttgttttgtttgtggggggtttttgagacagggtttctctgtgtagccctggctgtcctggaactcactctgtagaccaggctggcctcgaactcagaaatctgcctgcctctgcctctcaagtgctgggattaaaggcgtgtgccaccaccgcccagctgagtgctatctttcaaaaataagatgttagaatctctttcaggagataatctctcagatcccttttcctgtttattgaaaagtatttctgcaacgatttctctaacctgaatatccctagatattcattttagaagggagctaatataggtggccatgtaggtcagaagcaagaccccagccttgtgtcctggacagaactatgtctgtgcctctgtctcttcttgtgttgtctttctccttttctttctcctgtgatattttatgtacatattggtggtactcaagttccctctagactcagtgccagtgtcttaccacattccttatttcttcctgcctcaagtttgccaagtgtgctgccttcttttgatacactcctgagttcttgttaaatgccttgtgcttggaatgaacagctggggttcatctggaagactaaagacctatctgagtttggaaacctagataatattatgacagccttctgatgaaatatttagctgtggctcagctactgaaagagatatctacatttggagtttaaactctggacttcagaaagtgctcctctctgttgcaccagaatttgtaaagagcattcaagtatttaagtctagctttcacaactatcccacaacagactgtaaagcactaattcaggcatcgccagattgctgtatgtcctctctctaccctgttattccaactcatttgttagaaaaagcttaggtactcggaggtgttctataatagaaaatgaatttgaaaccctttcattaattggtgattaatatgtttcaggattagtttaagcagggctctacctcctgcccagtcaagtatgttctggttaatatccaattatctgcaccttcgtcgttattatgtcttaatatttcggatatgataccagaaacttgagagtcatgctaatgaggagcatagagcaagaattaaccaatgacatactcaatgatccttggtgaagagtctccttccttcccccgaacatatcgcttcagcgtcctgtgagccctgactgagaaggcagacttccagctacagcagacgagaattagaaaatcaattgttctcccctttaaataatatgatcttgaatttgcagtgtgttcacctcaaaccattgtttcatttcatttctcagaggataaaataggactcagcgaacctatttgtgtttcccaaacaggaaaccctgcgttctttcacctcgccctttaaacaagctgcacgtagttttgcctccaatggatgtttaattcagactaatttggtgtccctgtaatatttcgctaaggaaacatgtttcccctgccaatcttttattctgtttctccaagacacagtgccatgctgtagactggccacacctccattcagtgggttttttttttttttccatgtccattcacttttgagagatctgacttggttcccaggagctgtggctgctgtggtggcttgtgcctggtatggctgtgtggtgcctgtgtcattgtgtggtgtcactggtgttctgtgtgttacctttcctgtgccataacaaagccacatcagtccttcgcttccagtgaatggtgattgtcacacagggatccctactttgcctgggggtccattctttttgttgttaatgttaccgaccatgttcttaactccctcgatgcacaacttgctgctggccaccaatgcaccatggaggagatcttgaagaacaaaacaaacatcattttttcttctctgaggaacatgccaataccattcgattctaaagccagatagtgcagggcttctctttggttctttatagcacctggctttcttgagtccatttacaatgttccctcagctactcaaaagaatgaggcagtgaggaggagaaggcacacactacatttttccatgttgtatgcaaatgtcattaatctatagtgaatgaatggcagtgcacatcctaatttgagcctccccgaaaaccctttagtaatttacaaaggcatctagatggcaaaactggttcagcaccagggtttcatgaccgataattttacaatactccttaaaacaaagtaattagtaccgcaggctctggctgaacacaattgtgtctttgcttctctgtgtcctctctgtatcgtctttctcctttctctttattttgtattcttttattgccatgtcaggaatgctcagtgttttctctacaacagacctcagaggcttagcatattctctgtgtatttctgccccaagtttgtagtgtgcagtgcccatctctgctacatgtctccatttgtagtaaattctgtaaataaatggttttccttattttctgatcccacccgtgctcgctacaaactaataacaaaccaacttgagttggactcagagatcgtatgtgctcgctgaaagcactgtgaagacaggtttagcctctgaagagttgtgtagcaagtctttggtggctgctggtctctttggtgtcataaacatgggatatgtgaccatgtttctcccagctctgagtgtagctgtttttcctcctctgaggctatgcagcattcaagttaaaaactggactgagcactgacacacgttcaattgaaccatcaagtcttttaaaactgcctggccatgacgccagtctcaggctgtccgaccatacacacttccgattgtgggccaaagagcattgatttttagctgtcatttctagggcacatactgtagaattgaaatttaaaacttaatccattcagtaatgcaattaatttttaatgtgcagtaatactaattgaaatggcttgaatttagtaagtcaccacaagacattttcaaaagcaagtgtctccactcaggacctgaagagtaggtgatcactgtcacagtgtttactgaggggacctccctcgctctgcaggtctccagctgaaaggcactttctttaaattacaggagaatatgtatttctaagaagacagccatggttggggggggggggatttcctacgtaaatgttatttttttcagtgtataatttaggaagaaatatttaaacaggtttgcaaagctaatcttaatgtgctaagaaagtccttggcaatagctgcaaatgaagtcactctccaaccatatcacagtcaacactgagatgtatagacatagtgtctggcaaatttcactgtgtgatgtgttttgtgtttgtgagatcattttacttaaaagttttaattaaaagtgccacaatcaaagtcagcattctggatgggcaatctcattatatattatacttggacttgagatattattttcagatttgatggttgtggtaatctgttgttgctttttggtgtgtttatgttctgccaaattgatgctatatcctactttcttatattccaatgctttaacccttacatactatttcaaaaaggccttttaaatcccctgtgagaggtttttttccttgccacagtacagcaaatttttcacagtaaaaacaaataggttttcagtcatttctatactataaaacgttctctgagcacatttatctgctagtaaatgaggactttttaaaatgcatcagttctgatgaatgggcttgcgcggtgttcagaaggagcacagcattaagttaggaaagcggggaagctctgtacatcatgctcccgcagccctcacgttctagtatttaataacggatagagctgttaaagatttagtgcaggttccctcgtaaccctagcatctattcaaatgcgattttaagacagttttgcagcacataagtaaaaatgatatccgagaactcgaagcaattgtagcgtggcatattttctaaatgaagtgtaggctaacgtggtaccaatgagttcaacagatctacaccacgaaaccttggattcagagttgaaactgactttcatctctctcatggctaaatcgcgggtgctgtggagatccacaaagaacacgaaattggaactgtggtgtgacgaaaggagagagcttacttgtgatcattctaagccttgcaaacatcagctgaactttatagtgaacatctcctctgttttcacttaataaggggaacaaaaggaggaacaatgagagaaaatcaattgataatccatcccgtctggattagccaatcacagtgtggggtgcaccgtgagctctgctaacatctgttttgggtgtgctgtggcaaatactggcatataagaaattgttgtagacaaatacagtgtgctgtagatcatttcaggtaatatctaatagctattatccaaacaataattgctcttttaatctgggatggacattagtctgtaagagtcctctgtgataatatacggtctgtgtgatgctgaagtcacagctggcctggtggtggtggtaggttagaactcacgtacacccttgcagctctgtcctgttgccagccttgaagctgtaaagataaaggtggctaagtttggctccactctataaatagtgtgggttgggttcttctcagagcctatttgtccacctctaatttctgtcctgtttgatttgcagtcagtggccacagaactcattcaaactgcacagatacacaggccatctgtaaaagatagtctcctgctcttgaccagcagaaacgtaagaatcctgatagcagaggggaaatagcactttgttttgccattgtgtgtgtcacatggatgcccaaatgaagtatttcacgagaaagaatggataaaggagacggcttcatgtccacatggagcagaggggaaagatagcaagatgtgctttaggtataggtatgtttgatatgcaatgcttgatgtatgttgacctcaggttacaagagtagaaaatcccattttccagcttgtttcaaatgaagtaaaaatgctgcttcagttggtttatgctactcacattgggaaaggtgcttatactgtgataattatcatcaaggaatattaatgtgttcagcatttgtaacccaaaaactcattatagcttaagctgtgcatcatctgtgaagagagagctttgccagaacccgctcatcacaggggttgcctcctgcttgctgtggagtggtcagagtactgcgagaggtcactcgggctatttttgaaagctgaagttttgcagtttttgaatcgctaccttctgtctaaagggctcattgttttctgtctccaaatggccttcttcgtaatgaatgcataggaaagtgcaagaaagaataagattcaatcaatgagaggtagctgtgcctcatgatgtcaaacatgagagggctgccgtgtgcgttccataccaagataattgaagtgtttgtgtcccctctgctgtcactgagtgagggaagcatttacaatggtttccacagggtgggtgcccttgggtttcagatggaaatgccccattggggctccacttcacagccctctggctggaaagtgtgtgagtaagactgcagggtcagccttcctctctgagcagcagagtccttaattagtctgtgacaatctttcttatgagcctgacctgcctgccggatggcttctcacacattgaagacatctacgtaattcacagatagatgtttttatgcatctgcttaaaatcacttggtggagaccccgacttatgggaaacagaatccctgggccttccccagcaccctggcaattaatctgattaaaagagcaccactagtgaccataggtgcttggtttgctcagaaactgagctcacctgtgttggacagcttgctgcaagggaaccctgttcctgtgatagtttcacatgattaaatcccattattttcccctactgatccatcttctgtcatttcccataagtcaccttgctgcctgctctgtgttatggtttgtataggccaggcagagagcaggaaggctcagctctatcagcctgtctggctttgcagggctgctgtgtttcagaggtcaaactgtgaacctggccttgctcctgggaggactagaaaaatatgtttcataacttcccatagacttaagtgaagaggaggaaggaaatccatgaagcccataggctgcgtttagatgagctgttaggtggaaattcatcaagcaggagagctgactggtgttgaggaggctccctcaccgtgaggggtcactgccttgggtccagagccggtccttgctgagggctttgggggctagggtaatcattcaaatagcccagcaggcacagacacacaagttgataatctccaggcaagttgctgaaatgggaacttacttacctgctacaatcacttacatgaaggaatgctgacatactgagggccaggaattcagcacatccagcgaccgcaggctggttcctgtgaaagcaatttgtttcggtggtgttgttgttgtttgcttttgaaggcaatggaaccttaaatttattctgcagagcactaatgctacgtaatggatggatgtcttggacccagaccaggctctgggtagttgggggctggagccccagcagtgtaatgcagcgatactgtggtggcaccatttctatgaggatggaaacttaataatctttatgaattttgagtaactcataactccacttcctcacccaaagatatattatgaaaagattgcttctaaatccttcagacattctctgcacttatgatacatgccaccctctttaccttgaggcgttagaaatggatgtggcttcatctcttcataagagataaaaatgtatactttggaaggagcaaattgcatttgcctgcttaagttctctctttgcacatgatgtgggggatccaaacgtgaagaattgcttttgacattattctctgcctccgatgtcccaggccattacattcctacgctgaaatgtcctgtcacggcagaaatgtgaggtagaaaacccggaaagacactgcaccctgagcccatgtcctttgctgtaaccctcatttctttaatcattcaaatggtttgtttgtctcagtgatgaagtagtgattgaataacatgcatctctcaaagaagtatgaccaagtgcgggtttgtttggggtcaacaaagagtgttgttcatttctagaggaaatagtgatttttagctctttctaaaattccatttcacatactttttaacttgaaccaaaataaaaattttagtacatatcctgtactgcagacatagtgctgtaatttctaattcaagcttcctttttttaaaagaagaaatgcttggagctttctttacatgttggtgtgtgtgtgtatgtgtgtgtgtgtctgtctgtctgtctgtctgcccatctgcctgcctgcctgcctgcctgtttccagtagcagtctttcccaccacacactcactgctggaccactccctgttttgtgtttaacatgcttccaacagctcagagagcttggactaacgtgaaatgaaaaccatggagcttatattccagtctgaggtttgaaagagagatattggaaaaggatggttttgggctttgctccctttttagatgtaactgctgcttcttcattaggacttggaagagtttcctgtggttaaatttaatcaaatggttcagaataacaaacttgtacactcaaaattccaggagagttttgtatgaaacatgatttttttaatacagagttcatatacacttaaaatatatccacacatgcatctaccacccacccacccacacacacacacacaatctacacatgaccaccactagcaagaacaagaaggttgcagaacgttacgagatactatcacaagctacacctcttctcttttgttgtgtgctgttaagtggtcatgtctagacttctgaatcatacaaaaggctctggggtctttcagttatggcaagaaccaaaacttgagtgcatatgttcttctgggctatggtgtgtggtcactaccattactgttattaagcagctggggaaattgaggaaggcagtagtgtgtttggacttaaggagacagagtcatttctgaagtttaatgccttgtagacttcaaacgatgttctattctctatttgtctagtgatgtttttcctagctgttgagctgggaagactgtgtccctgttgtttcaaagtctaatgtggatgccattccctagacaacaagactaacctttgatttagaaaagaagaggaggaggaggaggagttggaggaggaggaggaggaggagaaggctaaaacagtatgatttttttccataaaaggtgttaagagtttagtgtggttattctattccattttcataaaacctattgcttcaaaaaagctaagttaaagctgggagtggtggcgcacgcctttgatctagcacttgggaggcagaggcaggcagatttctgagttagaggccagcctgctctacaaagtgagttccaggacagccagagctgtacagagaaaccttgtctcaaaaaaaaaaacaaaaaacaacaacaaaaaaaaaaaacccaaataaacaaataaaaaagctaagttacatttctgctttagaaatctttggagacttctttggaaatagcagcaagtaggcaacaaagtgacagaagttacttgttcagtgtaaatagatgtgagcagaagaccgcgctgtgcataaggcctaccgtgcaagtatgcagtaaagggatgtacatggctccgcaaagtagcaagcagttatgttcatatctttttgaaaggtgagttgatggatttaaataacaatagccttgccctgagcaatgtttagaatccagagtcacacaccctgcagtgtatgaaaacacatagccgcccgatgtattctaacagcacactcttttcattgtctgactcttgtcagacacagggagaagcttaggaaacttcagctcttctagaagcctcttcttgtgtgtctccaaacctcaactcgctataggaaaactgcaaagggaatagtccatttatcacgcattcagtgaagcacggacacggtattggggtaactacttgtcagattggcttctgttgtggggttctttttaaatcacgttcatttattagatgccaacatgtgttatttggtagagaaggaatcatgagggaagggtgggctttttgctaatatttttcataaatgttgtatgtgccgctgtgttctgcagaggaaattgaaacgtgctgtaaatttctgtcagaaaacaggagcaaacattttcaggttttctcctgaaatccacaaggacccgtggccaggacaatggaagtgacacctgggtgtagacttgaggtcactggcagctcttccctggtgctggtgacagcttaaaatgatgccgggtccttgtgttctaaacgttcctgtgattagagctgctaaactgcttttaatttttatcacagttgatttcacccaactgaaaattctggccatctagtgaatataaacctaactaaaatctattatataaaaaaaaaaatccaattagctagcagcagctctgcctactaggtgagcacgcagacagcagactctacagttgaggggaaagccttcctcacagtacagaaagtttgctttcctgggggcaagagccctgttggttcctcttgcatgtgctttattttgtcagctccaccttaaaattaaaatttacaaagtacaaaataaacgacaaatctttccagctcaatttctctctggatctggagaccaaggtgtcagcatggtaccttaaactacccgtgaatgaagccagccccaccccctcttcctctgcttcctccaggtgaccttttggtggagtccttgaaacaggcaaaaggcttgatgcctgcaggtcagggaaagaggttctcttctgattttctttaaggttcaagtctcttcatttaaaaaccttcctctgtacctagtcttcataaagcagtgtaagtttaaagtgtacaataaaatacgatcactaataaaactagcagtaaaataaataaataaatcgctgcgagtgacatgcaatctagcaggcaagaggttaaaagtgttcactgtgtgtaaaaattttacatagtgaggtcctcagatgcagaacagatggagacagaaggagaaagggggctggtaaatgctcaggtcacagtgagtataaggagcagtcaccaggttgtaagcccgagccagccagcaagcatgtgcttacaagcatgtgtgtacatgcacacatgtgccggggccatgttgagtgtctagaatgttctgagaccaacttcatctttgtcatttattcggcgaggaagccggtgccgggcaggcgtgcgcggtaatctgttgcactatgctgccatccctctgagcccctgtaggcttcgctgccagttgtttgcctgcctctcctagtggaattcatttaaattaaagcagtggaatgaggcccaagtccccaaatgctcagtccctctccttcatcagcattccagcgaagagagtaattaaagcaaaaattaattctggtgtaagcagaggaggcacaaaataactgatattagaggctagatgatgaatgcctggcatcaagggaggtctcctgggaggataaaagatttcacagagtttttgcatatcacagttttctcattatgagacccgacgaagattgctcagtgcatacatgatatgttaaaagagtagggtgaaaagcagacacttgttcaccagatacatcttaattagagcgctctttagcagacgggcttgcaaactctggtgataaatagactttcgaaggggagatgtaaatttagagcgttggggttctgggagacttcctgttgtttgtgttgcattatggggtttattgtggctctaattgctgccagtttattacagatgacactaggacattgacataaatggagccataaaaagactcacacggctattgaaaatatgcctggatataatggaaagctgcatactcattttgcctctcctaactgctccttacaaataaagtcatagctgtatgcagtacttcatcattttaaaactgagccgggctgtggtctctagctgtattgtataaggcatgggcctcgttatttacaggagtagtatcataaatgtggaagtcagagggcttgatttataagcagttcataattttgtaaaggtagcattttccccatctttgaagtactaagaaactttacattcattatttttaaagggtagtcactcagtgccctacggtagcaaagccactttccaggaaggtacaagatatccatttgattgcatgacaggcagcccaatggggagggaaggacatcggttctccactcaaatcaaaggctccgtagcctatgaaaagtggacagagccaagtaacccaactaaggttttgatgactaaggtttctgttctgaaaataactcactcattaatatcaacaagctgaaagagtgggttaatacttaaatcctccagtgtgtgtatgttgagtttgccatggtttaggcatacaagctggactacagttcatttgcaagcaactgtttcactttaaagtaccccagtattatagcagtaatttgtagaaaacttgcatccatccattctctctgtgtacatagaataatagcacagcttaacataccctggcacattttcttgtctctgggaacccccaatttcttctgaatatcctaggatttccttgacccccatgacagcaggggaagttgtccagaggaagaaggtccactcctcttgcctcatggcagatctgccttgtctgtcttcagatgtctatgttacaacagttgtgtaccccaagtcctatgtcctgcttccggattccccagctcaccgtggaatttggtctagaatgcctgttcacatgtttgtacttactggctactctagttcaggaccataactgagaatgctgtatcatctagtttctttgcctttaccgctggacctcggtcatgttaatgtggtaagtattttaggaaaaatgagaagacttgtaagtacttaacattttattgaaatttaattgaatagttaaggggtgattaaaaatctgaaattaacactctttagaaattaatgacagtcattaagatgtaatggggctgctcaccaacagtgctcagaaaggttgggggatttaaatttgcatgggggtcagagcagtgaaagatgttgtttatagtctcttgagcctcgactgcaatttcagggttggaacaaaagtgactctcttgttgtgttgccaggattactgtatctacagtaatggcagcttgcattgggtgagtctctgtgtcccggaagggtaggcacatgaccataggcagtgccctgggccagctgagctgtgcagtcagcatgcttttccgagggcctccaaaggctacccgaaaagctacccagaggctggctccttccacctgtcctctcagagtaaacggcagtgcattattcatgcgagcttgaatcctgggtctccttatgagcagactaacgttcatgtagaatggactgatatggtgggtaatggttgttttatgtgaatttctactctctggctatgatagtggcttcgccatcaccacctgaccagggtggagagatctaaaaagctcatatgttccctctgtggtactttctggtccctctttgtcatggagaagtgttcatccttaaaatgccctctgatgtttgcttataaaatatctgcagggctggctcacttacttcctgaagttttgggcagataaaaatatatgtcagcattcatattttgaattgatggataatcatggtgttctgcagaaggagggatctagttgtgataacttccaaagcagaggaacagaactctccttttcaaaaatgttagctctagagttagtctagctagttaattttcattgttatggaaaaatacttttgcttgttaaaatgcaagtagtgagtcttctgcgcatcgtgaggatgatggtgttttaagaagatcattggtttggtatcactgaaataaggacttaaggactggaagaattatgtttttgaggcagactttaaataatcatgtgacccgacagaacatctccagtgttggagtgactgtctataaaaccataagcctctgtctcctcctcccctttacacttttattttgctttatcccttgccgttattactttctcctgtaacctctccagcccgtgttctctctgcatctgcagtcagttgtcattccctcactaatactagggaacgcagtttacctccaaccctgtacaccgatgcattttataaagatgccctcatcccacccacacaggagctgtctgtgtcactgtcacttccagcccacaatggaaagcccctggaggtcaagtggcgtagtgtcaaacctttccccacagtccaggcctccacagagagcagctttggccatggttggctacaaaggacctgagctggaattgagaaggagaccagctctgcgtggctatgtgaagaggagaaatggtccaggtcagaggggttacacacagctcaagtaacaggatactcagggcatgactgaggcgggccttctcgggcaaatcaagcagcgcccattccctgattcaccagtgtttttatcacccatgggagtgagcacggccagctggccctgggcctgaaatggaaacagttgtaggagtgtgtacatttccatagaagtggactaaggctccaatagcacccgtctaaaatttaactgtatctgttagtcttattgacatccagtaagttatattgctaaattatcaaatctggtaaatttgggagacctggaatatttcctgagatttgtacaggtacatgtcatcgtctcgcttgagtaaaatgatgtgactaaaaatcacacagcttctgttccctgaacattttcatttgccctttaacaggaatctgctttatcgtgtgtgtggagggcaggggggtcttacatgggtgtgtatggcaagtgtcattcttgagtgtgctttacagctcatggtcagagcttggctcagatgactatgtaacctagagagataacatcctgggcttgcaaaggcagccttgggagtcagcagggtgtattcctgtgggtgtcaaatggaagctggggaacttcacttctgcttcatttggggacttttgttcaacacacctgtcccctctattttttcttatctgttctctactgaattcagtaatgtctctcaccacagtcctagctgcttaggtattgaaaagcaattgaaggatgtaatttacagactgataaatcagctccatttagctctggagaaagaaaagcagagtgggacttagcgaaagggagcaatatccctaaaaggaagtcagtatgatgccagtaagctttgtgaagtagaacctattttgaaagcacaggggtcatggctggaatggaggagagaagcagagtagcatattagcaatgtgggagagggctctttaaacaccatagatggattataggacagtgttcagcagacaggagacagagactgggagagctggctatgtggaaggtggggaagctaatcctagcagtcatgagaaatgaattgcattataatttctagccttaatggacgtgtggtttttttcccctcaaactttaaatgtcctaatacatttgtattttcactttctgaatttgaatctatatatcaagaaacaatttatattattcctaattagacaaaaaaaaaaaaataaccacacaaagtctttcatgtctttctaatctcaccctgttccaccaaaacagatctgtgggggtcctatcaaatggatgtgtcaacttctatgctataatgcttggggagaatagaagctgtaatgctcttgtcacacagaggaaagtaggatgtttattgtgtgtggaaagtttcgatgcagcagcgtgacagtaaacttatcagaatccaccctgccagaagtccgacattgctgtttattcatgttagcataaggtttaattattagcatcattgatttaactctgaattctatatcagtaaagagccttatgttagccccttttttgtgacactgcagtacagattaaaatttcatctgccaagattatatggtgtattctgatttcaggagacagaactaccgtgttctcacgaatagagcagccagcacgaataacctctgactaatcatatacctttcttatggcaaaagctggagtcgaatggattaagttttggtgaaaaaattatgaacctgccaccacaaatctaatccatgccgtggctttgtaaacagatattgaaaagcattgtttcctttgctctgactctaatcatagcacatatttgaaatttcataactttcttttgttccatcagcacacatattctaaagtgtataacattaataaatagaggcataatgaatgtgactaattgattttggcagtcaaagactggcatactttttgtacaatagggaatccattcaaggaagctgaactgccattaagagcaaagctgtggagcggtaatggtttctaatttggattctgtgtgaggtgagcagagcgcagttattcatagtaactcgccacttagggtttttgcttcattagtgacctttcccttaccatagctcattcccctaagtacagatttggtgttctggagcacggtgtgcactgacaagcgcaattctggggtttttgtttgtgtttaggagtgcggggggattgaacccatagccttgctcatgctaaacaagtcctttaccactgagctacatccacaaccctctttattccctttattgagagacaggtcccacaaagttccctgaataccaagcttctaatggatctgtcaactctagagatgacaatataaatgtccccactcctcactcttgtctcatgctagccacacttctgggccgttggcatatttagtcatgggttctgcttgcccggtgaacaaaaccgccagtagtaactggcttcctagatggaggcaaaacaagcttattaacttgtaagcacaaatacccaactacagcatctagtaggagttagtgaaaaattaattccttgaaactccaagggaaaaataggcctggattgtatgatcagccttacctttaaaaatgtgactggctttcaaaagtaattttacctcctttataaagtctctgtgcactaagctatattacacggctgcagtttaatagtggacagaagatcatattgggtgtcactgaggcattaatcaatggagtgtcattacacatcattaacaactctgtgttaagccctgtcatccgaaaccagagatagtgtgcaccaagacacccgtcgtttagtgcaggcagaactgatttagaaggcagagaatggctgttgtaaagaatttgcaagaactaaaatttatattaaaaataactttttttttttgctttgcagtctggcttcccaaaggacagagctgatgtgctcggcggcaattaggggagttccaatgggaggtcgagtcatttccaagcacagtgcaattgatttttcaccaatcagaatagggaatgagatgttctaagtctattattaaattatttatgaagtcatattaaatctggtcactactcctggcatttcaggttagtgaagatttctcaatcacagggatggcaggctggtgaaaggtgcatttcttaccacccttggttgctgtgatttaaatgagatgagcgggatgggagaagaatgggagctactgtagcgtcggcatcttaactaggtggtgctcaccgccctgactataaatttgaggtagcatctcacgagtggaggagtggtcactgctagagattacaccctagactggtgatttgggtaccattagtacgtatggacatatcagtttctgtcaagaaatgtcccactaaggtgcaagaggaatgcatgagtgcaattctgtaggaaatgctcagtaagggaagactggggaggcattataagggctttcttggtccgttaagttaatcttctcttctagcagataaaactactactctggttactctaagcatctcatgtcttcccttactttgcctctcaactcatagtgtgtcttagaagccacattaggagagctggccttcaagaaccatgcaaactgtagacccgagttcatttatagtttaagaaatactaaattctctatccagggtctctgacttttaggtttcttgtatctataatttttaattaattttatctttacagaagagaacatttcaactaaaaacctgactgctttgcacagaaaacccatgttttggttcatggcatgaagttctgtgtctataaatcaggctaccgctgtagcctcttgatgtattactagccgtccacactctgcgcagtgctctcacatctctctgcttcatctgtcagatgggcttgggcatagcagttctgtatactctcatgccactcttgtgaaaatgaattgagaagacatgttatagttatgcaaagcaatagttaaacgttagctctctccacttaaaatgagtatgcttttatttttccttcttcgattaccattggctccctagaaaccaatgaagccgaagttgacttctttgttatagaaatagttggatggtaaaaagagaaagctaaaccacctgaaaaggaaaacaaagtttatagtcagtcttcataactattgtgtagttctaggagaagtcagaatagtcactatggaaactagtccctgcagtatgccctcttctctctcacacacactgataatgtctacatgtgggcctgtggcacatagatcctggtgcatgtgtgcgcatgcacgcatgtatgtatgcacgtgtgtacacacacgggggggggggagggagcagtcaacacccttcctatgagctttaaccactgcgagtagacttaactgattcctggcttgctcatacttggcattggtcagtgggcagtgacttgcgtgaggggtggttgtgtatgtgaggagggcactatgcatgcctggaggatctctcagataagtgggttagtacctctgacagggttcagaagtgaagcaaccatgttccttttgtgtttcgctcctgtggtttactgacattggcaggtttcaaagatctcctttttagagatgattttatagatacttgcctgtcctctccccttcctctccaaattttaaaatcagggtttcactgttgtctattgtggactgcttttttttgttgttgttgggaagtctgtgcctctcctggtatgtgtttgggaccgggtgcacactacaccttttcaggtccacagggataagagcagatggaagaatttgattatctagcagtagaggaccaactgttcagttggatacagaaccgggagaaaagggttgaagagatctaaaatggctgtcgtatgtggagccaacagtttccgaagggaaccaggcaggcactgaggtgtagtaatgcagaatctcttccaagtaccagctggggctttcaggagccgctatccccacagcagacactcagcaggctccgagcagcttgactttaccatatgtggaactttttattctccacctcgctccccagagggacgggccacagggacaccagaggcaggtgaattgctcttaatgcagagcactaaatcactgggttaacatgagaagcctggagagaggaaatggatctgcagaagactgactcggagtctcttaaccttggagctattctgagcaccaaaaaagatgccgcataatgtttcattagacgctctcaccttgtgcgtaccctcctttatgcgggtgacctttccctccttgtacatatttcctaaatgcttttaaaagccattcaatacttcagaatgctaactgtacattttgtattcacacagaatcatacctttaaagtaacaggggacctgaacaacactgcagtctgtgatttgtgggagttccttgctttctctctgttcagacaccccagtttgacagatggggcacaaagccacagaacaatccataactccagtttgtatcataaatttttagtccctgctcctccaccaaatgcctgcttcctggtagctaggattgtcatgtaatggtgctggcatgaattagtattgtgtaagacatttcttcatagtggacatagaaatacatttaaaaaaataaataaaaagacacagggtcttttatttaaaagagatttaaaaatagaaccatctgtcagggcccagttacaacaaaatgggaaaatcaactcaatggaatctttcaaaaatgttagtaagttctgttttgtttgtgccttctgcctaattgtatttattttgttcctaaaatgcccctgccctggtggatggtgctgcctttcaaatcagtatatttacatgccctcaaagacccaatctctgattgcagagtatttttaagtgaaaatgtatttagggttttttttttgttttgttctgttctgttctgtttaattctgtgaccttctagctgactaggaagcaaacacatcacaggagaacatgagggaaatcgtagagaatgagggcacaaatctctggaaagcagaactgtgtttattagcagccttccaggtggactgtcctgaagtcacattggttgtcatttgatgatcctttgcttcctttggagaaactgaggaccaatttcggtgaaggaggtggccttgtgctgatggagaacaggtgacttgatttctctcacacactaggagcttgcaccaggctcagcttaagttaccagaaaaggggtcatgagggatgcagagcagaccagcttcttatagttaacaaaatagggaaaatgcaatcattagtcgaacaagcccgcctctgttaacccttatgaaacacccatcctattagtcaactaatatcttcaaacaaatactaatatataggttaaatcaataggcctgtattataaagtagaaggtacggttgatttcataaattcatgccgtattcacttgattgttgtagtgctcgtgcttaaaagcagggcctcctgcatgtcaggcacaggcgtggtcactgagtcccagctgcagcttcagtgataatctttgaatatatggggctgtctttgcaacaagaacctaattccactgatcacctggttacattttcctgtcgtagtagctaaaggagatgtggagcatttcaaagctgttatcgagagatcgcaggcagaggaatctttgtgtctatgtggggaaaagattttaactgtattttgtattaaacctataccagaaacaaaaagaagaaaacagatgcacatcacagcagagtgctcttctgagactttggtgggtgatacattcatgtggcactacctctctctttacaaaaataacgattttcagtgtttttatgcatggccatggtgatatagtctaagacactgctgatgttaaatttgtatcaaaaatcttatttggaaaaatccaattaacttcaacatatacattgaacagattctagaaaattttaggtttattctgctgctatggaattttgaacatcatgataacaattcatattttttatgcttcccatatgagctgtagtctgtgggtagaggatgaggtacatagcaacaggtttgatttgtggggaaatctctaccctctgtctttttaattatttttaatttttcattttaagaaaaaaagggggggcagaaaaacttgaatgcactaatgagatatagcagctgagtttgagataggaaagttcgcttttgaaaatgatttatttatcggtaaatctgttagagtgaaacttaacctgaatggcactttgtgttgcttgtagactaacctccccagaacacgtttaggggctgaagcagaagaaaagtcggcagcctcgagaatgttgtctgtcggctctcactggtgatttaagccagttgaacacagagtggttctttttggtgtcatttggcagaaaagggtggactggcatcgcgtgataaggaagagccgtttctcctgcacatgtgctagagtctctgtaactcataaattcaaattacttttaaaagctgcccatgatacatttgctcattaaccagatggaaaatggcactcaggaattttctacagtgttttcaaagaaagaatccaattgcaggcagacattccttagtacagtgtttatgcagctgtacttgtgattaaattacaccaacccaggcccacatgtagccacagaacttattgcttagagtacaaagcaccttgtaagagcatgagaactctcattgtgatgtgttctggcctcttggccaccgtatcaagctagcatcaaaagccatgcctgtgctccgaggtctctggagaaggagccccgggacagaagagagctcctctcactgtaggaggaactttgacagtctaccgggggatgctgggattgctgctgtcagcagttccaacagcgcaaacagtgtgaagaagcttccacagggattgaattactgaagacttctgctccgtgtttttggtataattgagagcacagagggagcctgattcctctgtcttatgatttgaaggtgaagacaagagcctgcagggctctgtcagagttatgggcatgctcaacccagacttcaaaaaaaaatctaattcccataaaaccgtacaaggctgaattgcttacctgcatataaaagatttactttcactgaatcatttaacacacaaccatattaattgcattttgaaaaggaaaagcagcccagaatacagcacagtgaaaaacaccatctcgggtgtgttaaagagctctgcgctctgaatgcctgcttgaaagtgaaagtggcagataccaacacgctgacacccgtgaccacacacgaacacacaagtcagagcttctcaaggaacaggccatgggtgttcactgctacttctgttggaaaggaattgatgcccctgttgtagaagtgttgtagctatgcctcactggtggctgtaactattattctggctgtgcaagaaaaacagtaagtaagtgcagagagagagagagagagagagagagagagagagagagagagagagcgagagagagagagagagcgccagccatctggctctcctctgtctggtttagcttgaatagtgagacggcgggggcagtagtgtgatctaccaatggccctacctttgtcgtcctgtttcatgcatagtctgacccaaatgcgtcccttgcacaggagggaagccagcagtgacaatgtagtcttacggtgaaggtacagatagcttgactgctctcccaaatgcaagggcgcgtcagcaccacacctgcaggtagtctgaattaaaccgacgccaacatgcaagactctggatttacctagtttctctcctggaaaaaaatgtggccaaagggctggataaaaatgagactgtattggaatggtagcttggtttctggatgtgctctggactcagagaaggagggttaggtgctccccgtgtgtatctacctctgcctctcaccctcctccctcagggttgactgtgctcgcctcttttgacttctggaacatctttaggcatccactcacctgaaacccaattaacccactatggggacagccctggaaggcacaaaagctcacatgtatttacacagtgacccagcctactttgatttaaccattcctacttgaagcttttgtggaaaagaagggagtaccaccctagaacaaataccaattgtcagctttgctttcacatcgccagccagcagatcttttccaactgggagtaatatcctgttagctgtgtgtaattctcctttcacctgggggattgagagtaccaaatgatttcagctgctcaggcattacatttcggtctgtcctctccttctgcccctgtctttctcccatattccttctgggaccttcttgtcgtttatagaacaggcaagtttctcagaaaaccttaaccagcaggcttcgttcggaaagaagccttctgagatgcccagagacggagagccacacaccttccaccctccttacaccagcactacccatccttcactcagacaatttctttttctactctcaaaaaagaaaaatgcttttgaagaggaacatagacatttgtgtgactttgggctagaggcagtacctttggccacgaactgggcactgtgtatgtgatgttaccacgggcgttctgttcgattgcattgtgtcttaacaacaaagccccccgtgaaactcaataaaattaccaatttcacagttgattttcttcctgctctgctctgcagccctcacactcctggcctgtctccacacactgcaggggatggtgtcggaccaaaccaatcacacggtgctaaaaaggaggcttgttaccaacgaggctgttcttaattctcattgtcatgtccagcaacttttacaaccttttaagcaccttttgtcactagagacatacctgcatcgattagaaacggaaggggagtgttgaactgggtggctgctcagatcccactgctgggctcccgagaagccatggttggattgcacacaatgtatgtgggcccattgtatttctcatgctaccctgtcctgtctctctgatattattgactatgctaactttgataattcaacattcaatcaaagccatagggcctacactttataagccttggatcactgattagaaactgagtattccaggtctacttgagtcactaactagccatatgctcctgaattgaagtcccctcttgtcctttgtcccactagcgagagtagttcaatataagtgggacacttaaggaaaatgtattactcaacatgtttttctgctctttacactaatagtcaacatattatatgtctcaagtgatcaagtcttagcctgataagcctcttattattagctacaaacaataaatatggttgatgctgtctaaaaacacaacctaaagtattgtaactaaattatagccttgctctaagttagaatactatggtcacagagataactaactttgaactattttcattatgacttgatatttttctattaaccacatctaaaccatgaaaccacatttaagttagatatggatttgttattgatttctttggcagttctcttcattgcattcttttaggaaataatagactattctaacagccaagccctgttggagttgtgtacaatctagtttatttttacagggcattttaaaatgtattaatacacagagtaggctgttgaatgggcagttgagtggtagagtgaccataagactggatggaaaaatgggtgggtggatggatggatggatggatggtgggtgggtagatgatgggtaggagagtgatgggtgggtgggtagatgatgggtaggagagtgatgggtgggtgggtgaatgtttgggtaggtggggtgaatggattaatgaactagtgcacttcaatgttgaaatatgcactggtttcatctgttacagaactacatctagtgttgtaaagattgcaaagactgcctttacgtttcaagttgtgtatcacttttatatccttcagctattgtcttgagtttgcttttatttttggcttaagtgaagcttgtctttaccattgtaactcttcacaccaagtatttggggaagattgctttcgggtgtgatggccaagacctttcctctccattcagtttaacttcatcatggctgttttgtgaacgcaagtgcatagtagttctccttttgcgtcctctcggaggaaggaagaatgactcttctgagcttccagatgacccgagcataggcttcctttgggaaaatgtgactcacacaggagacttaactttccttacattttctgccttgcaacacccacctcagctccccggaggactgggaagtttgaaaatcctacagaagacaattcccatgtgtccaggagctactgctgatcatgttgtgacccgccatccttgttaacgaagtggttggggaatttcagaagccagcctccttgtctgtcctttagggctagaaaccagaatatcagtaacagaagaattacgctgcctactggtctggaaatataaaacaaatcgggttttgtaaagtgtagacttctctctgacacccagcccttccctgcgcagactccgtttcccagcctgcagttgcaagcacatgcatactgctcttactgccgtcagggcgtgcacagctctcttctcctttcagtcaggagattccaaggttttctaagcccactcttcatgattgcaagcaaaataagtacagcatttatcttcttcagcattactgacacgtgggcagatttgaggaagtacagcatttcattgataatcaaccctcacccaccatattagccatttcaccacacaccatgaaccttgagactaactgccaaaacccattcccctctctcatgtccataatagtggcatttgcgttttctggtccccagcaccagctgtcacacttgatttccatgagattttgtgtacatccttcccaaataactttaattgcttgaaaatgtatatactctattccactctgtgtgtgtgtgtgagtgtgtgtgtgtgctcacgtgtgtgtgtgtgtgtgtgtgtgtgtgtgtgtgcgtgcatgcgtgcgcatgtgtatgttttaaggaaattattatccagcccaaggcaggtggactgaggaagaaggacacaaaggcagtgtgacatgctatggtgcctggggtttgggatgctcctgtcacaagctttcataatgagaatagttcatagaaccatgagttatcatgactgtgacctgcctcgggaggtcccatgccacatctgtattaacaactgcatctgcttcagggtaaccttattagcttgccacagctgagccaggggcctccggagatattagaccaagtccccagagaagtctaaggcttctgctctccctagatttagtgtggtgtccaaaatttaacatcaggacctgctgaattttattttgaattatctgctatagcaactctagcagaaaacaacacacaccacaatacccctaaaacttggcaagctccccaaatgccagctccagttcccattatggcatatggcttgtgtgtttcacataaaaagcaatggaaatatcaaaggaaaaattctcaccttgatttctgtttgtcttctcactctgggaatgtacaaagtgctgcaaagaacacaaaacccagagaacacagaagtgtgaacttctctgtgcaaattttacttccacattccacagcagaagaagtgaagaaaattcaagtcaatggagtgatgtggtaagaaaatgtgtgtgnnnnnnnnnnnnnnnnnnnnnnnnnnnnnnnnnnnnnnnnnnnnnnnnnnnnnnnnnnnnnnnnnnnnnnnnnnnnnnnnnnnnnnnnnnnnnnnnnnnnnnnnnnnnnnnnnnnnnnnnnnnnnnnnnnnnnnnnnnnnnnnnnnnnnnnnnnnnnnnnnnnnnnnnnnnnnnnnnnnnnnnnnnnnnnnnnnnnnnnnnnnnnnnnnnnnnnnnnnnaacccttaagtgagtttgctgtggcaactaaattcctaaaaagctctttcattccttagttcaaatgaatctgtcagaattaaattcagtcatatgtatctcactcatccatccatccatccatccacccatccatccattcattatctcttaaacagtaagagtaacagaacagcaaagtcacctgagaatcggcatgctaaaggggacctcccaggtacacaggtgactactcacaaggggcattctctgatggacaaaattttacccaattttattttcttgagttttatatccgatgctttcaaaggtctgaaatgagccattggcggttaaatcaaatgatacttagaagaattccagctttaactaatagaatgctcctgacagtgagtgtactggggcctcccgcattttctctctattcatctcagaccctccctgaggtttagtccctccttggtagactgaggagctaacaactcagatgtgtccttggcaccacacatttgccatgtaccatctcatcttccagcatctgagctgtttagtgctacactgggcacaccaagaccaagaggcgccaaatagcacataagctatgtgttgacatacctaatcccgggcctttctcagcaagttaaatttagttaactctcatagaaaagccttatatcttaggcattcaagtgagccatgattaaagacctgctattctttaaacattttgcatcttctttccttgcacaatgctgaggatggaacttagggcctcatgcatgctagaaaactgctctatggataacctagagccccactctagggctcttattttttctagccacattaaaattgccagcttcttttccctcctaattagtttacatgcaaaccaactcatctggattttgcattgggagtcactgcacctaagcagaactctttgccatcttatccccagatgtgattgtaactcgggcatccatttttatgaaccacaaaagttcattgtagtccagagtggcactttggttgttcggtgttaggcatttgcagtaagcaatgcttttgtttcccatattccctggcctgggttctcggctccgcagtggcgctccctggttcctgggtcctaaggctgtctgccttttggacaacacagtaaataaaatcactgggaatgaattcaagagaaaactgtcacagaaaaaagtgttcagctcattttgtaaaatgagcattcaccaggccaagtgaatgaagagtgccggccagtggtcagcatccaggctcccttcagctgctctctccagtgtcagcgtgcagtgtgagcgaggaaacctcagcctgttgccaggccaccaccatgcactttcagacttaagctcagtgcccagtggcgtggtgcacgcctcatcccacaactctgctcacccaagtctgctgttcctgcctttcgtttttctctgggcatcactggttcttcactcttttatcattttgtcttctcccttttcctttccttttgttttcagccccctgaacagtttcctggagttttaatgtttctgtggtttcatgcctgactgctggcctttacccctgcacacagcttccttaatcagagactaaatatatgtaaagcttagttctgattctcaacaatctgtagttttgtgatcaattgggaaaatgtttaaaaggcagaaagaatgtaatgccttgttgattggggcttgatggcctgttccatttggtgtagagctacccttgagctaccttgaggtcctggggagtataagaaagcaaactgaggaaaccaggaggaactagtcaatgaatagggttttcccatggctgctcttagggtcctgcctccgggttcctgccttgagtttctgccctaaattccctgcatggttcattggctactgtaaaatgaagtcaacctgtaccactcaacatctccttcatcatggggtttatcacagtcgtagaagcaaagcaacagtcactgctacagtatcattctcttgttcttctaaataactcaaatactttcctgggtgacactgcagccatcacagattgtctctttgtgataagtttttaatagtaaaaagatgtaagaatgttctcagtgttcttcccatgagctttaaaatctatggcttaaaaacatctcatactgatgcccatgccttttccctgtgagcgtaaccatttctggatacctttggccacactgaaaagtgactattgtttgaattgatatgttttattccaaaaaacttttgtgtggattatagcaaccatttctcattcccgtttccagttttaatatgagtgagatgtacttgttctgtttttttctttttatttgttaattttgaaaagagcttatttctaccttattaccattaaaaattagtgtttgtcattttggtttttaggaaagatttttaaaatttttattttaggtgtgtgtttgtctggtgcctacagtggaggggaaagggtgttgaatcctctggaattgggttgcaggtgggtgtgagctcatatgtagggacaagaatcgcactgcacagagcagagctgaggagcagcagccagtgctcgtgagcactgagccacctctccagcctgcccatgggtacttagtaaagaagtattcacatgctaaaggtagggagccttctgtcttcccttacatctcctttttccaagatttgatttcgtttttgtggttggttggttggctgattttttgagtctggttcactacagaaccctgactgtcctgaaactcactatgtagaccaggctggtttctaactcttagagatccaccagcttctgtttcctgtgtgctgggattaaaggcatgtgccatgatgccaggcctatggtttgatttcttaatgatgtttaggatacattttttaaaacttcctagcaatttaaaagtgcatcatgtccactttattttgttaattttaattttttattttaattaatacatgaaaacacaagaactattcatgtcagtaaggttccacatggctttttgagacatataaacattgtataatgctcaaattgagtcaatatatctttttcatgagaacttttctttgattcatggtgagacattagaacttgttctttctagcttttgaaaatatgtgttctccttaagcactatagtgtgaaattgcacactagacgttcttcctcttgtctgacttagcatccaccaactttcccttccctcctcactctatgaaggttctaggtactatcattcttgcctaaaattctatgaaagaaacagactgtacatacaagtgagctgcttcaggattgtctttctgtgattgctttgtatcacacgggataaggatgcacagctccatccacgttgctgcagaggtcagaatctctctattgatggctgaatagcactccattttatccatgtcctcttctctttttcccgttcctcagctaggcatccattggctatcatgatatgctgcagtatcagtggggatgtcacctccacatgttgatcttttctttttaaatatgtacacattagtgtgatgactggattaaataggcctgattttaattttctgaagagcctccacactgaggggattcatggtgtctggctttcactttcacactaaaagtggaccagggttctccttttcttaaatactcactaattatttcctatactttttttgtgtgtgataatagccacccttactagggtgaatagagctcctactacagttttgatttgcaattcccttatgatttttttatttttatctatttactgaccaatggtaggtcatctgcttttctaaaggtcatttctcattttattttgccatgaatactttgtggtttgggttggtggttaggttggttggttggttggttggtgaatgggttgattggtgagtgggttgattggttgctgagtgggttggttagttggttggttggttggttggttgaattttggcctctttaagaaagagtctttctatgtatcttaggttgatttcaaactcaaaatccttttactctgaccctctgggtacaaggatgacaggcatgcaccagcactctaagccttctgagacttttaccttcttatttactctcccatcacttccctcaggggtatagtttgccagtacttccgtccatgcacaaggctctctccttgatgactgtggcttttagccagtgcagtcagtggatgatgtagggactgccgcctggactgaggctacagactgcatgtcagatttaaaatacctgagtagattgagctgggtacagtgtttctgccttcctcatcagacttttgacatcatgcatgtacatgtgctttgaagagcgcagttcacatggacaaaggtgtcttctcaactaaaaagtatccgtagagatgtgtgcaatcaaacccccagaaccagccacagacatggcctcaaagggtgctgtggaagacctattgagatatttgctccaggtaagaggaggagcccagggactcctactttatcttcctagatgatcggtaaattcccttgcagcttagccttcattgagcccatccacacatgccccctctatccttttttggtaaggatcacagcactgagcccatccacacaagccccctctatccttttttggttaggatcacaactcctgaaaactcatctgactttggttatttgtaagagacacatgtgaattcttcataagtgatttgtcttaaatttcaggatattaatgaactaatagcatttcttttcttccactcctatacttgggatgatactcggccctgacttgttagaaagcttggttgattgaagttcactttgactatcccttccctctctccttcccctcatgattccttagcgcttgtgagcatttcttgtcactgggtccccaaatgcacctatttccgcacttctccaggggaaagcctttcatctagattcaatgtcacttgatcgacttgagtaaaccttagtaattaattcataaagttacagcaagagcccattcatagctggtagaaagagtagcagattcaggtcacagactgttcccaatttaataatttccttaatagttgtataaataaaagctttattggaaaaggtcacgttagagtttggattctatttgtaaatagttggaactaaaatgaaaacagctcttgctatgcatagcaccttcactttggcaatggcactctcggggtgcattcaaattgagaagatgagtagtagacacagaaataaacatgtcgtgggtctgggatcgtgtcacttgtgtgccttatctctgctttccatgtctctggtttactaggatcattgatactacattttggaagataccccagattatataatggagttaaaataattttgtttcttttgttgtgttcttggtattatgaatggcaagattttgtctcttccttaagaactatgccaaggtatcctgggatgagaagcggggagaagaggacaggcttgtaggacaaagggagggaaagtttaccttataaaggcctttgaagtgttacatgatccatctgcctgtttgaggctgaggcttaatccctttttaaaatgcatcaaatgtttgagtgcaaggttcggccctaacagcatctccaattctctgcagagacatccacggtgcaatttcccagacactgtgttcacacgagaagggtttgatccaaagacccagccagactggaaccatgtggagctgaagtagataggtggttttcagcaaagtcctgtgaagtcccagcagccagacctcataaaatcagagtaggaagagacttttaattccaaactgaaactgaagtcatgtgatcaagcttcttgttaccctccttaccagagaagaacaggaaaagggcaggtgagcctgcttcctcaggacttctaaatcctgtttgtgatggaattttaaaggcaaactaggaaatcaacttttcatttaaacacagattttcataagaaaatcacagtaatagggtgtcatttccatgaccaagaacatttcttaaattattaagtgtagacaacattcattcatcttaaggtcgtagctctcccgcagcattaagttatactgagtaccaccacttgaccaaatcacatgacaaacatttactgcaccatttaagagacccaaagaaacataaaccttaaatgttgctgttttgctgttcgtagctgatcaagatatcagacttagcaaatatttgggtcctatcccaatgttgctctccccaagacgcttaggcacaaagaggtagtctacaatgccttgacagtatctccaggcctgcattgttctctttgactcctgcatcatgacagctgcaattaaatgctgcgtctaagaacaggcaaaggagtttgaattcactctttacaaagttagctctggagccaacggcagacctttgtgtagaacatcaacattagccagaagttttctcttaaaaagcattttctgtttttgctttatggcataatatcagaattttccagcatctaattagtaacagtttttaaactttttttaagttaaattcccactagccatagaaaaacatccacttatgattgactagacacttagtgaagaacaccaggtttggggaatagctcaagcatagacatctaaaaagccactttactgaagaaaataaatgcctaaatgtaggtacttcgattttcatgtgattggccttcttgcaatgtatggaggatgccatggtatgggttcatacaaatcagactttcaaatcattgctccctaatactctacatagattgtgcaatcgatgtatattgcaatatatatatatattgagtattattctctcccaagaccagaagaaaggcctggactctgcccaagtcttttgtttgtaaaagccattcactgtttgtgcactatgaaaccccatgttaaatttactctaactttgagtgacaaccctgcctaattcatggggccatttctagtctttaagcctggagccttcggatttaacatctgggtataatgaaagcaagtcctgcttttctgactggtttgctctcctgaacatcgaactccagtacaacatgtgtacagtgcctgccttcactaacccaccctgtagctcagcaaaccttagggggtacgacatggatggaaagccttgggaggtataaccaaagtctactccagcttagcagatgaacatctgaacacttgtcatcctcttttaatgaatctttctttgaagcattaccttcagtgaaccattcattcattcaacaacttactaggcacaaagaaaaatagacttgcatttcctcaaggcagtgacagtaaaaatataaataatataaataaagtgtgctcaagaatgagatagtaggagtaggtgaggcatgagtgggcatcttcaggaccaaaggctttgaagagcagacttctatgggcagggtgatagagttgagttcaatctcccaaacccacataaaagagccagctgtggtagagtacgcctgtaatcctgacagtgggtagatggacacaggtgctagctggtgcttgctaaccagcttttctaaccctcttggggagccaataggacactctttcacacaaaacaggatggaaagcacacaaggaacactgacctccaaaggtgacctctgacctccatgtagatgttcagtatgtgctatcacacacatgtgggcctatgtacatacctctgcatacatatacattccccatacatacaccatagggggaagctgacttgtttcacatttctctgttcttttgttcctttttttaaaacgagacagaatcttactgtgttgtccagtattccaccctcagttccccggggggctgtagctacagctatgcaccaccatgctccccatgtatgccaatgcatagacttttcaggaagaccaatgatgaacaaggttgaatcagagcaaagtatgatgtcatgcttaagagatgccatctcatccaagaccctgttcttgagccagtggtgctgggttttattctgagggccatgggggagatttagaaggaaagtagcctcattagacatgggtcacactctagagagaaagattaaagggtaagagatgatgtacagaatgttagcccatcaaattcagaaaatataaaaccaaaggtggtggcactggaaatggagacaaaataaaaccaagaactatttgggagtcatgacccatggagtataagtaagattcttgggagacttgcctcctcagcagcctagagcagaacaccctacagaaaagcctttcctatatttttactgcagctaatattcctcttatcttgattctccaagatcaacattttctagctacttaaaacttctcattacctcatggtttcaaggccaacgtcccaactctgggttctgctgtcatatgttcatgtcatatggtcattagcacacatatgccagtaaccttctcttactgaagataccaagaaacgctgagcatatcaaagagatcccactgtccgtaggtgttccccattaatcattaaatagggttgggcagcgatttctgtagacaggtggagtagtccttggccttttctcttttcagagagcatagctgaaagctgtgacttatgccatcagtaatggggctcatcaaggtgaaagaaattttcaagaggaccatgatgtgagcacccagaacagggttatagcctgcagtaaccctatcatccagctacaccaggccttccatccctcttcaaagttcagtcagcactgaggacgtaagcaagtgcctgtatttcacccgcagccccaggggcaagagacggagagactcacttgtctctatggggagagtaggtagaacggtaggtatgctgaagacagaaaaggccgcccagcttaggaagacagagtggcgggtttcccgagctccagtgcatcttcaactccgacttcatcaatgtgagcacactgcaaagggacacagcagaagctggccctgtaaataatagatctcctgctatagtttaagcaaaaagctattatattgaccaaggaaaagtaatgtcaaataattgtatctcttacgagtttctgatgctaaacattaaaatactgtgtctcttcaacctcgctgagacctaatttataacaaagtaaaaagattttttttttttttactcaaatgctctgaaaactgttcgatcctggttcatactgaaacccatcactcacaaaagcaggttgtcttacagtctcacagcgggtaggtatatctcctgaagttagtacaggcacgtagcctgacaggaaacaaacctgaatatttttgaagtgtgttttaattaaccccataaagactcacccatcagccctctctgtttccagagtatgtcttcttaactgaaaaggaaaaaaaggaagaaaagcatagaaggggataaggaaggagaagagagaagaaattcttggtttttttttttcaaacccaaatagcatatagagttaagtcagcacacagaacacagatgacagatgtgactagattgtgacccagtactttgaaggagatatttgtatttaatcaggataactcagaagggcataaataagtcctgtgcaaataattatgcagagtccatttctgcctcacattcgtatatgcccgcctaattgaatcgagtgtttaatcccaggattcattatctctttccctatctaagtccttttctcatttatatttagcacccagctgtcccctcttccaaatggtcacctgtagtcctgtaaaagtcttgaggttggccttagaaccccagctttcaagcagcaggttctctcagcagggggcagctggatcttgctgtgtccctgaggctgggttagaatccttaaggagagcaaactgacttggagagggtgaaaatcagaccttcaagcagatatcccaggtagagctggccaaggtgctcttggtcagcacagggtgttgctgccttttgtagtcctcagaataaagcaatgaaaagatcagttaactcgcttgctggaagttattgatagagaaattctttctgcacgaaagattataaacagtgttatctgaagatggatttgttttaatttggcattgatgtatttgatacctggtaggatcaaagaaaacagaatcaaagggagaaatatagagcagtctgcttctccgaatatagccctcctttatagataggaaatctcgggactggagtgctcaaatttatttgtactgatgtttgtttaaagatcaatattaaataaattggtctggaagctatagtcataaagcagctgtcgaactaatgtaatcccacaatgccattttgtctactgcatgaaacctggttaactgtgagctcctcctcacatgtgcaaagcgtatggaagaggaaagagcagaactggatttttctgaacttggaccaatttgcaaacaaatgtaaaaggcatttttaaaaatttaaatttaaaaacaaaattatgcttggtccctttcagggtggcagttgactatttttgtgcacctcaaacttcctttaaaaaccatataaaaatgccacttccctctctgttatgtatcagtatgcaaggtgaaccctaagagccttgttttgggatattctgcctacactggatgttagttattattgtattcaattatgttgatgctgtttgttcgttgatttgcttttgaacagtgtctttggctccgtgtaccctggtatgaatcagtgtgcttagacactgtcagtttcaaggtgtttccaccactctgtatccatcagagattctgaagcagaaacccaaaacccattgcatgaagactatctcctctgcatgatggctgtggacccttaccccactgtctttgacatagtccttgagtgtctggtcttatttttgttctagttactgacacataagaaaggaggagtcctgctgtcagcccatagatttgattgtgagtatggcccatgatataatcatagagggatcattgccataaagaaacaaagaaaaccatacatgcagagcattctagatgctaagtacatttgctctcattgacccatcagagaagatgaagagttgcacacagactaatctgtccaccttacttttggtcgtgagataaataaatatctgttcagcagcagggcatggcttccttagaactgttctggccaaagaacaaaacttctgaaagtgtgtatttcctaattaaaggcatgtttttgaaagtcaaggttctgcaattgcaagtggtataaactggggcaagtaacccaactttttaaaggctcagcttcctaatctcaaaggaggtgaaaaaaaaacccagtatataacaaacaagttgtgttaaagagtggataaaataatctcctgaaaagcatttagaactgaagaggtggctcagtggttagggtgcatactgctcttgcaggggatctgaatttggtttctagcaaccaagccagagagctcacaaattcctacaactgcaggctcctggggagtgtgtggcactgtctttaaaggccacctgtattcgtcctgtgtaaatatgctcatatagatacacacacatacgtaatttaactttataatacactatgtggtacacagataaaaattataacttctgtaattgtgtgtgtgtgtgtgtgtgtgtgtgtgtgtgtgtatgtgtgtgtgtgtgtgtgtgtatgtgtttatatcccacttttcaactaggaactacagacttttctaaaagcagattaaacattagaagtaactaaatagatcatattattttactaagttatgcaagtcaaatatgtctcatgatattgttctggtttctgaaggtatgagaataagcttaaatggtcaaaaatataagtatttccccgtattgactcagacttaaggtgcttaagtctttcatcctggatcatgaggaggtggtgggcctcacataagtggaagccaaaagctttggtgttcaggtgttagtaacacaggtctcccttcatggaggccccaaccatcccaaacgttacaaggtcaatgaagagggggagaagtggagaagtgagaggaaaacctgtgtctcctgaaggctgactggctttgtgtggcaatgataatgcatagcggacaatagccaaagaaactctgcttgacactgaagtgccacccttgttacaaaagtcagggttagcttcaagcaccgtgtggaaaactccatccacaagagggctaccaaggggcttttcagcatgaaagggcacactttcatagttctgcagacagcaagctcttgcctgctggtgaacttacatgtgtgggtcactgtcccacgcctgggggataactgagtggtgtgtgacataaacatagacaacttggccctgctgtgagctgttcttagagtcgaggcctgcagctttagtctgtgtctgtgaaggactgaaaaaggatgctttcggtccatgctttcttgttaatcaaaacctaactttacgttttgaagatgttttctttcaaatagtcttgagaaatatcttctgtcaaagacaaatgctgctcgcctagttggcgatgatccctttttccctggaagctcttagcatgggtaggtcggtggtacagttccgtgcctaacttggctttctccagtcactctgggatgtttgcagcatccaaaaaagattttagttacaatcttgatttaacatctttaaaaaacccatgtacgtgtatccagtttatatatttcaacttctcttaataaagatgtaaaacttaaactaaaattgtagctgattgtgctgacttattgctctaagatagattcatcaaatctcccagctgtataagacagggcttactaatgaagttccctatcaaaaagaaaagcctaattttgatttggcttaggtaatgaacttctttttcctggtgtgataatctgcatggggtggctaaaagagtagctagagagagtgcgttcacagaagcattatgcaaaatgtcttttgtctctttttgctgggatatattaaattttcaatgtagtctatgtaatataaaattatgataatgacttttggcccactgtgaaggcagcttgctggtcctgagcgtgtgtgtctggcttgagcactaggttacactgtgggagttgccttttctattagcaaacctctagatacctaatgatgaattttctttcaccaaatgttctccttttgtctaaaatacaagcattttctaaattgcttttgagaaaaacaagagaggcatagaggtctatggctctaacaagggatagtgaaacaaagccagggactcagttagaatcgttctggtgattagaaaccaaccaaaaggttgcagcaagtactcgtgaaaatatttaccatcttattgactcatcagcatcgcttaggaagaggacaaattgaacagttgtctctcataaaatatgcctattcctttcaatcatgggaaattgaggctttaattcatcagacagttatagaaactttaagagtctatgagcattgtttgttgaagaaatgtctttcactttcccattttctgttctaaaattttgggtaattaaagtgtataaaatagtggacatgtcagtgatcctcttacttggtatatttcttacatggtatctagggaacgctttgtgaggaaatgggcaaacaatatctatttcctgtcacatgtaatttctaaatgatgattcttacacatcgtgatgaaggtgaccccgttgaggcatctctaaagcctggaaaattgttctagacactatcctagtttggaagatgttttaatatttatttctcagaaccagtttgcaagatacacaagaaaatctgtcttaacacgctttctttcttttcttcccaaaggccttcacctgctggaatatcaggacattgacggtttggtagttatgtcctcatgtgttattatcaacttggcacgatagtaaagtctggttaggattcacagttttgctgtgatacccaaatcatagatatgaggcatgctagaaagcctgcggtggagaaagttatttgttacacatgttggaaatcccaaaaaagactgttggtgtagaaactaccatgcagagaacacactgctaccagatgtagatttcctagtttctgaagaactaaatgtctgttaaggaatttggtcactatcctgtgtcaggaaaagtcaatgcatagtttattaataacttgtcaattgataacaatgctcccaatgtttgtagagcaatgattaactttggaaatttgaattggcattacgtattagaaaagtttattaaaatcaccctttaaaaatcaactaaaggactttcagaatagaaatctcatgagttatgatctcttgactttcttttctgaattaatagaaagtattgcaaagcaattttaataaagacttggagcccttttcttaaatattgaaaactaaattagagctatagacaaatgttctgtgggtaaagcacccactgagcaagcatgaatacccaagttgggcttcacttaagaatcaggggtgtgaactggagagatggctgacaaccaaaaatgtaagaattacgggtgtacctcacacctgcagcctttgtcttgggggttcaaacacaggcaggaccctgtagccaattggtacctctaggtttcgtgggagacactaaatgtcaacaagtaatgtggagagagagataagaaagatagttgatataaacctctggtgtccacatacacccccgcacacaaacatgcacaatcatgtattcattcaacacacacacttgcacacacatgcaaaataaaaattagaaaatctctcccagtacctaggctaaaggagatgacaattttatacactgttggttctgccaatgccttgtggcatcttgtccactgctgagctcgggtaccccatatgcccataaaagaaactgttcttgtttttagaaagggtgttctccgggtaaatggtcaggaaatcaggattaagaaaaaagttccatgttggcaagctatgccattggaagccacaaataatgaggccagctcccatgacctgattcccttgaatgtaggtaacactcatggcaactgtgtgaacttctctcttagctggtttaaacctgtgggcagtggtatgtttgcagagcccgggcacagtgctgcatacactttggaacaggcagggatgagtaaatggatggacagttagattggtaaagtcctgacagtgttgggcagacctgcttatttggtgggatgctgtgatgttatgatggttctgcccctggagccaaaaaacaggggtcctttgggcccaagcttattcttccatacgcctccctttggtgtgatgggagagaggactagggaagcagcttttcaaactctttaggctttagatggcacaagatgatgtttgtgtagaagagcgatagttctcagcactacaagtgtatggttttgcctttaatttggtgtctgtgttttatcagctaaaccagacgagctcaaatgaacgagcccaccccacagcacacagcacacagaatgttagaaagttgtgctgttcatccacagccaaatgatgattctattacagaaaaggccatggcgttgtaactggaaaactggggctgattttatttgtactcattagtgttgatggctgaaaagtctgagcatggaggaatccctcacacgctaatcaggaggaaagaaggaccttcaattaaaggcatgctaacctgaagaccatataaacagcattcggaaagctaatgggcaatccccaggtcagatgcccagcaaaggtcactcctcggtaaagagagtaaatcttgaagcagagtcacgtatagggttcagtctctgcctgggaacaataagtcatttgctctataacaagttgccaacacaaaggcttttctctggccatggaacaaataagagaaccctagaacagaattcccctcttctgtgccctaaggaaaatggctcccaaggggacaacgtatctaccaaggagtatttcatttgaggtcttggaaagctcacggatggtgtcaggttaaaacgcactgaattttctagtatcgttttgcaacaacataatatcttttactccgttcagacacaaacatggaactcttcttaaatctttccatgaagggcatttataactctaactcgactaatcaagaaacaaattcctctatttcaatcaaaacacacatctagacgcactcaggctgtaatttcagtatcgtgttctggtcacctactgttggtgcctctttaatcccacgagggccttctcgctgctcagctttcagctttctaattctttggagccatctcttgagaggtcagggaaggccaggctccccttcatgggtccttctgaaagtggcatgaagaggctggaggcatctgtgttgatttagttcaccacactgggtaaacacctcaatttctgctttttgtcattttgctgaactctgaaataacagcagtcattttaaagcagagtatttgagacaggcctttgatttttacctgtgtcatatcccattcccccaccccgtgcatgctgtgtgtgcacgtgtgtgtgtgtgtgtgtgtgtgtgtgtgtgtgtgtgtgtgtgcgcgcgcgcgccccttgtgcgtgcacccgtgcgaatatacatataaggctatcagaagttagcctatgaattttggcaccacagaaactttgttctcctgtgctcagtatcattaggactgtaactggaccagtaagagtgcttcctcccacccacccccccttcttgggcaccctatcttaagaaagcccttgtcattctcatccaaatggcactggccaccttttctgtctctccatgtgttgaaaatgtaaccattattatccagccccgttttatgcatcttccagatgatttaactgaactgaagctatggaggatatgctgactggcacttttcccaagcttaatgtgttaacaaaagccaatggtgtcagttttaacagttttagctaaattcccacgacactcttaacaaacgcagaaacctctgccatgtcttaccctgacagatttcctgccgtcattgcacacttaaaataaatgtcatccccaatcaaaaagttcacattttctctgacaatataatttgttactttgttcctgctttatctttctttggcacaggaatcttcagccaagacatgccacttttccacagtgttggctgttgtcctttgtgtccttccaagtatgagaatgaggccagaaagcaaagctagtttttaaatcccatgcattaacagttagatatgtgaaatgttggcttggagaggacaccatactcttattgcaaatccaaatgtcttagcctcggttggctgggacaacgtatatgacaaagtatcataagcccagtggcttatgagtagaagaagtctgttcttcattacttctttactagagataaagtccaagctccttgcggattttgtcaggtgaggaactacttccgggtcacagacagctgttctcactatatgccctcagctgctatggctgagctctctgggatctctttacaggctctaatctcatctgcaagggctccagggtcttgacctaatcaaccctcctaaagtttgatttttagttagcatcctcctatggaggttagaatctccacatagaaattttagtgagcacattctatccgttgtgcctacatattttgttgacttatagaacatggaggtcttacagatcacaaagaggatcatggttggttctaaggaatgaatatgccctcggccttggtcttggcctacaccattggtactatgtgtaataatggacagagcatgtaaagtttctgtcttttcttgcctagggaccaggaataggacatgtagagcaaagcacttgtcagagcaatattccagcatccctggcatgctttacaacgctttaggatgggctttatgctgtatttacatggcagtgttcttctgccttttgctcatgactctgctacacatttgcttgcttgttagcattttcctgtatttggaggcttggtaaagacacatgaaatgctaacccaacaactgagtcgtgtgactcccagtaagaagagagatggtctcctgtctgtacaaaatgataggcaaatggcccaagccaaccatcatgcacagtgaccttgcttaactgacctgaagaactcatcttaatacctttcagactattgcatagccaggcagggtagactagtggatggatcctggaggacagaatgtagagaccacactcttaccatcaaattggagctgcagaaaggaggtcacgcccattctcactacttccatttccttcactgctacgtcaaagtgctgcatgaaatggcccttaaggttctttcaggataaaataggtatggtttttaaagtatgaaagatctgtcataggcaactgttaattttttgatcaagccttttttgttcattagcttaaagacagtccacagacttctgagctgacactttctctgatctgtcannnnnnnnnnnnnnnnnnnnacacctcctgtctctctttctcagagaagaagagagaggtggcttgcacagcagctggctcatttccctggtttcacactactgtttaatgatccgtttcttgtgtgccacctctctcatctactgaagatagatacaaattgtacctataaaaattagagtatgactcaggttagctttcttcctccctttcaaatactgtatgttaaataacttcccatcatcatttttatcacaaattctttaatgataggtgagatgctacacaaacagatgcctttaacctgttctattgtcttcaagcgcatgatatgaattcacaggaggcagcagcctgcagaacagaccagtgcatgcaccctgtgggaaggactggcttcccaggaagccctggtactagttcatttctgcctttgcccaggtgtgggtgagggcatctctgtccagtccttaagaagagaagcctgggacatgggtggtttgtgagcagagccattaagcagggtctcagagagagcagtagtgaccatccatccccattgtagaaaaagactgtgttagtcagatagcactgcatgaagcccagcctcttacgctctgcttgaggatgtcagatgggccacgtgactgagtgtggaggtcacaaaaaaatccacaccagtaaaagcttctgaatgttcagtgaaaattaatttaaaaccaaatgtgtaatgattgtcacagcatgaaacaccaacaaatggtgcctaaactactatggctgagaatatagactagcacatgtcctgtgctctttaaggtttctatcatacatacaaagggattgactctttcagaatcatataatggttgaactgtggaaaacaaaaggcttgaaatattttccaattgtcattcctcattagtatatctttgcattctattatgttagaatgtttgattttaaaattattgtttgacttgctgacttgagtttcattaaaaaaaggacagaatttttaacaatttctgagatgtccctaaacatacctctgccagtttatactatgtgtttaagcaaagtagtgttctccatattgattaatataaaatcaaaatatcaatcaattctgaaagatgatgaagattccccatgccttgcaatataataaatccaaccaaaatttaattcttcatgtaaatatatcatacattcacctcattaaaatgcatgtttttttcatctttactatatggtgaaattatatgtataccaaagaacttttttagagctaaccttctttatgattcgttatcagtttaaagaaattgtatgcctattttgtattcctaatatgcctgggcttgggtaacattttcttgagtaaaaaaaaaggttgtgagtgggaaatgtttagggaaccccatcctgaagactaatagacttaggagcgggggcccttccaagcataccccagctttccactcactgacaagcaggcatcagctcctcttggcctctgctggtctttctgcttttaaatgaaggtcagtggcttcctgtctatagaagttgtttgcctatgaatttgaaggttactgttggagttcctggagtatgtatgcatgctagtgagtcctgtctgtctgtctccatgtgtgtaaaagggcagggaatctggacaaaaaaaagcaagcaagcaaacaaacaaacaaacaaacggaccatgtagcactttctgtgagcaggacaaagcattcccttccactgggacttccctctgtgagaccaggctttatacctgtgactgttcagtagaaggactaaatgtcacagtacaaatgagctggccattaccagcgagacacatcctggtaatacagtttagaactgtcagctggccattctgaagcaagcagaacaaagctagcaaggtcagcttccttctcagtgttccctccgacagacgggagaacctttgcttgagcagggggagactggaaggagccttgtccaccacttccacttcctacactggaatgggtttgtttcatccgagtcttggacttagtttctctttgttttatcagagtaaaactgcatttatctcagacaccatggctctctgctttgcagtgctttggcaagcagcaggctttgcagtaagttgttcctgggaaaagttataatagatgtgggctgtttcggtaaggcatagacatcaattaaaatttgaaaacatcaaaaaatgctatatttgtttctataaatgtaattatgtacaaactggacaggggcttgcataacctgggagcaagtaggaggcaaagacaggtcctcggggagatcagaggccacagcgataacagtagccagacttctctgctccaagatcacttcaacctttccccagcccagcaaccgtgtctgcatacttatagtaaacacatgtgccatttctggttaatagaattggtgttgggactttctctttgagagtcaacatttcagatggtgcctgagtacaggtatttcttcaatgtaatctaattgatagcatctcagttagaaatgctattggatatatatatagttttcttcattgctgaatccccaaacaagatctgaggttggtttccaagggtccagttatcagtccagtgacagggcgtgaagcagagtgatgaagggtactgcctctgcccttgtctgtggccttggacacattctctgaagtactctttcccttctatgagaatagcaacagtgatggtagtaagtcctcaggcctcataaggaggttgaagaattaaaagcaacaacccacagtagtgtgcctaacacaacaaatgtacagctgtgcttagatatgatggttgttgtgtccttcctgatacttaggataaatggcgaggtagtttagttttgattatatgtgtgcatatatctgtgtgtgtctggggggcggggggggggggtttgcaggtgccagtggaggaatcaggattcttacagctgtagccacacacagttgtgacacccagtgtagattctgggaactgaacccaggttctctgcaagagaagtacactctcctgctgagtcacctctccagcccccagtatttagcctttgagtcagacatggtgctaacacatgcctgtaaccccagtcttcaggcctctgaggctaaagataccagcctgatccaccatgggtggtttctctccttaaagagaaaccactcagcctctctgaggatttgtttttcttgcagacacttaaagggctggactaggggactctatctctgtagcttattaaattattgatgtaaaatattgactatattatacaagcattttaaacaaattgacataaacataattttaacaaatcactctgccctttctgcatttattgcatggcaatgacaacaactttcttttatttccagaagaagaaaatattagaagttctgtaacatttttgtggggtatttttttaaacaaaaaatttgggtaaacttttacccaattttctaatttttggcagaagagcaatgatatattttatcttatacaatcttaaaagcacattttaaccttcatatttttaaccagatctcacatctctttatataattttgactaggctgacatatatattaaaaaacaaccaaggaaaaggttattgtttgggtatataaatctaaaatcatacaccaactggtcttccagcgattaaagctgccttcccctttaataactctcctaagaaacaggaaatgtaatttccctacacctttcctggggctctccaatcagctaggtcctctgggggctcccactgtatattccttcatcaacatggagtcccccaaggggcccacacacactctgttaaaattagctgtgttccacattagtgacaggggctgagtattcctgtgaggggtacacagttgtatggtgctgcttcctgtttgagcaaaatcatatctttaattgcagagaatttttttcattacctgttaattgataaatcatgcttgctcctgctgctgggctcacacaccacgaacctgatcatgagacagcctccggcccaacccccccatcgtcctttcatacccccaaacaaaaagggcatgaagccgcatggccagagaaagaagacaggcaggttgcagccctaagcattaggtttggagagttgcataaaaataaaataaagcgtgtgtgtgtgtctgtgtctctgtgtgtatttgtatctgtgagtgcatgtgtgtctatgtctctgtgtgtatttgtgcatatgtgtgtgtctgtgtgtgagcatgtgtatatgtatgtgtgtacatgtgtgtgtatgcatgcatgtgtgtctatgtgtgtgtgcatgggtatgtgagtgtgtctctgtgtatgtacacatatacatgtacctggcatttaaaagagttccctttctgtttccctccttttgtcattcttgtcctttgattcatacttgtaatctgggtagcaagaagccaccgtcttgggaagaacagtaaaagtcctgcgtacagtgaaataatttagctgataattccccactgtataattttctctgcttcctgctagctgaccttgtgggctcctgtcaggttgctaagggagatccagcagggcttcggctctgttcctttatttttaaaaggtattatagggtagagtggtgtgttggtggcagctgagggatgggactagatgctgagtgcttgatcagatgtgtgaagcaatcctccccaccccttgcctgtctcttcttttcctccccacccccaaccctcactttccatgagaactacaagatagagaaattgctgcaaactgttgagctagaattctgaacttgatggatgtaatcaaaatgtggctagatcccaagaggtgtggcctaaggagtaggccggccaagcagatgacagctaatggaacccggagccttttatcttagagatgtcaatcttggtccagatcagggttgagtgaagaccttgcaatgtctgcaataaaagcattgccagagtaggattgctagagtccctctcccctgtccccagcctttctgagttggactgcatgcaatttgagcaggcagcagaaggcagagtaagcagctggggaaactgtctgtatcatgatgttcccagactaggcaaaagttaccctgctcattatgaatgggaagtaatacaccattgatttgtgtccaagtaattcccaggtaattataggccatcgatctacccaaacgggagctgcagcagttgtattctgcaggccttatgttgcctcacacctggtgactgtactaccattgcacttgggttctagaacagtctcttcctcaatcctcctgtggctgggaagatgcttagaaactatcagatggttctagaaggttgaaggaggccaggtgattccgtgtctgctggcctcagtcccttaaagagtcctctgatgctacaggggaggtaaggttgctttgtgtttgtgggggctatttctatgcccccagcagtgggacagggattgcatcagctggctggttttgtgtctcagctgtcaccagaagagtgtagtaatattcttgattaaatgtcattactctgtggcatagaaatgggaacagtgacatgattttggatctgttccttttcaaatccagcagtagaagcaaggcacgtctactatggattaagcacagctatttttgcgccatcttcaatcgcaggcttggaatttgtatcaatatgtcttcacttcatatcatcaattccctgaggcctttaactgaaatgcaagaaaaggccataagtaaaagaacgttgaacactattgttcaatcagcagctgttgccacatcaaaaaaatgcggttaatgtcccagattaaaataaattggtgataataaaagttgatttggtaacagtaggtacagacgatggtatgagaaaacaaagtttgtttccagtgcactctgactcatctctttctctgattatctgatatttaaagttgaccagcagggaaacatgtagacacaacacttttccctgcctaggaagagttattccttgatggtttataatcatatcttagtgctttatatatttataacaagctgataaatataatgtgagaggaagggggctaggcaccaagaaattgaaaagtcagttctagggaaacagagagaaattgttaatgttcctcaccagaattcaatttgtccaattgcaaaaatctcagtctccaggaaacaaactgcaaagcaagctcagttgtcatgtgatcagttgtctagcctaccgcctttgactgcctgcaagcttataggcagcagagagtggacagaggcagctaagtgagggcttcactcatggtcaaaattacatacagtacttacatgaacgccatgttaatacattcatctagagtagaatagtaaattggagtgtatttgatatcatcggtagatgctattatttgttaaactctggccaagagactttagagtggaacctctgaagccactggctcaattacagatccaacatcagtggcctggtattcagaaaacgtgatatcactaagcaactcttaagaatcatccaaagggcccacacctttcactcagggagttccttggatgctgtgcacaggcgctgctgccgagcaagccaggctcccacactggggcagacagtagaatttattctctcagttggcatctgcatgttaccagatcggggcttttgtctcttcctcttactagataagttgaaacattgacaggcagcgtgttccttttctcccccttttattacagtaatttataagatattttagctaacaggagaacggcccaagggggcattctcatgttaattaccaaatgtgggcttgtcaaaatcaaatagctccaggaacgatgcaagtagctctgcatcactggcttgtttggccctcaacccagtattagctacttttaaaaacccgggttcattaggcttttactgtagaagaagaatcactacctggggctttcagtggaagctggggctctgtcagcagcttaagggtttaatgtaaatgacattaaaaaaaatagtttcgtataacatacttggggaaacgaaaaacaaaacaagaaaaatccatgcttcgagagtcaagcactccttcctggtccctgcaatgtgacactgaggataattttcagtacatcatactttgaggagggggcaggtcctgttttatttagaaacatctcatcatttagtattattgggctggtgagttcaaggcaattgaaaaagttacgatttctaaaactctaatcctgacataaggttctacacacacagagatatgtgacatttcttctaacaggccctaaagcctaacccaagattgccctgttgggatgaggctcacctgagctgatccgccttgttcctgagtcttcccatgattcctttcatgatctcctttttctatctgtagcttctctctcccggagcacaaccttgtgcaggagtagatatttaaaaaaactaaacacctttctcaccagctccaaccctgctcttgactgcctaagagagtcagtgttggtgacaatgtcatggaaggacgtaagcaaacagctggtgatgtcagcaggaaattagaagtaagatttgctacactaaactacaatgtgggcgatccccctgtgcataatcaagagctcactctatatacaagtgagaattaatccaagaggggtgagcggttaaggctcagggtgttcccatggaatagttcctatctatggtatagaggaaccaaatttgaatgtgcaactggaagttaccaaactagcattttcttaacactttctggatactgggatctgtatatacactaaggatacagaaatacgtagagcacaggagtctcctaaaatagcaaagttcactagaagtgtcaggcaggcaaatgagcagtgtagtgttggtctcctgcagatgatggtcagtcttagctgtcagcttggtgagacttagaatcacaatggaacataggtgtgtctgtgagggtgtttccagaaagatttccagaaagggaagacccactctgggtgtggccagctgtgtcctgcatgggctggggttatagtgttcatctcctgactgcagaggtgggctagggttatagtgttcatctcctgactgcagagacagtgtgtccagctgtttcaatcttaaggcttcctgttcatctgagacgaacattctgaagaggaaatgtctagccaaacatgtagagaaaaggccattgtcatgtgtacaggactccctggaaatttggacatgtggtaggctaagttgacactatataaacagagaaatacatgtttttctggaccattccgggacacaccaaggactctgttgtatcttgctttatatgggttctcttaaggaaactagaaaagcatgttagagtgaggtctccgtctggcatccagatactcgctcactctagcatcctgtgcactggtgggtgctcctgggtaccagaatagcatcaggcagaaaacaccttccctgtccttcatgacctctttgaggtgcttggcagacttctgacagttctctttattcttctgcacaggtctgcctccacccatttaccttttaattttttaatgaaaatatttattttggtgttgtatttttaaaaatcactattaagatccaaacatctagattttccctttgttttcttttgaatgtttcatttcttgcattttacagtttagcccatgaagaagagtggggctgtctgggcccctgactctaaccaggctattctctcataggtacctgccatctttatcccctgtagcttgtagtttcaggcagtgccagttttctgacttgatttttaagagtctctcaatttttctccatctttatccttctcatggtgtagcctttagaatccctctgtctaccctacataccattcgggatttttattgggtttctcttaagtctatagattcatttgagaagatgacatcctaacaatattgaacatcttcatgaacatgaaatgtcttattatttaattattttaattacattatgtacttatttccatttgcttagtttatctttattatgagggtgtatacacctcacctgagtaagtcagaggacaagtttcaggactctgttctgtccttctgccatgtggcttctgagaattaaactcgggtcctcaggtttagaaacaagcacctttctctgctcagccatctctcctatccccattggttaattcctaaaacatttctctcagcagagagatacaaactatagtgttaagtctcataaaagacttatgtatatcttgttagattggtctctatgattttacccatttttatataaaagtaattttaatgtactgtagaaaacacatgcaggtagtttttctagtcatcactccctaaataacacatcataacaaaccaattattttaatgattggaaaaaactaaaatattaaaataatataattgtataatatacctaactgttcaataattatactgctaaatactataattagtgttaatcaaagattacatgcagtaatgtacaattttatataggaaaatgactgtagagcttggtaaccccttagatactgagcttgatgctgtggtcctgtatgctgtgacctggtcagcatcactggtgtggtcatgtctcctgtgttgtggctagcatcacttgttagttgcaggagtcttgttgagtcttcaggattttggtaaaatacataatcatggggtgatctgtaagaggcacagtgtggtcctctcttctgtatcactgtctttcctgggatgtttggtgtactgctggttaaaaatgttagaggggacctcagttttttcctagaacttaagggggagtgtgggttactatcatctgtgtgttcataactgtaggacttctgtgcatagtcttgatgaagttgaagcaaaccgtctcggtttctagctggatgagaggcttctatctttctgattttatttcctcccagaggatttcgtattacacacagtctccttgtgttttaatcatattctcaccgttgaacttcacacagggctgctgtacctgctgcacttctagcgtttgtcctctttgttttggtgacacggtcagtgactcattttcagatgttaatcttactgcctgaaaaattctagatagccaacaaatcctagactgctagagtcaatttactattttttttttccttcagaagcctgtgtgtttatgagataccaggtctggtcattttcctcttctacagtagccttgtctggcttgggaagtagggaactgttgatatttagaatggattggaaaattgccttctcttgggtttacagaaactctgtgaagttgtacattgttctctaattgtttggtacagttctccacttaaagggcatgccacagaccaaataattcatgtctgttttgaattcagagaattttttattttaatttattttttagtatatgtgctcttctagtcttacaaatattacaataaaatgatgcatgtatgcttcttcgaaaaataaaacttcactgtactaaatggcttgtcacatttaaaatgtggcacatacacttcttcttaatacaataaatatttcccaaaaatcagatttctgaaaatcagttctgacttgtgggtcctaccaaatcatctcctattcacaaatatgttttccaaaacatttcgtgttcatgggtagactgcttaaattcttacctttatcggtttccctcttttgaatattaattttattgattgattttgtccttgggcagttttatacatgtagatgatgttctctgggtaatactcaacacgtggattagaatgtcacagtttaaacaagttgctacatgtaaagagtctagagctatggctggcatacactaagtgcataggaaaggccagctactgttattaatttcttcactgtgctgaagcttctccagatgccctcatcgctcttgaagctccttctgcctccatcattgaaggagggaaatgagcccctgatgccccttgtgttgtttcctgtttattcctacaaaaaaaattcttcatgtttcagactcaatgtgcacttccccaatacaacacacacacacacacacacacacacacacacacacacacacaaattgctcacccaaacccttgctcaaggctggcatgaccagtctttttgtttgaagtatagctttataatacttgtccgtctgaatcttattacagtattctctttcaataatccagtcccgtggcggttccagatctggaacacatcttatgagtcacttgcctcagatgaataaacagagtcctagagaggtcataggcgtctccaagttcttgccgctggaggctatcagaatgagaagccctttcttagtgtgccaaaaatcacaagtgcactgattgccataacttaattctttggggtgtttttttttcaatttttaattttatgttatgttccaaatgctcattaatcactgtacatattaggactaaatttttctcctaatttctgtgatttatcttgctgttattattccccaagaagaaaatgctggaatagttgtgagtggctcctagtctgccctttaacaagcccagggaggtaaacattacaagtcctgacttcttccacacaacagagcagcttcttttgtgaaatagtggcttgtaaacagtgcacaggtatggaagtaaataactgtgtaagtaattgaaactacaggggaattgaaaaaatcagaatgcggttattaataatccctctatttatatgaaatgagctcttcatttgaggaactacaacactgagtggatattgcttcgtttaaatttataacagctttgctgagtgcaagcgatagcatcagcctgacttcatttctgagtttgcagcctacaaagttaggagccgtgtaaaggtgtgctctctggtcagtctacttggaaagcccgcttctgacattagaagaaattgatgctgtgctatccagtgtggtttgaagcacaggtagtcatttatagttcccaagctacgttctcctgtaagatacactgagaaagtctatcctagtgcttaactctcatcttaggatcttagttagattcttaactttgacatttatttacaggcaaaaaaaatggattcataatggtcactgaagaggaatataaagcagaaataacctgttacaaagcttactagaactaggaatagggtaggaaataaaccgtatcatctcctaattcacatgcccatttaaatcctaggtactgtaggtaataggaaatatagtctatagaaataatggcaaaatcacaactaagccatgcatttttaagtagttttaaaacttaaattttaggagattttctgtaaagaagatgtatgaggccaacacgcacacatatcgcacacatgcacacacatgcacatgtgtggcttgattaggaagactgtctggttactatctcattctaggagaacgaggtgcaaacttcctatctttatatcctgaagtattggaccaaaactctttcactatcagttgactctgatgttgctacccaaataattttgcaaattataatatgtaaaatgccaaactcttgacctgagtgataccctcactcatttcattcagcaaataaattagaagaacagaaaatactgcttaacaatgggctattgtgggttgtactcccatggggctggttaagattcaattttctttgtaaatataaacagaagaaaacacattctgtctcagaggtaaaaactgttaattatgggaccaaataatgtttggacctgaattcatacagaagacaaacacactggaatcttcatcctcttatgattcaataaaggtagatgtataaaaaacacaaattgaagtcatttttgcacatgctgctcatatgtagtatccaaaaatagtttcaaatgttttaacataatactatagtaaaaaattccataagcgatataagattaactgaagtagaaatacttgttacaatgactacatttggattcataaacccagagtgtttgtgtgtcttctttaaacatgtcattcaacttggccacaccgacaggtcacatgcactaaactgaaccaaatgggtcataaacaaaaccagagctcgtgactcttgtacatgggcaaggtgggaaggaaaagggttgttgctaggagctggggggtggggttgggatgaaaggggttgttgataggaactggggggtggggtggagaggaaaggggttgttgctaggagctggagttgggggtggggcagaggaagcagaaagggaagggaaagggaaccagaatcaaagatacacatgaaggaaactgtcaaagaactaacctaatattaaaaatggaataaaaaggctaaagggaagcctcacaagctatattaataccactctccttgatatgaatatttaatttgttagagaaaaccgtgtctgcttctttgatgtaacttaggtgggtagaattttgactgggggtagcaagaaccatcagtatagttacataacttcattccaataattgaaataaaatcagagatggttacaaaaataagaatagcctgtaaaacaaacgccgaggagaaaatgcaggtgaaagttcaaaacgttcagtacatggaaagcagcaaaaattcgattgctctgaaactcatttatgcctacacagtaggttcataaccatccatcctaactcttcacctcttggcatttctctactctgctcaccaaaaacagtctttgtgggctgcagaggtggtttggcatttaagagtgcacattgctgttacagaggacccaggttcagttcccagcactctcatggattggctcacagtggcctgtaactccagctccaggggatccaatggcttcttttttgcttaggcatctgctcccctagacatatcgatatacagacactcatgtgtacacataactttttaaaaccccactcatgtctttacctataaatgatgtttctgagtagctttactgtgggaaaaagtgagcctggtcctagcaagtaaaaaataagatgtaaaagttacgcctgttaatttggtcttgcctcattcccatccaatggtgtttcacagatctttctacctgtggtgggtacagaacaggaatgtagaggtagactcacttaatagacacgagaagtctaggagtctagacctgcttgctctccccacgcctgcagctggaaatagcagaatggaaagttcaggaaacagagactggctcctgcccacttttgctcttcattagacacctgagagtcatagtgacccatgacttcctgaaggcgctccctgcagagtttgagcaaagatacagagttctttacattcaagcccttgtgtgaacctgcagaagaggctggaatgacagcttgtgaaaattacaatggggtgaatttcagtcgcctacagggctgaaagcaattagccaaacgactaaggaaagcatcttttcatttttatccattattcacaaaatcgcgtctcagttctgagaattccaacctgacggtgactaaacatggacttcaagtctcatataggaagcagttgaggtcaaggcaagtcagattatatgatgaagggtattttatagaagggttaatatgctctcttattatacaggcacgatggtgtatatctaatctcaacatttaagagactgaagcaagagagtaggtatatgagccacccgggttaccatagtaagggcctacctccaaacagatttcaagaacatttgggtcttctgtaaaatccaagttcaccttcctgttcgtgtcaccaccctcaggaaggagactggtgaataggtaattcagcagatttcaccatcatcccttccattgcacaagcagccggatcgcctgggttgaagtctttgccattgagcatgaggtggctggatgacaattctttagaggatactagcgctctttagctgagctgtttatcaagcagctcagaaccacctgtatgtaagtccagctccaggaaagctgttctaacaactttccctgatccctcttctggtctctgtaagctctacagtgcctttaaagtgcctttagatgggttgtttctcaatgggatctaaatcttaccagtttgccattctcctttgaaggccccatttgtactagaagttgtagttttttttcctctgcagctaacaaagttttaagtttcttgcttttcctcacaccccaaagctatcttttacccaagaagaggaaatagctccctcagcttgaaaaacaaaaatttaacttttgtcagcaacaaatcagcatttcaatccaaaacagcatactgcctcccctgatccatagtgctgggggctacaggtgtgtgccactgtggctcagctcacacctccagtccagtgggtggaccttagggcttcctgatcacagagccacacccacagccctcccatgccagtagacttgcttgtcctacacacgcacacgcacatgcacacacagagagagagagagagatgcacacccctgtactatctaatgaattaaacccatttgtgtatttttagtcttttagttcaatgtgagtctttctatctctttctcatccttgttaaagatgcccggtgttttctacctctccaatacatgtaatatatgcaatatgcaatgtgatgtatataatagaaaagttgttagaacagctttttaaatgtcctagtctactaatattaatgtctatgtcgtttccgggttttgtgtgtgtgttgagttttttttttttttaattgaattctatctttgtttcatgcttgttattttcctttttgatgttttcttgcttactttttcaagacaggatttctctacctgtcctagaactctattcttagtccaggctggccttgaaatcagagatctgcctgcctctgcctccttaaaagcatgtgtagtggcctctgccgctaccatcatcaccacccagctatgcatggtgtgttctgcatatttacagatttggttttgtgcttttttacatgttgagtgctttgtagttgtgtaagtattctttgagctttcttcatagaagcagttaagacacttggtcataatatgcttttttttttttttgaggaatgtattgattgattgattgattaactgatcctgagcaacctttgagttaggtctgatcactgacgcaatactgaagcagtactctgaatcatctacccaatgcaagggggatgctcaaatatggaatgttcagttctggtcttgagcaacacagcatccagccagaacccttaggtagctttcaggagcctctgctgagactccagccagatttcttagctccttcctcagcaagggtctctacagtgttactccactccaccccccatttctcactgtggacagagagtaaagggaatacctgtgggagaggacccccaaagtgattaaggagtcaagaaagctgccagcttggtttttatttttaaagaagttgttctgtttattactaaatacatacaaagaagaaaatgagaaacgcctcttttgtttaaatccctttaatttttacatgccgcgaattcctttgttgtatgaatgttcctgggtgtagctagagtaatagtgtgactttttttcataattattttctgaacgatttttaagttggcattttttcccaccattactgttagaatgtaccaatatagccatctaaaccacccgctccccttccttcctctgaatccaattttcttataaccaggaagctctgtcagtcttttgtttagctttgtgtcagatctgtcagcagagttgtcattgtctttctttggtgacatttggatccatcaggtatgtgttggtgctcttgcaaactcgactgctccttcttcgcgctggctgatgtatctacctaagctctccaggtcgtctgagcttgtctaaggatagacatttagttttattgattctccgtggttgatagctaggtttacttttgttgtttccttccttgtgctgactttaggttgagtgtgcttctcttccctagccctggttttcccttttgacaagtgaagtccttagactttgtccctctttctcatataagcttttaaatctgcaaattctcttttcattaaccataccccataaattttgcaatactgagttttagtatcctttggttcaaattctattctaattttcaatttcctttttttttttttttttttttttgacccatagattatttagctgtgtgctttttcatttcctgtattttagatttttttctggctatctaatggttattaatttctaatttgattctgagtgattatagagcatactcagtatgtttttggttctattaagtttacccacacttgttctgtgggtgaacatatggtccatcttgatgaatggatcatatgcacttgaaaacagtatgcattctgcagatgttgggtataatgttctatagctatcaattaggtcaaggtggtggagagtgttgttggatcatcttctgtctcaagagatcagcaggtaagatagaaggggtgcttctatcagttgctagagagaggtgctgacatatcatctgtgacttaacattgcctatgttaattgatgattcccgactgtcagctccacttccccttgcgttttgtctgtgtggacttcgcacagtttaagcactctttaggtgtacatttgctagtagctgtttatatgtttcttgatcagtttgcccatttttcattgtgaaatgtcccttttctctggaaatagtattctgaaatctaccattaatatagccaccctgtctttctcatgcatatattattcatggtgtgtagtcccccatctatttccttttaacgtttatatttaatctctagctacatagtcagcttgtagttaaagctgccttttgtattcaatcaaatggtctctgtcccataagtaatgttcagtacaatttattcattgctatagttggatttaatcctaccattacttacttgtgtgatctttgatctccaattttcaattatatttcttcctgctttccttcctttttttggattatcagaatgttatgaaattccattacatctgcaggcctttgagctatgccccttgctattctagtgactgtaccaggaattaccatctggacccttaacttttcactgtatatctagtaatgctgtacaccttttcatccaaggtgaatgtgccatgagtgatggagagttctatgtcttctgtctgaagtgtgcagcaaaccccacaggacaatgttgtgatgcttctattaactgctcatgtgtatgataaggaaatcaaaatccaaaatggccttctacatttaccagacagagtttacaaactctgatgttcctcacgctctcccaaggacctgaggtttgacttgatctaactctccttcatgctgacatcccttaatttcagtcctgttagcagtaatcttggtttctttctacggaggtgtttctatgtcatggaatgtgacaggtgctttggcccatgtggggcattgggttgggtaaacacttcccatgtgagcttgttgccctctgtagttcttcctgtactttcacctcagagttccttaatcccctactggaggacattctcacccactgcctttgggttgtttttttgtttgtttgttttgttttcgggtggggtgatgttgttggttggttggttggttggttgttattgttggttggttagctggttgttggttggttgtttggttttgttggtttgaggcctctgtctcaccaaatggtacaggctgcacttgaacttgcaattcctctgccttgtccaagtgctggaattacaggtacaaactgcgttcccagctcagcaatcatttcttaaagcccagcttggatttcaattatttgaacatagcttgtttgtttcctttactttcttcttgcttacatctatggacttgtgctacttgctaagtctgtgacagttcacccattatcttaagaactcgttcataaacttatccatttgcttaaaagaatgctctgtaaaccaggctggcctgcagctgaaagcagtgcatcaccacgcctggtagggcgattattcttaagccttgctccactgcgacatgagcatacactggtactgccccttgctctactgcgacatgggcatacactggtactgccccccatgcgtccctcaagtgctgttcacttgtttttcccatgtgaattacttaccttgatctgtgtttatgtccattgtccgttgactctgtcatatgtgtcacgctgctaagcccacacagtgcttcattatcatttcttcagcaccctttgtggtgctgctttccctctgttgagatttctgagctcccatttacaagacgtgtcctgcctttcctgtcaatcagcacagtcttgatgcttgctttaaaatcacgggatgcaaatccatttgaattattgccctgaaaatgaatcacattttccattttcctactttgtcccataattttatattgtatcttggacgtaatgaatgagtgttctggattttgttaatttccttcaaagagaactgatatttttaatttaacagcttggctttactcaggctggaaacagtctctaagattgcaatttgaatgttgcgataccatataaaatctttcctgagtgcaatcagttctgcactcaggggtcagacagggttgtgggggaagtttatatgcagtttactgtttaccacaccacttctagctaagctttgtcttctgggtttctctgcttagttttcagtgcttatacttaatttaaattctgtcctttcttcaaggcaaagagttttagttatctattgatatactagcatatacattcacataaaaatactcatttttcctagaaaaggacattgatcttgtgtgattccttttcaagcatttcttctctctagactcattttcattcctaggacagcgccttcaagctaattgttatattttattcaatactttatccaaaatttataattctcatctgctggaggcttaatctaataggagcttagtctgccaatccaaagttgaccccttctcccacaagtttaaaactattagcagatagaaggattgtagacactgtagtggtttgctggtctctaaattccattctaaacttagctttagacattgctttttgtgactatgaggacctgctagcttcagagtcacaatgacaaaattcctgatagaagccacttccaggaggaagggttcactctggatcttcagcctggtcccttggcctcatgcacttaggcagaacatcttgcaggaacatgtggttgatgaatttctttacttcgtggtagacatgaagnnnnnnnnnnnnnnnnnnnnnnnnnnnnnnnnnnnnnnnnnnnnnnnnnnnnnnnnnnnnnnnnnnnnnnnnnnnnnnnnnnnnnnnnnnnnnnnnnnnnnnnnnnnnnnnnnnnnnnnnnnnnnnnnnnnnnnnnnnnnnnnnnnnnnnnnnnnnnnnnnnnnnnnnnnnnnnnnnnnnnnnnnnnnnnnnnnnnnnnnnnnnnnnnnnnnnnnnnnnnnnnnnnnnnnnnnnnnnnnnnnnnnnnnnnnnnnnacccacaccacccccccaaaattgtttttttctttgtagcacattgtcccaaggagctccttctctgacttgagctgtagagtctgttggcagctctggctgcgtactgcaggatcatttcaggttatttccaatggcacctcagactgccctttcatgcatcttggagtacctaaaatacctagcagctgaatcttattgtacccagtgactctggggaagaccacagcacccattgttctccagtcaccttggtacctaaaatcacagaattatgctgagatcctgtgtaagcatttgaccttttaccaccaatcctaagggcttggctgcattaacattgctaaatcgaatgctagggtgtgtggtcaggatgacaaagacattaagtaaatttgctaagttgaattctttgtgattccacaggagtcaggttctgcttgaaggcaaactgtgtctacataggctccaggcttctgagcatccaaatgttataacaccacttgctttggaaaggaagaagatgtggaattaatgtgggtcattttttcagtattttagtacctctgtactctatgggtatacagtggagattgtagagtgtagcacagagtgttttagtgctaccagcccttgatgtctctgagaataaacacgtgttatttgtgttcactagttagagggtttcatgacaaggtatggtcagtaaaacccatgattcacgcatgaattctgtaggagtaagaaccagctaataaaatgtctcatcaatttcttttttctgtatttttgatcatcttatctttaaaggaaagagagatacattaaattccagttctaataatagcccaaatgggaaccaagtacctaagatgatgaaaaaagttatctttcaaaagcagggttttagggtttgctttgagcctgtatgacattgaccacatcaggtcattgaaggaagtcagtggtctatggctcagtgtcatcctatctccaatttatattcactagcagccattaaatgaccagggtggtattgcgattaaggaaatttgctaggttgaattgtttgtaaatccacaagagttgggctctatgtgaaaacaagatgtgtctacacaggctcccgagcctccaaatgttcctaccccacttgcttacattcagctaccactgggacgggtgtgattccgggatgcaagagattgagttacacgccattaaacttccttctatgacctgatgtcactgaagaacatcatcatgaccgacttcatttaggctgcagatacttccgaggcagagctttgcaaagctccacagttgtctgattgtaatgcccctgctctgacatagctttgatatcagcctttgtgcatcagcagggcaccatcagaaactcatacatttatcaaggaagacacaatgctcagaatgtagccaaaaggaagagagtcgaatgctgtgtgcatatctgtaagagcagagagctgtgtgcacatctgtaagagcagagcagtgtatgcacatatgtaaatagcagagtgacgtgtatacatctgtaaagactagaatcctgtgtgtgtgtctgtaagagcagagtgcagaatgcatgtctgtaaagaacgtagcgctgagttcaagtctgtagagcagagacctctgtgcacatctgtaaagagcagcactgtgtctgtggatgtggaaggtagaggttgacatttttctgctgtatttcttaagatggtctctctggtcctgagccttacccactctgcctacactggctgtccagtaagctccagggatccttgtgtcacagcctctcccagtctaagtgatggggacacagcactatgccccactttttgtaggagcgcttacaatgactctcagctcctcacacttgtgtgggaagcacttcacttattaaggatcctctcaggccctgccaggtattttgcacatatattttctgaaataaaaactagaacttaaaacatggacttctgtgatgttgttgaggtaccctgaagaaccagggtccttgtaattagtcacattaatcgtgagaccaaatgtcttctcagcttctactgtgtgctaagggtcgagatgtttacccaggaagacagctaacatggcgctcctgtatgcagccgtaatttccacttgacagagtgtgtgtttgtgtggaggatgtttgcttttcatttacccacttagagctttatcatccttttggaaatgtattgatttattcggtgaagtagaaagggaagagaaagggaaggggctgagccacctgagtggcccgtatacttgccgatttaccgaacctgtcaccagtcctccaccgtgacctctgacagccagtcattctatactgcgaaaggcagataacctgaggtttgcttcacttcacggtctatcaaaatcatctccatttgtaagcactgtggatttcagttttccccccgttttgcattagaacactgcgtgtttggcctctcctagcaagcatgtggagactatggaactgtgtcctctgcgaggaaagatgacacatcgtcttccctcccggcatcgaggcattggaggcaggtgagagaggtctgcactgtggctctccacaggccgctttgccaaagggtaaataaaggacacccatccatcagctttcaagctgccaccctctttccttcccccagcccccatgtctccctgaaaccgggaggagggagcctctgattatttttgcccatttctagcagagcttggcatgaacaattaaatttagggcttccctgtggtctgtgaataacaatgcacagtgctaaccatcagggcacaaaggcagacaacaccgacgacaacaacagagagggtggtttcatttcttgtttacccttcaggacactgtttaccttatcatcactgaaggcgactttctcatcttttggaaatcgctctgggtttgttctctgactcttattctcaaactgtccagtgatggactgagcatgtcagcctgggactaagggatttgcaggaggctccactctcccctacccttacccctgaatatatctgtcagtctgtctgtccatccctctgtccacatctctgtctcaggcttctgtcttgattcttgtctctagagcatacacgctcacttccccatttctcaccacctctttccttttccttaattttcctgtcagacttttcctctctccctttcaacccgaatgatttcccctcttttttttcccttctctaaatttacttcacagcagattgtcttgtagtaaatcaccgaaaacccaaatagcactaaagcattctgatacaacattagcatttgcttaacaagcacaagataaacattaaacaaagaactgcatttctttattagaggctgcaagatacataatccatgagcacaagaaacatgggacccagtggatatgcagatgtgtgttatttcattggcgctgggcggccttgttagaaaaggttttcatctgaaggcttgggggtggatggttgactgtccctggtggggctgtaactagatacagagactgttgcaagctaggctgggctccctggtggacctgctgattggacagcctgaggaaaacttgggaagcatcgggaagtgaactcagtcaccttggggatgatagggtagagccagatgaaggcatttgacttcttttgtgactcccactaaggacagattgccagtgcgatccagcctccgtaactgcaaatcaggcccttcccctatgccgatttcattagaatggccagcatggtgcaaagagggagagaggaaaaaaaagaaagggaaaaaaaaaggttagacacagtaattttacaggcaggcgggtacaaaaaaaatctgcataattaagcagtcaaggctgctaataggggagtttatatgctctgggaccaggcaagggcagcacatatggatatagcgctggatattaaatctacggcatgcagacttacttcagggccctcagagaaaaggctaattatagagagaggaattgtgtttactggtctgtcttgggcaaagatggtgtaagaagtgcaaccaagttttgcagttagacatgaacaggctgctaatagagatatcaaaatatgtgttcctggttgtttcctacctaatcaacataacattatagattctgcggacactgccccagcccccagctccccccgcacagacaaaatgctgggagttacggttcaggcagtcaatgcatgccgagcgccaccaggtcaggctaagcgtgtgcttcctatgaaaggccaccatttaatctagaccaggctctttagcatcaatacactcttctttaggaattgagctagccctgttttaaaattggcagtgctccttggaatgggcccgaagtcaagacttaacccagatgtggagatggtaagtgggagctgccgtgggcaggggtaagccgtgccagcgagagggcaagcttctcggagggctctgaggggatggacattaacatttcataatgcggatcaaaggtactgagaaaacccacaggcccctttgtcacaggcccctaacgacagcctcatccaggagcagagacgatttcttcagattattaaagagatgcatttcatatttgtatgtatgtatgcatatgtgtatgcatgcccctacttatttatttaattccatacaaagagcgttttctgaagaggactggagtatgggccatttgccccaggctggatgtgccgaggcatgctgggttgtttcatgggaccacagcctcctgcagattttctttccagagaagcagtctggaccctttgtccttcaggaagcttcccatagaaaacagcagccctctcctagtacagagcagcggctgtgggcttgggtcatttgtgagccagtcgtgaattccattacttagccctgacgaggaggaccagaggagaatcccactgcctcggctcaagatgtactaaaacctcaggcttatgaaagtaaacagccagatattgggtcaggctcgaccgacatctgggcttctctcagaggcagggaattcagtgctaatgagaaggcatgagcctctgccttgaaaagcgagagtcgcagaggctaatgaccaggcacatgtgcccctgaagagcacgagaaccacatggcacaaagggctgggcacctttctctcgtcccttgcattgttcactggctggccagaggagttcattttcctagcacagctgcctagacatcacaaccattgattaagatgggaaaggccttgagagaccagtccattattgcaggtacccaatgcctgtatttcctacagaactttgtaaatttatatttcctgagcaattattgagttcttaacataagattgatcctcaaaattgtttttaatctggtcccttctaatatcttctaacatttctagaggtcgcaaagaagtggcattctgaagagaggaagcttggactgcccagtgtttgtcagaaacagtgtgtggccaacagaaggcagtagctttcaagcacttattaagaccattctttttatcccattctctctactggagacttaaaaatgtaaaccaatggtgatctggcaggactaaggagagatcaatacctgggaaatgctaggaactaagcaaagtatgcatggggcaggctcagccactattttgtagcttgtcaagggaaaatgaggttgaacaaaacaggcagaaagcagcctgccaagaaaaaggagtaacgtattattgtttctctagatggaaataaatatgagggacaggtctgaacacaaggctgcttttctttttcaactttgaggctggacagaagtcagagaactgggcacaaggcatgtgctaggactgctgggaatagcaggcctctctgctcattgaatcgcatacagggaagacttaaccacaaagcagatagtgggaagattcagtcacaacctccagtccacaagtggactgcacatccatcgtagcccagggagtttatcagaggatctcctgccatacctgcttctctcttccagtgtcattcattcatgtaaaaaccaaccacaggtgtgttgtcaacaactcttggaatcaatcaagataaacaggaagcttgagagtcatttgctgtgtaggggaagatgaaattcgtattgataaaatgagaatagtgctggaagaatcctagatggtacggttagcattcagggcaaagataattctgtgtgaggagcaaaggctggaaatgtaggtcataataacagatggccaccctttccatataaacttggtagggatcctcatgtctgaaccgaccttctgtgttaactcaacaagtgtgcatgatgtgtgtttttagttaatgctcagccctggcacacacacacacacttagacacaaatgcagtctcacacacatacatacaaattctctgtgtctctctctgtctctctctcttacacacacaatttggagaagaaggaaggaaaaaaatagtcatagctgctgttggctgtgccttcaggggaggggcttacaaaaggggtaatttaacagcatcaacatcttctgggtattgttttaaagcttatcattaccatatgcctagacttctcataaatgtctgggttacatttaaaagctaacaaaaggtctttgctgcttttccccaaatgatgccacatggtaggagccaggtcagtgtgcaagcctcagtgatagggccaggaaggcccttctcagcaaacagctggggctgcggcggtgccaccagatgcatcctgctctggacagttcctgtatcagtgtctctaccctgtggctactgtaacaggtctgccactcaagtcctaaaaactctagagctgccttgaggaggctgccacctggctacagaggggacagtggattttgtgtagccctgtcttctgtccttctggtctacaaccacactgtaatcccggaccctctctgccccatgaaacctagctgtgtctccctattttgactgtatgtggcgtggaggagggaaaatggagagatgaaactaacagatgaatgttaaggactaagagcaattataaaaatactccaatacataaaggaatacttgctcagtgcttagaaccaacaataaataacactgactgtagtctctatagaataggcacttgatagattagattagattagattagattagattagatagacagacagatagatataatagatggatagatgaacagacagatataggcaaataatttcatttttcataattgataacagacaaacagacaatttcactcttcgtacttgatgttgcttgaacctcccccccacccccactagatgtcctaggtacttgttgttcccatttcattaatgtttcagctaaggcatgatgaaggtaagcgcacaagatgacaacagccattgatcagcagagttgggtaccagtgaataatcccaaagtctgagttgcttaatctccatcaagtttcatgaagaaaggcctgtgtgcaactgcctatcacaggctttatagacactgcgttaccagctacagtggcagttgttttaggcttgtggtagaagtctatgattgcccatgtgcacatgtgtgtacggttcctcagtgaagcactaggaaaagtgacagattacaaaactgaacctaggaataaccatagtccaagtgctataagaacccaaaccctgcattagaatgaaaggagtttttttttagcatattgaggaaaataaaacagtatttgaccactcagtatctccatgtttatcggagatgtacatgtaagcaaacaggcaagtgggctgaattgcctctgtgaagtgctttctcctgcgcttgggaagagagatgtgaagtggaaaacacatggtggatgctctgagctgccagagtgggagtgcacagccgcagcaggggaggtttcggggctgtttgtggattgttactattgtgacttaggaaagaaagcaatgtgccaccgctggccttcattttcaaccattttttttaaaacatcaattaatgcaatcaagcatagtgcagggaaatctaactttttatttatatttctcagggccagggagggtttgtttgtttttattcaactgcaggccttggagcagcacggtctatggttttcatggtattttccaaatcaactcagtaagttatatttaacggtctatgtgaaactctccgcgtgaggaagagaaaactgccttgtaactggtaccatttgtgggaaaacaaacgagcctgcctagtttcatgcagcttgaaaataacagcatccttggttgtagaaacagattgtttgttgttgtaatgaaatgaatcatatcagttttcttacccacaatagcaaaatcgcaagatgtcatttcttctagaattaatctgattctgcagtgccacgtgttcagctaattttaatgaattttaaaaatagaagaccagtgacatgaaactgaatatcatatttttgttctcaatttaactttagaaattgagatgaatgaacaagatagccaggaaggtgtaaaatggcagggtgcttttgagagcattgttgtgtttcactgagtcaactaaacattagcacttgaagctactcacgggtgtcctgccttccaccccaagcatcccaggaaaccaccactgatgagtttaaaaaaaaaatcttgactgcaaagtgacatttgcttatttttcttcccctcggtctagggcctaaatgcagatttgaaccatgctttaccagtaattactggtgtggctgagcaaatcagtcatgctcttcctgggaaacaatctgtcctctgaagattaactggcatttgggtttacaccctgccctctgccagcccaggtacacacttagagaagaagctgagtttgacttgtagagaaattgtattcagcatcttgtgcttaaaagttgtgttggcctcccagaagactgctgctttcagtagatgagattatgtttagaactaattgagtggctttgggtccagtgtgacgactttgatttggaatttccctgatgttaccacattaatgataacagcattgttatctccatgacaaaggagatatgcccagattctgagtcctgtgtctctcctgtgctgctgccttctcctcctcttcttcctcttcctcttcctcttcctcttcctcctcctctttcttcttcttcttcttcttcttcttctttcttctttcttctttcttctttcttctttcttctttcttctttcttctttcttctttcttcttcttcttcttttcatctgcctgggctttccttttgagagttaccctatgatgtcatctatcatgtgggttggagaaggaggaggggactgctagacccatcagtctcctaagaaaacaattaaattgagtaggattctcttctctgagactcctctctctctctctctctctctctctctctctctctgtcatttcaccttcccttttccccttctccctctctccctctgcttgtgtatgcttgtgtgtattcatgttgggtgagtatagatatcacatgtaactggctgtcctgcacatgtgtgcaggtatgtgaaggcccagaggaaaagctcaggtatcattcctcaactatgccatcttccctgttttccaagctgggcagcaagttcagggatcctcctgtctttacctctcctatgcttggttgatagtgcctgacactatgcctgccttgaatgggttctggggatgcaaaactgtgccttatgcttgcatggcaagcctttaccaaatgaactgtctccccagcgctattcttaattctttgcagtagttggaggcaacatttaactaagctctcttcctattcctgagaatgtattgtcatagagtagtttttctctcaatatacttaggtatattcagtaatggcgattagtttaagatcgactgaaaatattcattcagtttagttttctacacatttgtataatgcatgtaatctgtatttgtgactctggtttgaatgtttggactgccttttcgccaaccttcaggaatatgacaattctgcttgttagtccagttgaggtcttaccagaagtattttgcaccacaaccattctgccgccaaattgcctaatggaatagctttcctttgagttgtcaggtgtgagaactctcatgctgatccctgtctgtccaagacttttgtcatgtgcttttccaagaaggaaactgttaagccaaccaaatatggcatactttcaggaagaacctgaacttggtggttgctaacacccacattcttctttagattgcttaagatggcattggaattctgtgctgattgcacaatgcatcctgagagcattgtggagcccataaatatatatataatgtgtaaggccatcaatagacagtttagtgacattatctcaatagagtccctccttatgtgtggagattcattctctgcttccattatattgacacagtatacagtatttaaatttttaagacagatcttgaatgagctgtttccagttttagaaaaattgtaataaagagagtggattaaaaatttattgtgcccaaagcatctttataatttggcattatgatctgagaaatatttaatagctttgcagaaagtaatataagaaattatatctaagaaagagctactcgtaattatgtctctttcttcactgaacagattaacacttgtaaccagctaacccgcgctttctggtgagctctagtcctcacagtctttagctttagtttttgagttgagaatctgtccttcctctcctgcctgcaccaccctgcaaacaccactcccgcctaccaccagctctgtcctgtacattactcttgactaatggaaacagcagaaggaaactgaagttagtatgagtcattattatgccagtaataacatcttgccttcagtatggagttcctaggtatgctgtgcactaattttccttatatacgtgaaccacatgctttaggaagtacatgtattcttggtatttgcccaaatactcagtttagaatgattcaagtacttgagcaagtacatgtaggtatagacattcaggcagtctccacatccaagtaattctaattctctaaaggagacctcgcgctcagcttccacagagattcgagtaacagtttaaccaaattgttactgccatttagggaaaacacaagatttgcccgctaattcacaagttgtacagtcagaaatgtttctttcagagtcatagatcagacccggttggggaatctggaggtgctgggggcggggcagagtatggggcagaatgagggtgggagatgacacagcttcaactctccattatcaaggttttctgttctcccacaggtcttacctactagatttcatttctggtaggagaaaggggactcggagacatggttgcttaggacaagtagctcagtggggccacggagcatagaaatatcaacagcttttgtgcacagcaataatagaattagaaccctagccctcaaccctaatcctagcccctagcccctagcccctagcccctagcccctaacccctaatccctaatcctaacctattgtttgataaacaacacaaacttgtctacttaaggagcagagattgtgtgtatgcctgtgtgtgtgtgtgtgtgtgtgtgtgtgtgcgcgcgcgtgtgcgtgtgcgtgtgcgtgcgtgcatgtatgggcataagtgttcacacatggatgtaagtatgtgtgtaagcatgcatgtgtgtgcatgtgtgtatgttgtatgcacatgtactcattgtatacaggtgagtgtgcatacacccatgtatatgtaggagaaaggcagaggttgatgtcaggatgtgtttctctgccatccttgtctttattttttgaagcatgaggtctctcactgaacctgaagctcgatgtttcagataagcaggctatcaaggcccctggaaccatccctttcttcaccatcccacatctccatccctagcactgggcctggttataatatagatgctggaaataccaagccaagccaagctctaagcttgtgttgtaagcactttctccaatgacccatcttcccaggcctaaattcctttttttttttttttttttttagtaaaggcttagtgaactgttggagtcctgggtttctgggtttggtgatgtttagattcttttgttagttcccttcatgggctatactagatattgtctcttgcttcaataatttctcatcatctagacaagtctatacttgtccttaaggccccttccaaccttggaatctcccattttaactaagtagatgagttgattctcttagattctccaatgctttcctaatttactgagtaaccaagattttacttcaaaaagcaaaaatgtactagagtctctcaaagtccttgagccagcagctgatctattgtgaagtatttattagaatatttcttagtaaacgtatgatggcaaagaatttctagccaactatgctctgtctttacaattctatttgacacattgcatttctgatttctctgagcactgggaacagtccttggtttttgggaagacactaagcaccttagagtagttttatgtcatcctctatttttctcaagtataaaagccccatctaggacatgacctgcacaaagatactgccgtggattcccatcccacacaccagttttcttttaagtatgtggctgcagtattttcctttgctaatatattttgacatctccttgttgtaacctgctgttctctttaattgcttattgttattaattatatagtggtagcatagctggctgcttgagccacttggctgtaaagaaatccattcttcattattgccgttggagcaacagaaaattgccagcattctgcccagagatgaatactgtgtgctcacatccagtaacacctcccagtctgtctgtctgctgcagctctcatctgtgccggagacacctctctttgctctaaccctcttgttttgttcatttctgtttaactccttggtcacctgccttcctaatggaatggatgtgttctctgtactccactctgtgtcctatctgagtagccagcttttctttcctccccatccccggcccccaccaactttccctctccagagtttcccctctcacaactttgttacatatgcgtctcaatttaaactgttggtgctaattgggcagtaccttgacccccacctttctgaaaaaagagatcatgagaccctttaaaacaactctaaccccccttctcctcacacagtgatcagatgtacttagaattgaggatatgaatgtatgagtgagtgagtgagtgagtgagtgagtgagtgagtgaatgaatgaagtacatgtgccaacctgaggctgtgggattacccacatcctgtcacgtctgacagctgcagcatcttgaaatctagacataatttaggatatccaatcccacagctgcctgtgccatggaacaaccagaccggtgtgcccctctgccttctggcagcgtgacattaaattcacactagttaagctaacttaaattgagcctccttgaaccttcctaaataaaactagtggccttaattacaatcaggcaatttaaaggttatggagctctaactagtatcacagtatatcactttaataatgcacaggaaaatttctctgaggggtggcctcctctgattaggagaaagcaggcttcacatttccaataaactgtttttagaaatcttactgtgtttatggcgcattaccttcttctgttcttcaaggccaagtttctgaggtcacgccaaaagaacaataaaaattccactcatttgcaaataccatacaggactgtgactttttcctccacattttcttgcttaatggtttgcctgccaggaggaagaggaaaacccatccccttccaagcacttgtgccatcacagacacaatttgtagtttgggataaagttagattctaaacaccatcgtaaggcaaagatgtcagctttgcactaagtaatcaatcagagagtttcttatgaaatagtttcttacaaggacaattagcttcaacaatgccaaagcagaggccagagagatggctcagcagttaaaagccctggctgctcctgcaaaggacccaggttcagttttgaatggcaacacggtgcctcacaagtgtctgtagctccagttccaggggatcggacagcctcttctgagcaccagggacaaggcacgcgtgtgatgcatggacatcacacgcaggaaatccagcaaacaaagtaaaagcaattcattcaatgcggctggagcgctggcttagtagttaagagcacttgctgctcttccagagaggagcagtgtttgctctccagctctggtgtggctgaacattcacctgtaactcccacttcagatggcacctgtactcatatgccacacacctacccacagttgcacacacatgcacataattaaaaatgtaaaaatgccctcttaaaaatgcccacctgtcttcattccttaacctgagggtattcaggaagtgtttgcagagactgtggtccctcgcttcatctcctttgtctggtttatatttctttttctgtctattttgtttttaatcatccgcagtaccaggctgtgctttctaacaaagacaaacagcttttcagtgtttagagatgttttccacatagctagtggctttacgccaagcagcagaagatttcttcttcttcttcttcttcttttttttttttttttttttttttttttaagaagcataagaaaaggccctgacccttagcgcaaacccaacacccaggcactgcagaaacattcctgatagatgccgtttctgcccccagttgccacggctgcccactgccatgtgggtgagtactgactgctgcacttcttggttctcaaggatgttttccccacagatttcacaacccagcaggttgcatttagtttattatgcatgaacccttccaatgttatcagttatgttttaggcttgtttttttttttgttgttgtttgtttttctttttccctttcctttccttttctgttttgctttgctttgctttgcttagcttggcttggctcagtgcttgaaggtgaatttacctatgctgctacaacaaccagaagacctacaggcaaagacattgataggaatttgatgtcaaacaagagaatctgcgtgcaaacggcatgataaatccatatgactgttttaattaagagaatggcacattgtattttaggaatatcaactgttgggaaagcttgtttagaccctggaagatagcacactggttcttttgtaagcatgaggatctgactttagaccctagaacatatgttcttaaatagatgtgatggtacacccttatcaggactacagagctctgggattagctggccagccatcagtcctgttgttagtcagaaaccctgtctcaaagatcaaggtacatagagttcctgaggaagccaagggtgacctctgcttacactcgcacacacacaccacacaagtacacacaaaggcatacctgtacttgtgcacacagatatacacttgcccatactaacacacaccacaaaagaaaggatccttgtttttctgtcatggaatatagtacagagacttccctgtgacctatggcaaaaagtgtcctgtttatgtatggcccatacatatggttgtcaggttgcagcatggatcactgaatcaaagcgtaccgtgcccttctgcatcttgcagttttgtatgaattggtaaaacatcactcccatgacgccttagctggaagatcccctcgctcacaagagtctctcctgggcctagcaggaaaatggagaagagcattattgagtagtgaagagccctatctctgatttcacaggacaccaaactcactctgcaaaatgcaggtcagggttttgatcttgtacttgtgcccttaggcacaagagagagatagtgacagagagagagagagagagagagagagagagagagagagagagagagagagannnnnnnnnnnnnnnnnnnnnnnnnnnnnnnnnnnnnnnnnnnnnnncttaaaacaaggtaaagagaaacttttttcaatagagagtttttttccagtatccttcatggaaactggatgttttccacctgatgcagaagtagacttggccaaagctttgtaaccagaagcaggtttctgagagcaggaaacatttctgcaaacctgtcaggtgcctttcaagcttcgctattctccattcccacttctttccttgcacatttgtttgcattgagcttattttactgtacaactgtgtgggtggggccgggggggaagatgctcgtgagtgaggagaccagaggtcagccttagatgttctccaggaactagtcaccttgtcctttgaggcagggtgtctcactgggactaagagcaaactggcctgtaaactttaagaatcacctgtttctattcccttagcactggggttacaagtacggtctagcacatccaatgctttttaaagaaattttaagtctctgtctgtctctgtctctctcggtctcttggtctctctcactatctgtgtgtgtgtgtgtgtgtgtgtgtgtgtgtgtgtctgtgtgtgtgtctgtgtgtgtgtgtgtgtgtttacaagagttcaggtgcaggtgcccactgaggtctcaagtgtcagattacaaactgttgtaatcctcctgatatgggtacaagaaattgaacccaggccctctgcaagacaagtatgggctcttagctgccatgtcctctctgcagccctcgtgcctgccattgtacccggttctgggaaatgaagtcaggtttgctcatgaagcaaacactgtcaggagctgtttccaggctccagtgtatcggataaggagtgtgtcctgatttcttcttagcttgctttagcgtgcttttgtgggggcggacggagggagctcactacaaagctttcatggggctttttccagtaacttttgctgtttaatcaaagcatttaagagtaaagttttctccctttagatctcttttgtaactccatgtttgcaccaagactttggctgtgagacccatgtttaaatacacaaagaggaaaagaaatcactggcaaggccagggcatcggtcaggttgggaagtgatctttcttggtgtgcttgttcttggcccccatttctgccaaaacagcactgccaagtgctgagtacggcaagctttgagcggagctcccgtttcaatgtttctttgttttgttttattatagtttaaacaacatcccaatgttttcctcctccgtgagaatattctaattcgtgcacacaaatggtaataacagccacgacattggacagcattgcatctcagagcagctaaaatcccccttcctgccttccctgccccatccacctggaccccctgcgagtttccaagctgctgatgtttatgggtccctgggcagcctctgggctctcgaattctgctgggtactgtgcagcctacccctgttgaatcatttcctgctcccatcctgctgataatgagaagttcaagacaggaaacaacagtgtcagaaccagtggctttgcttaaaaagtctaaaagtattgcaatgtttagactactggcaaacaaacaaacaaacaaataaaatcctcaggcatgagtcccacggacgcttgcaccttgcaagtctcctcgcagtatgatgtggcttagacataagggatacatagtgttcagctctccttgagacgcccgtggcttaggtactttgtgcatagaagccactggtgtttggttgctcggattctccaggctctttcctttatgtgttgtcagacgtcctgtccttaatatttcatgccctttctcaatggcttgggaatactgacagaagcaaatctcaccatattgccagtgaaaaagcgttctgaaagtaccggtcaggcaatgttcattttcatcttaaattgttccacagaataaataaggccagaacttcctaactggtgtgacggaaaaagaaacactcatatactgttcggttctctcctattctgccttacttcaggggcttaatgactaatctaccagcggacttgaaagcctaggccgtattctccactgccaaattagcaccttggtgtgtttatgttacagttgtgaaatatgtgtaatgtgtaatgcaacaaattattgtggccagagtgccagggacccgagaaagaatgggatgactgtgtgcgtggcaaattgcagttctggctgcctatttttctagccctgatttccagggtgagcctgtttagccgagggctgggtttgtcatgtatgcctttgctttgttagtcctcagacccctggcttataaatgtgtgcttggaaattaactcagggaagcagcaaggcgaagcatggtggggcgacagcgggtgttgggaattggtctagggcatggttttctcggattttaaaaaataatgtgtgtaagcatagagtggtgcgcacatttgaactgggggcacaaattacaacttcggggcatctggtttctctgcttggattctgagggctgagttcacgtcctgtcaggtcagagcttttcaaggatagcccctgtcatgtgataatggggcatggggggtgattttagcctatagatttctgtagtagaagaatgtgaaaagaatccttccagccagggtcaagggtaaatagaagagttccccttataaacccttacaaatcggccctcagcaatggtcctggtatcggtgagataggtaaaccaggttcccagaggtttctaagataccagcagcatgtaacgcagccactgaacatttgcttacaactgctttagatttttggttttttattggaggaaagggggtataaactcgagcacatggtctgtaagctgctgaggaggccgtcattgtgtaaagctcattctaaaatgtcagagtcctgtgttagactcacagtggccatggtggaacctataacttgaggtgtgcttgagcagccaaatggtgactgttagatctttgctgtggcacaactgattaagagtcacgtgggtccaggatagactttggagagaaagaaacacttgcctttgagctggctctggttgagaatggagtgttttcttggagcagaaagttcactataattcttcctgtttctccctcaggcaatgaggtagcacagcaattgcatatgcagaccccttccttggaacgtttaatgtgggaataaatatttacatgagtatgagactcttttgtagacttgattcttgtttacatttatgttccaggttacacaaagattagcaaatgaaaataattgttttagctccgacttctatacatgtgacattatttctcaattatgcttaagcatccttggtactaccttgcactaggtagccagcatcagcctctagtatgtgctcagtaaggagaaggccactctgacattttacccatgtcactgggtacccacacaactgccacagtgcaagctttggggaagctctgtgccctgtgaagtgagccaggctgaggctgatccctcttctttggctgactaatttgcactctgtggtcttattttccctttcctagcactgatttacgctgtcatggtttttagactagaatatcttccagtcataatgtgcaacacttgtattttttttttagatgccatcattttgcacattttctatcaaccttttagctgtgaaaagtccaatgttgtaatcgatctttattgataggacacagaaaggccccttctccctctccctcccctatcaccctccttcccttcctccttcagagtaacatacagagataaactacaagtattgtagaaaatctggagaatatagataagcagaaaacatggatggaagtgtctagaagtttcatccagagatcccacctataactcttcataaaaaaatagggctgtgctagcctattatagccttaatgaaatattgtaatggttattaagtcaattgactctgaatctctttttaataaatgaggcaggctgtattatccaattactgtcagctgctacctttccagagagaagaaatggtgattttgattgaatttttaagctctttggcacctttaagggggaggaagcaaggtgcaagttctggcttcagggcacatcccacttgaaattgaaattggaggtgttgctagtatcacctcatgagcatcagctgctggaaggaacagctttttgcaaggaaatggcctttaatgcagatatactcctctacactataggttttcagctctttaacagtgagatggagctggtgaccacatagctgaacccagaactcacgagggcaaatacagcagggcctctaaatgaagctgcttttgcaattctccttatcaaggagttgtattggaattctcaaatctctgtctccccttcttagtaaagaaagaaagtgtttagccagcagtagacatagttgtttgggtccctgtcttgacttcctaggctcttgtgtttggattattgcttctcagctggtgatccagatttggagaaattgtggggactttaggacaaagaacctaactatgagcaatgggtcactgaggagctgggtcactaccaccagctcagctccagccagagcctctacttcctgattcccccaaatggaatcagccagagcagcaagcttcacagaccctagctgtcttggtttctcagttatccactgtgccccctttaaaccacgatcacccctggagctgtctgcaggtcacgtgacaaatgagaagtgtatttaatgcagcccttacctgcttgccctagagccagccctgtgttgatgccctagagctgcttgccctagagccggccctgtgatgatgatccacagtgaggaccacagtggggggtggggaggaggaactgtgatgaggggagagaacaaagggacaggtaaggagtcttttatttgtttgttttgggttttttttttttgtttgctttttcgagacagggtttctctgtgtagccctggctgtcctggaactcactctgtagaccagactctccacaaactcagaaatccgcctgcctctgcctcccaagtgctgggattaacagtgtgcaccgccaccgcccggcacgggtgaggattcgtactgtctactagaacatcgattctggatgaggtggctgaggagtaattgatgtatttttctcctagtcagataacttggagatccatttattggggaaaaaaaaaaacctcactgtttaacctacaaataggaaattgaacttgcaatattttttcaatagtgtaatgtgctttaaaactgtaaaaatagctctcaagaatgcttgctatgattgctgtcatgggtattacttaatcagtccgcaaacaaagggtagaatctgtgaagaatgagtctgcgctagtgacacagaagtcactgcacgactgactgtcgccattcttgtttcatttgactaaatttaaattatttagctttggggagactgctttactctgggctagaaaaaaagagaagatgggtgaggacgtgtttcttgcactcaaacacatcttttgttttgttaattttacatacaaagcgtgagtagtcaaaagggggactatcacattcaaaagcatcttaacttgccgaattccctttatgtccacacacacagtcagcctgttctcaatgaaagactgcagcaagactggtcacgtgacttaacaggctgattgtcaaggaacccaggctccatacaagcctactccttggctctcatggacaaaaagaaatgggaaggaagaaaagtattaattgctatttttcccgaatgtacttattggtcacaatgtgaaaaagtagacgtaacttttaattggtgttgtaacattaaaacttaaatattctcttactcttcaacatatagttatacagtattcaagaaattttaaaacttggcaaatacttctggttatatttgattcagttctctgcaataaatagtgttctttatatctcttaatgactgaaatctaggaaatttttggtgactttaagatttaaaagaaaagaagggaattaaaaaaagaacaattgatcttacataatccctaaagctttttgtataaccccttgtcatgtcagtaggcacaattaaacttcttcttacataattataatcaaggagtttgctgtgccacccaaatacagagtgggtttttatctcctgtgaaatgtagactgtactgggggcttaattagtgctttgagttctccttgtacaaattcttgtcctctgcttctgaagactcacacttgtgtgagaggaaagattaggaatacaaatagcatgatttcactcctagttagctaataacaattccctttgtaattggaccttcgtactgtcagagctcaactagtgaagcacctacacggagattagcctttgagtggagggaaatgcctttgttttcagtattttggtttaaatttgctgttccctgagtgtaaatatatctcctgctcttggtcctagcatgtctacctcttatgaacatctctaatttttacagatagaaggtagacatattgcctaataatgggaaggtcagagtatagcctctgacccttgctcttcctaacaagtcatcttggggatagcaggtgtgtggcatagcttgtttataagttcatgaacccagagacaaaactgccgatgtctaagttctgactcctttaattgttagcctctctgactcagagaaaagttctacattctctggatcatgcctttctcatctgtcaagtgggcataagaatagcattactcatgagttgttgcaaggttgcatggattcacatttgcagacatgtagaacagttcaggaaccacagaaagctggatcgttcgccaggctgtgctagttttagtgaaggcaatgctccctcgctggactgggaactcttaatacagcaattgtcagccaatcagaattgttcttctaccaacttctgatgtctaatgatctaaaacttgtcaaaagtgagccggatctcagaaaagtggaaatgagatagacaggtgaagagaagcctgggacaaaattagacctgtcaagcaaagctaaacgaacagtgacctggggttggatatgatgggctaggactgagaagcagagggaagaacgtccataaagtgaagcgttctgctacagactcgccagagcaggctgccccagtaaggtctgtttcagaagtgtgccacagagatcctggggtcaggggtggaagcctctctctacagtcttccaggcaacgcagagaagcactaaagaagaagccattccactctcctattggttctttattttaggtctttggaaatatagagcccataaaatcatgatcattaaaacagaaacctttgcatcgacacactaaaagcctcaaagtaaaatctgatttctgacttttggcttttaaattttaatttttttgtaaatttctataaactccataataatgtaagaaatcactattacacatatacggagcaggcattacagggtgtgtggctacacatgagtctgcatctatatttggctatagcaagggcttgcgatgagaggtatcctggctctatcacaaagacggtagatttgacctcttctgtcaatgtgctttcctcaacagatgaagggctgaaccatgagtgcaaactctgcagccagacctttgactcccccgccaaacttcagtgtcacctgatagagcacagcttcgaagggatgggtggtaccttcaagtgccccgtctgtttcacaggtaaggaacttcttaaagcaaaatctcagcctgtgtgtgtgctgaccccactgtgtccttcctccaagcgtacttcccactgcttggccttttacagcaacgactgctgttcaatttgggggaagatgtttgatttctgctgattagcattattgattgcagtctgctttagagactgagccgggcgggaaggttaactgtcaggatgaacgaatggcatttcgagttcttgcccaagtttacactttcccactcggaaaaagacatccactttgggttcactcctcttcctctggatgttaaaaggttaccaaagtctggctgcttttgagtcactcgatattcaattaaaatatgtggtcccagtgcccccacatatgtgacctcaacctggataattttataacttctttataaaggtgtgtgtgtgtgtataaataaaatacttctttgaaatagtatacagattagagatgtttattttttgtgagattggattttaaaagttgatagaaatatatgatcctagaaaatttgtatcagatgttacagtggtacagttgtcagggttaaccacacacatgagtgtgcacacacacacacatattcacagaaacattaacacacagagagaaagagagagacagagagagatagagacatacatacactttagaatttattcctcaaagcccatgagcgctgaaatatgttcacacattttctgctgtcaccctaaggtcaaggctacttatgatcctcagtgatcatctcacctgtgtctggcacatggtggccaagcacatcaatggaaagaaggaatgtgtagatatcttgacctcaaaggaaatttctctgtctgcagattaattagttaccttcactgaattcagcctgtagatttgtattctatataaaatgggaacatgggccataggccctcgtacctctcactagtaacaccctaagtatgtggatgactatatcgttaacactggccttcacgtactcatcccatctgctaatgtttctctctgttgagtttgtttactcttccaaatttttattttattaaagctattgttaggctctcaccatgtatttaagatgcacagagtcaagagtcaaggtcctttgtctaggtacctggtaattctgtttaaaagaagagtaggccaaaggtctccacaattaaatcttacaataaaatagttctttcgtgttgtagccagagccccataaaatataggatgttatatggacataagttgcaaacctggataaaatcccatttctttttgttgagctagtaaggaaacaaagccacatcaggaaccgcctggatctctgtacaaacagatgtcaattgtttgattgtatcttggagtcatttggaaataacaattaggaaaaataaaaccttccaatgtaaaacatgtcgggaaaagaaaagctgagaggtttctttaaggtaatgagaaatgttattaaaatgtatgactcacaagaacaatactgtaatatgatgttaggttggctggcaattagaataattttaatgatcagagtggagtcaaagtcaaatgccagcatctttaataaatcctctccctgcctatacagattaatattgtagatgcaaacttttttaggtcacagtgcaccaagcatccgtcagaagtcagctctgccagcccaaacagcgcctctggcatatacaatttaattattaatagtatgtctcctaggtaaactgttacacagtcttagggccttgttttgtagtcattaaaattgaacatgtttatattattgaaacccttgcattccatgtgtaggccgagttgatcttaaagtatccaaagagaatttacctgccgttctgttgcacatttatagacagtgccccagagtagctgtgggatatcatttttagcattaacacatttaaatagagaactgtttgctagctataactttaggcaaatacaataaacagggattgagcagtcatgatttcttaacctgtgggttgctgtgaagtaggagtcatttcttatgagacagagctatgcatttgacacacagcttttatttgcaaagatttacaaggagcagggactctgtgaaccattactctttgggctgagctaggtgctaggtagagtgcatcttaacggaagccagagatccaaccatgagcagctatgactcttactctccccaggggtcaggagccaggcatgcctggaggtgtgcccttcaccctgttgtctgtgtgtgcagaatcatgagcacaggatatagcggaactcagtaacccaagctcccatctctttgttatttcagtgtttgttcaagctaacaagttgcaacagcatatattctctgcccatggacaagaagacaagatctatgactgcacacaatgcccacagaagtttttcttccaaacagagctacaggtaatggcctggtgaggaaggctgagggttgagcctacttgttactcttatgggacattttaactatggactgagaatctctcttcccctggaccaccatgatgttcttgtgtttgggggcaaaggggaaattagagacaagattaatagacaccaaaataattttgcctctggctgctgtcaatcataaaaagaactagaagagaactgtaattggaccttctgacccagtgtgaaggatgtaggggttgggttactgcactgtgggatcattcccctcacttgtctgagctcgctctcccaagccttgttttattcatgttctttccccctgggagccatgctggatggatagccagccatcgttatccagaaggttgaacactggaaagggtcttttgtccaggatgtatttgttccacatcaggcagctgaataattagtactgaaaccacagctttagagttgaagtctgggcaccccaaaaagttagcttggaccttgggtgtaccttttgttagatgtaaaggtccacgacttctctgaacctcaaatgtgaagaaaaagaaacaaactttatactcacaggttgtcataaggtgaacataaaattataggtataaatataagctataaaacaaaacctatggttgcttgaatgactttcagaaataatagttaaggagtcagggggctgaggctgtagctcagcagtggagtacttgctgccatgctcaaggcattggattaatccaggcatcacagaaaatgggaaaaggagagagaaaaagatccaaaggataagttgacacatacctataatcccaatgtcacaagttcaaggccagcccaacaaagaggaaatacaaggtcataaagacaccaaaaaagaagtaaaaacaaagacaaagaaacatggattctattccagaaatttcatttagaagaacataactttttcaataccttttgcatcttaaaaaaaaaaaagagtaagaatattatcatgattaaatttttttaaatcttgctggttcctatggaagaaatggagccacatttgaaatctcttattatgaatattactggttattgtttggcttgacatggctgtgggcttggtttctacacccagagccaagaccaagcaatacagaatttatctgcactcctctggctacctctatggtatctttatgcccaagaaaaggggaggttctggtaaggcaagatttaaaggagctatgtatatcagaataaagaagctatggttattctactcagttattgttctaagcaactaagttagatggaatttaggagataaatgaacctactgaattgtattattgttagtggaagaggactaacatctctttttcacattttgttcctttgaaacactggatcctatcacatgtgtctgccaataaacatggaatacagtccaagtcatacttttcctatttcttttttttttttccaagacaggtttctctgtatagccctggctgtcctggaactctgtagaccaggctggcctcgaactcagaaatccgcctgcctctgcctcccgagtgctgggattaaaggcgtgggccaccacgcccggccccaagtcatacttttatcatactaaaataaccttccattcttgctttaaaaaaaatactggttttattgcaacttgtgtcagagaaaagatcataggaggtttggttgttctggcttggtaaaagattagtatgtaaaatttgaaacaaatgaagtaacagtttaggatgaaagtcataggctttgtgcagagactggtgccaaggtggcatctaaatgtttgtatcagacttctacttgggcactgtatgcacagattccaacctggtgtgtctttcactgagaaagcttatagtgaatgatcattttaatataactatacaagaaattaataaggcagctgtatttctctgttcctcaatagtgacacaggtactaagatttattttcaagcttcacctcaatatcctggcagtctaccttataatcccctaaactaatctagctacctcccagccaacatcccaataatacgtgcattgagggcacttccatgatccaactgaactcttaccaactccttttgccctgcctcaaggctcaatctcctctcttccccccccccacctctctctctctctctctctctcccttcccctcagtggtggaagtcccaccctattctcttttctgccatacatcgggtattcagctcttattgacgaggcagagaatatatgttaagaactgtttacataaacttgtgacaggaaatacttgacataagcattacaatgtgctgtcagattgaaacaatgtatgggggtgggggacagaaatcagcatttgaataacacgaggctaacctttacacagtgcacaaaacactttgtctacagctcagcactgtggtgggagtgatctgtgacctactctagatcagacacacttaaatgcatccttaaagacaagaggtttcaagaaacatacagtcttcactttcctgcagttaaacagttgttctccagctctctggtcctgggaatccttaagaaactacttgaaaacccttccttgtaacttgtgcgttactatctattgatatttcctatagttgtccattactttccctaacttcaagataactgtattaaacaggagagggggccaggcagtcagtacacctccttgtagcctcttgaggtgaggagatattttttatacaaataatattaaatactataatgaatcgttttgaccttacagataaccaacaagtatctcagagaccacaggggtccctaggaggcagatgttctcgaagacactgctctctctacacccaccctctggatctttgtggccgtatgaaatcagacttaagacgctaactcagtcactgaaactaggatgtgagtccagagctggaaaagatgtatgtctgctcttgacatcaatactcagcttctgtgtgtaccagtccttacatgagaatagtcccgatggctagtaaggataattgttgcaaatctgagataaaatactgactttatattcagtagtttggaaagctgtaatccagtcgtgggaatatctgaaagtctgtgctctaaaatgctcagtaatagctgtggctctagttgtagggacaccaggagaaaacgggtcagaagttgacatttctgagttttgatggtatctctatatttttacatttgactctagaagttcatgcatctattctttcagcacccatattaccttagaaagtgaaaattgtgtgtttttaaatggtgattaacttcctgtattgaaaacagaaagcaaagttcctctcattgccaggatgcagggtaattgaactgaaattaaggtgacagtagaaatactgtcctgacaaaagcatgcagccagtgtattgggctgatgccctttgtaccttgatatgtaaaataaatgtaaattttaggccacttgaacctacctagatttttatggcattaaagttatgaaggagtgcatgaaattaaatctccaagaattgaaattatgttagagatcttaaatcattcaagttctctgcctctaactgcaggacaggaacactggggcaagtgtagagtaaacattctgagttgctcactaaccactgtggaatgtcccttagtggtacagaaatgatttttgcgacatctccttcactctttcacagttgaagtatgaaaacagatttggaaaaagtcattactttttagatataaaaatctaccttcatgtatgtttctagttatccttgtaaataagtatgtttcatgtgtgtgactagacaagtaggtaactagtggaggagccaatggtaaacaaagctgcatcccaggttgttgtgtgagagtgcagttacattgacacatctgtatataaatacaaagcgtggtgtgtactttgactcacaatacatacaaagccaagtcaaatgtaagtcattccttgtcactttgtttagttaggcaacatgaaccatccttctctggagtccccttgtaggaccagggacgtacactacttggtaagtgtgaaggtctttggtcaaccctgttgtcttgttgatcgcaagtccagagatagagatacacagtccttcagtcttactgcaatgttatctttgtcttttcctggagtgctcaccagcagccacacacacagacagacctgatatgttagtcaaggcacatggcaggaaggcaaaggtatctgcgaataaaagctcattatttgaagaaatagaatattttattatttggaaaataaatgaatgtgttcaaggcctcacatgtttccccatagatctcagggggtttagtatgatttcatttggtgggggatagttttgtcttatttttttgttttttctagttggttattttttgtttgtttgtttttgtttcgtcttgttgggtttgatttggtttggtttttcgagacagggtttctctgtgaactcttggctgtcctggaactcactctatagaccaggctggccttgaactaagaaatccagccatctctgcctcccaagtgctgggattaaaggcgtgtgccaccactgcccagcttttgtttgtttgttaacagaatttgtggagctgaagagatggctcatctgttaagagcagttattgctcttctaagaggactgagtttggttcttagcaccggtatcaggcagctcacaaccccctatatgtaactccagattccccttcaatacacatccatatccaagtggttcatgttgtggttgagtattttaaagctctgtcttacagcacagaaatcgctgttctgttggcacccccccccccccctggaaacctgcaattgagtggcagtgttggagtctccctcctcctcctgcatgtcttctaaggaagttctatcatgttgagggtttagtggagactgggaaagttcttacagtgggtagaatgaatcagcctaaactctggacgatgctagcatttcagctaggtgtgcatcagagattgcagagtctccacactgggagagcagctggtgtgttgggggagatgtagtaagacttcgggatgccaccacagtataacttgtcaccgtctctgcagctgtttgattttcctctcaaatcacttttctagcatgtcaactaattttaatgcgtatttttcacacctcagttttattagtgcttgagttttatggtcacatttctgaaagaaaaattaattgttgtatatgagacaggacaccaggacaacagcattgtattgaaacatggctcattgggtcccttgctaactggccatacgctggtctttcagggttgagatcatatgcttcggatgattaaagtaggtagattggggcatttaggagtcttttgttagtggtcagaatcacaagttcactaggcccagtgacattattggattatagttaagatagagattttaaaatatttattaaaacacaattccatctcttaaatgtaccatgatgccaattaagagataacaagaataattcaaaatttattttctgtcaactttgaaaggtatgatgcagataaatcattcttgcatgacatggtatgtaagctattgtgggaagtcctgggaagtaccttacctgctgagagcttggtgaggaaggcagacatcacacagtcagaccaggtcttctctagcatcctgcatctctaatgctgacccaagaaagcacaatcaagattgaccaattatatggaaagaaaatctctaccctagagctcagaaacttcccaagttgtcttagtttgctggaataatttttcagtcaatcatattttgctgagggttccctgttagttggtttctaagtgaagatacgtattattaagctctcttttcacaagtgtcaagcatcttgcattagattttgttttcctttttagcttcaaactcgacaagtaatggtgctggctttcaggaatcttatttcaaagctgtgtgccaactcccttcagttaaggccaagacagagggttcttgttgccgctctgtaaacagcaaggtggggactggctgtggttcgaagaaaactttattcactttgttctcatgtttccctccacctgaacctgaaatttctagtgagcaggaagaatggaacctgtttttagcaaatctaaaaaacgtacttgtaactctgctttggccttccaaaagctttcttaataaaactacatctagaaattaagcaagcacgaagaaaggaaagtgctattgtcacatctcacaactctcctgtatatttcaagtgcttaatttttttgtttctcacagacattaaagttttttgtcattatccctactcatactataaaagtcacagtcccccacctgccttgtctcctttcagagggccccagatggaagtgttggccccgcgctcggttgagacctggcacatctggtcctgcagtgatcccttaggactgtctgtggaggagagcaggctcccctttgtgctaccctgggctgcatcccctgaagccacagagcctctgcatagctctggtcagcccttgaacatatcaggaagacgccaagatttgcaagagtataaattgtgtcaaatgagtgcatgattcgggaactggcctacccattcatcgcttcatctctgctgtgagcctgtgcggctttggaagcaaattggtgctacagtgacttgcacttaatttgctccgtggctaaattgatctatctcttttatttgatcggatcaccaggaaccgaatcatttgcattgatttattgattggtgctgtgttttcaccattagttttgatcactttcagctgttaatattggataattcaatcaggattgattggccttaccagtgaaggcagaaagttaatcaggtcagacacaaaaatggggcagaggtaatctaaccgtggcttgactgtgatattattatattccctctctccagtcctctctctttcctcctcctctctatccccctctttccctaagtcactctcctctttgccacccctcccctcagtctttctctgccatgaatgcaataaaggaataaaggagaaagtttaaaattatctcatattcgcaatgcatcctaatgtgaggtccttttatttggctttttaataagactacatctagaaattaagcaagcatgcagaaaggaaagtgctattgtcacagtgaacttatttgggttaaatgccttttcaattacctattttgtcccaataaatgtctaatctgtgtgtgtgctccgaaacacaacctgggctcacctgtttctaagtctggcccttactgcctcaccatgtgtcctggtagccagatttttccagaaccgagtggctgatatggccagaatcggggctgcaggagtagctgcagtcagtggaaaacactttatttgcatctgaatagtttctactgccccacagctcagttttcaaaaaaattctccatccattaatttcttgatgttcgtatcgatggctgacttccctatttaaagggagcaccacctcttcgttctagggcccgctcctcctccaacagccctgttgtaagcaagctgccattacattattttctgtctggcccagagttgacgacagatggccatctctgaactgccatcagctcagctttatggagcatccagccagggcagcctgatggcactatggccagttcggcagcccctccctccccgccccctggaagtgttcatcacctctgccacattctgccttggctgggccttgttggctctgttggcttccatgtcgccaaggcagcctgctgccacagcactgggagagttgccttcattaagaacaagagactgcagacacagttgtcctccaaacagagttctgcctaggcacctttgtagtcagatctattggaactatctgaaaacccaaatttctagaacattctgcaacccagacagactcatggaattcctgcatgtgttcctattttagatgtttgctctacacgtgggtggatttcctcacattagcagagactgtgtgccaagaatagacccttggtgtttacaaactctcatctgactgttggaaaacaccacgtccggacccaactgttgtgacaattagggaaagagagatggcaatcacagactctaactatcaatcccctgaaatgagcagagaatccaggccagcatcttctagatccctggaggtgatgctcctcgcactgcagcccagcaatgagctgttctgagcatttgcaaaagattgataggctacccttgatcgggtttgctaaggcaaggcagctccagagccagccatgtattttaggaggacttcacatttgtatcctttattgttatattttcagtgaatctacagctcgtaacaggctgtgccctgcagctatgaaggagtaagttccccttattggagggaaatcggtgttctgtaaaagcctgagatggggcggggagagatgaatggtgcttaaaagcactgctggcggtgccgtcatttagaacagcaactccgaggctccgaagagagtgaaaagcagggaaaggagtccttttaaagtggtgaaatttcaactgcctaaaataacaggtctccttcattgattacttcgttgaataagcatgggaggcacttaagaggcagggacagcttctgcatgggagaggagagcctgcaaaagttaagcatcttctcttcctcttatatgggaaggtgggagccacccgccatccacttccttgcacatccctctcctgcatggaatcagcacctcagctagattggcagagcccttcttttcccatgaaacctgactccaccatcaaaggcttcctattctttatcagcaaagcttgattttataattagccaaaccacaccctgggtacatctgctaagcttgggtgccttctaaccatataaaaggtgactcgctaccattaaatatcagcagtgtgctgagcgatgctttgagtttataagggtgaaaggtcactgtgcaggaaaatggaaccgtatatttgctgtgagacaggcaccaagacctcactcccatactcagttataattcatgaggctgctggtgggaagcccttttccctctgtggagttaacgcatctccactgaagcctgctgagagcaccctgcatccccaccaccatctgtgtgctcacttctgaggggagagggagacacagagagagagagagagagagagagagagagagagagagctccccccatacaatttccaagtgtacacactgtccaattgctcctgatttgtgaaggtttccagaataaagcagggctcttacctgactaagaagagaagtggatggaacaaactggtgaactctcatttagaaaagactagttggaaaagggagacacagcaatgccttaagtccacagctgacttgcgagcctgaaatctgctgtctgtcatcatttagtaagaggcaccacaggcaacctgggaacccagagatatggtgcccaagttcaccctgtcctcaggatgccttcagtcagcaggaggaatcttacatagtctgtggctctgagatgcattttctgctctctccacggacttgagccagctagtggcatgaatgcagtcctagccacacatagacagactgtgtctgtggtgacataccacccattcttgggaaccagcactggttaccttagaactacctagacctcatgtcaaagagatcggctttcttacaagcagagtgtcagggcgacggaaaagaactgcaggtcagcaaagggcttccaggcatgttctgaggtggtgagaacagggacagcattggctgtgtcctgagccacgtgctggcaggcctttgggggttctctgctctcctctctttttcctggaagcccagaggtaacaggacaggagaggacagagtatgtgatcagacatcggaacctagacccggttgttgctgggtgatcgcacatttatttataatgtttcctgatcgtgtgcctgatgtgccactgttgtactcccgtttaaaggataaatcaaagccagacctggaaaaccagcatatgattttaacagatcgggtgccatagggaacctactgtgttatagaatccagaatggtctttggatgctcaggcgccagctaatttcagaggctttggaagggccatggcaaggttagaggtcacccatgaagacagtggtacccaggggccaccttgtgtgtaattggcttgccatcccattcggctgcccgggggtgtttgtcatgtgacctctttcaccctcccagggaaaaagtagggcaggagtggctgggctagctagccaggttttcttgggtgaaagatcactttgagatgacacagccgagtagtcagcctgaattcctggttggtattttattaattttgcaccaagataaatcctgaaattctgacaaactccatgacaggtgaaattccttcttgcagaatcttctcagcgagagactgctcatttcgttctgttccgaggcaggcaacaggagggcagctttataatcagccctcaaaggacccccagccgccccagagtctcggactgattgaataactcctgggcctcttcccctaggcctccatcagcgggggtcctgtggaaagcaatctcccgcagactggcactgaagtgagctttaaaccaccattttctgctctccagaggagcctggagtactaaaagatagatggactgcagatattttatgagaaactgtcagaagaagagcagagtaaatgtttttttcttcttctttgagtcacacactccatcactgttgaatttctcccagcctccttttacatttaaagtacgaaattaattggttgctaacctttcgttcccccttccctcttcgtcgttgtcttcctcctcctcctcctcctcgaggtttttttttttttcttaaatattcacacagaggccctttgcttaaccacagttgtagaaaatcagtaccatttgcaatgaaatatttataatgacagaatgaaaaattggattcattttctggactgcagccgaacagtctgcaacttcgcgcaagtaccgttgcctgtccctccttcctccctttcacaggagtcatttctaaaacatagctcatgtccatttacctatgtgctggaggggtgcctaccaaagcacagagcctggccccactcttaaaaatacagagaggaaagagcagggcggatttgcgttagggctgctgcagagggagctggaggacttggcccacacgggtggagaggatttgagctcccatctgaaggaagggcagcaagtttcccagactagggaagcggtggggcttgaactttgtagcacacactgtcataaggatcagcctcgatgtcttatcttggggcagatttaaagggatctatcttgttctcctcttttagggttagctgtgacccacacctctcagggtgactctctgtttgctcgctgctccaggcctggccctttgcctttcatccctcagaagtcagagacaaagggttgtgttagaactgccccagattacattgcaggacagccatccctgcctgcgctaatctgggtaggagaggggtcatttcttctgttttcaggatcccattggctgtatatcaaggaccctgtagtgaatcccagtctcccaaataagttttcactccatacactgtatagaatcacttagctgtctcttcaggctccattgctaggtacaataagggattacagcccatctaggcaacccttcccaggctttcagcccagccctcaatgctggccttgaattcattctcttttggaagactgggcttaattagttagcagtgtttcattttgatggttttccacaagtgaaaacagtttctagtactttcaaaacatgaataaaaacagctgtgaattgagatcttcaaggtttcaggcccttcatcacgcatcactggctccacaagatcaataatccatattttattatataataaaggctgtctataattgaattagctcattcactccatttgattagccccagttcattcatggagaggataaaaagaatgcacacatacctccatatattatattatttggatgcaaagagcttgagaattggtttcaatattgtttttccagggggtagtatgactcacagcccatgcatgtggggatggtagcgttaagtctgtcctgccgataacccaacgtgggtactgtataataggtctcccttcggaccaagatcaatcccactctaaaattctgaaagacaattgagatggtctttgtttggggttttgttttctttttatctacaatccttccccctaagatcattttctcttatccacccgaagactgtaatttggggcctctgtgattgcttactctgaagcaaaagttagcaccagtttagtaagagcacctagtgggaaaggtgacctgtcatttactcttgggctctctcaggacagggctctagtacaaccgtgtgctctgtccgctctcgcagagtcttgctgtttgtatataagctacaagatttgtcttcacattgcttttcatatatatacattttatacatagagagagaatatatactagaatctgctgacagttcagcaccagatgatgtgtgctgtaacacaggctgccttgtagctctagaatctcgcctgaagatattttactgtggtgtttcctggactttgattcagcagcgaaaggaggttttcttgcgtgtgtacattttaggatgctagtgccgttttcttcctgcaccgtgcgtgaatgtgaaaaattgtcttccttgacccttatttctcttccccccttaggggccaagatttaaggggaaatcttttttaacattaacattcgttttgaaacagtttaaccaagtctaagtatatactcaagtaaatggaagctgtaatagtggagtgtagagaatcaatctccttgcaggccagaaaaggaacattgaacagtgttcattcatgtactgccagatgtatttctgcatgtgacacggcttgcccgaccgctttgagtgattttcagtgttactaggcaggctggcaagagcaccaggcctcctgacagaagtaaagagccgcgcagcccaagtgcttggtgaaggaaggttgcacagggaaccagagtatcagaaagagaagcaccccacctcagcctccatgtcagtgcctgtgatcacaagcccctgtgtctatttcccctcctgcccagaaccctctgtgctgtggctggtttgcatttgtgtttgaagtgccaggcagtttaatgaagttattcttttataaattttgcaacactgaagcaagcatgagggctttaaattagaataagtgccacttgtgtgtggcaggtccctcggaggactgatgagagtgaggcctcccggtgcctgggcctttcttcatggcggtgcggatctgttgtgcttgtttacgaggctcacctttgaatttgtgtgagctgctctgtggctgctgcctagccctctgctaagagactgtctttcttccaggatcatgttaaatacttcacattaaagagtgctttttttaattatattgctttattgtaatgaattcaaattaacttggaggagcaaattgtataaggacgtgaaggttatagattgctctctccatagttacagcacacctctgtgtgaagggattaaagggcggcctctctggtagctcagaatacttggaggggtgaggagactgtcacagaccaagaagcaaagcagaaaaggcgcccaaaagtggcatgagaggaggaacgtcacatggtgttcttagaaaccaagtctctttggtggaagacactgctgtcattttaatgatcagaaataccctagcagaagtggtgtgcaagtgacagtataagaatactatacttccttagagactaagacagaatggccagatatctctcagtgattgagggtgcttgccacagagcctgagggcctgagctccatccctggggaatgcactcggtggaagggagaagcaactccacgaagctgtcttctgacccttagctggcctcctggcccactagaggtttcttctcttggtttctctgtgagctgtttaaaaacaaaattgggttcagcggatgcaaaggagacttccagaacggggtcctgatgctgtcttaagcatagaaaaagatacagagaagggaagagagacaggggacgatgcaaaggagacttccagaacggggtcctgatgctgtcttaagcatagagaacggtacagagaagggaagagagacaggggaggaatgagggtggtgggagcatgacaatgcagaccttcttaaccaggaatttttgcttgatgtggaaaacattcaaatattacactggggctatgacatgtttgcactttcaaagaatttgctcacaatctcaaataaagcctcttttgggacttccttaagtggcacccccatctcagacagttccagaagggctgaaagatctgaagaggaagcagagcccatgcctgaatgtaactcattctctacatagcacaggcttgcttgcttgggcatggaaatgcacacataatctcagggtatggctcacattcgacactgcttaacaatagcagtcgataagttatattttgacatactagacagctgtttggttgctgatggtaagcaaacagattttctgttatctttgatgaattatagtgtatttgactcacacttagagagtgtggcaatgttataattgagaacaagagagggctggagaaatggctccctggcaagagcacttgtcgtgcaagcatggtgatgtgagttcagctcttctgctgccatgaaaaagctggtgtatatctgtgcacctgtagccctagtgacagaaggaggagcctgaggagcaccagcctggctgaaaagaatggtgtgccctgagggcagtgagacactgtctcagaggtatcaggctaaacacctgatgtcactttctggcttctgcacacgctggagcacacacgggccttggagccttggaaccttggagtgcactctcaagagcgcacacacacggggggcgggggggacatactttgcctcctttttcacaattactggaattcagtggaagggaacccctgtcctatgaaattgaaaggcagagagtcacggcccctccttctcaaaaaggttaccctttgaatataaattaccggagcgggtgcctttccttctaatcagatgaccttttgaaactgatgaaccagagtttaaatcctaaggctgccagtcagtttttaaatcaatgcctggctccagcacccttcagaacctaactggatctcagtggatcgcttacgcagaagggccacacacggagcttggaggaatgttatagctgattgtggggcagcccaacttgattgtaagatcttgggccaaggagagtgacaaggacttacttcaccaagtcctctttttaaaaaaaataaaaattagaaaacaatccttccaggattcaaaaacctaaaaccagagggagtcaccacatatctgcaatgcttgtaagagggcatttctgagcaattatcaatctaagataattatttgttgctaattactacacaagcctattaaatattcagcagaagtttgtttaattgtgttggagtggggaagaggtgcctgagcatagctcgagcgtggcgagccagtggtgtgcactctagagcctggtagagaggaaatttgtgtttgcccaagattaatacattaacatcaggcaagcctctccccctccttgcacagttatttatctttgaggtattaaaattgaagcacgatgaagggggcactgttcacggatgtaaacttgggaagaggtcattcttaatcttgtttacagatgctctggtttagaagggaccagtgtgataaattaaacattacagtggaaacaattaaagcctagctacaagtggtacatgcacacatctgtgtgtgaagagctgacctaatccctgaatatcttactagacagtattgcccattaaagccttctgtcccctaacacactgagactgtcattccagaggggaggcaaaatcatcatagcctgggccccctcctttctgctttgtatactatgattgcaatttcctgttggcttcttgcatgtaaacaggtagctcaatttgttgattgcttgcaaaaaacaagagagagaaatgaactttatgcttttaacatatttcccagcgaccacttttgtgcgtgttcttccaatctggaactttctgtgaatctcaatgcaaactattgtgagttcaaaagagaaaagtagttttttgggttttattttttaatttttttattgtgttgtgttagagaggcacagacagatgacagacagacagacagacacttccatgccatggtgcacattttgggatcagaggatattggttcatttgagacatggactagtttatcacaggtggctgcttcagggtttgggtatcgaatttgggaactcacacttagaacacatgcaaatactcccaatgcatctatatctccagacctacaaacagtcttcaggcctctccagaatgcaaaccaggtagaaatcagcattaaaccaaaactgtacgattcttttaaaggtcttcctggaaaatggaattgtgatcatgctaacattgcccatttgtagcccagcaatataatttggccttttaggtggcttgttttattcctctatactgtttaattgtcaaaatactggaaattattatatgttctgacttcaaagttgcattatttaactaattagtctttgcttctgaagacttacattaaactaagtcccaaatgattagctgtgtgttcatgctacattataaaccactgaaattttccagattggttaaatattgcttgcttgtttgtttgttttaaagaaaaagcaaaatgtgagttcatgcagtgatcccagaatttaggaggcaggatcaggaaggccaggttattactgtcagctgcatagttttcggccagtctgagttataagagacccttcctgaaaacaaacaaacaaaaaatgtaatgtgttgaacatcaccactttccaaactgacagacaccttacctgtccccacagcagtttaagcccaccaaatcctgtgatgtctaagagctctgggtttttctgtggcactcatttttgcccgtgttccttgccctctttaccacttcaagccacaggtatgcgtagattctctaaaaagtcagcttacagaccctcacagaaggcagagggtctttgctctcctccctttgaaccttgtctccctgataggcggtatgagcaatagccagatgaacatccttagtctcttaagagacgcccaccaggcactttctcttcggtcctcccttactggaaactacactttcctttttatgctacatctcatacacaggtacattaatccctaccagcaaaggtaaaaccagtggcagtggttgctctggggtttttttcaaagcagacattcattttcacacccaaaatagtaactttcacagcttcattcccaaggcactttagacactgtgacaacctgagcatccggaagtactgttgtttccttgccctagtgtgaaccatctttgctgtttgtagagtgaacatttctggagtgatgtagttccacccactaatagtgccacttataatatatcctcaaaggatcctttgcagaatttctggacacttgcccacactcatcctgtggcactattttaaaaagtcatgcagtgcagtcctgtatatttgtgtgtgtgtgtctttgtgtggacatacgttattttcataagacgaaggacatatcccacagactgagagcaagtagcacacctgaggatggacagacagcatggcagactcatatatttcaggacagagacaaatcaaaacccccaacttgatcatatctcagtaaacttctctgtgcaaatacaggccaacagcaagggctcttagtggccactgctccacactgcatcaagacacaccaggaaaggtaagctctgaaggcagaccaatacaaaaatcataaacgtaaaacatcggggagctttcttgtgatgtgggttttgtgacttgattatgtggatctcaggcatgaactttagacattacagcatcccctctcagtatctgaatgtgacacaccataggccaacatgtctacatgtctcctttgcccatggatcaaaggctttcttcttgaaagttaacagtagttgaatactagatcttccttttctccaactctctcatttattcatgcacaaatgttttccaaatagcatgaggcaatggtcccctacgaagagggatttctcccacttggagaggtgtagtaatgtctggggacaaacattgcagtataaactaatacactttctatggtgaccagtaacaccatgactacaaccagcaaagctgaggttaaaaaccttgtagtaaggcaagccatattggcgttatgggatcctctgcaggctctttcatatccagcataggaatggtatctgtccatctgtccatctaacaggaaagacttctctgcctcatctccagcttcctgcacacacttctgagcatcagcacatggacttgttgtttctcccatactgtaggatcagcacaactcagctctcctaggctcattaacactaacctccaaagagcaacacaaatatgtccttcagtcagtttcacctgaaagctaactctttttctatgaaaaatatgattaaaaactttagtgccaggattgtttgaagaacaggcctaaagcctgaggtcaatgaaacaattctccccttgccaggttagacactctcacaggatggtccttttctgtctgttatagcatgtttctgatcatttctggtgattccatttcacctttgttttactataattcaatataagtagtgtcacccagaggtgctctgagatgtcagcccaggtccatgtgagctgctaaatctcaaaagaaaaggcagcagcatctctgcatgttcatggtgataacagaactgcatatgaaacaatagagaacttctgtcactgcaaacacggtcagaacggcagaatctgtggcattaaagaggggcagaggcgggtcgtgatagatgggttcagaaatgccacctccacgtgacaatagaaaagtagtgcctccttatctaataaattcttcaaatgagttcatgagttcgctttcttggtatgagaaatctactttgtgtgttgatacgttgtcttttttacttactttctctttggtcatcaaatcactgagggaaaaatagcacatataaaagaacatccgctgatatatgtcatgaaaatgtgcaagctcaccaccatgttcctgatgtttcccaggtagggtctgtgaaaacactatgctgtaggctttctccatgtaggaaatgtacactgaccactctaagtaggcaaatgggtttcaaagcaatgttggttggttctggtctttgatgcaactcttagtacattctgttgctactcccagggttaagggggattgattcattcagatttaaatgtataagaatgtctgattgtgtgggctctgaaggcatttccttattaacattcctcccctgttgacctcattaacatatttgaggggcaccctttgcctttgggactgttttttccctccatctttcagggtctatagccccacaccctgtcatcactccctgtatacacgttcaaaactattttactagcagagaagaagttaggaatggaaaagagagagggtagaaatgtaaaactcttgattagaaagtataatttaatagaacatgtattgaaccaaatgtattgattaatgtagaagatatagtacttatattgattcgacccagagatttagtactaaaagctctaagccaaaaagctgttgcagattgctacaaaagtcagtttaatgctgtccttggaatgccttcagaaagaaattcttctaatgtttgaggactaggtagaatgcggtatatgtcagcctgatcccacggggttttattctgtactctaatagctgttacgagcctacattatatccaaggagtaattttccttagaggtgcccagctcgctttgtgtcaatatgctagcattttaagtcacgtacagtatatgcttctgggaacagggaaggagccagccagactcataaaggcctgcattcattaataaaggcagaggcttctgtccctccattgcccactgcagggaaggctctctggccttcggggaccctgtacagacacatttaaaggaagctctattttgagtgggcaggagatgaaatgtatgacttggaggtatttcttaagccagctctgtgcccgagcacaggggtgaccttctgggtcaaagaagaaggcaggtcaaaaagacttattatcctgcctgttggaaaccaattgcttttgttttaaaataaataaataaataatgaaaaagcaggggtgcttaaaggtggacagtgatatagaattcagtttaccacctgaaaagaaagctagcaaccgtgtgtgtgaaccggaacgtgcttctaagaaaaatgggaggatactgattagcctctgtgtttacagataaagggccagcccaagtgataaagggaagagtaatataattagttaatcagcgaagattgattgtaatgtttgtgttctccaactaaagggaaaaaaaccaacatgttaccacagccttgtcaccatctgttgaagacacagctacactcgatctttacgttcctgtgggttttttatttcctgccttgctttgtctctgagctctgattgtaccagtctgaaagcatctcatttaaacagaatccaaccatggtgtaaactgactgcgcagggccttgggggagagaacgctcctccttgtctttcttctttcctcctcttcagtcccttttttaaaaacataatatgctggctctctcccagcccttggagcttgcctatatttgttttggcagaaaggagccataaataggtacgtcatgctttaaaggaaaagatttacatctttgaatcaacagattttttttttttttacacaaccccgtcaaatgttcttcccttactgttgccacgtacctttgcagtggtgttgacaccactgagagcagagatacagcacttgctgagaaccagtgaagtccagacaatctgggggcatcgcttttttggggtggaaatgaaatttttcagattctcccttcaaagggtgacttttatcatggttctaggcacattagatcatctcagaactgcaaggtgaacagcttcagagggtcctggggggttatttttatttttattaaaaaagaataactgttttccttggaatacgtttaaaataggattaaacagtttgaccagcaaatgtggtcagctcttggagttaatcatttgttggagtgccaagcctaaaatgagaattccagtcttctaaaatggaaggctcacatttaaaatgtctcacattaaaaagacatccatggtgctgggggtggggcactgcttaaggccatcatctgttttttagcttcttagtttaatttcacattcacgggggtgggagggagaactcacacactcctccaaacaggtcctttacaatgaggagagtgttctagaatcctttctgttaaagtatcaggcctagatagatcttcttttaggctttaaggtatgtcgtgagtttgactttttttttctttaacacaaacccccctcgtgtaaaacaactgttcataactgggattaatggttttcaatttccagttacttagacatggggtctccaggagatggctttttgcagagtagagtatggctctctgtgggattgtgcaagttttcttctcttccacttccttttctgtcaccgcccccccccccacctccaccaatgtttctctgatgttcctctcgattatgtaaaacactttgccttcattggaacagatattttttctcataacctgtcattgcattaaagtgctttggggactgtgaattgctgtgtaaaattggtgagattacccattgctttgttctagtgaagtggtttcctcagacctatggcgctccacccgctgcacaggagacggggctgttggggaaggctgcgggtgctttttcctctctggtcttcatctctgtgcctcaggactagctgtgccctgtggccccgcttccagggcagcaatgcaccatgctgcctggcctcccctcagctcccagcttctggcgtctacatcacatctttccacttgcttcttggaggtcttgccccgcacacagtgtctagaattttcttaaaagcacgaaagtcactgagcacttacatgggaagatgtgtttcccttccaaagagacagccgaggccacatctggagactgactttgtgtttgtcttcacccacacttacaagacaatcgaatgaatgtgtggctcagacacaccatctgtccttccgcctcacaccactcgtactttcggtggacttgggacagggtgcgagtgcaggaagcagaaacatcccagggattctcaaaggcaatcccttgagtgtaacagaaacatctggaatctctctcccccactccaacagaaatatgcccatttcccatggacctctggggatatgcctccttccctctatgagaattgctgtcggtgttgggcagccaggactggaggaaaactttattgggctggagccaaaaaagggaaactgactgtggtagtcaatattgatgtcaagttgacaggtactaaaatcacctaggagataagtgctggacacacctgggatgggggtgggggtggggatcgtctagattagcttaacttctgtgcatgcttatgaggcattatgtagagaggttaattaaggtgagaagacccacaggaatgattggcagcattattctgtcggctgggatcctagatgggatagaaaggggaaagccagctgagcacgagtattctattcattgctttctgcctcctaactatggatgccacataagcagccaccgcaaaccctggcttcgaggagttcctagtagtgatggactgtatccccaggctgtgtgggagccaaaataaaccacccttccttaagttccttttgtcagtccctttacttcagcagcacgacagttttaatatggtgagggtgacagttttccatgtgttcaggcatctccagctcgtgtttcttcatctcttctattgatgagacacaccatggatctttatttggtagacacttgtatttccccaacctgcttttgtcccgtttcaggaaatgtttttttatctgcttctcttaaccttcagagcataagtcctttgtatcaatgacttcgatatactgcaataatgtgattaaaatatatatacatatatattttcagaagtgtaaatatttagtgtgattgttagcaactaatctgtacctctgtctattggggggtgggggagtatgagccacattaggaaacttaggaataacatgataaagataagactattgacttatttcttttttaaaaaagatttatttttattattatacataagagcactgtagctgtcttcagacacatcaaaagagggtgttagctctcattatggatggttgtgaaccaccatgtggttgctgggaattgaactcaggacctttggaagggcagtgctcttagcccatgagccatctcgccagcccgagtaatttcttttttaaacattaattggaggaaaaacaaagcactaaccatcgcctgtcagtagcccgcacttagctacctagtgtcctggcttcttttagttctttcacttcataattctcttttaggttctttttgttttgttttgttttgttttgagtccagacctttctctgaaaccacttttgacttcgagataacaaaagaagcagtatagtttggggttttaactttttgtaatgtatgtaaccctctaatcatagctgtgtggatctttaagaaaataggaaagctttttgttcccaccagtatttttaatatgttttcagaaaaacacctcccagacatatttaaaatcaatacccagacaaaaggtttggcatgaaaatagtttactcttaaatgcacttttaggccaggactactagagagaaagccatccttttgatgagaatgtagcaaagatgttctacataagctcacaataaaacaaagctgccttctctcattttttgcagtttgggctctagcccaaggtgggtaatgccagacccccccccctcccccagtcatgactgtccatcacacagtaattgtggtgggaagggacctagtcccactgtccatctccttcaccagaagctaaatctgaaacagggaagagagctaggcccctccatccctctccattgcctcgctagtgtgacagcctcaggatggcgttatcagcctcccagcctttggtcatgcagcctgaacaagtggctggctagccatccatcctctcagggatggatgctaaaggcaacaaagacttcacaaagtgttctgcttcaaatactattttaactcctctctgtatgtatgaccaattctgaacttgttagtgatgttttaaatcccctcataatattgtctaaactaccattcatttgtgtttccatgcagtagtcatgcttctaagccctctaaaagatcttagccagtcagaataggcacacatgcacatgtgcagaaaacacacaggctcacacacacacattcttgctttgttgtcttcaccatggcctatgcttcagcctacagtgacctcctggggtctctctcatgtttttagcctcagtgaaaacattatcttactacctgctgcagcaaagccttccctggtgatgaggcaggcctgggaaaagctgtggcatttctgtgtttcttcccattattttttgatcatatcactgaattgtcatatgcctacatggttttcttctttggatcatgagaactttaatgagctcaagacagaagctatgcctcttcccatatcccatatacagttggtaaggtcctctctactgagcactaagtgctgtgggccctaccatgtattgatagcagcattccacaggttcttatgaagatacaacaaaactaccatcttgaggccaggaggctttggaaagtcagagaaaaaggaaatgtgttttaggatacccatttgaggatgggtagagccctaccctggcaatcaacatttaccatctcttagagattagactaaattgtggtttttaaaaaaaaatgggaatgatgcacaggtcaagacactgttttaaaactgttttaacagtggtaccctggtgattgaagcatgggtggtgttaaagaggtggtactgggtgggagggtatttggagaaggcgtggcaggtagagaaaagttatggtactaccaagccctcccctcacagaaccttctggtccagcctctcctacctcttcatggagaggagttcacgtcagtgtacccatactcaccccaggcctttcacctcatctgaatctccctggtgccgtaaagcaccaatgcagcatccatccctgtgcagaaacagcgcagttcacggcaccggggactaccagcatgtatctctgctcactccaatggcaagactatcactgaagctttctccctcttttttctccacagaatcatacgatgactcagcacagcagttagttcatgtatgcacggcctctcaaggagaaggacttttgtggcacaaaaagggaacatgttttactctttgcacgaaactcccattgttaatgtatactcttcagaagcattgtattgtatcatacaacgtgtactatcaaaactgttggatgttcatgtgttggaacttttgagcaccagatagacagactccttgtatataaagtgttgcacatgtattatgtcgtcgatgctaaaatggtcttataaagacaagtggacttgggccctattcaggcaagattttcaaagtgaacaaaatggcttaagagaaaatgttttcaaggaagacagaacttaaatgaactgttctcatgtgactatggttggacttccttttatgtacacttaagcctagaatttctcttttggtatatcaatggttaaaacccaagactattttttactgctggagattctcgtgaactatgaagagacattctcacagaacagaaccccacatctggatacggcccatatatatatttgtaagccttgcagtgtgacaggtagcctcaccatatatgcaatagttgttatgtagactgtcaaagatttttttttcctggctacatttgaagctttgagtgttcaaggttttccttaatgatttcacacagccaaattcttgaatcagttgaactaacctgtatgttactgctctcaatgtttaccctgcggcctgaacctggagattactggaattgttttccaagaggaaataaattcagtttaccatc

SEQ ID NO: 16 - DNA, 4637 bp, Mus musculus
ctctgatggccatgagtaatgctgtacagaacatatacctggtgcagatccgtgttctacaaccccttctgtttctcttgagtgacttcccatggattgcatggttgacagttctaaagtctggggtctcatgagccttgagatggcgttgacgttgaggacgaccccagctgctcttggccagcctcctcgccttccagtaaggaccagacttcccccagccatggagaagggtgtgatttcggagaggaagaaggtggccctggactgccttacccatgccagttctgtgacaagtcctttagccgcctcagctacctaaagcaccatgaacagagccacagtgacaagctgcccttcaagtgcacctactgcagtcggctgttcaaacacaagcggagccgtgaccgccacataaagctccacactggggataagaagtatcactgtagcgagtgtgacgcagccttctcccggagcgatcatctcaagatccacttaaagactcacacctccaacaagccatataaatgtgccgtctgccgcagagggttcctctcctctagctccttgcacggacatatgcaggttcatgagcggaacaaggacggctcccagtctggctccaggatggaggactggaagatgaaggacactcagaagtgcagccagtgcgaggaaggctttgacttcccggaagacctccagaagcacattgcagaatgccaccccgagtgctcccctaatgaggaccgagcagccctccagtgcatgtactgccacgagctgtttgtggaggagacgtccctcatgaaccacatcgagcaggtacacgggggtgagaagaagaactcttgcagcatttgctcagagagcttcctcacggtcgaggagctgtatagccacatggacagtcaccagcagccagagtcctgcaatcacagcaacagcccttccctggtcactgtgggttacacctcagtgtccagcacgactccagactcgaacctctcagtggacagctcgaccatggtagaggctgcaccaccgattccaaagagccgcgggaggaagcgagctgctcagcagacctccgatatgactggcccctctagtaagcaggcgaaagtcacctacagctgtatttactgcaacaagcagttattttccagtctcgcggttctgcagattcacttgaaaactatgcatttagataagcctgagcaggctcatatctgtcagtattgcttggaggtcttaccctcactctataacctaaatgaacatcttaaacaagtgcacgaagctcaggaccccggcctgattgtttcggccatgcctgccattgtttaccagtgcaacttctgttccgaagttgtcaatgacctcaacacccttcaggagcacatccgatgttctcatgggtttgccaatcccgcggccaaggacagcaatgcgttcttttgtccccattgttacatggggtttctcactgactcttcacttgaagagcatataagacaggtccattgtgacctcagtggctcccggtttgggtctcctgtgcttgggactccaaaagaaccggtggttgaagtctactcctgttcctattgtacaaattcgccaatattcaacagtgttcttaaactgaataagcatattaaagagaatcataaaaacattcccttggccctgaattatattcacaatgggaagaaatcccgggccttgagccctttgtcccctgtggctatagaacaaacaactcttaagatgatgcagactgtgggaggcgggcctgcccgcgcctctggagagtatatctgtaatcagtgtggtgctaagtacacgtccctagacagctttcagactcacctcaaaacccatttggacaccgtgctgccaaaactgacctgccctcagtgtaacaaagaattccccaaccaagagtccttgctaaagcacgtgaccatccactttatgatcacctcaacctactacatctgtgagagctgtgacaagcagttcacctccgtggatgacctccagaagcacctgctggacatgcacaccttcgtcttcttccgctgcacactctgccaggaagtgttcgactccaaggtctctatccagctgcacttggccgtgaagcacagtaacgagaagaaggtgtaccgctgcacgtcctgcaactgggacttccgcaacgagaccgacctgcagctgcacgtgaagcacaaccacttggagaaccaaggcaaagtgcacaagtgcatcttctgcggcgagtcgtttggcaccgaggtggagctgcagtgccacatcaccacccacagcaagaagtacaactgcaggttctgcagcaaagccttccacgccgtcatcctgctggagaagcacctgcgggagaaacactgtgtgtttgaaaccaagacccccaactgtggcaccaacggggcctcggagcaagtgcagaaggaggaggctgagctgcagaccttgctcaccaacagccaggagtcccataacagccatgatgggagtgaggaggacgtggacagctctgaacccatgtatggctgtgacatctgcggggcggcctacaccatggagacgttgctgcagaaccaccagctccgagaccacaacatcaggcccggagaaagcgccatcgtgaagaagaaggcggagctcattaaagggaattacaagtgtaacgtttgctcgagaaccttcttctccgaaaacgggctccgtgaacacatgcagacccacttaggcccggtcaaacactacatgtgccctatctgtggagagcgcttcccttccctgttaactctcacagagcacaaagtcacacacagcaagagcctggataccggaaactgtcgtatttgtaagatgcccctgcagagcgaagaggagtttttggagcactgccagatgcaccctgacctgaggaattccctgactgggtttcgttgtgtggtgtgtatgcagactgtgacctccaccttggaactcaaaatccacgggaccttccacatgcagaagacggggaatgggtcctccgtgcagaccaccgggcgtggccagcacgttcagaaactgtataagtgcgcatcttgcctcaaagagttccgttccaagcaagatctggtgaaactcgacatcaacggcctgccatatggtctgtgtgccggctgtgtgaatctcagtaagagcagtagcccgggcctcagtctccctcctggtgccagcaggccaggcttgggccagaatgagagtctgagcgccatggaaggaaaaggcaaggcggggggactgaagacgcgctgttcaagctgcaatgtcaagtttgagtctgaaagcgaactgcagaaccacatccagacggtgcaccgggagcttgtgccagacgccaacagcacacagttgaaaacgccccaagtgtcacccatgcccagaatcagtccctcccagtccgatgagaagaagacctaccagtgtatcaagtgtcagatggttttctacaacgagtgggacatccaggttcatgtggcaaatcacatgattgatgaagggctgaaccatgagtgcaaactctgcagccagacctttgactcccccgccaaacttcagtgtcacctgatagagcacagcttcgaagggatgggtggtaccttcaagtgccccgtctgtttcacagtgtttgttcaagctaacaagttgcaacagcatatattctctgcccatggacaagaagacaagatctatgactgcacacaatgcccacagaagtttttcttccaaacagagctacagaatcatacgatgactcagcacagcagttagttcatgtatgcacggcctctcaaggagaaggacttttgtggcacaaaaagggaacatgttttactctttgcacgaaactcccattgttaatgtatactcttcagaagcattgtattgtatcatacaacgtgtactatcaaaactgttggatgttcatgtgttggaacttttgagcaccagatagacagactccttgtatataaagtgttgcacatgtattatgtcgtcgatgctaaaatggtcttataaagacaagtggacttgggccctattcaggcaagattttcaaagtgaacaaaatggcttaagagaaaatgttttcaaggaagacagaacttaaatgaactgttctcatgtgactatggttggacttccttttatgtacacttaagcctagaatttctcttttggtatatcaatggttaaaacccaagactattttttactgctggagattctcgtgaactatgaagagacattctcacagaacagaaccccacatctggatacggcccatatatatatttgtaagccttgcagtgtgacaggtagcctcaccatatatgcaatagttgttatgtagactgtcaaagatttttttttcctggctacatttgaagctttgagtgttcaaggttttccttaatgatttcacacagccaaattcttgaatcagttgaactaacctgtatgttactgctctcaatgtttaccctgcggcctgaacctggagattactggaattgttttccaagaggaaataaattcagtttaccatc

SEQ ID NO: 17 - protein, 1085 aa, Mus musculus
MQVHERNKDGSQSGSRMEDWKMKDTQKCSQCEEGFDFPEDLQKHIAECHPECSPNEDRAALQCMYCHELFVEETSLMNHIEQVHGGEKKNSCSICSESFLTVEEKHMDSHQQPESCNHSNSPSLVTVGYTSVSSTTPDSNLSVDSSTMVEAAPPIPKSRGRKRAAQQTSDMTGPSSKQAKVTYSCIYCNKQLFSSLAVLQIHLKTMHLDKPEQAHICQYCLEVLPSLYNLNEHLKQVHEAQDPGLIVSAMPAIVYQCNFCSEVVNDLNTLQEHIRCSHGFANPAAKDSNAFFCPHCYMGFLTDSSLEEHIRQVHCDLSGSRFGSPVLGTPKEPVVEVYSCSYCTNSPIFNSVLKLNKHIKENHKNIPLALNYIHNGKKSRALSPLSPVAIEQTTLKMMQTVGGGPARASGEYICNQCGAKYTSLDSFQTHLKTHLDTVLPKLTCPQCNKEFPNQESLLKHVTIHFMITSTYYICESCDKQFTSVDDLQKHLLDMHTFVFFRCTLCQEVFDSKVSIQLHLAVKHSNEKKVYRCTSCNWDFRNETDLQLHVKHNHLENQGKVHKCIFCGESFGTEVELQCHITTHSKKYNCRFCSKAFHAVILLEKHLREKHCVFETKTPNCGTNGASEQVQKEEAELQTLLTNSQESHNSHDGSEEDVDSSEPMYGCDICGAAYTMLLQNHQLRDHNIRPGESAIVKKKAELIKGNYKCNVCSRTFFSENGLREHMQTHLGPVKHYMCPICGERFPSLLTLTEHKVTHSKSLDTGNCRICKMPLQSEEEFLEHCQMHPDLRNSLTGFRCVVCMQTVTSTLELKIHGTFHMQKTGNGSSVQTTGRGQHVQKLYKCASCLKEFRSKQDLVKLDINGLPYGLCAGCVNLSKSSSPGLSLPPGASRPGLGQNESLSAMEGKGKAGGLKTRCSSCNVKFESESELQNHIQTVHRELVPDANSTQLKTPQVSPMPRISPSQSDEKKTYQCIKCQMVFYNEWDIQVHVANHMIDEQHECKLCSQTFDSPAKLQCHLIEHSFEGMGGTFKCPVCFTVFVQANKLQQHIFSAHGQEDKIYDCTQCPQKFFFQTELQNHTMTQHSS

SEQ ID NO: 18 - DNA, 4723 bp, Mus musculus
cttttaggatgtctcgccgcaagcaagcgaaaccgagatccctcaaagaccccaactgtaaacttgaagacaagattgaagatggggaggcagtagactgcaagaagaggccagaagacggggaggagttggaggaggacgctgtgcacagctgtgacagctgcctccaggtgtttgagtcactgagcgacatcacagagcacaagatccatcagtgccagctgacagatggcgttgacgttgaggacgaccccagctgctcttggccagcctcctcgccttccagtaaggaccagacttcccccagccatggagaagggtgtgatttcggagaggaagaaggtggccctggactgccttacccatgccagttctgtgacaagtcctttagccgcctcagctacctaaagcaccatgaacagagccacagtgacaagctgcccttcaagtgcacctactgcagtcggctgttcaaacacaagcggagccgtgaccgccacataaagctccacactggggataagaagtatcactgtagcgagtgtgacgcagccttctcccggagcgatcatctcaagatccacttaaagactcacacctccaacaagccatataaatgtgccgtctgccgcagagggttcctctcctctagctccttgcacggacatatgcaggttcatgagcggaacaaggacggctcccagtctggctccaggatggaggactggaagatgaaggacactcagaagtgcagccagtgcgaggaaggctttgacttcccggaagacctccagaagcacattgcagaatgccaccccgagtgctcccctaatgaggaccgagcagccctccagtgcatgtactgccacgagctgtttgtggaggagacgtccctcatgaaccacatcgagcaggtacacgggggtgagaagaagaactcttgcagcatttgctcagagagcttcctcacggtcgaggagctgtatagccacatggacagtcaccagcagccagagtcctgcaatcacagcaacagcccttccctggtcactgtgggttacacctcagtgtccagcacgactccagactcgaacctctcagtggacagctcgaccatggtagaggctgcaccaccgattccaaagagccgcgggaggaagcgagctgctcagcagacctccgatatgactggcccctctagtaagcaggcgaaagtcacctacagctgtatttactgcaacaagcagttattttccagtctcgcggttctgcagattcacttgaaaactatgcatttagataagcctgagcaggctcatatctgtcagtattgcttggaggtcttaccctcactctataacctaaatgaacatcttaaacaagtgcacgaagctcaggaccccggcctgattgtttcggccatgcctgccattgtttaccagtgcaacttctgttccgaagttgtcaatgacctcaacacccttcaggagcacatccgatgttctcatgggtttgccaatcccgcggccaaggacagcaatgcgttcttttgtccccattgttacatggggtttctcactgactcttcacttgaagagcatataagacaggtccattgtgacctcagtggctcccggtttgggtctcctgtgcttgggactccaaaagaaccggtggttgaagtctactcctgttcctattgtacaaattcgccaatattcaacagtgttcttaaactgaataagcatattaaagagaatcataaaaacattcccttggccctgaattatattcacaatgggaagaaatcccgggccttgagccctttgtcccctgtggctatagaacaaacaactcttaagatgatgcagactgtgggaggcgggcctgcccgcgcctctggagagtatatctgtaatcagtgtggtgctaagtacacgtccctagacagctttcagactcacctcaaaacccatttggacaccgtgctgccaaaactgacctgccctcagtgtaacaaagaattccccaaccaagagtccttgctaaagcacgtgaccatccactttatgatcacctcaacctactacatctgtgagagctgtgacaagcagttcacctccgtggatgacctccagaagcacctgctggacatgcacaccttcgtcttcttccgctgcacactctgccaggaagtgttcgactccaaggtctctatccagctgcacttggccgtgaagcacagtaacgagaagaaggtgtaccgctgcacgtcctgcaactgggacttccgcaacgagaccgacctgcagctgcacgtgaagcacaaccacttggagaaccaaggcaaagtgcacaagtgcatcttctgcggcgagtcgtttggcaccgaggtggagctgcagtgccacatcaccacccacagcaagaagtacaactgcaggttctgcagcaaagccttccacgccgtcatcctgctggagaagcacctgcgggagaaacactgtgtgtttgaaaccaagacccccaactgtggcaccaacggggcctcggagcaagtgcagaaggaggaggctgagctgcagaccttgctcaccaacagccaggagtcccataacagccatgatgggagtgaggaggacgtggacagctctgaacccatgtatggctgtgacatctgcggggcggcctacaccatggagacgttgctgcagaaccaccagctccgagaccacaacatcaggcccggagaaagcgccatcgtgaagaagaaggcggagctcattaaagggaattacaagtgtaacgtttgctcgagaaccttcttctccgaaaacgggctccgtgaacacatgcagacccacttaggcccggtcaaacactacatgtgccctatctgtggagagcgcttcccttccctgttaactctcacagagcacaaagtcacacacagcaagagcctggataccggaaactgtcgtatttgtaagatgcccctgcagagcgaagaggagtttttggagcactgccagatgcaccctgacctgaggaattccctgactgggtttcgttgtgtggtgtgtatgcagactgtgacctccaccttggaactcaaaatccacgggaccttccacatgcagaagacggggaatgggtcctccgtgcagaccaccgggcgtggccagcacgttcagaaactgtataagtgcgcatcttgcctcaaagagttccgttccaagcaagatctggtgaaactcgacatcaacggcctgccatatggtctgtgtgccggctgtgtgaatctcagtaagagcagtagcccgggcctcagtctccctcctggtgccagcaggccaggcttgggccagaatgagagtctgagcgccatggaaggaaaaggcaaggcggggggactgaagacgcgctgttcaagctgcaatgtcaagtttgagtctgaaagcgaactgcagaaccacatccagacggtgcaccgggagcttgtgccagacgccaacagcacacagttgaaaacgccccaagtgtcacccatgcccagaatcagtccctcccagtccgatgagaagaagacctaccagtgtatcaagtgtcagatggttttctacaacgagtgggacatccaggttcatgtggcaaatcacatgattgatgaagggctgaaccatgagtgcaaactctgcagccagacctttgactcccccgccaaacttcagtgtcacctgatagagcacagcttcgaagggatgggtggtaccttcaagtgccccgtctgtttcacagtgtttgttcaagctaacaagttgcaacagcatatattctctgcccatggacaagaagacaagatctatgactgcacacaatgcccacagaagtttttcttccaaacagagctacagaatcatacgatgactcagcacagcagttagttcatgtatgcacggcctctcaaggagaaggacttttgtggcacaaaaagggaacatgttttactctttgcacgaaactcccattgttaatgtatactcttcagaagcattgtattgtatcatacaacgtgtactatcaaaactgttggatgttcatgtgttggaacttttgagcaccagatagacagactccttgtatataaagtgttgcacatgtattatgtcgtcgatgctaaaatggtcttataaagacaagtggacttgggccctattcaggcaagattttcaaagtgaacaaaatggcttaagagaaaatgttttcaaggaagacagaacttaaatgaactgttctcatgtgactatggttggacttccttttatgtacacttaagcctagaatttctcttttggtatatcaatggttaaaacccaagactattttttactgctggagattctcgtgaactatgaagagacattctcacagaacagaaccccacatctggatacggcccatatatatatttgtaagccttgcagtgtgacaggtagcctcaccatatatgcaatagttgttatgtagactgtcaaagatttttttttcctggctacatttgaagctttgagtgttcaaggttttccttaatgatttcacacagccaaattcttgaatcagttgaactaacctgtatgttactgctctcaatgtttaccctgcggcctgaacctggagattactggaattgttttccaagaggaaataaattcagtttaccatc

SEQ ID NO: 19 - protein, 1305 aa, Mus musculus
MSRRKQAKPRSLKDPNCKLEDKIEDGEAVDCKKRPEDGEELEEDAVHSCDSCLQVFESLSDITEHKIHQCQLTDGVDVEDDPSCSWPASSPSSKDQTSPSHGEGCDFGEEEGGPGLPYPCQFCDKSFSRLSYLKHHEQSHSDKLPFKCTYCSRLFKHKRSRDRHIKLHTGDKKYHCSECDAAFSRSDHLKIHLKTHTSNKPYKCAVCRRGFLSSSSLHGHMQVHERNKDGSQSGSRMEDWKMKDTQKCSQCEEGFDFPEDLQKHIAECHPECSPNEDRAALQCMYCHELFVEETSLMNHIEQVHGGEKKNSCSICSESFLTVEEKHMDSHQQPESCNHSNSPSLVTVGYTSVSSTTPDSNLSVDSSTMVEAAPPIPKSRGRKRAAQQTSDMTGPSSKQAKVTYSCIYCNKQLFSSLAVLQIHLKTMHLDKPEQAHICQYCLEVLPSLYNLNEHLKQVHEAQDPGLIVSAMPAIVYQCNFCSEVVNDLNTLQEHIRCSHGFANPAAKDSNAFFCPHCYMGFLTDSSLEEHIRQVHCDLSGSRFGSPVLGTPKEPVVEVYSCSYCTNSPIFNSVLKLNKHIKENHKNIPLALNYIHNGKKSRALSPLSPVAIEQTTLKMMQTVGGGPARASGEYICNQCGAKYTSLDSFQTHLKTHLDTVLPKLTCPQCNKEFPNQESLLKHVTIHFMITSTYYICESCDKQFTSVDDLQKHLLDMHTFVFFRCTLCQEVFDSKVSIQLHLAVKHSNEKKVYRCTSCNWDFRNETDLQLHVKHNHLENQGKVHKCIFCGESFGTEVELQCHITTHSKKYNCRFCSKAFHAVILLEKHLREKHCVFETKTPNCGTNGASEQVQKEEAELQTLLTNSQESHNSHDGSEEDVDSSEPMYGCDICGAAYTMLLQNHQLRDHNIRPGESAIVKKKAELIKGNYKCNVCSRTFFSENGLREHMQTHLGPVKHYMCPICGERFPSLLTLTEHKVTHSKSLDTGNCRICKMPLQSEEEFLEHCQMHPDLRNSLTGFRCVVCMQTVTSTLELKIHGTFHMQKTGNGSSVQTTGRGQHVQKLYKCASCLKEFRSKQDLVKLDINGLPYGLCAGCVNLSKSSSPGLSLPPGASRPGLGQNESLSAMEGKGKAGGLKTRCSSCNVKFESESELQNHIQTVHRELVPDANSTQLKTPQVSPMPRISPSQSDEKKTYQCIKCQMVFYNEWDIQVHVANHMIDEQHECKLCSQTFDSPAKLQCHLIEHSFEGMGGTFKCPVCFTVFVQANKLQQHIFSAHGQEDKIYDCTQCPQKFFFQTELQNHTMTQHSS

SEQ ID NO: 20 - DNA, 259781 bp, Homo sapiens
  misc_feature (1)...(259781): n = A,T,C or G
ttttcagaccccaactgtaaacttgaagacaagactgaagatggagaggcactagattgtaagaagaggccggaagacggggaggagttggaagacgaagctgtgcacagctgtgacagctgcctccaggtgtttgaatcgctgagcgatatcacagaacacaagattaatcaatgtcaactgacaggtaaacaatacttatcacttttttgtcttcttgtactgttctatttctgattttttcagtttgttcctttatgtgtttttctcttcaaattattttattcctacatttgaatacctagctaagtctagaggtgcttttgaaagaattctgagatggttgtttggggtaacctcagtgtcacagccctcttagattttgaaatgcacctaaatgtcaatagctaatgagtgtattttcctttttgcttttttttacatgatgccatttaggagcagaacatgaatattggatgactaatatattttaaaaatcctttgaataccttttcaaagacagcatgagaaatgaacatgttagcttagataacacttcctgaaggaaaccttttctgatctccctctgcctgagttagccacatttttttgtgttcccataaagttcaatacttatccttgagcaccacagttctcactgggtatgttcatttttccatctcactcgttagactgaaagctcatggatggctgaaactgtgtcttattcattctcgcattatctaagcctagcacaatacctggcctatagtaggtactcattaaggctggcaagttattctgctatgcagttccttggaagagtcagatttaaagtaacatgttgcatagcatgtttgatgtaatggctaaataaaactgggactcagtttaccaaatatctaccccacttaaaatatatcctacaagaatgcatctctgagcctgggtagggcattttagatagaactctgtaagatacacatcattctgctctttctgtttgaagctgatgccactcctatgtgtgtgtatgtgtgtgtctctctttctctgcctcttattttcccaacacaaatctttcttccattaagcgagtatgggaaatgtgtttactggacaagtggttctctgactgttttccacagcatattcatatttttataagattttaaagtgtgttctattttaacaaggttttctgaatggattattgtggaatgttggattaaatccattaaataggcttctttattaaaagtgccttgtggctcttctcttcaaagagggattacagtgaacaagtttattaggccccagaatcatcttcctttcagaaaacccataaacattttctggaactgaagtttgagaattgatgttgcttatataaatattggccatacatatatattttacagtttatatatgcttctagggagcaacttttattttgatacaattccaaacatacagaaaacttgaaaaaataatataaggaacttccatatcatttacctgattcatcagttgcttacatttttctccatttactttattattctcttcttccctctcctatagcatctctttcttaatcatttgagagaaagttggagacatcatcacacctctatacatatatcctttgtatttctgaagaacaaatctattctcttacatatctatagtatacttactgaaactgagaaagttagcctttaggccaggcgcggtggctcacacctgtaatcctagcactttgggaggccgaggcaggtggatcatctgaggtcaggagttcaagaccagcctgatcaacatggtgaaaccccgtctctactaaaaataaaaattagccgtgcgtggtggcacgtgcctgtaatcccagctactcaggaggctaaggcaggagaattgcttgaacccgggaggcagaggttgcagtgagctgagatcacgccattgcagtccagcctgggcaacaagaacgaaactctgtctcaaaaaaaaagaaagttaacctttaacacaaatagatactactatctaattcacaatccatatttaaatttcagcagttgtgttaataatgtctttggtagctattttttcccctcatccacgattcaggatcatgcataacatttaactgtcatctcttttacctcctttaacctggaatgttctctcagcctctgtctttcctgaccatgacatttttgaagagaagctaccagttagtttacaaaatacccatcaatttgggtttgtctgatgtttcccaaggattaaattcaggtttcataggctcctgtagtattcaggctccaaagaagcctgaatcaccaaagaagtgatattgcacccttctcagtgcatcagatcaggaagtacatgatgttagtttgttaccatgttgatgttgttaacgatgaatgtttgtttaaggtggtatctgccaacagtttccattataaagttaccattttctctttgtatatggttaataatttgtgggaagataactttgatactatataaatatctacatattcataaaatgtttacccactgtttctttcttttttttttttttgtgatggagtcttgctctgttgcccaggctggagtgcagtggcgtgatctctgctcactgcaacctctgcctcctgggttcaagcgattctcctgccttagcctcccaagtagctgggactgcaggtgcataccaccatgcccagctaactttttgtactttttagtagagacagggttttgccatgttgaccaggctggtcttgaactcctggcctcaagtgatgcgcctgcctcggcctcccaaagtgttgggattataggcatgagccaccacactcagccatgctcactgtttttatgtctattgcaagttcataatttatctatttgttagcctactgttatattctttcttattcatttgtttatttgtatattcatgttactgtcatctcttgggtttttattttattcagtgggtcataattcattactctcattgtattgatacccagattgccatagatctagccaatgggagtcccttcaaacaggatcctgtatgtgtttaatatgcctccatcattatttgagaactttagtttctgatgcaaatagatgctccagaatcatcatggtcttttcttgtcctagtcctgcaatcagccagcaatttttcttttcttttcttttttttttttcttttttttctcctggttctttatgaggacaaaggtatttagaaaccaagatatggatactatgtatgctcaatgctataggtgtaccattacttatggacttcagtagacagaagtaggaaatgtacatgcatacttactataatatataatacactcataatatggctcataaaattcacacatatacaagtatatgcacatatgtgtatttttctctatccaataaaaaccatatgttcatattgatacctcccattcaattcagtacctcaggtacatcctagtctttttccttggtgtatttctgctgccttctgtaacagagagaaacctggcttccattatccttattaatatgtttactcatttgcctgagcctagaatatacagtaagtagtttcaaaattgcttgctgataccaccatgataggcaaactgagtttaatattnnnnnnnnnnnnnnnnnnnntgaaattcataaattataagtatataatttggtgaattttggcaaaataaatacacctatgtgacacgcccttcttaagatataatttctttcatcccagaaagttccctcatgcttctttctgatcaataatgctccactagaagtaaccagtttttgagctgttttaaccatagattcattttacctattctagaacttcttgtaaatgaaattgtacggcgtgcaccctttttttgtgtgtccagcttcttttgttcagcataatgtctatgagatccattcatattgttgtgtatataagtagtgtgttttttattgctgtgtagtattccattatatgaacatatcattatttgttttacattctcttgttagtggatactttatttttagtttttgagtattatgaataaagttcataatagtcaaccttctatatggatctttttgtggacatatgttttatttctctcgttaggaatagaattgctgggtcattgggtgaagggcatgagatatgatatgtttaatctctattagaaacttccaaaccctttttcaaaaactcccaccagcagtagatgagaattctggttgtcgtacgtacttgctaacatttatattatccgtctttaattttgacattctgttgggcatttattggtattttttgtggattttctagctcatatatatttaattgacttcatttaaggtgtatttttcctagaacatatcattttgggaaaatcccattaaatgcagatgattagtaagatgccattttcagtagaataactggtgctttaaacaaagctttgctcacgtagaatcagcactaacattaggataaagacatgggaacttcagcgttcccactggactgacatgacagtgtatattcatctagcaagaaatcatggctttggtaagagtgggtcctctctcatgttacaagttattttaaaattcatataatttagaaaacaaccttcaaattctgcttggtaagtggttaatttttactgagtgcgtgccctatagttattcttatgttcagctctataaaattgaatcgaagcaaaaggcattattcctgtctcatacaactttaataatacctgtgcaggaagtgctgaattttccacacatggtatggcaaagattatgagttacattttttaaaaaactggtaaaatgtttggtttattttggtctgaagctttctgaaagtagggaatctgttctgtggtcacatactacagcaggttagtcaaaggtagaaaagtagaggccgggcgtcgtggctcatgtctgtaatcccagcactttgggaggttgaggtgggcagatcacctgaggtcaggaatttgagactagcctggccaaaatggtgaaaccccgtctctactaaaaatacaaaaaagttagcagggcatagtggcgcacgcctgtagtcacagctactttggaggctgaggcaggagaatcgcttgaacccaggaggcggaggttgcagtgagctgatatcgtgtcattgctctctagcctaggcgacaagagtgaaactctgtctcaaaaaaaaaaaaagtcttacttgccacttgttgaagcacatgtccagagagagttatctgatgggtcttgttttcctgtttattgttgttcaggattatttctttgggaaggtggtagattcgggaggcaaagtgtaagtggaggccaaggaggaagcgaaaaaaagggagaaatgaaatcaggaacgatccatgtttgttgaaggtgttaatggtgtagcttgagttgcctgaaggttgccctccagtctgatctggaaaagattaaagacacttggaagcattttaattaaaaaagtaatatgatgcttttgctttcttgcttggttaaagccttttagtgtaagttgggaggtctgacagttccagtgttggcttcccactgcttgaattctcttcttgctgcttccccaccccccaccccccacccctggctgacaaagtgctggatttagcaaaggaaggtatttttatatatacattttttttttgcctcttggttttattacttttttctttccttttttttttttttttaaattcgttttaccttttaatttcattcagccccatttgcatctttgctgattttcctctcattccggtcctttctccaagattcttaatttccctgtccatattttcccctttcctttctccctgcccgttccatggtcttatcttgctgctttctcaatttattctttgttgcttgtggattcccttctattaatcttgaagtcgttactgacatgtttggccctataccagctagaccattgcctgaagactttttgatgaacaatctgtgtaaagaaagagggaatcctgagcagtgtgctagagggttaattatagagtatgattagaagtgaaagctatcttacaacttgttgatttgcaaaataacagaaaagggatatattctatgtgctgatgcctatgtgggttactcagggtagttctgttatgagagagccatagaaaccctgtcttaggttcttcccttcttttaactgagggttttcttggtaacttaagatctgttcctttggtgactttcatccccaagggtgacgcacattccttggagagcctgccttgatgaaaacctattcactccgtatcaaaagtcttgaaactgagccaaggccaaacgaagcctttggagatgaaggtcaaatacagaagaacaagatgatcaattctagacccagatttgaaagtcagctataagattatgtgccaggtaaaataatgattagctgtccacgtggactgaaattttagacagtggatcctgcagggataaagaaaatgcgagctcacacacacctcatggagtctgtcactgagaggatattctagtatttgcatatttttctggacaagcatccttgttctaagaaagaacagaacagtccctgaagatagcaaaggacgtggtgacactcacagatgagttctctctcctttgtctcatggtgcaattttcctggagtctacagtccaacatgtataagtaagttatgtatcatccctgcttgaaggaatagggggaaaggtgaaagaaaaaattaagtccctctcttcaattttagcaatagatggaaaccacctgtcttgccccagccttgctgtctttttcctggaggctaagaaggcaggggaatcaacactctaatgctgttgggactctctgatgcagaagacagattatcaaaatatatatttaaagaaggaaaagcacagagaacctctcattttactaatccacaaaccctatcatttcttgccaattccctcagggggtggggagggctggaagccagaggggtctcatcacactgctcaacaaagatttaatagcagggtgctatggggaaggctgagattacagagactttgttatgcttacaaaactgagtaagaactagtattgtaaatcatcaaaactaagctacacttaacaggataaatgtataaagtgcatttggtaatactctatgcttgttgttctgagtcatttttctcttctctcctgctaatttgcaaacttgagttgtctgttaagtgttctttcacatcattaatgtgaattgcctgggcataatcgcagaaaaaactaaatagcattgtgttagttcttaaccctctggtctaccatactattggtagatgagtgtgtagaaatatgtgtggtagtaattctgctgtagctttggggaacatttgtagaccagatatataaagccctacccagggttgtagcttctttacaaatattcttcctgttcacattttttaggaaaatgaactgaattgatgagtggatgttgttcgtcagtgtaaagtagtatgtccatttaattttgttttaaatcttatgaaacttcctggaagcttcatacaatttttgtaagctgaaaacttttagacatctggaatatccttattatttggccaaagaatttttttaaatgtgaaagtgagtatacatgtgtcatatggttgtggcaaattaaagactggttcattccaatgaacaataaagtgctctaacagctagttctgttggcagtgggaataagggagatgagtagtttacagaatgaagcatcgttttcataaaagcagattgaaactgcttagaacctttttttttgctgttttccttatcaaaccattagttgaaataaattacatgaaataaatgtgatatttcaactttttagttcatattaattaggcttaaggcattataagttttatttgcatatttctatattaatttctatattaattcattattcatactttgttattaatcatttaagtgttattaatttatgtttctatattaattaggcttaaggcactataagttttattttcctgtttccttccattttgatcagttcctcattttgtacctaaagtatgtctttttttagcctacttcattctccaaatctccctaagcccccaaaatgcagtttcatggcctccatagattccattctccagcccatctctatatgcattttacttttagactagtgatttctaaatgcactgtcataatatgtatttactaatacattacatacatacatgcattatacaacattcacaaaaacagaaattaaaaaattaggtaaagatgaaataaacagggtttaaaaataattttatgttattttggtaattcattttaatggctgttaaaactgaaaaaaatacttcacaaaacctccagagagaatgtatgttattctttcccatgaggttgttatcagtggtgggtataagttcatatttcaaagaactttcctgataatctcacttctgtgcttttgttttgccaactttcagtcagctctgatgaaacggtttctccccctcccctttccctttcatatggtaggtgacaaggagcttttacttggtgtgaaagggccagatttgctgttttcttgttgattacttgtgcttgactatcagtatcctgcagtttttttttttgcagaaaacttttaaaaatcagttgtcaaaatctgaggattttgcatgaattagattagttaaaattaaatattctgatccgtaagtccagtttgctggacactgtagactgcattagtatgagatgggataaaaggggctggagaagccagcccacccagctgactggagtactgtttatctccttgctctcaggaaggtctggttagtacctggatggctatttctgattggtgtccattctgattggtttctaactattcagagtatcctctctcctgcacgataatgtaccctgtatttcagagaccactgttcttgactatcacttatttcatgaggtgaaaaacggctcaccaaatctttgctcctctcagttttagagaaagtggtggggctgagtgtgtcactttgttcaactgtcagggctcccaccaagttcttccatgcagttaccaaagacaaagtgatcatctatagttggttccaacttctgaaccgtaggctgagtatgcttccttttccggttttggaggtaaggtcagttcaatcattacctagtatacaagctttgttatttccacattgattttgctgcagcagaagtttttgaatattagtacctggtctgccattctcttcttgatatatttgtaaaattcgctaccaaaacatggatataaaataattatttttagatctgttattttctcaaagctctttgaatgcttgtgggtattgtaattgggatttatgaaaggactgtctgtactgatgaatatgttttcccagtataagtgatgatctattacattaattaacttattaaaattaaaaagtttggatcttgaaagggtaatataagaaatatttctctgtaattttgatgtccatattttattaggcatttttacttttagcctgcttgaataactggtgattcacaagaaagctactgattatgaatgaaaagttcttgaaggatgtaatctcctagaaatagaaaataaatgagtctattcactttaatttttacaagtaaaacctaagtggagaatatcttatattagttttaactgtattcataaatcacctgtttcttgactaatttgagtttttaaaaattaagtcttttgaaatgaatagaattcaagaagaaaattagcattatttgtctgtaaattgttttgccttagttgtgtaatgaataatgaatatataatgatctaactgtggtttcaggattcatttgccaaaaattgtaaataaaatgtcaagaacacaagccatgggagaatatcttcaagaatttctcccatgtccttgatggtcattgatggtaattaaagctgtcagtttgtccctgtggagaagtataaaaattataaatgaagggctctatttgggatgtggagacagtggggtctcttttgtggggaagatgaattaaaagagacccactatttcttaggccctctgcagtcatttggtctatcttgtaagcaccaatgtttagctatttggatacagttgtgtgcacataagggctctgctacctttaacatgttttcaaatgtgaaattcaacatgataaaacttaagaggttgaatttttttttttttttttttacatttttgcttgactcatgttgtttttcatgttctctacttacgatgctcgtgacctttatctgtttccttttataaggagtgggttactaaaaaagctgttaaaagtagactatttccacacccttctctttgtgctaagtctgtgtttggggatcttgtctttagggaatggtagcaatgtcacagagatctatgacctcttaataggtcttgggaggggaaagcaggaatcattctacactgtgcctcagggcttagttcctttaaacttcaaggaattggactggaactcttcactcctcctttctttcggttttaccttcaggggaaattgatcgattagaggtgattattccacaaactctgaaccctttccccatctttgttccaactggagcttctcaaagtttaaagggattgtgtctcctgggtgaattgtagaatgaatttaagtaggttattgggcagaactctttgaacacacattaaaagtgctaaaaaatatatttggaacagaagaaaatatttgaagcaaaagggtaaggaaacattcgtttcaatataattataatttaattatatgggttatttttgagcaaaagattagctgttagaatgtagaatcatagtgcttcaaaccaagaaaataacagggtcaatgcaacaaatgggcaaatgttcaaaatctgaagggtgagtaagaacccaataggaccaaagataatcataactgattgggcgtatatatgtcctctattaaacacaacaatattctattaattgatggctttcactatttttttcaaacttaatgagaaagaatatatacctattctcttttgttttctttgcatgtataatatatatgccttatggacactatatcatctttgaaatatatttaataccacatcaatttaatcttttccctccctctttttttttttgttttctgttttttgttttaaatctgactcttagactctacctacttatagagcagaattagctccccctggtgactaattaaaaatgtagacaaggatgtttggggtcatgagcttccttaacttcaacctttaaatgcataattaatattagtatgtgtatagtaggcatgtacactgaactatttttcaagtaaaaattccaattagtcttgagaaatgctgattttaatgtcagtttatctatgtaatgaagactcatccatcttgtgtggctttcttggagttgtgcccattttgatgacctcagacatgttggttttctgctgtgggagatactagaataggaggtagatattcagatctcttgtgaactagtaactggttataaaagcagaaaataaaagtaagagcagccatcaacttacctatctctatcattcttgcaaaataaacttttatagaaaagattgtcattgttaaaaaaatttaaaagaaatattgttttagaaaaagcactattatacattcaagcactaagatatatttttttggttgtgccaacaaaacatttttccatttaatttatgaattatttaaagtgtatatttttattactcagattgcctttaaacttaacttcttctgttttataaaactgttccccctcataattaaattatcaggttgacagactcttgagaatgcttttataatctttttaaaaagaaatctgtcaaatctattatatacttactatttcttatacctaattttattttctatgcaaaatatttgcttttcaccagtgttttatgctggttattaaaaagccatgtcttgtggctgtatggtctggtttaatatttatattcaatattacatatattatcctgcatttaaagggaaagatttacagttttatgtgagagctcatatttgagttgctcctttgttcctcttgttctgaatagttttctacacttttctgcccctctctttttgcttttcttccttttccaaggccacagtttttgggtacaagccttagtccattgatttgttcatttcttttgtttttccaccaaagtgtctctctgttgggagaaagaataccatcttctaacctcaatcatttcttaccatcaccttctgtggcctgcagaaacctaagcggagcttctcttggcgttattgatactattttgtcacttggcctgaagcgatggttatgaagcagattagatgaacacagcatccccttcccccagttaatttctgcctccttccattaccgctaacttccttctgcaagcagtctgcctgccctttgcaattcattagtcccagtgcctagcaaaagagcaaagaaccatgctttgctttaagttttgctaatggtcactcacagatggagcttaagttggtgcctgacagctatatagtgatagctttcttcttatgaacaccagactacaactgacaagtacttaataatataaatattattatattgattagatactgcagtttggcctaataaaatgtgaagtttaaggcaccatttcttgctacactaagaagaccatccacaagtaatgaaatgaatagcacctcccagtagtgtgttttcccaataccactatgcattcatcagcaattcagttcaataaacatctactaagatcctactctttgaccaataaatcactggaatacaggttccagcatattctgagaaaaaaaataattttggaggggctgtggcgggtggggggggggtgtcattaaggccaacttggcacattggggtggtttcctggagcacatgatgtctttggtgatgagcaagagttagccaggccgagaaaggggaagaggtgcttcaggtcgacagaagagaaagaataggaaagaggtatgaagcagcatagaatctgctgggcaattttaagctgtagaaaatgtgtaagatggagaattaatgagagaataagaatgtattagttattcattgttgcataataattattccaaaagtttttgtataaaaacaacagccatgtattttctcaaagtttctataggtcaggagtttggcagcagcttttcccggagatcctaatccagagtttctaatgaggttgccatcaaggtgtcaatcagggctacagttacctggtggcctggatggggctggggtatccacgcttttttttttttttttttttttttttgagatgcagtcttgcccaggctggagtgcaatggcgtgatctcagctcattgcaacctccgcctgccgggttcaagtgattctcctgtctcagcttcctgagtagctgggattataggcatgcaccatcacgcccagctaatttttatatttttagtagagatggggttttgccatgttggccaggctggtcttgaactcttgacctcaggtgatccgcccaccttggcctcccaaagtgctggggttacaggcatgagccactgtgcctggcctggggtatccacttcttagcttaattgtgtggcttctgcctgaagacctatcaggaggcttcactgcaagggcctttctgtaaggtagctcttgacatggtaattggcttttctcagaataagtactctgagagagacagacagacagacagcagagagagacagatacatcaatatgggagctgcagtgtcttttatgacttcatcctggaagtggcataacattacttctgccatattctactggttacacagatcaactctagtgtatgagaaagaattatacaaaggcgtgaataccaggaggtagggaccattggaagccatattggagccagttactgcaatgaaccaggaaaggaaggcagggtctggaaatggggaggcaatgccaagagcttaaatttgattctctggcctgcatttttcagactgctctgaggaacttcacagatatcacccagctaggggtggaggtagggagttgagttagcagggattctccattccctgcaaccagcgcagcccaggatgaatattcaagtcagattccatttgagttttgagtttagaggtttaagaatgttcaataattactgttttaggcagtgggtaaccatcaaagattttatgcaggggagtgaacacatattcagattagattctattttgcagagttagattggagaaggaacattgtggggaaaggatttgagataggaagctcttgcaattgtattagtaagagaagacaggatcaaaaccagtgcagtggtcatagggtagagagggtggccaaattcaataaatatctaggaggtaaagtcattcagatgtagtaattgattagttgtgtctctgaattcctcagctgtattgggtggccatcactcgatactaggaaaaataaagaagcaggtttggaagttagaatggtgggttccctttttgcttgtgttaaatctgagatacttttctgggtagaattgtttaaagcaccagttgtgtacttaggccagaacccaaaggtagacatcaggccacttacatacttttttttttttttcttgaattgtggtttagttttccctttatgagttgtctaagtttctctccagccttactccaatttttgtaacattgtttctgattcagctttttttctttctttttctttttagtaaagaaggatctcttcttctcagattgattactacttataaggcctcttgtagctgggattgttacagcaagtggaaatgacaccctacaaatcttatctgtaaaggcaggacatttaaagcattaaggctggctagtgttcttgtctttcaatatgaggcattttgacatacaaggtttaatgccttattgaaatccagcaaatggaagctaagaagggtgctttagtctcacaggattagagcatgtagggttttctttcctttttgaaaaaatataccaaggtccatctccatgggaaatcttattactaaggaattactggttatgcccacctttcccccccaaaaaagaaattaccagacaaatttaattttactgttcattgcttagaatctgtggccatctcgtgaatcttaacaggctgcttttatatctgattttcagacttgcagtttcccatcatctcccttcgtattattttaattaaaaattccattagcttaaaaaaaatcaatgtaatcattcagtagtaattaattcttaccaatcttctaaaggagaaatgaattaacaaaacttcaaaatgttcaaatgagtaaaaagtgttgtgtggttaatgggactggtagaaatgtcagtgtaatggatagaggggtgggttctggcaaatggctgactaaattgcaaatctcagttctcccaaagctggttgtatgtccttagacagattacttaaatgtttaattgaacatttacctgtaaaggtgataacattgcctgccttttgtggttgtggcaattaaatgagctggtagatgtatcatcatggcaaggtgtgtggcacacagtgaagggatgtgataaacattatctattattagtgttagtattgttggtattattaaagaaggtagtgtttcctgtaagagtaactcacatgagtcagattccagatttgaatatcttccagaatcctgagatattttgaaagaattagtatgagttattatttgccattccatcttaaaattcttcccttctaaaattcaaaaagaattaatgtgttattgttgctaagggtaactggccaaatggaggaaatgaaaattagtttaattgcattcattacatttttaggaaggtcttgatgtctaacattctttaaataaagaatgttatgttttaggaataaagaagagagacccagtttcccaaacccaatgaataaaattaacgttttattctaagttctatacaaaatattaaaaattaaggccctgtcatcagtttttagcctgcacattggcatatataagaagatagtcatgaatggatatcactaaaacattttatccttgtagcttatttatttagtaacacagaattatctatgcaacttttagaatggttttaaaagatttctcgttttataaattagctcaaaaattagaaaatatattaatctgagtttagtacaatgaaaaatattgatacctcatttttagtaggcaagcgtaagcatcatggaattggtctagctataatagatgttcaggtgatcagtagtttggaaatcatctggtctaagtgagttcatttaaatatgggagatttgtacttttgctttctaggaaaatagtgcctaaagaagtgcatttgtgcgacaaatgaccataaagataactgcctgtttttgcagcacatcaaacatattaaagaacatacttatagtatatgtgttagtgtgttttgctatattcacatcttttgctgagcattatgagggcacaaaagaaatgtgagtcatgaaacctattgcctacaatcttactgtgcacttaaggcaagcgtaaacacatgtacagtatttgacaatgacaggtgtacctgaaaatgtgtgttgcctatggcagtatatcattatataccagaattgctaatatggatggtaaattctgtgactcttcaaagaagggagtggcaaatgttcacaggagctgataggagaggtcttgtggaagaggctgaaggtgaactctgcccagagtaatcattgggaaattaaagggaaggtgtgggatggaagggataggcaggcgttcagggtagaaaattgcagatgggtaaaaagaccccgaggtcaaattctggtatcgcctcagaaaataatttcataagcagtagaattctgtcacaacatttgcacactcagaatattgaagagttctctgggggcactgtgtgtgtaaaaagtgctgtaggtttgcacacacacaaaaaaccgaatgtaaagtcagttagtaacctggaaataataaaaatctgtttcacattaggttgtctgatgagcagcttgaagagaatcaggtagggtagagtttatgaacaactgttgggaagtgagttaggttgtgacagttttagaatatgcagaatacaagaatgtatggactaccacatccagtctcttaattcaacagaaatatgttgagcctgtctcaaagagactgtatttgatagtagcatcttttgccttaatgcttttgttaaaatgtcatgaagtgtcttcaggtgtaattttcatttaagttttattcttactatgctatgaacctttggtgcttatcaaatgtaaattttcttcagtgaaggaagaaattactagcacagccattaatagtttaatgaaaagtcttattgcttcttaaaatttgtattttcatggtgattgacaattgttaattagttaatcctctgtcggtgctcatgaggtaggtcaatattatcttcattataaaatgagaagattgagaaatcaaaaacttcagtgaatttcctgaacaacctatttctgtattgacatggcaaaaacaaattgagtttactctcagattatttttttagttaaccaaatatctttgtgttgaataattgactatctcagatatctgttcctccctgtacagttaaaaatccatttataccaagtgtgagtttgggccccaaaaagtagatttgatctatgagcttagatgtcaaaggttgaaagtagcatttggatgaattcacaagctaaataattatatataataggaaaccccaaaataacaacagcttgaattagaaagaagtttgtttcaggccaggcgtggtggctcatgcttgtaatcccagcactttgggaggccgagacgggcagatcatgagatcaggagttcgagaccagcctggccaacatagtgaaaccccgtctctactaaaactacaaaaattagccgggcatggtggcgggcacctgtagtcccagctactagggaggctgaggcaggagaatggcgtgaacccagaaggcggaggttgcagtgagccaagattgtgccactgtgctccagccttggtgacagagcgagactccgtctcacacacacacacacacacacacacacacacacacacacacacacgaaagaaagaaagagtttcttttttttttcacagaattctagagataagcagtccagagctggtttgggaactcagtggtcctttaggcaccaagacttttttcttggtgctctgcttcctagcacatgactgccattgtcaaataggctacagtgggtgccagagttcatgtcaccatgtcctgttggaggttaggaaaaggaggaaggtagaagggctaacaggccctgctgcctgagttgattccctttaaacaaccttcccataagtcccatattttgaggtgtgcaactgatagtgtctcacacaattagtatatttgaatatttatattttacattattgtgtaacattttgtattgctcacgatttttttcgtctaatgtcatgtattatttagagtacttgctaaaacataagagcttttaaattcccaatatgggcagacctttttctctggttgataacttacattcttaaattatttagcaaatagcacatcaaattttcccatggagaaactgttttgaatccagggcagaactgcagtctaggactctgtgctttatccaccttcattctttgttttgaatgtgtcattactcctagagaggaaaataaggaaacatctttattatagaagtgtttaatataatcaaatcaggcatcttatggatatatgaccccagggaatgtttgcccaaccatgacatagcacatgaaacttctgtgtacccaactgacctcaacactgtcttatttaaccgtgggaactccactttccaggaaagtatcacaaaatatgctccattctatatgtatcctcagaaatggaggccaattagtgcaaggcttgtcgcacacctgcttttgggatgtgaggtgtcacctaggtgctagcctaccactgctagcttgagccatggaaccacggaggtggtgtgcctaggtaagggctgttgtgtgacctgcctgcttctttactggtgtgcatgtcgtatgcctcagagtgctgccacacacctctttctctcacctctttctccacagcctttcccagcatctataaacaaatgggtattgggaaaaaacgatactagataatccatgcaaatgaaaaagcttatagaagtaagagcttttcaattggattctgaagaacagaaggttggaatggaatgctgaagaatggggagagccttcaagttcctttctataaaagggaaattgagactcattgtcacttagtgatttactggctctgtcatgatttagacattgaacttctgactccaagtccagtgttggtttgctacaattgtttcatcaaggtgaaatcaataatgaatcacaccacaagctgttacccaaaagcatattctggatggaaataattgcttattagggggttggtacccttgtcttcaggtatagacttgtgtgttccagaggttgcaccagatatttatctgtaactaaatggactctgcaaacatcccctccttaccccccactccatctttttgagtacttctccagtccctagctgctaccccattctttgggaacaagctaagagaaaaagcctggtaatttctaagaaggaagactttcacctattaggggcttctgccagcaatgtgagagctgcatcattttcctctgatggacaggtcatgaggacagcatcaggtcaccattttggcatgaaagcaggctttgaggctctcagaacaattgttggtatttttggaagtcaactctgtgtagggagtgttgttcaaagaggtaaaatgattagctgctgccaggtctcttttttaaaaaaccttagtttttgtgagtatgtaataggtgtgtatatttgtgggacacatgagatgttttgatataggcaagcactgtgatcaagtctctgcaattgcaggcacttctctgccttttgagtggaagggtacagagggcaggaggctcattctcagaagcttcctgtctttagttgttataccagatattatctgcatggtccgagtccttgtcagttttcttgctctactggatatttttagatttctctactcctgtgtgagacccctttccagatttaaatacatctctaatgtatccccagtgtatattccagaaacaccgtaaaactgggtatagatatgatggaagaaaaagtaagttccagctctcagggactcatatttgctaattggaaaagttatggatgctttcaaaataaaaaacaagtttatagacagtctttctcttatagctgttgcattgttagagaattaaaatataagtcataggcaatgatgatccatctttgtacttgcaatgctcgggagaaacataaatgtttctcaccattgtttgatgtttgcaaattattaatatgtatacatctttgagggtgggaaagtatttgactgaagaatcaaagagaaggagggaggagcagaaaagattttcaatataagcatgtgacttttttctatccttactgaaattaaagttaaatatttgtaaatgtttttgaagaannnnnnnnnnnnnnnnnnnntgcggttttcacaattaagagtgatggcaaaaatcacaattacttttgcaccaacctaatattataacgtgcaaagtttgcagtgacttttttatttaagtttgctttgatgacactctatgatctttctaatacatccaaaatattgagcttttaataataagagatggaaagagatgccaacataagactgttctcttgtttatacactattagatcaaaacatgtattttctaaataaccatttctattatattgtcatcgagtgtgtatatgtctacctatcatattgctacaataaagtactatagaaattgttacagttatttattgctaggttatgaaagttagtagctacaaaacaataagaatttattacttttattgcttttcaagattctttggattgattggtggatctgcttttcaccaggttgattgggaggtccacagtggtcttactcacatggctggtgctggctgcacttgggagctcagactgtactgtcactgggggctgtggttgtcgcttttctaaccagtcctttccacatgtctcgtctggctttcacagcatgggtctaggttccaagaaggagtacttcagggtctaagttgcagtctcttgaggcccaagcttagaaataacagcgatacttctgtgttctctgttggttaaagtaagttcccaatccagctcagatttgagaggatgggaaataaactccacttcttgatggtggaataggaaggtcacactgcagaggagcacgtgggatggcagttatcgttgtggtcaccttgggaaacataatctgccaccgaaatcagagtctctcttattatcatttcttccaagtctaccatgtaagtttaattgatcttatgcttttaagtgagaaataggaagcaaggacttatacaatgtaatttcttaaactgtagtcttttgttcccttgtatcatgggtcgcgtttatagagtggtatgtctttaatgtcctaattctactctcagatgtcatcaggaatctttatttataaaagaagcattagtcaactgtggtggtttctcaccctgaccagtattgggcaatcactttatgaaagaccttacagtgttgttccccgacatattttaaaacctgttaggggttttttgtatacagcacagtaattgagttgtatttcaggtatttgtctcctaatgagagtactgcatagttaccataatcttgaattttctaattctgtttgtattcagaattcttcacagttacttttcctaacttatcttcttagtctgtggagaatttttgtcttagatagttgtcttgttcgcatttacatcactcactgtctttctctcctgccctccttcattggactttgtagcacgaacatgttggaagcagtttagcttttgttttgtaaagttacatgttagtattctgtgtatggtttcctacccagacctcatgtggcccaagccctggtatatgttaagcaaaggaaagctgacttttcctgatagggatgagtcagtttccttctgcatcaagatgtttatacatggggacagatgcagaggatgacaaacctggatcatgtgatctccagattgtttttctttgctggatttccacgtgggaagtggtaggatctagaattttgctgctactgcgcccaggatgtccgttgtccaaggtgtatccatgtttgtggtctggctgtttggcaaggagccaacgctgcattgttttggggcatggtcactctttaaaagaggagtgtgatcctgcttgatcaagtgaaactgtagaatgatttatttcactctgtgaagctataggtgtgttagttacagttactacctgtgaattgcttccaattttcacagtataagatggtatttccttctccaatgattttttttaaagcatactaattctaatactagcctttcatcatgattattgttgctgaaagtacatagggccaatgtaatccctagattggtgtatgatcaaggaaatcatatagtgtgccactttgatgacccgctgttccatttttaaaatataaagtatgtgggtaaactggatattgaatacattcttaaaggcgaacaaaagtcctagggatagagtggtggtctgcttcactttctcttgtgataggcaggaagaaggaaggatgtatagtgtaattgcatcactttatttgagacttaaatttgctttggcaatagcagctagagagagagagatgccctaaggagcctaaagtctaacctcaaatttactctgacccagtccacatgccgaaatacaggtagtatatatctgagagatattctgattgtatgatttggtccaaggttcattaattggcagagacctttgactaagacatcatttagaagaactggcagattaaattgaaagtatagttcaatgacttctataaattttgtatttctttgggtggttatatacatttctttctctctgatttaaatgaaactgaagactagtctgtgctctctgacaatagtaactcaacagtaattaagagaagcaatttttcagaataatgaaaagaatctatataaccaacatcggcaccttttcatctaatgcaggtgaataattgaatatgttgcgtgtagcccaggacctggtacatagagagtccccagtaaatgtttgatgaatgagtaaatgagtctcaattagtgaatgtactaatctattaataactcaatcaaaaagtctaagaatgggagggaaatatttctgtactaggatttctaaggatttatgaagattgttataataaaaagggaagtatttgaaactcatctcagtcttctagcagaaataaagactaaatatatgaatgccttaaaaacagagtttttatctgataactggtagagaaactgtttatttctttctatttgcactttccctaaaggacctatggtttgtgtctattctgtgaccatagtataacagagtacgtatttgtcttcttgaggatagccatcattcattcattttctctgccagtaatatgaactttcatagtattacgatattgttagtttcttaagtcatactgcatttagtggtattcgcattcattttctatattttcttgtgataaattctgttatagtcaaaaaatttcaaagcaccctggcaatgatttattttaatatctgcgtgagactaaatacacaaataagaaaggatttaatatgaatttttcatggatttgctgtaacttgaatattgtgaattgattttgtgcaagctgtcacagaccttctgattagcacatacttactagaacatctctgttagcaaaactggattacaaagtgtaaatgccaggtatttgtgcttattctgtttagcattctcatgagtttctttacgtatatctagtgtgttacatatgttttgaaagagtacctaccttagagaatgtggctcttgttttatggcccattttaattcagtatatatatatatgtgtgtgtgtgtgtgtgtataaagggacatgtatatgtgtctatatatatgtgtgtgtgtgtatgtgtgtgtatgggaaaaatgtataaagaaatggttgctacttacaaggctttacaatttatggggtgaccacacatacacacttaacaaatacagaaaaacataagacttttttcattcattcattcaatacatatttattgagtaccagctatgtaccaggcactatttatttcttatactgaagatacagtcttaaacaagacaggaaagtttcctgtttcttaggagcatattgtctagtgattatgattaagcacagcaaaatatagagagatacatcctagagaatataaataagcaccaaaatgtatagtcaagacatgagaacttagtggagctcaccattttccaggaaggcctccttcatgtcaaggaagacttgaacttgaccttgaggaagagaaggtatttgcagaggctcccagaaagaaagttagatgtgtacaccattgtgtgacctgagaaggccaaaacactctctaaagaacagtgtttgttcaaagaaaattctctgattctcattcctgttccatatgcaccctccaatttccacaggttaaaatctcaagactgtcagcgatggggttctattagaataagtgtgactgagtatctttgaagaaacaatctcagatcccaaatccatagcaagtctaggcacatagtatatatactacttgcatatatgaaattgatgctgaaagtgtgcaaaagtatctctagatagaaggattcaagtgctatagtattactaaataaaaaatatttgcagagagtggtggcagatgacaataacttctttttgaggaattttactttcttgtacctagtgctcctatcaagtgggatattttcatcagggatgatagagctacatagaattttgtaaatttataggaataaaagggaattaaataaaatagactctaagtaacaaggtctaaaattgactagggccattgaaacaaaaagatggataaggaagtgaatagaagggcataccttcagctatttctgtgttgtctgtgattgtgcagtgcttttaaccaaggtaacaagggctaagatgaaagtaaaatctcttgggcttcatatctgtcaaattagcaaaaagtgtgacaattgtaagtgttgccacgatgtggagtaatagacactgctggcgggagtttaaatggatagaaccactttgggaaaatggtttggcattatacactaagtttaaggatatgtaaactctatgactcagcaatttcatatctccataccctggagaaacaggtatgtatgggagacaggtacatgtacatgtatattcatagcagcattgtctgtgatagtcaaaactgaaaacaaaccaaatgtctggtacacagaataaactgcatattcacataatggaatattttcttttaatgtattttatttatcattttaaaaatatttactttttttttttttacttttttgggtacatagtaggtgtatatatttatgggttaaatgagatattttgatacgggcatgcaatgcataataatcacatcaaggtaaatggggtatctgtcaccttaagcatttatcttttgtgttacagacaatccagttatacccttttagttatttttaaatgtacaattaaattatttttgactatagtcatcctgttgtgctagcaaatactaggtcgtaaagcattctttctaacataatggcatattattagcagagaaaatgaatgaatgatggctatcctcaagaagacaacccctgcaaatgtcgaattgacccaagaaacaagatgacaaagaatacatacagtatggaaccattcacatggacttcaaaactaggcaaaactaaattatactgtctagggttgtatacataggtgtgataacaataaaagaatggaaaatcactatcacaaaggtcaggttagtgcttacctttagggtagaaggaatgggtagtgatgaggagggacacttgaggacgttttaggtgctgacagtgttctatttctatactagtatagtagttatatgagtgttgtttataattatatcaagttgttgcttttctgtatttttatgtaggtatatttcgtcaattttttttaaaagaaactatgtgaaagagataaaggatgtcgcagatagcagtatagaaagatttctgcccaaacctgctccttttttttttttttttttttttttttttgagacagaatcttgctctgtcgccaggctggaatgcagtggcacgatcttggctcactgctgtctccgcctcctgggttcaagcgattctcctgcctcagcctccctagtagctgggattacaagcatgggctaccacacccagctaatttttgtatttttagtggagatggagtttcaccatgttggccaggatggtctcgatctcctgaccttgtgatctgccccgctcagcctcccaaagtgctgagattacaggcatgagccactgcacctggcagcctaaacctacttcttaagatgtaaggcaattatgcaaaaagaggacaggtttgccatgtacattttcgttacatttgactgtaatttgcacatggtgaaaaacagagtttgctactagtgtctagtaatttaaaaacgaaaacctgtttttccagagtcagaagaagacatcctaggcctatagaatcaaatttgacaactaatttgtagcataattattttcccatgctttatgcatatttattgattgatgcagtctcttgaattatacctagaagcaaactgaccagcggatcagcagaaaattaacagcaggaaaaaaaaattagtatacatgtcttatctagagaaatgaagaaatttttattgcttttatcatttaaaaatcatttgtgaattcctctttaagagaaacctttaatagtttcccagtagtaccagcactgcagagtattatccagtaatgaaagagaatgctaataaaatcatttcttttttatattgtaatggatcaaagttgcaacttcaaaataccaatgataaaaatgaaccttttaagattgtaggttactgcttgccaaagataatattcattaactagagttcacatctcatgctctggattaaagaaattatttgcaagcaagtaagaaaaaaattatctttaatttgctagtcataaggcactacttttttgaaagagtattgtctcttaaaaatggatttttaatttaaattatgaaacagtcataaaatatcctctggtagaggctttgatggtttgcttgaaggttggattgtatgcaagaaattgtggaagcaccatttgctagaaataaattgccaaattgatttattttcaagacaaagccatacaatactatttaaatacctaaaatataaaaatgaacactaacaaagcagccaacgattccacagtagagcataaaatctccaagtgttgtgaagagtatcataaatacctatcttaagaagctcaattaaagtttggaaataataattttgttgttaaatctctaaagagctgcaatagtgagatcaccttgaggtagaatccagaaaagctagttttaaatattgtactcctggagcaatgattgattgattctctagtgtaaatttcttggtaatgtctgtttagagacttctaagaaattaaggaatttgtgtgtgtgtgtgtgtgtgtgtgtgtgtgtgtgtgtatgtgtacatgtgcaagcaagaaaatctgttaatgcagcaacaaccctttgtggagccctcatctgggcgaaaggtagaggagtgtttgctaataatctctgtgtgatagaagatagcttatgggttttctttaattgtgtggaatcatatgtatgatttttctttaattattgattaaaatgatcactaagcaacagggtatccagaactttttggttgttttatgttctgttatcgcctcttctttatttaccttcaactgagaaaacaaaaatattgacttaggaataaaggcagaatatatatgggaaaaccattgggcagtggacccagaagtgaccttggagatcattatatacagtggattcaaactgtgctttggggatctctggggcttcctacagtatgaggagagcagagtggagatgggccctggggactggaccctgagggtcctaccttggattcaggttgggtggttttatttatcttggacttccccttaaagttttgtttaaagaacaaataaaaacagcttgaaagccactcctttagtaaataatcccctcatctcccactttcatgtttgaattaattgcagtccagtaaagttgtagcttgttcaagatttcactgctggtagtggcagaagcaacaacagaagccacatggtcatgtctaatggggctgtttccctgataacgttttgctttccactatccatacccacctactatatcttgtatttcttaatgatacacgccattatttaccacctcactatccacttccctgtacttgagcacaagctacttttgtgtcatgtcagggacacaaaagaaaacacagttagtcatgatgttacaaaaaagctctggggaggatttaaaaataccagtgttgagaagaatttgttggaaatgccctttttgtgaatatgtgccattattgtgccctgacattaaggcaactcatgtgaaatgtaagtgcagtgacatggtacagatggtgactgagaggcccaaatctcaaataatgatgaaatgaaattagacatttttttcacagtaaatctatgagattcaccagaataaagtatccgaccagaataaagtatccgacatctgagtcagcatcacagtttgatatgggatacagcaaaaagtgggaaactggcaggtgacatgtgtaagtgttggtagacatgctcatttgactttattcaaaccaaagacttgccctgtgttttccagggcaaaaaataatatgtggcagtttaagacaataaccttggatagcactttttcttctttttattcccctcctttttttctttcaataaatattcattgagcgcctattatgagccagatactgtcaggtactaaaatatttcctgtaccaaaagaagttaaaaagatgatttttttttttcttggtgcaatgattggaacttccaaatgactggaatgaggatgtcttaaatcctgacaacttttcaagtacagttgtatctagagagggtgttgattattgtattctggaaactcagaaattctattttctcgagtttcctcaattgaaaaataggaataccacttgtagaggcttatgttgtataaataattgcaaatatagtatgccgagggcttggcgagaagggtggcagacgtctacagagagtagaattgtctgcaggatctgtggcatttattgactcagggatctttgggtgtttgaatgcaaaacccagagagctgacctgtatttctcctggtggaagatgagcctcacaattcaactaactgcttaggaggaaattaggcttcctatgaattaagtatacgttattgtaatcctatatctgaagctcaaattcattacttactcttatgtagctgtgtttaattccactacctttacctatgagtgacaatagcaggggatattgtcaaataagatggccacattcaaacattccacatgaggatttgggaggctttcctaagccaaaatgctgacatggaacatttattcattttattgcatttaattggtatcttttcatgttgagtgtagaaatggtcactttaatgtttacatttttgtatgtttttactttagacggagggtaaaatagagaaattgatgtcagcagtggacaattttcaatgagaagaatttcactcgtgcattatttatggccacatgtgaaagaaagaacctccatttcttatcattcaattatatcttggtagaattctgcactggagccccagtcatttggcaagtgtattaatagttttggtaatgtgactaatgctagtcctctgtaacagtagttccgttactggcctttcctcaggcaccccacaaagctttatatttcgtctaaatcaaattttgggtatcataaaatggagtacagtgatggaaatgaattcatttacccatccatccatccatccattaattcatttattcatcttttcattcaagaatatggcttactatcagctgggtgcagtggctcacgcctgaaatcccagcactttgggtggctgggtgggtctctactaaaaatacaaaaattagccaggtgtggtggcgggtacctgtaatcccagctactcaggaggctgaggcacgagaattgcttgaacccgggaggtggaggttgcagtgagccaagatcacaccactgtactccagtctgggtgacaaagtgagactccgtctcaaaaaaaaaaaaaaaaaaaaagaatatggcctactgtgcatcaaacactgaacttctacttcaatagaagtagaaattgctctctagttaaaatttggtagcaaacagtggtatcagcacctccctgtctactcatttgcagtcagtactctgggctcccagcgaggggcccaggaataagagcacagaatgcgtatttcacaggtgttagtgcttggaatgattgatgaaatttaaatttggaataaaacaccagctttttaaggtgttcataatcacctagatagtctgatattaacccttagatcaattttggggagtaaagtataaaatttgtctttcagaggaaggccaacagctggattagaaggttctgaattttaagctgcagttcatcttgatactattactaatcaaagcgccttcttcagttactctggatgcttataaaccgcagactgcatgcagttcatcaatttggctgcttttccatagctgctatgaaaattgcaaacaaaattgcttttcattttgctttgacaggcagttttaattttattcatcattttagcaaattgtataacatttcagttgtgtgcagcattgctttttgtcttttttttgcactgtatttatgccgaaaatatgaaaacaacaataaagaagagaccaataatggcatgttgtagttaaaaagggcttattaaaaggatattttctgcctgggtgaaaaactttcttgaacacgtcataaatagtttataacacacagagctacacttttattgtgtgcggaagttgattgtctagctagccgcatttttaaaattaaaaaataattttccccccaattttgactttatgtttcgtttactcagaccctttcacagcctaattaggcaatgactatctatctgaagtcatcataaagaccaagtaaatcttggacacacaagagagttgggggtaagtggggaatgcgttggttagggaaagatggaggaagcacataaagatttatctgataacaaagtatatacattttcattttgtagaaaaattactaataccatcacagccaatgggctggttttatgatgcgcttcctgagctcttcattgtagtttcagcaatatgagaagccctgcaagcatgcaataaaaacagagccgacttcgtgctcgccttcctcattgatgcctcttgcacaaggaaagttctgttcgcataatcactgagggctggtggcatgctctctaaccttgaatgtgaagggactggggagggaggagaatcctttctgccaggggtttaaaagaaaataatgtttattcacaatactttttaggacataaagacttttatttaagatttacaagattgctggtaaggatgattcataaccgaagtccagttttccttagggattaaccaccatggtttgttttttgtttttctagcatagcaactgaatttcatcattcattttgtcatttagcaatagaagacaacttcaccaaagaagctcacagtacgagtaaaattggaagtaaatggaagccatatgttgttgctgtaatttccaaggttaaaaaaagctatagttttggctattgccttttattctaaggagaaggaaagttaaaaaaaatgcttttattatcaatagccttaagttttagaaaacatatttattttgttaatggcagcatgaaaagctcatgaccaaagtgtttggagcaaggctgatgtctggcagtaatccatttcttaacttatgtacaactgtggagttattaatgctagtcaggttatgtgcaaggattcaggaaaattctttattcctcattgactcctgacagttattgtacctaggaactgggtaacgtgttctgaagtgagcaattatggaaatgtttacttcactggctgcatgtaaatgtgtgcagagaatgtaccagaatttttccttgggggtatttaattctctccagggcaatgaaaatcaaatgatttcttttttttttttttttcaaagctgggtttttttttttttaagtgttataatgcagctgaataatgatgaatacagtagaggaaaannnnnnnnnnnnnnnnnnnnnnnnnnnnnnnnnnnnnnnnnnnnnnnnnnnnnnnnnnnnnnnnnnnnnnnnnnnnnnnnnnnnnnnnnnnnnnnnnnnnnnnnnnnnnnnnnnnnnnnnnnnnnnnnnnnnnnnnnnnnnnnnnnnnnnnnnnnnnnnnnnnnnnnnnnnnnnnnnnnnnnnnnnnnnnnnnnnnnnnnnnnnnnnnnnnnnnnnnnnnnnnnnnnnnnnnnnnnnnnnnnnnnnnnnnnnnnnnnnnnnnnnnnnnnnnnnnnnnnnnnnnnnnnnnnnnnnnnnnnnnnnnnnnnnnnnnnnnnnnnnnnnnnnnnnnnnnggggaaaaaatcccaaatatgtatgcagagttatgaaatttctatggatgcaaaatggattttgtgcacatcacgcccagtttattgatgttgcccagtagaggttttttcttttctttccctgtcacctatcaggtttacaactcttgttgctgaaactattgggggggcattttcagtattatatcttttctgagaggaaaaaaaatcataagaattaagagatttcatgtgaatcagaatgagatgttttcagcattgtgacatttctaaagcaaacgagttctgtgaaagtccattgtagacagatacaagcaagtagaatcctaatgcttggtcaagaagttggatacttatctgcgaatctgaagtcacacagtccttagtgagaggaaactggcttcaatttaatgctctttctgaggaggatgactagttgtatcaaagtaattttttaagtttcctgcagatttgtttttacagtagtgaaaaaaatattagtttaaattggcctctgtggtcatgtgcctgtcattggaatagagttagattacattaataaggaatagttgctgacctttatactctcttttttttttttctgaatttctcctgaatttcttaaggaggggtttcataaagagggtttttatgtcttgcagaaaattgagttttgtagacattacctaactcttgatttgtcacaccgggatcaataacatttcgctgctcttaaacacacagaatcacaggggacacataatgttttttataagtgcagtaaagttaacgtgttgttgaaacaaaaactcctctgacagtcctgtaataagtacactctgaaactagcaaattatctgtaatactaggaaaggcaggaagagcgcttaagagtacaatatgtacgttgttggcattaagcgctgcaagaataagaaattaggatttgctgctctctcctcagttgcatgtcagaatgattacggagtcagtttcctcagaagagaagccgaccaggccccccaggagtgtttcttgaggccacgtttttaccaagtttgcttggtatgtttggtctctttgttctttgaggatattctgtattagttacagagaagcattttccttatagcaaagaaggtattttaagctagataagaaaaatgggccattttcttctcctgtccccaaagtccatgtctggtccatgaattttcttttggagtattcactgatattctaaagatgtcttcagcaaatataagtcccatatgatgtaatttgcaaaagatatttggaattgaaaccacccttgtatgtgctttcatttcctcagtccagggagtccgaggatcttgtgttagattagactaggtgggcacgcttttaaccgctgaggtgccttggcctagactctgcgtcttcccctcctccccttttcgtttaattaaatttctgattcccctttccagaccttcaaatcccgtttttctttcctcctacccaaatggtgtttagttgttactcagcttctatttcaagaaatgaaaaaatagagattatttttaatatctgagagatatatagtctatgagatgtgactgattattgtatgacctttgttttttctcaacatttgtttttctttaggaataaaatagtagctaagattggaaatctgtttcaattgagaagaatgggtgttttgttggtggcagacattggctctcctctgtatggtggtaggtagggctggaagctgatgatggctgatgtgcaaatcttgtcattttatgcaagctggtgctgttcatcctccagctctttgcagagaatgtagttttatgttcatttaataattatccattttggttgtacttgtcggggagagcttcttgagccccatcagtttttcagagaagcaccactcaagctcttctgctgaaaatgtttttccttccctcccttcacttcattccactcttccccttatcgactctctcatcagtgccagagctcttcagtattccactcctgtcctttgtgaagtgattttgcccagacacgtctggctcagggtgaagtgccctcccctgagagcgcgcactgcagccccaggtcgccagcaccatgaatacattattatcccaatttccatcctgttgccacggcagcacttttggagctgctgggttattaagtcgtacatcactaataccctgatatgagcagaagttggatttaatatcggcctttgatcagattacctcccaacagtcagctgtcattagaaaattcctttgctcattataccctcagagctctggcctgtgtagcaaaagggtggcaggcctgatacatggaggcaatttcaagcctgggccttgcactgtacacttaatttattttctgacctttttgtgatttggggagattctgtatagccatgcgtgcatgtgcgcgcgcaggcgcgtacgtgtgtgtgtgtgtgtgtgtgtgtgtgtgagaggtgagagagagagagagagaagtgcaactacaaaatctgtctgtagttctgtaggtggtggatagaggtacgtgtgagggggtggttgtcttttgccaagtgatactatactttgttggaaagtgtctgttttctgcctgtcctcgggtaatgtataaaacatggtgcttcaggtagagatgaagggtaaactgatgtccccctaaatggccagcctgtgtatgcacctaacacttcactgagcaatctgtcaacatgtcagcaacacatgttttataaaaagcctccagtgggagcaaaggctcctgccagggcttaggaaatgctttgaattcagcagatttctattgctggagtcccccgaggttccttttacaatgcctacatttcagaaatttgaacttgggacccttagggggttctctccgaatgcctgaaaatgtagagttatattgttgcgtgtccccaagcggtctttactaatacctgaattcggagaagctggaaattacagagctccccaggggaagctttatccacaccaggaagaagagaataactctgcagggagattgcttaatgcattgctgaaataaaagaatttgagagagatgggttgaagtgttttttttttttttcccttttctggccactccttcagcttagctaagtccttaaagacaaagtcagggtaaggaagcagctgggctctttttaatgaaattttagatgtggcttttgaaatagtcagatgcctgatgcctccctgtgtgtgtgtgtgtgtgtgtgtgcgcgcgcgcacgcacatgagtgtttgtgtagtctctctcactagaaacctcttttgtttacatgcaaaaagttgttttcatttttaggtgcatcatcagtttcatcttgtttccttccaggcttagctgtttctttttttatactcccaatgtacctgtctcagttacttggaaatatttcttcatctctttctctttttttatggtgcttttcttttattacatctgcctgtcatgctttgtactctccccttttcataacttgtggtgttgctactttcctttcgaactctcactgctttattgaagacttctttatgcctatgactctgcctctctttttaattttcctccggccctcagcgctctcgtctcaactcagattttggaaatacttgggtattttttggctgctttctgatgagatgactttgctgatttttttgtgtgacgtattgttattttgctgctgctacatttcatcaagacaggttgctttgacaatttggagtagatctgcaagcttcagactcggttgtgcattcattcaggaagtaaaggatagctagagcagtgcgtttagtgtgtgtatgtgtgtgtgtgtaaatgtttatcatacatacatagggcttgagggcaagggtgggagtgtcattgttgtattttaagtgaataaaaaattttgaagtccatttctgttctttattatctctggtaaagagaaagaaaaatatcctccttgtgtgtgcacttttctagatctttccttggctgtcttttgacaccatgtcacctgaccttatcaggagggagctgggggctcaggctcatgtttactcagggtcctcctgggactgaacactacctttgagtccagcttctttcagctttgcagacaaagacaaggaggacattctcacagaactcagccgtctagtgtaaaacagttccagctgttgctgctcatgaatttttttgggggggggggaaagtattggcttgttttttaggtgtggctacattcatagagctgtctccagacattgattttttttcttcaactgattccgtttaaaagtggtgagggattaaaacaccaactcttttggaatttggcaaattataataaggttttaaactcccgtcaacgatgatggggggtattcagatcttttgcttttgaagttaaaaagggtcagatgttttcagatttacccaaatttacgatttccagcagcacattattttctattttccatttaagtttatgttcagctattgaataatattcttggatttttctggaaagctttctggtgaaacatcaagacaatgaaattaattatacttaatgcagacacataaacttggagggggtatagttggtgtttttaaactaatgttcttgctgatacagcaaaatcctgtgaaggttttatagacatatttattgtggtccagtaattggagaccgacctcagcttttaattagcgtatgttggaccagagaccagggaagagcccctgaattaggctctgattttgactcttgctaagtgctggcaaattcaagggttaagcttagagcacagcaatcctcatgagtaggagaggcaagagtgggaatgtatgatgtgcaaaaccaggtgactgaggtgaaattcttccttagacagaaggaggcaacttttcaaagtgaggggcctggtggaagctctttgctgagaaaaaagatagtgagtggaggtgcttgttgatatgtgttagaggctcatgccaacactcctgtgagattttggttgtactttccttggatagagtgcttgtcccatccattacacagaaagaggtaccagctgcttcctgcacaaagcaggcacgctgtggttaaagtcattctctgtaggtttaatgcattggaggaaagcattttgtacttaagcactttaaggattcactgaaacacttgaatctggctccctaaaaattttaaaagctcttttatctctactccacgtggtgcctttcacttagaaatcttctgtgttctttgctgtccttgtcagtctggaaagtgctttattcttgctggatttttttgttttgtttttcttatttgcaggtgtccctggtaaaggcctaaaggggggaaaaaaaagcagtaggattttttactaaaataatatttctttttaggtgtggcattttgtatataatttaacttaatttttttgggcttctgactagtcctttcaaaaagatccctctgatgccctgtcacagtggggatggaatattgtttttggcacatccacattgcctttcatttccctgtccccaccatgcaccgccccctccatgtgcgagctcacactttattacctgtatacttggccagccggatggagtgccgctctgcagacttcctctttccaaacactgaactatgttattctgacaccgggtgctgcctcccctagggcttgggtgtgaaggactagcctgcactttgctccctggtctagtggcccgacgcactggtcacaagccgcctggctttccagtggttccgatgtgcatgtttctcaccctgcttctccctactcctctctggccctcctcctttctgccttcctacctggctccaaaggcagctgatccccctcatccccccaaaacagttttgggatgttttggaagaaataccagtacacatattcataggtgctctgtgttctcaagtttaccttccaaactgtagaaagtttaggaaatggagcagaggagttgttttttggaacccttggattcttaaacagaattttcctgtaattataaacgagtggcaacttcctaacaaaattaatccttttctcaggaagggtgcaaagagtattttcaagagtctgaaaaacaggatcctattttgaacaaaaggcaaaaagctttgcctagaatgtgagaggatttttttttttctgccagttttaggccagcaggattctagtaaatgctgatgaagtaccgcctgtgattccttccgttatttttgaccgcatgctttattctagccacttgcctggtaagatactctaaactgcactggacagtcagaaacctcctaaagtcttttggtaagattgtgtttcatcgcattcatggaaggcaagtcacattgcctgagcgcaatttctagctccaccttttaatagtcacgtgatttggggaagttgcttaactaactctttgtgcttctgtatctgtaaaatggagctactaatagtccccttctcttagggttcccttaaggagtaaaggagattatgcatgtcagacacagtgtgagtttagaacatagtgttcaatgactgttagctgtgattgattgttactatgtagagtaagtcattcttaaacttttactgttttccacagtctacatttccagcacatgcattctatggaacaaacttcttgacttgtgatttgggtcagcaaacttaatttgggccaaagttgtactttagttagaaagcaagaccctcccacttgccttctgtgtgcaggaatgaggaggacatttcctctctcatttagtatttgtgttgaatgacaataacaggatcaaagtaggtttacatcaagcataatttcctcacgtgtgtttgagattgcttcttgctttgctcattattttctagtcctggttttctatgaaaaagtttctgcagatcaaataccatgcaagacggataaagctgtaggtgcataggaaattaaatggttgtggaacactaatttatatatctctggactcttcacccctaagtccattatttgttgataggatgtaagagaaatttcacaactgggaagtagaaaatgagggcaagacaggtgtaaggattgatttgcttagaatgaatttaagcaaggaattgatagtatgagcggaaagggatttgggtgagagagagagtgagacagtatttagaagcctttgtcatgagcccttgtatttaggtgatcggatctatggtttatattaatatatattatccttgatcaatctttgatgtgaatacatttaaaacaaatatattcctagaaggctgggaaaaccctgttcttctcaatgggacaataccatttacttttgctttaaattgttttacagagaaaagaattgatcagaaacaaataagggtgatatcaacatttatatgttatccttctagtttgcccaaaatctcacaactactggatgtgggctctactgtcccttccttctttgtttctcactttgaaagaagcctggagtccttcagaatccagtggtactacatgtagttctaggtctgacttgtgtgtgtgtctgtgattgagtaaaggtgtagactgtcatcaggtaatgattattgcatctgaaacagagaaaaggaggagatacaaagagacattagaaagaaatcttgctctttttttttttttaattttttacatcccttcccaatcctgatgaaaaccaaaagagagggtctttttctttgtaaaagtgcctgagtgtgtgtgtgcttaaacagaattgtcgtgtgccttcaatgacatcatgggcatttcaccttcacatgtgccacttaatggtgctggtgtctgtgttatgtgtagacatttgaggcatttccctggcattttcttctattattttcaggactgggagagtctgaggcaggagggccatctgtcagggctgcggagcagcgatgaggggaagtcagcgtttgggtggtgactgtagaggagcatggagtgtgacgttctccaaggatccttccagctctgagcctgtgattctgtgaaataatttggccctaatgtagtgccagggacatttttttgaaacctaatgtgatatcatatcctttatcaatatatcgtatcactgcagtttgtgacattatgctgtaaaatgctagaccataaaagcctataatttatgaggctatattaggtacttactttatgtattatagcctgatagccttgtaattcaacattgcctacatttattctatatataattccatggagggttctggtgacattataaaccacaaaagcagagctcaagtggttagtcattagaaccccaagataaaaatacctcgtattacattattcagtatttattatttcccataatgtgaagttaaaacgcttgcatatgaaacattttctatttacattccacatcacggcattcatatacatgtcaatcagaagtgctctggttgaataccacatcacaaccatatataaccttgtttttgtttgaaattatgtttgctatacaaggatgtgttgtccatccctctgcaaaacaagtttttcccctgactggttatcaaagaggaaattctgctgcccattcgttgtggagttttttgttgcctgttaaagagaagccaagtacatttgtttttgaatgaattttaaatcattcatacagagctttgtcaaaaataaatactctatgaagctcgtttacacacaaaccactgtagtattggtcatgggccaaaggctgtagttatactaacatatgttgaaatgcattagatcattactgtagaatgctgtagtatatttttataagttgtctgagtgtccaaattaattccataataagtctgattgatgtaatcctcttatataaagttggttcttgttgtataaacaatgccactctctctcctgttcttcaccttcctcctcactactcctgtctaccttttctgggacattttgattatagaagccatgggtggcatgacagattatggtaacagtggcatatggtatatttcatttgatttcagaattaaaattaagcgcttcactctgtcttcccccaccagtttctccacaatttgggtagtttttccttgagatttgcagagactaaaagtttagaaaaagagaaagataaccaaaagttaataaaataacggagttataaagtacctgaagccaacctactgtaaaaagtgacctgttttatggcatcactttataataactattcacagtggcaagcaagtctgtagaggatccatggttatagtcatttattatttgttaaaagtggagaaagagagattttttttttaaacaagaggaggaaaaattagaagcagcaagctgactgctttcactttaaattacagtgcaatttcttttctagccagcaagtgacttgaaagtattgaaagataaacaacctgagcaagggccttggattcttgccatatgctaggatctcaattaagggatgaaattgcaagacactcttcatttttatcaccagcgaggctgggttctgtgggtcagtaaagcaggcaagagtggcggctgttcgaggcatgggcacagctagtggagggtcataactacctgcattagcattaatgggacttagcagcacagatcgcttcaaatggaagaacagacccaaaagggaaaagtgggtagagagtgggggttaactttacttgaatctcctctttgttggaaatacttgtctctttttctttgtcatgtgctgaggcatttactaatgagtaagtaacacaaaaaatcacagatgaaagaaattggattctcggtagaggactgagattttaagtgctattcaaaatacaagttgcagaatattggaattaccacatttttgggtacatgaatagtgattctctccatctgagcactaatttgcattgcctgtgctgtcatattttgctgtggcaccattttctctaagtattgcattattgacttaaaaggtgtcattttccaaatgatggaggtaaggaagtacattttccttatttcgtaatttgcacacagattgaagaagacttaccattgtcacaaaatttggatatgatggatcttgtattttaactggattgtgggtgtagggaaatctaccagtacattaattttaatggaagattgtggcatccttgaaaaatattttgaaagttaagtcatgttaattttcttccttatttctttcctcctgtttcttaaggcctcatcatctttgactccttactcttctgtgccatcaatgataactgttaattcaagataattgtggctttagtaatgtttctatttagtatggtgcttttcacccataaaaatatagtgcagatgttaacttacctgatccagagctgaaactaaataacttagtgaaatgctaattttcttttaggtgtgttcctcacagaaagataaggtaaatgacatgaaatacacacacccattcttccactgagcctttggcactcaggtttctgtcagtacaatcatttatgcatattttacttaatagttgagggtccgagtttctctttgatgtcactccgctactgatctttaacttaaaaacccaagttagatttatgtaggggttttttttatttttttgtgccctaagcttacctttctcttacttcctatatatgaaaaactagctggtttgtggcaataggaaaggaaagtaacattgttttaaagccagattttgcagtggtgaaatgaagaaggaaagatcgaaaaattataatatttgataagcttttgctcttaataaatatataatgcttatattccctttttcagacattctgatgtaatagatacactttttttttttttttgagacggagtcttgctctgtcactcaggctggagtgcagtggcataatctcggctcactgcaacttctgtctcccaggttcaagcgattgtcctgcctcagcctcttgaatacctgggattacaagcgtgtgccaccacactcggctaatttttgtatttttagtagaggtgaggtttcatcatgttggccaggctggtctcgaactcctgaccttaggtgatccacccgccttggtctcccaaagtgctgggattataggcgtgagccactgcccctggcctgatgtaatagatacacttattaatgataatatccaaactcatttaactttcagtttagaatgaaccatcacagattgtgttttgttaaatgtaaaataaaggtgaactaaatatatctgtgttaataagacttcattaacttcttcacagatacaaaatagaaagtgacgtgcgcatatgaacgaggctttggaaggggcagtgtaaaattgaagtgtgggatgtgtcttaaagtacaggtcagtttcagggagctctgttttccttgaattaggcaggcagcattaatgcattatgctccactgttcagggaggtgggacccctaagtacttcctttggtgtccaagtatccattctaagtgagctctttctctgtctccatgtattcagcattaaagtgatattttacattgcttagaaattatgagagtgtttgttgctgttgtgtaggaaggaaataaatcaagggcttttgtgggatttaaaattcttcccaagaggaaagagctaatattaaggccttcacaagtgggattaattttgtatatctctcaggagtctattgggtattatatttatacattataaaatgtgttttgatatgccttaaattaatatttttctatctgcagggtgaacgtgaaggtagcactttctgtctggggtgggtggagggggaggaaggggaaggaaaagagagagtgatgaagcccctctttgctgtgcataagggcatgcatatttttggtctgatagtgatcattttctgtgatgccctgagtagcctcacaggcacagtttacctgtatggtggcaccaagcagaaaaattccctgctttttccactatcactgttcaaattttacctttataagttagcccttgaaagtaagctctttttgcacatggtgccggtggccgattgccaaactttgtgctcctccgccatcaatagcagcttccctggacgtcttttagcagatgctgtcaactcatcacctttctctcactcccctcacactgccttcatggatcactgcgtatgctggtgctcatgtgtcaaggggaagggcacagctgcaaaaagggtcacccctggaggcccaagcttcctgtctccgtggcgtaggcaatcctggtcagtctagccctgtgacctgtttccctttcctttccttagatttgtttggcaggaaagcccattggccccagtgcagaacactaaaccttggctgatggggagaaggaaagagggagggagcaatccctgaaaatgtagtagcttgtcatcatgtggatacagtgtgggtaatcaaaatgtgtattttgaaagtatgatgtgtttcttgctgtctggttaataatctttgttatcttaagagtaaatgggtaggcgtgctacacatgatgttattaccgcatgagtgggtgcccggatggccaataaatcaaagtgtaaagattctgtacattcgttttcatttgttcactagtttgcattcatcttaactactcagccagttatagctctagattagagtaaaacatgcttatttgtcccccttttagtgatgtccttggctttaccttcctattttttaaaaaaatttttgcgccataagttgtattgggagaaatgttgaagttcatccttttacaaaacctcaattatgagatagaaaggtttattcaaatgcctgtcatatttttgcaagttttatcgcagcaggatccagtggccccacaaatcggcaggaaatccactgtaaatttttcagtaccttgatgattgagtgtttgcactatagcaagtttttttggcaatattttataggttggataaggaatttgttttgaatgaaagcccagataaggtttgtaagtttttttctttttcttccttatttctgttccctccacccgctttggggatgaaacttttttttctctgtactctgctgcttagttgaacagtaggatattgaggtacttgccatgcctgatggtcataaagttaaatatacaacaatgaggaaggaatctaggggacaagccataagtcccacaacatactttaagatactgtaaatatattcaaatgacaactctcccatccactagacacaacatcttatttcattctgtaaacaagtctgaagaatgccccaagaattgtacattgaatgcctggcagtatgcaagtatttcttcattattccaaagtacctgcccacaacagtatcataaatatgagtagattcagctatattgaactttgttacattttccttccaatgagactatccctgtttccattttgttgtgttggtagattctccctttttctgtaatacataatctttggaaatatttgtcagtgaaattttattcatatgccattaacctctaataaataccacatatctaattgttttcaacagtatggtaatagtctgcattttatgtatttagataacagcacagtaacaacttacctgatagtcagctgactctgggaggatttggtcatcagatccagaagttagaagagaccgccttctggtcgtgtcatatctacatagtagagtatccccagtttcccttaaacccagctgaaatcaccaccatgactactgaccatgttggggaaattcttgtgggtatgctggttccttggtattccttgaataaggaaattccttaatagcaaaggaatctcctcattccaggatcaataattcttatagcagagtcttgggaggccaaagtatcagtgtgtctgcatcatggaagaaggttcttcccttgccctttggaagtgaagaaatacagctgataaggagaggtagattccaccttttaatcttccaccagctacctctaagcttgcctgagttgtttaatttttctggccctcagcttcttggtctgtgagatgatacctctgaactgttaggaccctttctaccctgaagttctgtggttctacctaaactttaaacaattagtttattattaataatagaaaactgtacttatcctaaccccaaattagccgttatggacaggtggcagatttcttataataaggcctgtacaagatgcaacattgtggtagaaacttttagaaagtaaaacaaccactcctagctaattttaaaacataatgtcttatgaacaatccatatatactaagtagttataacaaatatttacatagtactctctatgccttacactctaagtactatacatacccttttattaatctgatttaagtgtaattgttattacctttttacagatgggaaagctatggaccagaaaaggcaaataacttgtccaaagtcacgtaaatatgaataatgaagctcgggtttcaacttaggcatcctgcctccagattccatgcccttaactcctataccaggttccttctcaaacaaccatatttgtcttttgttttcctgctgctgctactgacattgatgatnnnnnnnnnnnnnnnnnnnnnnnnnnnnnnnnnnnnnnnnnnnnnnnnnnnnnnnnnnnnnnnnnnnnnnnnnnnnnnnnnnnnnnnnnnnnnnnnnnnnnnnnnnnnnnnnnnnnnnnnnnnnnnnnnnnnnnnnnnnnnnnnnnnnnnnnnnnnnnnnnnnnnnnnnnnnnnnnnnnnnnnnnnnnnnnnnnnnnnnnnnnnnnnnnnnnnnnnnnnnnnnnnnnnnnnnnnnnnnnnnnnnnnnnnnnnnnnnnnnnnnnnnnnnnnnnnnnnnnnnnnnnnnnnnnnnnnnnnnnnnnnnnnnnnnnnnnnnnnnnnnnnnnnnnnnnnnnnnnnnnnnnnnnnnnnnnnnnnnnnnnnnnnnnnnnnnnnnnnnnnnnnnnnnnnnnnnnnnnnnnnnnnnnnnnnnnnnnnnnnnnnnnnnnnnnnnnnnnnnnnnnnnnnnnnnnnnnnnnnnnnnnnnnnnnnnnnnnnnnnnnnnnnnnnnnnnnnnnnnnnnnnnnnnnnnnnnnnnnnnnnnnnnnnnnnnnnnnnnnnnnnnnnnnnnnnnnnnnnnnnnnnnnnnnnnnnnnnnnnnnnnnnnnnnnnnnnnnnnnnnnnnnnnnnnnnnnnnnnnnnnnnnnnnnnnnnnnnnnnctgagaatgatggtttccagcttcatccatgtccctgaaaaggacatgaactctttcttttttatggctgcatagtattccgtggtgtatatatgccatattttcttcatccagtctatccttgatgagcatttgggttggttccaagtctttgctattgggaacagtgccacaataaacatatgtgtacatgtgtctttatagtacaatgaattataatcctttgggtatataccttgtaatgggatggctgggtcaatcggtatttctagttctagatccttgaggaatcgctacactgtcttccacaatggttgaactaattgacactcccaccaacagtgtaaaagtgttcctatttctctacatcctctccagcatctgttgtttcctgactttttaatgatcaccattctaactggcatgagataatatctcattggggttttgatttgtatttctcttaataaccagtgatgatgaacttttttttcatatgtttgttggctgtgtaaatgtcttcttttgagaagtgtctgttcatatccttcacccactttttgatggggttgtttttttcttgcaaatttgtttaagttctttgtagattcaggatattagcactttgtcagatggatagattgcaaatattttctcccattctgtaggttgcctcttcactctgatgatagtttctattggattgcagaagctctttagtttaattagatcccacttgtcaattttgacttttgttgccaatgcttttggtgttttagtcatgaagtctttgcccatgcctatatcctgaatggtattgcctaggttttcttctatggtttttatggttttaggtcttatgtttaagtctttatcttgagttaatttttgtataaggtgtaaggcagggatccagtttcagttttctgcatatggctagccaattttcccaacaccatttattaaatagggcatcctttccccattgcttgtttttgtcaggtttgtcaaagatgagatggttgtagatgtgtggtgttatttctgaggcctctgttctgttccattggtctatatatctgttttggtaccagtactatgctgctttggttactgtagccttgtagtatagtttgaagtcaggtagtgtgatgcctccagctttgttctttttgcttaggattgtcatggctatgcaggctcttttttggttccatatgaaatttcaagtagttttttccaactctgtgaagaaagtcaatggtaccttgatgaggatagcattgaatctgtaaattactttgggcattatggccattttcatgatattgcttcttcctaccatgagcatggaatgttcttccatttgtttatgtcctctcttatttccttgagcagtggtttatagttcttgaagaggtccttcacatcccttgtaagttgtattcctaagtattttattctccttgtagcaattgtgaatgagagttcactcatgatttggctctctgtttgtctgttattggtgtataggaatgcttgtgattttcgcaattgattttgtatcctgagactgctgaagttgcttatcagcttgaggagattttgggctgagacgatggggttttctaaatatacattcatgtaatagcaaacagagacaatttgactttctctcttcctatttgagtatgctttatttctttctcttgcctgattgccctggccagaacttccaatactatgctgaacaggagttgtgagagggcatccttgtgttgtgccggttttcaaagggaatgcttccagtttttgcccattcagtatgatattagctgtgggcttgtcataaatagctcttattattttgagatacgttccatcaatacctagtttattaagagtttttaacatgaagggctgttgaattttgtcaaaggccttttctgcatctagtgagataatcatgtggtttttgtcattggttctgtttatgtgatggattatgtttattgatttgcgtatattgaaccagccttgcatcccagggatgaagctggcttgatcatggtgaataagctttttgatgtgctgctggattcggtttgccagtattttattgaggatttttgcatcaatgttcatcagcgatattggcctgaaattttacttttttgttgtgtactgctaccaggttttnnnnnnnnnnnnnnnnnnnnnnnnnnnnnnnnnnnnnnnnnnnnnnnnnnnnnnnnnnnnnnnnnnnnnnnnnnnnnnnnnnnnnnnnnnnnnnnnnnnnnnnnnnnnnnnnnnnnnnnnnnnnnnnnnnnnnnnnnnnnnnnnnnnnnnnnnnnnnnnnnnnnnnnnnnnnnnnnnnnnnnnnnnnnnnnnnnnnnnnnnnnnnnnnnnnnnnnnnnnnnnnnnnnnnnnnnnnnnnnnnnnnnnnnnnnnnnnnnnnnnnnnnnnnnnnnnnnnnnnnnnnnnnnnnnnnnnnnnnnnnnnnnnnnnnnnnnnnnnnnnnnnnnnnnnnnnnnnnnnnnnnnnnnnnnnnnnnnnnnnnnnnnnnnnnnnnnnnnnnnnnnnnnnnnnnnnnnnnnnnnnnnnnnnnnnnnnnnnnnnnnnnnnnnnnnnnnnnnnnnnnnnnnnnnnnnnnnnnnnnnnnnnnnnnnnnnnnnnnnnnnnnnnnnnnnnnnnnnnnnnnnnnnnnnnnnnnnnnnnnnnnnnnnnnnnnnnnnnnnnnnnnnnnnnnnnnnnnnnatttctgccttcatttctttatgtacccaatagtcattcaagagcaggttgttcagtttccatgtagttgtgcagttttgagtgagtttcttaattctgagttctaatttgattgcactgtggtctgagagactgtttgttatgacttccattcttttgcatttgctgaggagtgttttacttccaattatgtggtcaattatagaataagtgctacgtggtgctgagaagaatgtatattctgttgatttggtgtggagagttctgtagatgtctattaggtccacttggtctagagctgagttcaagacctgaatgtctttgttaattttctgtcgcgttgatctgtctaatattgacagtggggtcaataaagtctcccactattattgtgtgggagtctgagtctctttgtaggtctctaagaactggctttatgaatctgggtgctcctgtgttgggtgcatatttatttcggatagttagctcttcttgttgcattgattcctttacgattatgtaatgcccttctttgtctcttttgatctttgttggtttaaagtctgttttatcaaacactaggattgcaacccctgcttttttttttttttttttgctttccatttgcttggtaaatattcctccatccctttattttgagcctatgtatgtctttgcatgtgagatgagtctcctggatacagcacaccaatgggtcttgactctttatccaatttgctagtctgtgtcttttaattggggcatttgtcctgtttgtatttaaggttaatattgttatgtgtgaatttgatcctgccattatgatgctaactggttattttgcctgttaattgatgcaatttcttcatagtgttgatggtctttacagttaggtatgtttttgcagtggctggtaccggttgtttctttccatgtttagtgcttccttcaggagttcttgtaaggcaggcctggtggtgacataatctctcagtatttgcttgtttgtaaaggattttatttctcattcacttaagaagattagtttggctggatatgaaattctggattgtaagttcttttctttaagaatgttgaatattggcccccactatcttctggcttatgggtttctaccaagagatccgctgttagtctgatgggcttccctttgtgggtaaccccacctttctctctggctgcccttaacattttttccttcatttcaaccttggtgaatctgacgattatgtgtcttggtctctttttgagcagtatctttttggtgtactctgtatttcctgaatttgaatgttggcctgtcttgctaggttgggtaagttctcctgattaatatcctgaagtgtgttttccaacttggttctattgtccccatcactttcaggtacagcaatcaaacataaatttggtcttttcacatagtctcatatttcttgggggctttgtttgtttcttttcattctttcttactttagtcttgtcttcttgctgtatttcatcaagttgatcttcaatctctgatatcctttcctctgcttaatcaagttggctattgatacttgtacatgctgcaggaagttctcgtgctgtgtttttaagctccatcagttcatttatgttcttctcaaaactggttattctggttagcaattcgtctaactttttttcagtgttcttagcttccttgcattgggttagaacatgctcctttagctcagaggagtttgttattactgaccttctgaagcctacttctgtcaatttgtgaaactcattctctgtctagttttgttcccttgctggtgaggagttgtgatcctttgtaggagaagaggtgttctggtttttggaatttttcaggctttttgtgttgtttctccccattttcatggatttatctacctttggtctttgatgttggtgaccttcggatggggtctctgagtggacatcctgtttgttgatactgatgctgtttcttttctgtttgttagttttccttctaacagtcaggcccctctgctgcagctcttctggtgtttgctataggtccgctccagaccctgtttgccggggtatcaccagcagaggctgcggaacagcaaagattgctgcctgcttcttcctctggaagcttcgtcccagagggtcacccaccagatgccaatcagaactctcctgtatgaggtgtctgtccaccactactgggaggtatctctcagttaggatacacaggggtcagggacccccttgaggaggcagtctgacccttatcagagctcgaatgctgtgctgggtgatccgctgctctcttctgagccatcaggcagggacgtttaagtctgctaaagctgcatccacagctgacccttcccccaagtgctctctcccagggagatgggggttttatctataagtcgctgactggggctgctgactttttttcagagatgccctgcccagagaggaggaatctagagaggcagtctggccgcagaggccttgctgagctgcggtgggctccgtccagtttgaacttcctggcagctttgtttacactgtgagggtaaaactgcctactcaagcctcagcaatggcggacgcccctccccccaccaagctcaagcatcccaggtcaaccttcgactgctgtgctggcagcgagaatttcaagccagtggatcttagcttgctgggctctgtggggatgggacccgctgagccagaccacttggctccctggcttcagcccactttccagggaatgaacggtactgtctagctggtgttccagatgtcactgggatatggaaaaaaagaaacaaaaacaaaaacaaaaacctcctgcagctagctcagtgtctgcccaaatggctgcccagttttgtgcttgaaacccagggccctggtggcgtaggcacccccaggagggaatctcctggtctgtgggttgtgaagaccgtgggaaaagtgcagtatctgggccggagtgcaccattcctcgtggtacagtccctcacatcttcccttggctaggggagggaaatcccccgaccccttgcacttctcagtgaggcgacaccccaccctgcatcagcttgccctccgtcggctgcacccactgtccaagcagtcccaatgagatgaactgggtacctcagttggaaatgcagaaatcacccgccttctgtgttgatctcattgggagctgcagaccggacctgttcctgttcagccatcttgccagcaaatccgatttatagtatttttaaagtatcttttagaaggctaaattgttatcagtcattcacaagtcagtggaaaactgatttaatcagattgctttcttttctaataaaattgttttttaattttgaacttttgtgggtacatagtaggagtacatgagatgctttgatacaggcatgaaatgtgaaataagcacatcatgaagaatggggcatccatcccctcaagcatttattcattgagttgcaaacaatccaattatactctttataagttagtttaaaatatacagttaagtttttattgactatagtcaccctgttatgctatcaaatactaagtcttattcattcattctatgttttgtacctattaaccatcctcacctttcccccagacccctactacttttcccagcccctggtaaccatcctcctactcactgtattcatgagttcaattgttttgatttttagtttctaccagtaagtgagaagacgcgatgtttgtctttctgtgcctggcttatttcacttaacatatgatctccagttccatccatgttgttgcaaacgacaggatcttattctttttttatgtctgaatagtactccattgtgtatacataccacatattattttcccattcatctgttgatagacgcttaggttgcttccaagtcttagctattgtcaacagtgctgcagcaagcatgagtgcacttatctctttgatttactgattcctttcttttgggtatatgccccgcaatgggatagggtagctctatttttagtttcttgaggaacctccaaactgttctctgtagttgttgtactaacagattgttttcctttcagtgctggagaacagtcgtattgagggaacaggatgtgagaatgaatgaggaggatggatatgtagagcgctccttaggtgtctgaataaatgtctcctagagtctcttagagggagatcttaggacactaagagggttctgatatcagggggagagagaaactgggtaacagtaattaagttcaggaaagaaagcaggaatgtttatgataacttcatttattgtaattctaccaagagccagtcctgagtccaagaatgggagaggtaaagatctaattatcctttcttcctcttctactttggcctctgctttttgtctcacatttgttgttcccaacagtcaacacctgagcaagtattttgaacactggagttaagtaacatcagttaggtggcaacttgtgagtgttcagaacagaggatggtgctgttaagtcacctgaaatttagatttttgtttaatatttttaaaaatgtatgtcatgaataacagttgacttaccaacacagttttagaagggaacctattaaaatcaaataataatagttatgctttgttgtttaatgaagctgtttatttttccccggtgatagttggtttccattattttcacccagaggaatatgctgttattttcctgcagactttttccttccttttctccttcctgccatacttggtgtttctctctctgtattcttttccttttcatggtgtccacattttcctctcctccttcctgaagctttttctgtttcttccctctgtttcaccctgttttcttccctcttataaagtatctaatcagagttccttgatttagctaacaaataaatagaactttcgggcttttgtttaattaacaatgaaaattactgaaagaaataatgaacataaaaataaacattatgaagatgtaaattaaactccataaaatttggttttgaataaaattgacagaggaatgagatcttgacaaaatgtaattcttcaaaatttgaatcacaaaaattgaacttggtagaaatattgatcttaggaaactcataatatgtttaatatggacaaaattgataaatgaatcaaattatcatcatataattttaataaaaatgagctgatcccagtgaaaataatttcagtgaaacaagaattaaaatgggaaaaaatagtgtagttaatagtgctgtataagaaattgatgaaggaatttaatcaactcagttgagtatattccagaaatttgttaatgacaaaaatatatctgtactgacaaaattctgtgtaaagtgcttatattcaacattctaagactcaaaatgctggaacaaaatggcagagtaaaaataccaggaatgaatatcctaatcccctcatttaatcctcatagctctacaaattaggataatagtttcctgagatacaagagtagttgcggtccaaagagtttagaaagttggtgataactgcttgaaccaggtacctgatttcaattcatcacaataatgagggtaccacacctttttcatggtatctatctggaacaagtaaaatactttggatataaaaagattttgttacatgacaaaatttagcactgttaaatttcaaatagttaacagtatcacaggtataatggtgatattctaatgaaaaagctaataacctatttattcattcttacgtataggttaagaaagttattgacctaggccaggtgctgtggcttatgcctgtaatcctagtactttgggaggctgaggtgggcggataacctgagctcaggagttcgagaccaccctggttaacacggtgaaacctcgtctctactaaaaaatacaaacgattaactgggcgtggcagtgtgcacctgtagtcccagctattcaggacgctgacgcaggagaatggcttgaacccggaaggcagaagttgcagtgagccaagattgcatcattgtgctccagcctgggcgacagagcgagactctgttccaaaaacaaacaaacaaacaaagttgttgacctacatggtgaagctccgtctctactaaaaatacaaaaattagctgggcgtggtggcaagcacctgtaatcccagctaattgggaggctgaggcaggaaaatcccttgaacccaggaggtggaggttgcagtgagccaagatcgtgccactgcactccagcctgggcgacaagagtgaaactctgtctcaaaaaaacaaaaaaaaaagcaagttattgacctaacttttttttttcatcaatcagagtaactgtgatactgtatcttgatcatggtcagaatcactggtttgaaggatggatgaaattagtgtctcccacgtgccaggcactgggagctaaatttagatatcaaagttaccttctaattctggatgctttaataaacttttgtcctggggctaagtgagactcattctgaccttggttttgattaagagatttggaatttgtgagaacatagtcttgtaatctaaaacagtgcctaactactagtggtttattgggaattgtccaagcaaataattacaaaacagaaaaggagatattccactggccgtttctagtactctgtgctctgtcctgcttcacagttactcaccagtggtatctaagttgacattcagagaaagtttgcaatggacaaagctgtttcttggcagtattttcactctattcctcagcccctttctacctcctgattctctctaaaggtctgttggcattatcagctgctcaaaccatcccagactgtccctgggatatcctttaaaacatcccctacatgacaggtgtaggtgactccttcttattctttactcactgccctaggcagccctcctgtctctttgagccaggtattgacactgtggtcttatttctccttgtatttatttgccatatcaaaaaacttaccactttattattttgatagtttgtttattgcttttcttacccatgagtttcatgagggcagagattctgtttttctctgatcatagtagatgatcagtaaatgtttatagaatgacaaaatgaattcctccttagagcaaattcatgctaagatgtggataaccaacatagttaatcttcccagatgtttttgtactttctaaacaaaaggtcaacttcaaaaactaatgtgttgtcttcaagtagtgtaacaagacggaaaaaaatcattcaagcactgtgaggaaagatattttggagtacaggaatttctataaaagagtactataccatgtgaatgtaaaaccccagggaaaagtatctgccttaaaattgttgctgttttcaaaaaggaaatcatcccatttttgaactcaccagttctctataattttctaatatttttttcagagcaggtcttttgggagggccatggaagactcccatggtatgagtgtaaagaaagatgacataagacataagtgataaagggacgtaagtgattgtttccttgtactgtatagggacttcttgtactgtctgtcctttataaggcaaaagctattgtccattgtgctactgtctcttaattgttggtttacttaactaagagttttataatcctagtaaaaacttaagagttttaggatgtttggtctgttgctgtgtttgtttaaaaactcctggctccttttctttaacgctgatgaggtaaaatgcccaagtccttccgcacagcagggggtgggtaataagttacggttagactcagcaactctgggcattgcttaaatatataggactttcagcagagccgctttcctttaagcacattccatggagacaagcttaatagagttccatctggtcagggagaaccactgtttccgagactggacagcctctgctcaatctcttcattgagtggcttttaaaaattaaaaaaaaaagcatatacacagagagaaaaaatagaggagagaagggagagagaaggaaaaaggggatagaaagtgaaggagggagaggaggaggaaatcaaataaattcttttggctttttgtttttcttcctaactattcataagtataggaaagtaagatatatgttgtgatagagaaattgggaagatggactcattcaccgagtagacaaacccttcttaggcccctttaatgtgccaagcatactatgtgacaagaatggcaaatagcataaaattgtaaaattgagcagggaatcagtctcgttgaccacagagggtatggggtactctaggaacaagaaggaagatgagttcagaatcaagtttgagcactgagttttaaaggtcatcccctagctcctgctaatcagacaggtcaggtgtttagttaggtctaaaatgtattaactcacttgcccccagagtctctgttttgttagtaactggaggtgctctgatgcagctgacgttggccaaactgaggaggactctggacatgaattcccagagatgcaaattgcctctcagaccctccggttcatactttaaccacctcactgtagcactgcagtgacactctggaagcctggaaagtgacaggcaaaagcagagaaggagcttgctttatgaagtatcctgaagaaaaggtttccaggttttcgtattttactctgttgaaattgtgccttaattttaagaaagatatctattatttatagagtaacagttacattttagttgaactctggtgacctatattttccttcttgtgttccttatggggttttactttccacgtgcatcagtattttcatttgtacctatgactctcctggggattttgaagattgaagagataacataatgctgagaaaatattctgagcaccacagagttcaataagaatacgtaagacacatgagtaattataatagtaggaaatccactgcttttttggagtaacatgccaaaaagtataaagttttatggataataccgtatattgttactattactagcaatagtaataataatttactaagtacttactatgtgctagatataatacatatttttccattgaatttttaaaagaaatccatgaagttgaaacatgttttccagatgaagatgctgaggttctgaagaaaaggttaagtaacttgcttaaggttttcttcctccacatcccatgctccgacccaccaccccacccatactttatatccctattttatgttgctacctgttctttttaatgctgaccacatttccagaaatgcactaaactaccaaccttagcttacttaatccttctggccaaccttaggagaggtaggcattgttttatttatttattttttgtttgctttgttttattttagcatttcttttttttgtatgagacatggggcacatagtgaataagtgacagaagtgggatttgaacccaggatgtgtctgaatcagaagaccttggcatttactattatgttgtcttggaaccaaatcagttcatgctcaaaagctctcagtgtttcccaaggctctttgaatgaacttcagagtcctttatgcaccttacactccctacataatttgcctgtgcagaatcttgtagctttctcttccccaacctcccccttgtttgctctggtagccccacttgctctctattccttgaactgaccaagcactttttcttccttggcctgtcctcatgctgtgcttttctgtctggagtcaatcacctctttgcctcctcttcttccttttagtttaaggggtgttccctctgggaggccttcactgagccccagtctaggtgcgtccacgaccacattctctgtgaactgctgttgggtgatgtctgtcttctgactatcctgtaagctccataaagtctgaaataccgttgactgctgtgttcccagtgcctggcacatggtaggcactcaacagatctttattgcccaatgcgtggatggaatgatcgtcttgaaattctagttcacctggaccccgactccaccctcctgttgctgtttttgttttcctctctactcccttcagctctcttcttacctctgctcctggaagtttacgcccgtggtgccctctccaactactttggagatgaactaatctgatccccagctagatattagccccttgagtgcatcacagtgtacatatttgttggattgaagcaaattgataccataactcagtcttaagaaggtttatttcacaagggtcacaagaattgaatcaaagggctgcctcaaaagtttcttttctgctaaattacaaatccagacttggccaagactgtacctagaatgggccaatttaaaataagctcatgatttgatcctactcctggcgaggagtaacctgcctttcagagatccctcctggtacctacgctgggtaaaaaggattaaaannnnnnnnnnnnnnnnnnnnnnnnnnnnnnnnnnnnnnnnnnnnnnnnnnnnnnnnnnnnnnnnnnnnnnnnnnnnnnnnnnnnnnnnnnnnnnnnnnnnnnnnnnnnnnnnnnnnnngaattgagagctcaggcactgaccctctaactacatgggttcaaatcttcccactacttatggactctgtgttcttaggcacatattaggtcttggttctctcatctgtgaaagctcacaggtttttgtgaagtgtaaatgacatgacacatatcaagcatgtagcagggtgcctggcacattgtcattactcaatagatgatagctattatttttattataatattttatacctaaatgatactctgtgtttggagaacattttcacttaccctgttgtgtagatggagaggcagcccataggaaacccatataagtggtcttcttttataaatagagaggccacgtgtctccagtgtcatttttgataggctagttctcagtctttaatctcttattttcttcagaaagatccatagcatgatagagaagaagataggaaagctggtgggtcaacaagctcatctctcaccggcatgggcttctgtccttatggtctatttccagtattgtttcagttacagttaaaattccctccagcatctcagcttccgacacatttcttgggaagctattcttttaacatattgccattaggaattttttcttgatataaaacctgaattttcctttgcttaatttaatccctcttcacatacacctcggacctctttaaataattcttttccctccctgccatttgcacctttcagttacttgtagagagttgtcatagctccctttgggcctaatcctatcactgtgattcatgttgggcaagctgtacattttgtaatagtctatgggcatattctaagaatgctgtcttgctggaataaaagcaattctccagtgatattatccaaaccttatcgtcaataacagctactaaatgtgaaacaaagcaagtgactttttttctgaaaacaaagaaggtaacgaacaggaagtggtgtctaccttttaatattattattcttatcaattatgagagtgcctcgttatcaataatgtagtatagaattgtctttatttaatctatagcctatacatacagaagggaatactacatgtatacctccaaatggcagataaaccaaaagaaattttgttttttaaatgtgaagtgtgtgtgtatgtctgtatgtgtatttgtgcacacatgtgcatgtgtgtctgtgaatgtgttcttctgggactttatacaaaatattgaaggagaaaaaagaaaactaaattgaagagacatgagaaagttgttgagcttcacccgttataatgggatatggacctcttcccaagacttgaaagccacaacccttcctttgtatctcttccagtcagaaaggctgagatataaggaatttgaaaatatgcatttgatactcaacaagcatctctgataggttggaaaatgaagaggaggtttcatgacctgcgagtacaggaggcaattattttctgttttcctattgcctttagttgctccgtgtagccactggcaggcagggaagaacagggaatatcgcttacgaatggatttctgactctcaggcagttcaccctccaccttgagacagtcatagaatattagaactgcatggataggaaacagtatagaaatctagtcccttttgaacttaccaagaaaggaaacgaaggttcagacaggaagttatgtatttaaggtcacataagaagttgaagcaatgtgttgtttgagcccaggcttgttttccttgttgtccaggggtctcactactaaaactcactcctagcttgatatttatattaaacttaatagcccatcatgacaagtaaattgaaaaaatagattgaaatgggtatgaactttctaaaatagatcttttctaaaatagatctttttaatcattataatttgtgagttaaatgagggaacttagatgttacttaagttgatgatcaattccactttcctcaaagcaacagaagtgttcctaaaactatgagtacagtgtatttacccagggagtcccatcctgcgttgctaccccagtgatctacggtagtctccccatctagcctcatttcctgctagacttttctcatctctgcctttccttgtgcttttgacttcgcccagaatgttcctttcttttaactacatctgtggtgcctttattgaagtattttttgccatggccgtcttcagaactcagtccaatggcatgctcaataaatctggaccatttaaccacctgtccttctgtgagatgctctacaccttgttctgccatagtgaactcagttttaatgttttttttttccttcagctgcacacacacttgtatttctgacccaacactgttctccttcctagctctgttcttgtctttcttccttagattgccccatttcctcacaaaggactgcagactaagagcctcttcagaattatctggcctctgggatcccttccccgcacttcgctcctgtagggggcctcttttcaagccttaaagtcttgagcgtagagtcagaaactctacttctgtcacaaacccatctgaaatgctccatttggaatgcaactgcatactccaacctgacataactgctctctccttggaatcgtcactgtcttcttttaaggcatttatgcttttgttggcatcatatttgcttatgttttgtaactgctaacttaaaaaaattaattgtggtaaagtatacataacataaaattttacatatccaaatcatttttaagtgttacgtacattcacatcatttgtgcagccaatctccagaactcttttcatcttgcaaaactgaaactctatactcattaaacaattccgcatctccgtctctccccagcccctggcaaataccattctgtgttttgtctctatgaatttgactactctaggtacctcatataactggaatcatatggtatttgtctattcatattggcactttccacttagcttaatgcctgcaaggttcatctgtgttgcatcatgtgacaatattcccttcttctttaatgataaataatatcccattttacatatatatatatcatatatataccatatatataccatatatatatcatatatatataccatatatataccatgtatataacatatatatatacgatatatatatatatgccatatatatacaccacattttatttatccattcattcatcatcattcatgatggaaggttgcttctgcctcttggttcttctgaattatgctgcagtgaacatggacatgcacatactgtctctttgagactgtgctttcatttcttttgagtatatgtccagaagtggcattgctgggtcgtatgcttaactctcctaaattgtgagctgatactatgttacgagacttgagaccaatgactgggtcattttcatcttcatatcttcttagcctctatcacagtgcctcatcatggtaggtactcagaaggtgtttgttgattgagcaaattgataaatcagtgaagcaaatgtgttacaatattgaatgtaaatgacttgtatagattaaaatatttacttcttttatatcagaaataaaatagggaaagaatatatagaaaaatacattcagttactacatatctgaaaaacgagaacccaagagcactttatgcattcttatgtagtgattatattggtaattttatgaaaggtggttgcagttttatacaaatttgaagggaaaaagttaaactttccaccttcctttttactttgtatgtaaagtattaagaaatataacccattacctactaaaattctcaattgtttccagaatagtgaaagtagctgttaacaataataattgtaaaaatataaagtaatctcaaacaggttcatgttttgtgtaatgatcagataacatgagtaaaagcagcaattatgtgtttctggtccacactggaggtggaaaacaagaaaagcatatgctacaactgcatattattaaaaaggcaacgctttatatttactttgcacttaaaagtttgaatgatctgggtaatagaaatagacaatacacatgctttggaatacattaaaattgcacatacagtaagacaaattgctattttatagcctttccacaatgtagcaaatttgtacttctggcttaactcatgataagtttgcataacatttactgggggttttcactgcgctagttcatttttcagactctttcttaggggtggtaccattccattatagaagtccaagggtctgtgtatgaaaagaaaggtggggtggagaagaaatctggggacaaagatctgtaatcaaacaagctacataaacctcagcggaaaacagtgggtatcaaataagattcagagaagacaagtccatttttacagtgggctactcccatgggtacccattccctgttcttaccttgcttccttcttttatgtctaggagatctcaggaactcaaatcctgtattactccatattcattcaggttgggtttatagaagctaccttgatctagtaaattaccagggagaaggactttgtaaatcagccacaaccacaaatcaaccagcatctgcaaagaagaaacttaattgattttaaaagatattaggctacagataggtgagaatttgatttaaaatcaaaattatagacagctgtcctgggtagtagctgatggacatgttgttattttattgctagggaacattttttctacctggttgatgtagtttggccctatcaagatggcactgaaatgtgttaacttagatagtgtacatgcttctacctgtaagacaaaataagtatataccagtgaatacatcttttgtatgcatttaccttgcttcattgatttttattgcatggtgcagccagcctttactgtcccacaattattccccagtatccatatatgctggtgaagttgatatagagcctagaacccaaaatgaaaagacttcattactattttaggactttaggcaaagaacttaatttctctgggctgaataacaatgtgctggacaagttggtttctgatgctgcttcccgctgtaaaattgtacttttctctgtgacagcatcagaccttgttcatgccaagtaagattactgcatagtcagagtaactgaagagttgggcaaggatttgagttcatatcatgtgtaaaaattatccaagagaagtgtaaggtgcttgcaaatagttcccccccacatctgctattgaaccctttggaggtatagttcaaaccaatactgtgttgtacagtgcccttaatactgatttccaatttatatctgtatttctccagaggacctgagcaaattacatgctgatcatttcttattaaccatattttttattatccaaatgctgcctctcatttaactttgacttatgacagctccattgtatatcagcaaatacattttttgaagcacaaaatctaaatggaaccatgtcttttcctcatgaaatatggagtcttttttattcaaaaaatttaaaatcccaaatatatacaccactttgagcaccccaacttttttgaaggagatcaaatagaataaatatattcaagtttgctacatagaaggtaaaagtagttagtataagtcacaaaaatataatgagtctaattcttttaaactcccaattgtttcccctaaattttcctgaatgtgacaggcttcccttcaagatcagtaatgtcccaggaatgtggcagtgcaaataaatggaaataccgtagtgatttgtacttcaggggttaagggtctggtgcccagtcagaaagggcttgtgccagggaccaacagtataatttgtagaaacacatattcttggaatttttggattcaaaaggaaaattcttttttgcttttttgtgttttgctattatcttaagaggtgtatggatttgatttatgaacaagtactgctgtaaataataaaataataaaatggcatgtcagcaagggataaagagttacttacagaagttaaagtgaaattaaataactcttgaatccatttgtaaaagtgcctgtattctcagttgaatggtagtaactactgcgtgaaggaagttggtttgccttatggataaggtttttataagtacttaaaatggaattagcatacaccctttaaccatgctgatttttgtttatccctgcaacatattttgaaagctttgctctcctgtataagccagtagaaagcacaggcacttgcacagcatttaaaactcagatataaagcatttctagcacattatggatgcgctatggggtttgaagttaatgtgaatgtcaggccagagaggggagaactttataagatactgaataagaaactcctttgccatttactatgagatgagaataaaaaaggaggacacagaaaaggcagcaattttaacttcttcagatatatccagggaaaataccttgtgttaaaaacagaaggaaatagaaagtgtgtagctgatttcctagcctatggtattttatgatctggattgctttgttcaagaaaaaaaaaaaggtaaataagttgcaatgtagtcctctgtatttttccgtgaagtattagatttttgtagaatatgtgcatagtgtttatgaatcagaacctgaatcataaataaaatgttaatttgtagacacatttaactgtggagcagatggaaaaataggtatgtgttagaaaactaggtatttgcagaagctaatgaagttaattggtctcatttgactaccttattttcccaaaccccctaaagactgggcttttttatttctttaattaaaaatgagtttggtatgttaatattataacctttcatattttcctagttttctatataaatgtcttatttatagaaccgcccttaggagtccagtattagtaagaacattagtaaactgggagcagtaagaggggtgctaatgctatacaaaagctattagccacatacattgctataatatgtgcttttacaccttattattacttccctgtcctgtttctttttgattacatagagaaagatctattttcctttagcttgaaaacggtacaagtagaaatacataaaataatgattgtggagcagaatttaatttttaaatatcagtacttgaacatattttgattgggtaaattacatggtaaactcccattgaactatcaccagtgtgaaatcagagaaatcacagccctgagttaatcaataccatgtgtgtagataattttccctgaattattccttgtataaggaaaggttcaaaatcaaaatatttagctgttcaccgaagagtgctttttaattagagctttatgttgcggctgccacgttggcctgtatagtggatgctgaatgtagtggtgcatactgcagagggttctgggacattgtttctctaatgtcatcactaacatattgcatttgtattgattgtctatgatttctgtatatggatgattgagtttgagcaaactacttagggtttcaaaggatttggataatgttacactgtagggctggaaatctctttgagtattgtattgcaaagggacaaagtcatagtttcagtgcatttattaggcccctgctgtagaaataggaagaataaaccatctttttaaagttaagagatcttggaatgggcaattctaataaatcctgggtttaaggagaatggtacgtgctgtagtaccgaagttgtttattcatctggaatgtattagaatcttgattaataagaagacatctgcagttttacataaaaagcagagcaggcagtttggcaaatagaaatgagaagggaaaaagaaaagccagttccatcgaatgctgttgtttcattttgaccaccaagcattgttattcctgatatcctgatagtatatagcaaatcggcattttctccctgcagaactgcagcagagaattaagatctgtagttttgagaacaggtaggtccttttaaaggcttacatgggaaataatatttgtcattttattttagaaaacccaagtggaagaaagacaaacctcagttatttgagtgtttcgtttacatgatgtcaaacatatatatggatacttgcaaatctaaaatttaacatctcatggaatatattttcactttgaatatatttttcttaacttttcactgaagaatgaatcacttaagaatctcttaccctcacaatcattttttaaccaaatggagagacatgatttttacataagacattttaaatttcaagatggctaaatgatatgttggaaaagaccatggaaattattgtgtttgagggaaatcgaagccaaagcctgtaaaatgtgtataattcatatatcaacaggatggcttcctaaattctcgggcatttttcaaaagggaatgataacatcggagttcactatttggaagataacacatttggcagctagtttctgaagaatctggcacccatacagacattaatctctaaggccaataggtgaaagattattacagtcttgctgaaggcagaaattcatgcatattgcagtcattcttatgggagtaaaaggaacaaattctgaccagtttaaaatatgacagttttaaagaaggaccaaaactaaggaaaaatagcttacttcagatctattccacagtaaatatggcaaacaagttgctgatgataatttttgtatctggtattggataattgctgaaagctgagggatggctctttttagccacccagtcccagacagctaagtaatataaaacagattctaaaaacagccttgcttaataggaaagagtgtgagattatgtaacttgaagggcaatggacaaatgaaaaatgattttacatttttcattggtggatcacaatgtcaggagatcgagaccatcctggctaatacgatgaaaccccgtctctactaaaaatacaaaaaaattagccgggagtggtggcgggcacctgtagtcccagctactcccgatgctgaggctggtgaatggcctgaacctgggaggtggagtttgcagttagccgagattgcgccacagcactccagccggggcgacagagcgagacttggtctcaaaacaaaataaaagaaaaattatttcacagtcattagcagagttaaatttatgtaatgttaaaatattggttatttcagagtatgattgtcagctttcagcctctgtcccctgcaagtgtaatattttagtaaattttaggcagagtacaattcttttattttagcaaagacaacagagatagaaagtaaagaagaccaggaatggtggctcaggcttgtaatcccagcacttcgggagtgtgaggtgagcagatcacttgaggtcaggagttcgagatcagcctggccaacatggcaaaaccccatctctactaaaggcacaaaaattagctgggcatggtggcatgcgcctgtaatcccagttacttgggaggctgaagcaggagaatcacttgaacccaggaggcagaggctgcagtgagccaagatcgtgccactgccctccaacctgggtgacagaacaagactgtcttaaaaaaaaaaaagaaagaaagtaaaggcccggcgtggtggctcaagcctgtaatcccagcacttagggaggctgaggtgggtgaatcacgaggtcaggagatggagaccatcctggctaacacagtgaaaccctgtctctactaaaaatacaaaaaatattagccgggcatggtggcgggcacctgtagtcccagttactctggaggctgaggcaggagaatggcatgaacccaggaggcggagcttgcagtgagccgagcagtgagccgagattgcaccactgcactccagcctgggtgacagagcgagactctgtatcaaaaaaaaaaaaaagaaagtaaagaggtatggtaccataaatatttattcttgctatgtgagagagggttgttaatatataagacaatgctgtaattcaaggattgtcaaaattttattatggaagtcagcatagtaaatatttgaggttctgtgagccatatggtttctgtcacaaccagtcaactctgctgcattgaacaactcatattcaatatgtgaatgaataagaatggctgtgttccagtaaaactttatttacaaaagcaagagcatttggcctataagccgtagtttgttaacctctcttaaaatagattagtttagcatttagtaggttctcagcatttagtaggtgattataatagtgctcagtacttgagtttttaaataagtgcgcacttgtagttgtatccctgtctgacagaaggaaatttgtgtgcatatgccagtgcctgcaaggtcttacatatttacactgttattaatgactaattaagtaagtgggaaaggtgtgtaaaggttctttatctagataaagataaagttctttaaataaagctagaaaagtacacaggataagaggattgttgtaaatatcaatatagcttttcaaattaatatgctaactcgtgttatttagaaaaccataaggttatctttgcctaaatgtcatgatgaagaagtttacgttttaagactgccactgcataaatgataacatcataatatacattcagtgttgccaagtcttttccaggagaggcaggccgaaaggcaggttagcatgtagaatcattcttgcttcaatattctgttgtcatttttgcagatgttcttcctgggtaaagctccattggtgtataacgttgtatttcagattcagaggtgttgttgctgacctagagtctgtgggacatacatgtcaaactccttttttataagggtgcctactttgttctaacccagccaaaatagagtcttcttttaaccttcctatcagacgtgtgtgtgtgtgtggtgtcaagatagctgactttaagtagaaaagcaatctgtaacattggtattgagtcctgttgtttctgacatttggattcaaaactatgatttttatcctaatagtcttcttgcaaatatttgcagtaaaccaaccatatagtgactaatagtgtgacaaatggcaggaatttgggaggaagagacattacaggcatttctccttccctcatcatatataattagtcactgagtcttttggatctatttttctaaacaaatgaatgcatttccttcactctgtcactgggatactccttcactttaggtttttttgcctttcactggaccattgccatagccttataaatggactccctgcctctagacttcatccagtccctcctactccaaagggctctggtgaaaaccatctctgctgattgaaatccttcaacagctctgtctctgctgcctgcaaataaacttggggccataagccatcatgatcgggctctacttcctctcacaaattctatgttctagtccagtggcacttgaacctggctgtagtgttgcctgagaaacttcaaaaaaatactaatctaaacttcacctctagtccaatgcgataagaatttctaggagtggagtagaagcatcaatattttaaaaagatctccaggcagttttaatgtgcagccaaggtcaagttcctctttgtagtcattttacaccattgattccctgatcacaaatgtttgcatttgtacatactattgttttcctgcctggaaaactcctgcttattctttaaggttcaactcaaagaacacatccttggtggctattatatgttcgacaagattgttttcgtgcttcttccacagaacacccacaacatttctgtagaggggtctattaacattcctgatttccttgccttgtgatcatatgtttacatgtgtgcctctcccattcattagtcagtgaactattcattgtaaccatgtattgtgtcttggtcaactttgtatctgctgtgcctcttctgggtctcatccataaatgggtcatcagaatatcattatggaattgatgactgcatcagaagagcaggactggggtggtagctagaacacacctgaaaatgtattcactagttcattcagtgggcttcaaaattatctttgttccaatggaatattaggtaaaaacaactagtctgggaatgggtgttgtcaagcaggagagtccttaggatgagaagcactatggaaccccttctgtgggttggcaaatacaaggtcatgtgaccacagcccaagtaaagactatggtcaagattttgggcaagagaggtgacaaagggaagagagaaaacatcaataataattgaactgaatcctctcttaggtggggaaaggaaatcaatgctcacattaaattggctctaaggtaacatattagcaatgttagcaaacccacagataagactggaaaattcaccagaaagcaaaatgttactttaagagagggtggagggtggtggaaagaagaatgatgccaaagagcccaaagcagtaactgaatagtcttaacaatagtagctacattttggggttttgataagtctttgcctacaacaatataaaatatagtgaacagattagttggatgggggaaaaaggaaaataggatcaaacaaaaaagaaatctatataagagaatgattcttgtctattttagaaagttaatctatccctacaattgattgtggtgttatacgcactgaaacaaagggaccttctacattatgaatattcacaaaatatgaagtgtaatagcttttgagcaacaaactcatttatagctattttaaagctttttttcataaagatcataagactttctttttttttactttatttatttatttattatactttaagctctagggtacatgtgcacaacgtgcaggtttgttacatatgtatacatgtgccatgttgatgtgctgcacccattaactcgtcatttacattaggtatgtctcctaacgcatccctcccccctcctcccaccccactacaggcccttgtgtgtgatgttcctgtggcgcaatcggttagcacgtttggctgttttctttctttttttaagagaagggtctcactctgtcacccaggctggaatgcagtggcactcacagtaacctcaaactcgtgggctcaagcaatcctcttgcctcagccttctgagtagctgggacaacaggcatgtaccatcacatctggctaatttttaaattttttgtagagatgggtctcactatgttgctcaggctagtcctgaactccaggcctcgagccatcctcttgcctcagcctcccaaagtgctgagattacaggtgtgagccaccacgcccagcagagcacaagcattttaaaaatgtaatatgtacattttaaatacttctgtacatatttacaaaaaaccaagagtgggtgaagaatcacatttcatacacctttgatccctgtgcctagcaaaatgcccgtttgatgaacaaatgggtaaaataatgaatgaataaacttgaatacaagttacaaaagcaattgggactgttttgtctcaagtaagccaccttcttccctgtcttgcatcatccacctagctgcaaagtgaacgcatgaagcttagactaaaaagcatatgagtgtttgggtgataatgatgtgtcaatggaggttcatcagttgtagcaaatgtaccattctggtgggggatgtcgataataggggagactatgcatgtgtccaggcatggctatatgggaaatccctgtactttctgctcaattttgctgtgaacctacagccaacctaaaacatagtttattaataaaaaggacgaattcaaagatgtgtagtcaaaaaattatgcattctaaaaagtattcattgatgactcacaacaaaattaatgggatttttaaaactctcttcctcagaacaggaatgctgaggctaaacaaccttgcaaaaatgagatcaatgaaaatttgctatagcaaagttgattcatttgttttcctctattttcaaaaccaccagttaaaatgcaggcagttcccagcttataaatagattatctcccaaaagttaatttaataagctggtttcttggaattcaccacacattttccaatggagcagtgcagtaagtgggaattacattttaaggctagcccacaaatatatttaaatatataaggttggtagaacagggccacagaatgcagctatgcagtttgtgaactgcacaaacatccccagcaatggggtgaggagacagaaacctaacagcagtgcttgcagtcacgaccagcagaagagacacttaaaaaagtcatctgtgaggagagtaccttttggaatttctcctcttagaggggattgccttttgcagttcacataaagatacctctggtttgtgttagagaccgctggaacaacagtaagttgtaagcactgtttagatgagaatttgaattctgagttttcattaaggaaatgagacttgcatttccccaggattcacttccagaacaaagactctgggtcccttttcctacatttcttgagcactgggaatagcaccttttctggctcctctagaacaggaggagtggcagactggggaagctgaagttttagtggtcagagtctctgtgaggtcttaggcttcctgaaagcaaggactgctgtgggggaagtagctataagtacagtggctcttaaaggaactctgatctttggatgtggggtggtataaagggtgagagtgtgtgtgtgtgtgtgtgtgtgtgtgtgtgcacatgcatacacagcttgtgtgttagaatgtctctgggaaagttgaaaccaggagaacttctgcactggcagagtaaaaactgctggtgtatggtggggtcccctggacctgcatctggtggagcaggatggctatgatttccttacttaccactattggaaggaaggtagtcttggagtttctcagtggactatggcaaggactcagcttggggagagtgagaaggtgaaggtgttggtggttcatttgtctgtgtcacatgtaagtttggtgttctgaagccagtgaatttatgcggttgaacaatagattcatatcatcacagagctgagtttaaaaatgctatgaatcaatgtgctctgttttcatttgctttttctaagtattttggtattgagaaaacccctccccccaaaaaacatcaagtcctcaattttacattacagtgaagttctctagacttaagaccaagttacattaattagaacttatttcaataattttaaaaaatttatgaaaacaagacacttagtgcccacttggatgtgccatatagtaacagtattaatcagttgaataatccacattaatcagtcctgcgttgaagtaaaattattaatcagcttgatgatctaagcaatcttctgaggaaatgagtttgtcttagaatttaaaaagtgatcatggaaaagttagaaagagtgagaaaggaaacgaagaaggatactcatttcagtttatttcagttattttgacaccagatcttctgctgatacagagtgactctgagctttgatatccagttctgaacaagtaatttcctcttttaattgtgtccttttctgcccagagagaaagttttgtggcaaagtgtcagtggctgggaagagctacctcttgagttgtctctttaaccctgagggaatgaagttattttggtatagcatgtaagctgaggccatatgtgacattgagtagacgtaaattgaggcatgataccatttaatttggctttttaagctaacaaaaggacaaggaaaaaaaagtcaaaccagtattgaccactgtgaagaaaagatgattggtttgatataaacgttcagagttccacaaataatgtggaaacttaaccataagggaaaattgaggttatctaatcagatgaagcattccaaaatctacaggtgatctcctcaaaatcactgcaaactctgttgagaaaggcagacttgggaatagaagttgggagtcagggagtgttacaaaagaaacattttcagaaattcttttataccaagggatgattataccaacagctgatttggggttcttttgttgaagaaacccaaaatctagtgagaacgtattgtaacacgatggcattgcgtatttgaagtggagtctcatcagattatgtccccttttagttgtagcctgctttgacattccccaacccctctaagggggctgtgatggctttgcaccaatttttcagtttgtcctctcccactctctccattttggtatgtcctttgtattcacagtatagaacaagaatcacccactacattcgatagctaaacaatgagaaaaaccaagcaaaacaaaatatgttcaaaaacaggccttatttgtttcccaattttagcattcatcactgcaaaatttaaatcttatacatctaaataattgaattctccccagtaagaaaggaattacaaattaaactcattgtgcaagaaaaaataatatattcctagatcaagcaaaacaagcaaaaaaaatatataggatgtagcaaatatatatgccatgaaagttgggagttttttaggtgagagttggtatttggaagtcaacaccatgatctttgaactttttgattacgtctcttgaaggctgaaaatttgtagggtaaaatttttagtttcaccctaaaatttcctcttgtgtggcttggcaaatgtgaaagtttgagaacctcagaaaaatcatgttgaaagaacctgctcagaagagatcggggatgtggatttggttgatgacacaggctattgagtccttacagagaatagtttgtcttccatttttagatggctttaattcctccaaattgctccttgaataataggaaaaaggcaatttgaatttcagtgacagattggacataacaggttgcaactattaggtctaattttaccatactgagaaataaaattgcctaaacataaacatcgatcactgatgcagtaaattaatttgtacagaaaaagtagtttaactgcagtgtacattaaacattgaaaattttcaaaattactgctctctgaattaatttgtacacttgtttacttgttaaaagcacgcatacattcttttttctaaggcagcgtgggtttgaatagaataagaaaaaagtataaaaagtgagaaggaaaaacagagatgtggaaggcacacagattggcctgaatacttacaaataatggtttttctttcaattttgtttttaagtgctctttagaatgtgcattgtttttgaatctgtccataggatactaaagatgtgcacattttccccctcattataacaaagataaatgtgatgttttaatagccttgacttacgttttgttaagaattgaaggtaggagtaattagaagagttttatggtttggtttcttggtgagtttacattcaaaggtgtcctaaggcttggaactgttacatttgtattcatcaacaacctgacccatgcatttctttatacttaaccatttaaaaaaaatcagcgagcatgtttgcattgttccctgtaattctattatgaggaatgcatggcaaagtttggatagtatctttctagattgttcgagccaccatggaactggagctggcaatgcgttgtggtttgataatatctcctgcctacagttttcaaggacagtggttcgattcaaatacaattctgataagtggcaggttttcgtgtctttaatgccttgacaagggcatcactctcaggagagggaggtgaaaccgtttggacgaggattccattcctgctcctttgttgctgacacactaagataatggacaattaagagagccttcactgcaggtgaaagtatggggttatcactaatataaaggagcccatggggtgctggggtatgaaggagaagaggaatgggaatttttaaagggagtataaaacacacagatgagacgcctaataactgtttacatattgcacttttacctgtgataatggtgaatgattggagtgttcagtattgcttgctctaacttttttttttttttttttttttaatatctggttcattgcatatgacacaaagtagtgcagaaaactcgccccagtgctggcctgcctgtcgaggggtaagggaacctggataagaaagagatttgttttgtggaatctgtcttttagaccagcttccatggggtttttaatctagggtagtggttgtgaacccagcctgtaccctctatgggtcttaactctcagagagtctgatttaattggcctgaggatggatccagtatgtaattttaaaggctctttggacgattccaatgtgtactcagaatcaagggctatcattgctgagtttgtaacagaagatcaagctcttcaacactcaggctctctagcagattgtgtgatgatttaataggtttgaataatagtgtctgtgttgctgttacagaagatgcgtgctgcgtatgcttctgacagccctctcgtgtttatgtcagtgtcgtgggcaagcattcaggcatatctggggagaagttccttgtctcttgactactgttccccactttcccttactctcctttagtttctgggttttgttgttgtttttgttgttgttgtttttccttatagatgtttgaagctaccacttcctgtgagatcatggataagtcacctaagagtggggaggagtctgataaaggcagaagtgcctcatgtgacgtcagtgtccaacagtgaccagcaactttgtccctagtcttcttactctgatgggggagatgggatgttctgtatgcatggaaatttgaggggcacttctgatgccacttaggactaataaaggtgaggcagtccagagtatttcaaaacggagtgcagaagaggttaactgattttcttttgacttacactatcatttgtctttaacagccctgaacgacaatagagtgcactgcttctgataagtatgggttctcctcagcctgaagagatgtgtgtgataagataagatggcttgaaaaaaaagagagcttgagggaaagggacaggaggagagggagagagaaagtatgttaactgctttgtctgcaaaataccccctggtagccagagataagacaccttgagctacttggaagaccttaaacaggatgtaaatgaagccaataaaaatcacttgagatcaagccctccttctcctcccccctcctatttccagctctgacaacagaaggcttcatttactgtatggcataccacacttacattgtgaaccccggaagttgcaagagactgtagcctgttcaaagaacaaagaatttttagagaggtccaaacttgaggcatttaatcagcaattctagcatcgcctccctgagtggaaaaagaaagtattgctgaatataggaagctcccttcctcttttctcacttcttactccagatattcatttgctttgtagttttgtgacaaccttctttctatgttgaaatggttggcaggatgagctacctttgatagtgtattaatatttcccatctagctaacgcagcttgaaagtaatcatcaacaaaagtttagcagacagactttttcatgtacacacttgaaacacggctgtctactcagaactatgtttcctaagcatgtaataccaggctttatgtacttggaactgtataactctttaaaatggtcactctttttctggaaatgtacaagctgctgccaacgctcttacagagaggaagttacttgcaggagctaattgagtatttcactgaaaagatttgaaatatggagtcctactcaaagtgggaggggggctgttaaaggataggagggcaaagaatatagtgatctaattttctttctgtaaaagctgcttcttggaagaactgggattcaatttggtctttgaataagggcgagaaagccctccatcaatgatgttccattacagaggagcaaacacgggaaaggcacagctgagtgcagcaaacttcaagcaaggacttaggtgattcaggggaaagaaaagattctaaggtgattctcaagcttgggaatgcaggtgaagactcaggaaacttgctaaaaaagggagatttctgggccccatcctcagaagttcagtcaggaggcgtggggtggagtccaggtgtctgcattttaaacaggcagttcaagcagttggtctgctagtgattggtggattagactaagaaatgctgccctgtgtcatctggctgtggtagagggtcagcctttggttttgttgtgtacagccaggatagctggaatgataattgaagaagggtagcttaagggataggtgagaaggatccttcatttgaatcagtggcagggaatatgtccctacaggcaagggtgtgagaggaaagtaaagctggccacagtgccagtttgactgtgtctttttttctgctttgctttgtcaatacctgatccgaccataccaccctgctcaaagcagaggatggaagaacaggagagaggcaaacagacccactgttaaggagatgtgtatatataggatttttctggtcaatagccagcagtgaaatcaaattaagaaattggctgtcatgacttgttaacagagagttataggtttgtagagttgttaggcaatttttgtcttcttctgtatatgtgtgaatacatacatcagttagcatgaattggtttagtaatatgaaaaacaatgaattttttttaaaagagaaacactattaaacaccactttaggtttattcatttacccataaaaactcagcatttgagttattgttgttgttgttttagtggaggagagtttgggaaggatggactttgagggttttctaatacgtagagccaaggtgcttgcctcggcactggagatttggatgtgggtttcagtgccactgtcaactactattgttagtacaagattataacatgttactcatcctcgttgacctatttgttcatctgtaaaattagcactttttttcccctaaaggcccacatttctcacaggtcttaaatcttatgtttcatatatatacatgaaaagttaggaatgacagccttgactttcttttctctgtgtaggcttcaatcacattcactcattttctttcctttgagccctaaagtcagacccagaggtatgcacaatccatgccaaacaacaggccatcttaagagaaaagagcagagctcagatgtgggaggaagctttgtaaagatttcagagaacagccctttggtacagacagtattgagtcagtgaagattctaaaactgtgctggtaggttttatatctttgaatattagcaatgtgtctcattactgtggccacactaccttggattcttttcttatacattattttgttatttttaaagtatcttggatggaggcaaagtaagatgctagtatgtggaggtatcatggggtttttgaggcctgattttgtcacaggtgttggaatatttgccaagatgtatcatctcagataatatgtgttatttatatatagacacatatatataatttaataaaaatatgattatagatattaatcagtagaaagtagcgtcataaagtcttcccttagagacatatttcattaagacatgattgtacagatatttagtcctattaagtgtcaaattactacgattagcacttttgtaatgagagttacctaaaatatttgaaaaactactttggcataaatcacttagtctattctgaacatttagtcaactgtggataaaagcatgcaagcgtacacataccgtgtgccacaattttaactgtactggttcccataaataaattaccagggctgttaccaagaaaaaaataatgaaatgaactggcttggatgttatcatcatattcattctaaggtagagattctagggaagagaaaaatcaaaccaaaagtgaaaaataaaacataaagggcaaagagggtaactggaaagtcctcaaattgataattcgccttattttcagaatgcctcttttatattttgctgaattagcaaaattataaatttaaaaactctataaatacatgtacttaatatcataagacctgtgtagagatactttgtcataccctaactaaagatgattttaagaaaatagctttggctttccagtttatatagtacttttataaacattatctcatttgagataaaggattgtcttatatcatttgggttacttggaatccaatctcatttttccatttcagttttaccatgtaagtgttaatgtgaaaggtaataattctgttgaaacactataaaaattctattgtataaggcatattagtgattggccctactgtagagtctttcttatgcatgaagtctcaagatagtccaacatccctgaaatgcctttttaatttttttttttttttgagatggagtctcactgtgtcacccaggctggactgcagtggcgtgatctcggctcactgcaacctctgcctcccgggttcaggcaattctcctgcctcagcctcttgagtagctggtactacagacgcatgccaccacgcccggctaattttttgtattttagtagagacggggtttcaccatgttatccaggctgatctcgaactcctgggctcaggcagtctgcccgcctcagcctcccaaagtgctgggattacaggcgtgagccaccgcgcccagcccctcatctctgaattccttaataccactgtagcatataatttcctcattaaatgcataaaactgaggagcagacaacagatactactttgagttgcagctgctgggtggttggctgggtgtactcactagcgatctcagtggctttttcaccctatgaaaacagcctgacaacctgtgtgagtcagtctgtgctttaacaaaattcaaaatgattatttgccacagaccttaacaattcctatcatttgttagacacatgtatgtccaaatcaagaactggtactgaggtcagttgtaatacaaaggcatatggataattgtagtaatagttcccccctaatctttgtaacagctttttctacattagcaaaccatatttatcactttactgcacaatgaacccacagggggtgctaattgttcattaattaaattttagcctttcagcacttttgtattctctagtggccttgtctgcagtgaagtatacagtgtggccttttcaggctgccaaaaattcatgttggcgttactactgccatggttataatacaggtgaaattcagctccaataaataccatttcaggactgttataattcctggtgactgaaagttttccggccttggaccaaagcctacatgttggaaaaatagtcagtaaagtctagtttaacaagacaaaacattctgttagaccagatgctgctttgaaatagaatttgatttcgttttttgaaaattctggtggtttatggcagttcttccaaaaccattaacgtggtgaaatgaagtttctaagatccgtcattccctaacgaagccatttccgaacttagttttctcagtggaagaatcccctttaccttctgcttccccagtgaagaagttaatttaaaatcactaatgattaacttggtagcattgagaaatttactgagtatttttaaaaagtgtaggtcatccttcaaagctcagtacgtatatttcacactggtgcaaaggattttgaagtgaaatagaattggcctcaaggactttctaactaagccaaatagtcacttatagagtggtgctggcactatggaatgtggctcctggactttgaatgcaggccctttcgttgtgtggactttacaacactcatgaattaatcacaactggccagtgtgtgtagctattaaccaatgaactgctacacattgattttcaagatatctgtgagtagcattcagaagagtttttttggaatatttttgtttgtttatttttatttattaagactgttatttaacaagaataataatattgttaataaattaatccatattaattttataatgataatattgtctatcaaattgttatttaaataatattgttaaatagtagttctttatttttgtttatttttatttataaacagaaatgccctttaagtcattaaaaatttttagaatctcaatatgaaaactgcaacaactaaattatcgttaattttgattcctttctgctgttctcacatttatgagttatcatttaccacttatcacttataggtaactttggctttcatagcagtagtaataatgtaatacatttttagattttagcagtacagaaaactccttcatataaggtcatgtttgagtcttataatacctcatatgttgaggcaggccgaaatttttctgatattatagacaaggaaatcaaaacttcaaaaaaaaagtagtttctaaagttcacaagccaatattagacctgaacacatagtaggtgcttaataaaagttgattaaatcaatggattaaagcaatgaaaaactgctttaaattctttgtggtatgaggtcatatataaacacaagagcacatagtaactaataaatgccttctaactcaaaatagtagagaataaaaagaatacagactcaggaaatccactctggtgacgtctgtcattattcaagaaaagatcaacatgttaaacggtttagaacaccctcagtcacggcactgtaaacagatgtgtaatacacagttgccaattattgaacgccaagaggtgggtgcttatcattagttatatatatttttaagtgagccaaaagatagaaaaagaaaagcaattctcaccccccacataattggaaaccacttttccttctgtctggcttcagaaacacaatgtcttgatttccgtgcgagagaggatgactgttctttaactggtttcacgtcagctttttcctctgatttgagaggtggagttaagtgtgaactgcttaagaatgcactgttttctatttaatttggctgcggaagatggaattcattgagctccgtctgttcaaatgaactttaagcaacagcaagcaaaacatttatacttctccctgcacatgcaatcgaaatgtgtctggtgaaagaatggatgaaaagcccaggattacctaaggagagccatggagatgtgataacaactccttatctctttgttggctcatctgaagtgttaaagtgttgttgggggaaagcgagcctcttttttactagggagtattgaaggcaaaaaaaaaaaaaaaaaaacctctgagcttgagctctgatatctggaattcatcttaagactgttaaaaaatgtgcaccaccaactcccgctcttcacagctgctgttattaatgggtgaccacccttcttcctcataacctaactgttaattcatttaattggtccttctagaacagttcaaaatattacagaatttaaaagcatctgtgaattataaataattttaaagttcacatttctcatttgaacacccagtaaagggtattcgttttcaagtagttaaataagttatatgacaaaggagtgaatttaatgtggagctgttgattttttttttttaaaaagaagcatgatagctattaaagttacagcttttctaaaactgttgacatttctatggagaatgaagggaagcaattgtgtaataatgtataatagtttttttttagcatgaccttatcttttagcaatttaaatcattgctttaaaaatgtattttgtaatttggttagaagattttaaatatgatggtgtaaaattgttactgtgttggcattgaagtaacatgtcaagtacccttgttacctgtgtctattaaacatgcatttcaaaatattgtcctctttaagtagagcccgacttctcttagtgtttgtgcacacctgtgtatctcccccaggagtttcagcttatgttaaagtgtctcaggtagctaatgactgaaaaagtactgtgaattctatttagtaagaaatttcagaactgctcctatagcctgctggcagaagtaaacaattatgtaaggcaagtggggggaaacctgaaattttgttggtctcaagtcttaccctattgtttgagcctcaaaaaaaaatttactgaatcaacttaccatgttgctaaataatgcaatgattgtattgctcgtgttttaaggagaagagaggtataaaccgcattcttggcctcagaattccatagaaaaacacttgtgccaaggttacctgcctgtaaagacccaagattatatcccatgtttgataatttaatgtttggaacatagtaagcacagatttatggtctattaacatttaggtatcaccagctatttatcttttattttcttgctagctgcgtatacaactgtgaaagcttaaggcactgtagattgccattgggtcagtccttaaaattaatattcctgagattgcattaaaggaaagaaaatattaaaatatgtttatgctatattcatagaagcttacacatggaaacagaaatacatgcaacacatataaatctttttgtttacatatgcagcttttcttccagccatgataaggtgccctagaaacattcactagtctttgtaacaccccagagggtaagtagcaagaattcttatcttcatattgcaggtgaaatacctaggtaggggcagattaaatgacttagccaggtcactctctaagtcagttatgaagctagaaataaaactccaggatcttgacttttggttcctacacaagtatcagacccatcagtatttgtgcttcttctcctcacttgaaaagtaaccattgatgtaaatcctgtccctgttaaggaaatcttgctgtgtggcactagcacacatgatactgagtccccgatgggcagttaagagggtactctgctgttgcagtgaacaagctcaggtagcaaaaggatattgttaagccagtttcttgcagaccaggccctatgaagaacattatcagaagtttccataacttcagagaaagtattttcatctactttcttacattagtttctcttgaataatttcagattgcccctagtgttggaatcaatcttctgaaaggcttggtccctgtcctcaggaagtgtatgtcctacacaaattaagacccgcttaatcataaacaaagtaagcattaacattagtctagcccttctgcacatattctcttcctctctctttgatcttattttctaatttctggctaatttgattagtcttgaacaccagcgagtggccagaaccctcagcatttctcttccacaatggcaggctgtaaacagactctcagaccctcatttgcgtgcttgtctgtccatcagcaggagctaggatcaaatcacgtccagtctctgcttcctcctccccaggttggcacacgaggggctgatggctcacgtcacaaaggtactctgtgttctgttgccttttttctgtggaataactccttctggtatgacttcacttttctgttagtgagcactttcccccataaatatgcctgaacaggtgttactctgctgctaactgagtttccagctgtcctcctccaacacagacccagcaaaatctgttgtttcgtccttttaggcagactagagaagcgcctagcctgagatggaggtcttccttgcaggatatggccgttctgctgccagaagatggtccggaaagcctggctggctaacaaagacaggccttcagcggctgggtgtagttccagttctgcatcccctttggcagaaacacagaggctgctgcagtgtggccagccagcgaaattaggaaataaggacctcttttatttactcaggctgctgaatcatgggcattcctgtctgcttggagaaaagtcaggcggctctactttccactgaaagtctcaggagtgttggagactttcatctcggagtgttcacacacttgttttaatgtgctttatggaaatggtgaaactcagcaagtacagttgctgtagaaaaacatctgcactaaccatgcacacacatttgcatctttaaatagactttttaggccacagagctggtttctagcaaagctttttcggcagtaagagctacagctctcggagagtcagctcaagtgaagagactggtttcaaaaattaaaatttaacatggacatgttaagtacttcacattgaaatgcagaaaacttgccatcacccagaaagacagtccctgtaagtagcacttagtgccaaagggaaaaaaagttaaagttgattcaggaacctgagttgaaagaatcttctacagtttcttccacgtgtaaaaagaaattgacatcgtttaaacctatattcaccatttaagcttagtttgcactgtggctgccaaaaagcctaagttaatggggatggataactctcaaagtcttaggtagacctcagagtatgttggcggggagaccatcaccacaaaagtcttggaggagtctgatacctgaagagtgtggaccaacccgcttggagtagtgagtccctgtgtgttctttggagaacacaatccatttacagtactggcaaatgagagtttttacattttatattttaaaacagaaatcagcctttcagggatgctttatttatttttctataagtattattccttgctcaaactatttacttctgctcaatccccacgccttatgacttctagagggggtgttgtgtaatttcctttacaaagacaagtaatggggactggagagaagaaagaaaaggtttctgctctcttgaatcctggttaaaaccttgatcctaaccttcagctcacttgacgtgtcactgaaatttacaagcttaagagaacagttatataatagatatagtcaggcatggaccacagacaagaacctgaattaagcctggtgttagggattgcataatttttataatggtccattgctctataattctttatgtatttgtaaaaaatatatcatacctggacacaatctgcaatttaattacaaattcacttgctcaattttcaagctcaatagttacatccttctaggctggatgcattacaaattctgattcactgttttccccaaatgtataaatgagaagatgtgtttgaaaatattttttaaatgaaatagcaggatttaagcctaaaagataaatgtgaaatgtggtagattttacctagaatgttgagtacatttaatagatggccttttttttcaattagggtaaatatttgaaaccttgatttgtttcaggtatattagctttaggtgacaacacttttttaaggggaaaactagatcattattgagtttttttgcttttagttaaattttttttttgtatgttgagtggtgagttgagtttatctgcatatgttcctggtgtattcactttaagtataaatcacatccacatccatcagaccctttcttatgctggaaacatgttgggttatagagtcctataaatgaggatgcaaaatcatgcggttttcaacttgtatggcgaagctttgttgcagtgggcaaggatccaggaatcggtgtttggttgttttctcagagtgagagggttgccatctggcattgatagtgagatggtgttgtcatcagtttctagatgcaggaaaggaatgatcctcatctgtttcctgtggataaggaagaggctgacaatctagtaaaatcttgttaccttaaagaaagcagacatggaattcgtttacataatgctcaccagtttctacttttatattaatcatttagcttgctagtgaacttcagctttgaagaatttaaaaacttatttgaacatactctaattgaataccattagaatattctaataatgctctaactgagcctcttattctaactgaaacactatccccaccagctccactccatggtctttacttgtgtgtttttttgaaaaatcgtgctcctttggagagtggaaagcttttaaagtttcttctgatcttgaataataggttatgaaaagcaaaaaagaggtttcacaacctgctttgagatggtcttattttccacttggatatcaagaaagcaacagaaataacagtgcacgtttgctaagaacatagtttttaaaatcacctaatataaggtaacattcctttatggataacttgctaagtttatatctggctctcagtcttgtttgtcttctttttgtcactcataaatctttcagcatttaccataatcatttatcacttttcctgtttccagtttttcacaagttgctttgtctctgctcacctcaaagtgcaggtcctgtttagctaaggaagttcaggctgctgaagcttttgcaaaaggaagatatggtgggccacctcttgaactttccaaacaaaatacactattaaaatctggcccttgtgaaactctcattttttcttgatcctagctgatcctagctacatgtaatatctagcagtacccttctaacatttaataatccattttctggcctatggaattcgaatttcagttattgaagaaatcctggttatctttcattacacaagacataattattattgtgttttctgtcttctttcatgtgcttactttttaatatttttttgctgaaagcaataaggtctgtatcaataagaaccccgtaacagattttggtctgcagaattgcctttttatataaaaacaagcaaaatgcagagggaattttttattaaatattagacatctgggttgactgcattaattttaaatcattcccgtaatatttcctcttttcatttggttcttcagatgctcacataatatgcaaatcattttagaaggaatacaaaagaaacattaaatatattaaaatctgcattttaataaaattgtcaatgtgtaatatataccttgcttctaaggaagaatgataaaaagtaataaaagggtaatttagacatagaactatttaatatcctcttatattttacaactcaacaaaaagtaaatgcagaataactgctttgggctcagatttgaaaatgtctcactcaaatattctctcttttcattttgttttttcttgaaagattcaagagggcccaactctgcgtgctggttgaaatgctacggtaaactcactcttgaatctcaacatgtcagatgaaatttgtcattgcttcttgttgcagatggagtggatgttgaagatgatccgacttgctcttggccagcttcctcaccttctagcaaggatcagacttcccctagccatggagaaggttgcgattttggagaggaagaaggtggccctgggcttccatacccgtgtcaattctgtgacaagtcgtttagccgcctcagctacctaaagcaccatgagcagagtcacagtgacaaactgcctttcaaatgcacctactgcagtaggctgttcaaacacaagcgcagccgagatcgccacataaaactccacaccggggacaagaagtaccactgcagtgaatgtgatgctgcgttttccagaagtgatcacttgaagatccacttaaagactcacacgtccaacaagccatataaatgtgccatttgtcgccgtgggtttctgtcctctagttccttacacggacacatgcaggttcatgagaggaacaaggacggctctcagtccggttccaggatggaggactggaagatgaaggacactcagaagtgcagtcagtgtgaggaaggctttgacttcccggaagacctccaaaaacacattgcagagtgccaccccgaatgctccccaaatgaggaccgagcggccctccagtgtgtctactgccacgagctcttcgtagaggagacctccctcatgaaccacatggagcaggtgcatagcggggagaagaagaactcatgcagcatttgttctgagagtttccacacagttgaggaactgtacagccacatggacagtcaccagcaaccggagtcatgcaatcacagcaacagcccttccctggtcacggtgggctatacctccgtgtccagtacgactccagattccaacctctcagtggacagctcaaccatggtggaagctgccccgccaatcccaaagagtcgagggaggaagagggccgctcaacaaacccctgacatgactggtccctcgagtaaacaagcaaaagttacctacagctgtatttactgcaacaaacaattattttcaagtcttgcagttctgcagattcacctgaaaactatgcacttagataagccagaacaggcccatatttgtcagtattgcttggaggtcctgccctcactctataacctaaatgaacatcttaagcaagtgcatgaagctcaggacccaggtctgattgtttctgccatgcctgccattgtctaccagtgtaacttctgttccgaagttgtcaacgacctcaacactcttcaggaacacatccgatgttctcatggatttgcaaaccctgcagctaaagatagtaatgcattcttttgtccccattgctatatggggtttctcactgactcttccctggaagagcatattagacaggttcattgtgacctcagtggctcccgatttgggtctccagtgcttgggactcccaaagaaccagtagtagaagtctattcttgttcctattgtacaaattcgccaatattcaacagcgttcttaaactgaacaagcatatcaaagagaatcataaaaacattcccttggccctgaattatatccacaatgggaagaaatccagggccttaagccccctatctcctgtggccatagagcagacatctcttaagatgatgcaggcagtaggaggtgcacctgcacgtcccactggagaatatatctgtaatcaatgtggtgctaagtacacatccctagacagctttcagactcacctaaaaactcatctcgacactgtgcttccaaaattgacctgtcctcagtgcaacaaggaattccccaaccaagaatccttgctgaagcatgttaccattcactttatgatcacttcaacgtattacatctgtgagagttgtgacaagcaattcacatcagtggatgaccttcagaaacacctgctggacatgcacacctttgtcttctttcgctgcaccctctgccaggaagtttttgactcaaaagtctccattcagctccacttggctgtgaagcacagtaacgaaaagaaagtctataggtgcacatcttgcaactgggacttccgcaacgaaactgacttgcagctccatgtgaaacacaaccacctggaaaaccaagggaaagtgcataagtgcattttctgcggtgagtcctttggcaccgaggtggagctgcaatgccacatcaccactcacagtaagaagtacaactgcaagttctgtagcaaagccttccatgcgatcattttgttagaaaaacacttgcgagaaaaacactgtgtattcgaaaccaagacacccaactgtggaacaaatggagcttccgagcaagtgcagaaagaggaagtggagctgcagactttgctgaccaacagccaggagtcccacaacagtcacgatgggagcgaagaagacgttgacacctctgagcctatgtacggctgcgacatttgtggggcagcctacactatggaaactttgctgcagaatcaccagctccgagaccacaacatcagacctggagaaagtgccatcgtgaaaaagaaagctgagctcattaaagggaattacaagtgcaacgtgtgctctcgaaccttcttctccgaaaatggcctccgggaacatatgcagacccacctaggccctgtcaaacactacatgtgccctatttgcggagagcggtttccctcccttttaactcttactgaacacaaagtcacgcatagtaagagtcttgatactggaaactgccggatttgcaagatgcctctccagagtgaagaggagtttttagagcattgccaaatgcaccctgacttgaggaattccctgacaggctttcgctgcgtggtgtgcatgcagacagtgacctccaccttggaactcaaaatccatgggacgttccacatgcaaaagacagggaatgggtctgcagttcagaccacagggcggggccagcacgtccaaaaactgtataagtgcgcatcttgcctcaaagaattccgttccaagcaagatctggtgaaacttgatatcaatggcctgccatatggtctgtgtgccggctgcgtgaatctcagtaagagcgccagcccaggcattaacgtccctcccggcacgaatagaccaggcttgggccagaatgagaatctgagtgccattgaggggaaaggcaaggtggggggactgaagacacgctgctctagctgcaacgttaagtttgagtctgaaagtgaactccagaaccacatccaaaccatccaccgagagctcgtgccagacagcaacagcacacagttgaaaacgccccaagtatcaccaatgcccagaatcagtccctcccagtcggatgaggtaactcgccttttttaatgtttgctatttaacctcctcaagaaacggtccctgctttatgtttacactctccacagctttatttattgtcatgggccaaaagatgcttagattgaaatgcagtgggtttctttttcccccatagccattagctagcaattacttgcttcttgataagcagcattttggcttgaatggtgcaaaataggactaattccagtctccctaggatattgtcttctctatgactgaagagaccagcgctcatgccaacactactgagatctggaatctcagcatagcttcaccgtgagttgaaatccccagctatgacttgtgtgtatggcagagagataatgactcaaaagtaagatgctatgagccaccatgctggcttagagtaaattaaaaagaatatatatatttggggataacaaattgggtaggggtggctttttaatgccatgttgtcaacactcactgtttttctttgtcttctgggtagagaggaaaatacttcctcacaacaggatttttaaaaatcccctacatttattaagcaccacatgcccattattctgtttaaagacactatccctgagtttgaggcctactctctgggtttcaaaatcaatgtgtgcgtttttttttttctccttagtttcagagtagttttctgctttctttgccgtgacgagtacaaaaaacaagttcatttacaatgaaatcatttcataagtcatcatttcttagtagctgagcagaggatggctcattttaatatttctttatgctttatcacctggtttctaaaagctctttccacttccctacctgcccctatctggagatccatccaaatgaaaaccccagggagatccttctcccttcagtttggggttactgcattttccttatcttgtctctgcactcacaccctggcggaggcccccctgtggctccctgcagatagccatcagtcagctggcaggggcgggctgagaagactgagacagagcctggcctcacaaaatgtggcatctgtgtggcaggcaaactcccaaactttgaagccactttcccccttctcccctccccaagtaaatctgcacttttctctcatttaaatacatgaaatcctttcaaactgctgaggacagctggaagaacatagctttgattatggctcatagctcatgggttggatcaaattgtttcttttgaaacaaatattagtagttaaaagcatatgaaatgagggttttccaagtttttacttcggaattttttaaacctatagaaaagttaaaggaccaacacagcgaacacgtatgtgtgcctgtgtatgggtatccccaggtcctccagataagaatattttgtagcgttttctctctctctgcacccctttttaaaatcaacttcagccacatgaaagaaagttgcaggtatcatgacatctcctaagaataagggtatttttttgttcaattatgacatcattagctaaagcaattcactaaattaaaaaaggaaattaagtaatcccataatatcgtctgtaagaggttcatatttagatttcctcagttgtccccaaaatgtctcatatttttaagtttttgaatgagaattctgaaaacattaaggcagaaaattactcttctcctttgtttttattttgtaatgcttaacatatgcctacaagagattgatactcatgtttaatttacaaagtgtgtaaagttgattttaaatgactgcattagtctgtgtgtctgtgtgtgtgattttggtgttgcttgtgcattttaaatgaggcatagctggactctcttgtttcttagtagattgtttatgaaagggcatatgcctgtgtcttcttatctgttcatggtttgtattttctgatatttataaattgctgtaattataataacatctaagaggaaatatttcaaaaacgaatgaggacatataaatagtatttacacattaagttggttagaattactcgatgaggagaatttatcattaaggctcgaatgacacctaaaatcttagtgatatttagaaagcctatctttatcctgcacttacataggataatacttcaaatattttttaaaatacttgtttaagttttacaattgcatttttaaagtacctaatgactaagggtcaaaaatgactatgcagtcgagtacctccctatgaaacctgattaataagagcttagagtggtatgcttaattgatgagatattaggatttagtttcaaatatttcttagtgcctcaaaagttcactaatttgttcaacattttaatcatcgttactatcgccatttttaaattcatcatactatttgttataaaattttgtatgatactctctacaattaaatatgtacaatataccatattatttagactaatatagaaaattatctaaatatacacaaagttttacaaaaagaagcctaaaaataatatgtcagcaagaaaaatacaaaataaatactcatttgttcacattctttgttagccaagttaaatttctataagttctcattttgaggagtttgtgcattttttccagattaggtaaaatgaaatgttattatataagtctttgtcaaaagacaggtgtatcatataggaataaattttatcacaaaaagaaatgtgacatatatgtctattgacttagatgccctaggtagcaattgaaggacttagcaacataggtggtattttcatctcttcttcttgctgaggcttgagactccagaagtgaaaagaaaatcacaggagataagaaaacctggatacataggtatggtcaagaacaaggttagatttttctggaccatgacttagaattacatagaatatcggtaaacatttgtgtccatctttcaaagactaaaaagaatattatatgattgagactaggtaggatacctaattaaaagggatttaaacttaaatataaatctggggaggataagtactatataaaaccctgcaatccaaaaaatggatgaaagacaaggcatgcaacactaaaagaaggataattgttggtagctgttatgtaatagagagatttgaaatcgaaggcagatctgagtttgaatcccatttcttctgcctaatgctttctgaatttgtgaaaaatgttttctttgtgccagaatcctcagattattaatctaaatttgcagtgaagattttgttttgaataaaatattttggagaacctattcatttttctttgctcctcaaaggttgagtgtgatagaaatttacacataacctacaataaatgattccagggatggtaaggttaactggggacaggaagaacactggccctttagctgtttccacacatgaagcaccttgcagttattgacatttactatacgttgaataaatgttgattcttctggagttcatgggcactgtctactcaggggctgccccatctggacctcagaatgttgtctcatgactttgaagttctacagtagattttggaaacacgtattcttctgcctcctttttctagtgtgcttcttagtcaagtttccctgagcaactatttactcacatttcaattcacactgtcctcaccagtcctttgaaattgctcttgccagcattaccattatcctcatgatctccatgtcgcgagatgtgcatagggtgccacagaatcaaaatagaaggaacagtgtagaccatctgactcagccactttattttacagacaagaaaacaggggcgggtaaatagaggattgtctaagatcacacagccagtaagtggtaggcaaggggttagagttcaggttaactccaggttcaggattctctttccacaatcccgtggcactttcctctagctgcagttgaatccccgtcttttctacagcatcctctcggtactcctgtcttctttctcttctccttcagttccctcacccattgcccaggatcttctgcattcgtcactttattgcagctgactccaagggctcttctggcctaattgaccaatgcattgtacttagagaaacaaaaagatagtatatcttagttattattgtctctaagcacttgtcactgttggccagtccacttttatggggcctctgtcttccttcctggcttcctggttgcctctgtgaacgccctgtggcctctccttcttttgctagccccttcctgtaggtttgtttccccctcattgctctcagtctgcatatcccctccatggggcctccttcgctcccagagcttgaacgaccaccttttactgaccgctctccaaatagtgtatccaagggacaggaggggacctttgggagctggtgggaacactctttatcttgatgcctgtggtggttacgtgactgcatgcatttatcagtactcagcagatttaaaattggtttattatttttatggggattacacctcaatgaagctaattttattttattttattatttattgatttcagacagggtctcactctatcattcaggctggagtacagtggtccaatcatggctcactgcagccttaacctcccaggctcaggtgatcttcctacctcagcctcctgggtagctgagactacaggctcatgccaccatgcctggctaattttttgtatttttggtagagacgagcttgccgtgaggagttcaagaccagcttaggctcaagcaatccacctgcctcagcctcccaaagtgttgggattacaggcgtgagctaattttaaaaagcaatgatgtctccaactcacatctttgctctgagtttcggactcatataaacagctgcctgctacacgtatccactcacatgttcccttgaacttcaaactcagtgggtcccaaatagaactcagcaccttttctctaaacctgcattttttcttatgttttctatttcacctgtaggtccatcgatcttctcagtcacttcctttctactctgcatcatttggtcatcaagccatcttgactgcagctcatatgtacagttgactcttgaacattccaggagatagaggcactgacccctcactcggtcaaaaatctgcatataactttgactccctcaaaacttaactactaatagcctacttatcgataacataaacagtcagttaacacatactttgttagttatatgtattacacactgtattcttacaataaagtaaaccagagaaaagaaaatactagtaggaagtcataaggaagagaaaaatctgtccattaagtggaagtggagcatcactgaggccttcatcttcattgtcttcaagttgcgtaggctgcagaagaggaagaagaggagggtttggtcttgccgtcttgggggtggcagaggcagaaaatacacatataagtggacctatgcagttcaaacctgtgttctttgagggtcagctatttttcttttcttttttttgagatggagtgtcactcttgttgcccaggctggagtgcaatggcgtgatctcggctcaccacaacctctgcctctcaggttcaagtgattctcctgcctcagcctcctgagtagctgggattacaggaatgaaccaccattcccggctaatttttttttttttttgtaatttttagtagagacgggtttttttctctcagacagggtttcactctgtggcccaggcttgagtacagtggtgggatcatgggtcactgcagcctcaacctcctgagcaatcctcctggctcagcctcctgagtatctgagactatacaggtatgcaccacatgtccagctaattttttttttttttttttttttttagtaggctcgaggtctcattatgttggccatgctgggctcaagtgattctcctgccttggtctcccaaagtgctgggattacaggcgtgagtcactgcacccagccaactgtttttcttgaatcaactcctcccaccatccccttaccacgttttaagttcaatctctgatcttcttttcctgagcaactgaagcagcttcatttggtccttctgacttgagtctcatcattttcaaatccatctccacaccactgccagaaccatccatctaaaacacaaatctgtctagcatgtcccttcctatttgaaacattgtaagtgttctgctcctccatccccataggatgatataataatccttttattgtgaaatacaggacccttcaggtttcggctttcccttcttttccctgccctctccttgttctataattggaagcactttaattaaccacacataacatattgtctctgtgtcttactgaggctgtcctgtttcttctccccaaataacctctctcctcttgactgtcttccaccttccagaaggctgtccagcttatcctttctttggagatcaactattctagaaggccgtctatgagcctgactctccatcccaagcatctccctatcccctcaatgccctgtgcagataatatggagtaaatatcacgtgaaaattgttacactgctttgtgattatctattacattgtcttttcctctgattaatttcctgggacaagaacttactcagtctcatattcttggtacctctgacagtgccaggcccatattaggcaaaggcctcactgcatgggtatcatgccatggagcttgaatgtgcctggttgccctcccaaaatatcttcttatttttgcaggacaaatgaccacctagatttttcatccaggaaacctttgtctgaaatgtcgtatgtataccctagactcctggttctctctcctgaaacgttttcctcttccagacttccatcattttagtaaagggaaccactctacacccaattactcaagcaagaaacctgtgaatcattcctcattcctcttttctctcattctccatgtttaatccatcaatgaatgctgttgattccacctccaataagtatcttcaaatatctcatccacttctgtataccttcaaagccagaattttagtctaggctgcaattgtttctcgtctggataccgcagtagcttcctaacagatcctctccttcatcttctgcctacttccagtccattcttcatgctgcagttggaagcgtagacctgtaaattaagtgaagtcacttaaaattttttcgtggcttcccactttctcaaatgaaccccaacgcctcaccagcttacaaagtcatgggctctctggctgtggcaggctattctcacttccttctggtgactcttccttcttaactctgcccagatcctgaacatgtgctgcttccccactttatcacctgagctgctcttcccaaacagcctgtctgttctgctggctctttctcgtctgtcaggttggccttcctgaaaaccttatcaaaggtggtctgccctttaggattttcttttaaaaatgtcattatttgttcactcggccgggcatgatgcctcatgcctataatcccagcactttgggaggctgaggtgggaggatcattgaggccaggagtttgagaccagcctagccaacacagcaagatcctgtctctacagaaatgaaaaattaatcaggtgtggtggtgcacacctgtagttctagctactcaggaggctgaagtgggaggattgcatgagcccaggagctcaaggctgcagtgagcagtgatagcatcgttgtactccagcctgggcaacagagtgagaccctgtatcaaggaaaaaagccctatttcgttcttctcctttctcatctctgaatgcccatcaacttatcataagggctcagtaaatgttagttgaataaatgaatacagtgtaagtccttcagagtaacacaaaatggtgtatactttattttcagttacatctagttactaatacatatgggtataggtcatttagcctaaaactattttaaagttaggtttgatctaaaaatattaaaatacagtaaaaggtttgaagtttgtaacaatccaaagttcatctttaatatgaagatctgttttaagtgtcttagaatcaatattttttatggtttttgtatggaagatggaaatgtgcatgatgacaattcagaacctactcaagtcccggagttctgttttgtattgttctgttcatcagaatttccctatgaggctgaaaaaaacaggttgattaaaaaatattttaaagttttcaaatttcaaattgctgatactaagttttgctaagttaattatgcaaagagcaaaaactaaatgggttaaactccctctaaagagacagtatttaaaaaattaaatagaaaatttacaggaccaaataaattgataaggttcaaggtgttcttcaaagacagtgaattgctctgccaagtccaatctgtattgttgttgttgtattcaatatttttttgccatctacaaagtaatagaacagggagtcaacggccctggcaccagtaccatgggttggaatgtgggagcaggtgccttgcatccacgctttctacccagttccgtgatcacctgatactgaccattgcccccattattgaatttgctgcatctaccattcctagattttctgtacttacctccagttctagaccttttgttgatattttttatatggttacagtgactttttagaacttatgaaattcaaaaataggaatgtttttgtatttcaaattgctgattgcacataataacatttatccttttggtactaggccaaaggactttggaatcatcttgtgtcatcatagaactctgtctaggagaaacatttcacatttttgactgagattttgtcaagatggagattagtaaatatctagtcaggatgattttaaatgatgaaagaaaagtgaaagctatattccggatgtctggatctcttattacggtgttgctctacctaccacatgatgtagatgtagttttctagtacatgtactttgtatttctagaaatttagcagcctaattttaagaatcttgccaaaagcttttaaaaagcctgaatagctggttccccttatttatacttttacaaacctttttatgcttttttatcttttaaatgtgcatgtttctaaaggttctattcttaacctacttttctattctgaaataggaattcctatttcctattacctcattattatcccatacaaataagcaaaatatgaagtttcaattctcaacttctgtttaactcccagtcttaaattttcagcttcccttttcacattaccagttgaagcttctgctagccctttaatcaactccaactataatttcatttttctcccattttggttagtgtttcgtctttcgcctcgtcattctgcctgaaactttgtttctgtttcctatatgtttcctgttctcctaacctgttagggcagtcactccccaggagccattgattattcttttgtaatttctcttctatctgcatctcctgcatcctttctccaggccaaactatattaaatctcagctggtctccttcacgtgcttcctatcataaagcttatctcaataaacttaaaacctgaggatcacacaaatcaagttctctgactataatacaagtaatttataaatgaaaaggatatcttaaaatcatacattttaaagtttaaaacatacattgaacaaagaaggcataatatagaaattaaaaatgctgaaaactgaaggataaatacatttcaaaagtttcgagatataactaaatgcaccacttagagggatagttgttagaaaatatactttagaaaataaggaaagcatactatcactgagatatatcaacttaagataaatagaaaacaaagaaacaatgaacaacaaggaggccaagaaagtgaaaagttagttttctgaaaagactgacagaatttacagacttctggtgagatgaatcagtaaaaagaaccagagataaataatattaataatgaaaaggggagccttactttgtactcgcagaagttaaaaagctaataggagaaacattacacatatcaaaataactataaaaagaatgcaataattctttttttgagagaatgaggagcaaaatgactttattcatgtaaagtttaagaatggacaaaactaatctgtgatgatcaaagtcagagtagttacttctgggatcgtgtcaacagggaaggaaaagcaaggcgttacctggatgctggaagtgtttcatatcttctctatgtgttggttatcctggtgagtgatatctgaaatttcaccaagcagtatacttaagattactacagtttactatatgtaaagttatttcccaattaaaattttacaaaaaatgccaaatgaagataaaagaagaaaaaataatactatgagtaactttatgctaatggtagagaatttaagttacagtatatagaaaccatcttagaataatatgttaccaaaaatggctcaagaaaaaaagagaagtatagtgattcaataaacattaaagagtttaataaattgttgaaaatctttcctccaaagaaaatattaggctcaggtggctttcaaaatgagtcgccctaaacatacacataatttcaaaactgtgcaagaaaatacaaaatgagaaaatacctttgttcatttgatgaatctgatatgatcctgatatcaaaaccagacaaaaatactgaaaaagagaaatgtaggccacttttattcatgattttacattttaaaattttgaacaaagtattagtagctaaatccatgtataaaaaagagaatacattatgattgaaataggtttatcacaagaatgcaaggtgggttcaatttcaggaaatcaattaatttaattgaccacattaacagattaaaagagataaattatatttttatctcaaaagtcaatggaaaaactgtatttaacatattttcatgatcaaaaaagaacactaaactaagaataggtgggaattcccttaccctaataaaaactttttaaaatattatcttaagcaagcattataaataatagttacatataaccattattttattatatagttatatattttataatataattataatgtaactataatatcattataatatatgttataatgtaactatattattatacttacaatgtaatttgcagggaaattttaactaatattttataattaaaattactattaaggcatgctgggtgatgtagcctgtaagctaagataaaatcaaaatgaatttgagtattagaaaaaagtagcacaaaaattgaaaatatacagattataatgtcatatacaggtaatatatttgcatgtaaaacgacacccaaagaatctaaagacaaattattacaataaaactttagcaaagttgctgggtaccaaatcaacacatttaagtcaactggatttttattcactagcaaaacccagaaaatacacattttaaaataatcctacttatgatagggagaaaaaaataggtacttagaaatcaatcttacaaaatatataagacatttatggaaaaaatgataaaacattactgaaatattttaaaagacttgaataaatgatcagatataacttgttcgtggaagttataggaagactcaatactgtaagtctgtcagttatctctaaattgatctatagatttagtgctattccaatgaaaatttcaacaggttttaaaatatatgtttctatacatatatatatatatatatatatatattttttttttttttttttttttttttttttgagactaagtctcactcttttgcccaggctggagtgaagtggcatgatacttggctcaccacaacatccacctaccgggttcaagtgattctcctgcctcagcctcccaagtagctgagactacaggtgtgcgccaccatgcccagctgatttttgtatttttagtagagacagggtttcactatgttggccaggctggtctcgaactgctgaccttgtgatctgcccaccttggcctcccaaagtgctaggattacaggcgtgagccaccatgcccggccattaaaatattttttatatatttttattttttggaacttgataagcagtttccaaaacatgtatagaagaatgaaaagtcacatgacaaagatattcttgaagaaaaagaataggcagagaaaatatttgtcccattttctagtcaatttataataaatctgcagtgattaggattatgcagtgttagtccacagaaccacacagagatttctccaaaaaggatattacatgtataaaattcagtgtagaatagaactgcctttgcacattagtggggaaatggataaactattcaactcattatctatatggaataaaataaaattgaatctctactgacatgtataaaaattagtggtttaaagacagatgtgtgaaaggcaaaaccataaaccttttagtaaaataaaagaatatttttatcactttctataagggaattattttgtaaacaagcccacacaatataaatcacaaataaaatatgttcagcaacgttaaaaataatttatgtttaccaaacatcatatagggagtgaaaacaaaagctacaggtttataaaacaaatttataacacataactagaaaaatgaatagtttccaaaactatgtaagaaacagctagaaactgatggaaaaacgcaaactgccatataggaaaatgggaaattgacatgaacagaatttcacaaataggaagcatgaaggtccagtgaacatgtgaaaatatttattctcattattaatatagaaaatgcaaatttagagaaagagtaacggattgtctgggagggctgcataggaggctgtgcaggagtccaggtatacaggtgtttaacagttaactctttatacattacctatgttatcaatgctctataagcatttaatctttaacataaaaacaaaaaactcccaaaactcagaaccctaagtatataatcagtatcattcaccataaatagaagaatgaatacaaaatgatattctaaaatttctagccatatattctaacccacaaaaggctctgagcctgaaacctgttcattactacaagtttattaagtgttgtagaggtattaaagacatattagcatctcagttaatcttttttctcttgttattgtgattagagcagtatccatgtattacactttaatgggtatatatctcacactttggggaatattagcatttagcatgaacttttttattcctcatctggtacttcaatttgtgataacagatttattaattcctgccatgcacaaggcattagctatcaggtttgtaaagaggagaagctttatacaaatatggttatttggatacatgtctttctcctctgtgtatgtctggcaagcttatgtgagaacagggagacagtatgcctggagcagagtgagcagaggacagagtcgtgggagagaaggtcagagagctggagagaggggcagaggctgggctttggcttggtagcctccgtgggtccccggttagttacttgtatgccataggttctttgtaaacacttgtaaataattgaagcctggtaattaaaatatttggaaaatgaagcaaagaaggaagcatttctctaaaaactaaataatagtacaggttctcagagccacacatgaatagaacattagacacctcgtaagtatgtgatatactatgcacttcatgtcataaagagattgagtggcaggcgaagtcctataaaaatccccatatcaaggcaaataatttattttattgaattaaacattgtattacataagcaaacctttaactgagtctgtaaattttttgttatagggagattgctgctgtgggcatggggagtttaaggatatgcagcatagtatagtagaaggaaagattgtccttagggaaaaaaaatgagttcatgtaacagttgacagggtcatctatgtgatctcagccagtccttcctaagcttcagtttccttgttgctaaaatgggcattcaacatactttaccctctttataaggtatcatgaaaagcagatggcatagtctatgaaaattcttgctaaacatgaagcacactaccaatgtcatatgtgataaatcatttatatagtatgtaatctacacatacccctattatgtatgtattatgtatacatatatttatataattttttcaatttgttattataatgtagaattatttcatctaatgctagaactatagcttattcagtcaaagtgcatctaaatgaggaatcatatttccacaaagttgatgaagtggaaaaaacatagtttagtcttaaaatcaaacttaaaggcaatgaaaatcagggagcaaaaagaatgtaaagaccacagaaataaaatgttactttatttgaggtcagagatagtgtcaggtagcaatacatataaaaggtagaaacgcatataaataaatgagcatataggtgacaaatataatcacagttaagaaaggaaaaatgctcaatagtattattggattgcaagggagttaacaacatcttggagaaataacatttaagtcaagtaaaaattggacatgaaaggtttagtaagtgaataccaaaatcaggatttctaccctctaatcctaggaaacaaatgagtagcttgagaagcagttcgtttgaaagggctattacttgcccaaaatccaccgacgatgccctgtatgaatcacatacacagtatttacatactggggggaaaacgtagtaaaaattgtctctctttttggccacgatttgtaatttagatgtataacctctttattttaagaatagaaacttggccgggcgccatggctcatgcctgtaatcctagcacattgggaggccgaggtgggtagatcatgagcctggccaatatggtgaaaccctgtctctactaaaaatacaaaaattagccaggtgtggtggcgcgcgcctgtagtcccagctactcaggaggctgaggcagaagaatcgcttgaacctaggagatggaggttgcagtgagccaagatcgcgccactgcactccagcctgggtgacagagcgagatgctgtctcaaaaaaaaaagaaaaaatagaaacttatattttaaaaattactactaagtaagcaattgagagatatttcaacacaaagatacgccatgatttagaagtcgagtggcatcgttaaatctaacttgacaaagtctgctgttaacatattcattttaagatagatctaaggattatcttcgaaattttacatttaagttcggcttaggcagtaggaagcaaaaataagctgtattaaaagctattgatacagtccaagcaacgtagcaagacctcgtctctactgaaaatttaaagaaatttaatgggttcagtggtgtgtggcatgtgccagcagttcagctactcaggaggctgaggtgggtgtggggaataaatgaatgaatgaactaaactcaaattaatctaaacagtgtaacaagttggttttaaatgttttaaatttggcataacaaaataatattgcaaaagctattgataaatatctagaaattgataattataagcagtgaccacgtgtttgataaaggtcatttttttcaaaaaagagaaagtaagaggaggaacagaaaaaaggaaaaaaagaaaagtgggtttaagggagggagggaaggaaaactaaacgaccaggtaaagtagctgaaaaactggcaggaaaccccctaagcttaaaatctgtacttactaaaactggagaattaagatagttttgatggaaaacagattcttttagcaccataattgtttctagattgatattattttgttatacaaaatttaaaatgctgtttagattgagtctagttcattcattcatttattcaacaattaattgagtttcaaatgtgtggcaagcattgttcatagacgttgggcacaaaaggcaaacatagttgttgcttcatgtttctctcagtaaagaattaaacctataaaaagcaaatatatcttcaaatagtgattcctatgtatattaagactgtgaagagctggcaggattagaagtaggactatgtttaaatgtctagtaaggctattcaacagtgatattgcaacatgtcttttaaaagaatgactgatttgtcacctggatttctaaagaaaattaaaaaaaaatcacggtgctttccttgcaagatgtcaaatttgatattatccttttcttaacacttctcacctttcatattatatactgtggtagaatgttctcaaggagcagaagcttggttgggaaagggccccctatttttccagattatattcttagactttttttatttggagaatttctagctttatgcaatatattatcagtaatgattatgcagaactttttcagtgctgcagtttaatctttctgggatgacctgaaggggaactaagaggttatacctggttgtatgatgcagaatctaggtgtgtttgataacagcaatctggttccctccatcatgatattctgaaaacgtttacttttaggtgtacatataaaaagctcacatcagttcacttctgtgtagttcatgcaccctttcacaaatgctctctgtcaggcagtgtgctgggtgtgagagcttaagagaaaactaagacgttactacttaagtgacaggaaacctttgaatataatatgcacattctatgcgctgaaagtgtacactgggaaatgaaaaccctccaagaaggcagcggttagtagcaagaactggcgatggagaggcggtgctggagagtcggtcctggagtcctgtgccccgaggagccccgatgagttgcaagcatcacagannnnnnnnnnnnnnnnnnnnnnnnnnnnnnnnnnnnnnnnnnnnnnnnnnnnnnnnnnnnnnnnnnnnnnnnnnnnnnnnnnnnnnnnnnnnnnnnnnnnnnnnnnnnnnnnnnnnnnnnnnnnnnnnnnnnnnnnntttcattgtctgtgaggaaatttgaaatacatgaacttacttgtccgtttcaatcctaaaactccacaataccctatataagcttggctgttacctttggaaatgcagagaatatgggggcatttttttcctatttttcaaaaagatattttcgggataatgaatggggaaggttttgaaaaatctagataattttagttaaatcaaggggttaaaagaaccctaccacttgcacatttgtatacattgtaattgcacagcatgttctagaataggtaaagtgaaagaaacacacctctgtcctaaaaaatttactaagagtacaaacaacaggaataataaagtcagcacccacagcattgtgtgggtgtaattgctagcaagctttctgaagcaggtgggttttagaagtgatttgaaggagaagagaagggtggtctgacatgcctcagtaggaaagctgttcaagtggaatggatggatgagaaaatgcaaacccagaataagaatatggagaaagagagaaacaaagtaagaactgctaagagaaagggggacatgcattaaaatatctcagcggagataaaagttataaagaacaaaggtaatttgggcacatacatggataaatgaaatgatctagtataagacaaaccacattttgtaggtaagacacaaaaactaccagaacacgaggtatttctttgacagaagactagctggaaggatacattagagatataaacaaaagagaatgactaggactccacaggagccttcatctaaagagaagtagaaggaagcaaagatttttattgcacagtgaacaggtatgagtcatttacatattaatttgttatgtgtaactaattatgtattgcagtagatacaaaatgggccgggcgcggtggctctggcttacacctgtaatcccagcactttgagaggccaaagtgggcggatcacttgaggccaggagttcgagaccagcctggccaacatagcaaaaccccatctctactaaaaatacaaaaaaaaattagctgggcgaggtagctcatgcctgtagtcttagctactcgggaggctgaggcaggagacttgtttaagcccaggaggtggaggttgcagtgagccgagatcgtgccattgcactccagcctgtgtgacagagcgagactctgtctcaaaaaaacaaaaaaacaaacaaattaaaaaaaaatgaataagacagagccttctacctagccttaaagagcttatagctgttcaggatcagttttattgaaataattctgatacaacatgtaaacgaattataagagaattttttaaatgagataaaaaatttgtctgttttatccttttgaaatttgtgatgactttttattaaatgatatcaagtactcataaaatgaaccaatctaatttgttttaggacagaaaccatatacttaggaaagtatttcttaatggattctaaaatactttattctccctaataatttttttcctagtttatggtgggattataagttatactaccactcttctggatggggtctctctgggcatgtgatgtgatttgatggtgatgcagtgtgcttacatactgtcgctactccttcacctctccaattgtccatccttgatatctaccagccgtagctccttattttggtaacagtgaaacagaaagaagtttcaatactttttaatgaaaacaatcagatgatcagaataattgatgaggaaaataggccctaattttgtgtaaccccaaattttgacttctcttttccttctcaggtttgtttctaaaagagtgattatttaaacccatattttcccaccttcaatttcttacctttcttgaatgacatgaacatttataaaacagtcaatgtaagaagttaactagaatttactatgaattataaatgtcttcaaataggaactaacaaaatagtatagccatgagtagcaagagacaaattccttttcctagctcaaaaataattagcacatgctctggtaattttttttttttttttttttttttttttttaccttcactacggcatcaatttagtctgttattcatcctcttccaattcactgatttctggtgctgtgtaaggtggtaggcagttttgcaagcagaaatagaccagtcttaggtaagtaccttatgaatgaaggtgatggatttagaatgactcattagattgtccattcaacagtcagtaaacaaaatgtattgactgcctactctgtggaaaacactatgggagattttattcaggtagattttttatggcatagaaataaacagcaactgaaaccataacattaaatgagatgatctagatgaagataccttatttggaaggtctcagtggactgtgtagggagggacatgagttggtcccttggaagagactccaaaatgtgaaggaggagagtaagcctaataaagcatctctctccatgggaaacttgggcacagttttttcagtgtttaatgtgagacatcaatgagttcaagtgtgtagaaagacaaattttgaagaaaatttgttaggagacaattttgaacttaaaaaagattatttgttgttctttattaattttaaacttaaagtaaacattattcttagaaataaaatgactctttattcctaaacttcaaggtagtaaattccttccatgagacatgtttggtatgatccatggaaatgactccatctttaacactgagttttgcttttaatgcatacctgtcagatttttctgaagactccactcaattatttcctggtttttgactattggggatacctttgaaaataaaatattttaatactattttatctaatatttaaagagaattcaataaaacattttaaaaatggctcaacttttttactcaattataaatgtagtagtagcttaaatttatatcttcatggagtttagggttttatttgtaaaaataaatgtattagatcattcttgcattgctataaagaaatacttgagactgggtaatttataaagaaaagtggcttaattggctcacagttctgcagtgctaccacctgctccacttcttgggaagtctcacggagcttttactcttgcaggagggaaagcaggagcaagcatctcccatgggaagaacgggagcaatagagagtggcggggaggtgccacacacttttaagtgaccgcatctcgtgagaactcactcactgtcgcagagacagaaccaagctttgagagatccacctccatgacccaaatacctcccaccaggggccactttcagcattgggaatcacaattcaacatgagctttggttgtatcaataaatatacttcatatacttaaataaatattttttctccctggtactataaaaattgcaactcagtcatttaaaacaagtatctataggttttttcttttctcttccttttcttgtctagtcagttggccagaagcaatcttctaatttagccctggctctcttctgaattgtctttctatttcccaccatctgtaagcaactgggctggcatgtagtagatggggtctcactcagtctgtcccccaggctggagtgcaatggcatggtcacagctcactgcagcctcaaactcctgagctcaagtgattctcctgactcagtctcccaagtagctagaaatacaggcacaaaccaccacacctgactaattttttaatattttgtggagatggggtcttgctaccttgcccagactagtcttgaactcctggattcaagtgatcctctcacctctgcctcccaaaatgctggagttataggcatgagccaccacaccaggccttgtaacagtttcaaactcaagaaaattattcccattttagacctcagatcacgtcctatctctcccagagagttttttctaactcttccagaccatattaatctgtcactctctgacatgttctgtcttctctttgcaatacaccaaaataggcacttggttctgaactgctttgccatgtcatttaggcaaaatacttaaaacactttaatgtttgtgtgttttatttccccaatcatattgtaatgccttgagtttagggatcacggttaatatctcttggttgttgaggtgttgccatgtgccaggcatgatgtaaagtgttacatggattttttatcaggacattcaccaccactgtaagacaatagcatccttttaactgtcacaagaatacaaattagaatattgatacatttgtttttcaatgaattatttgggcttttcatcattagtggctttcattacatttcaataaccatttttttcttctttcttcagtgacttattttcatacaaattcagaattacttagaaaatgactaggctaaattagtagaatgtctgagttattgagcatttgtggaaagctgctggcttattactttcactcacatgtagtatccatttgcttgccaacaaaatactggtgctactgctcttaaatatatattgcatttgcgattaatatattcattcttgggatggtaatgtatattgctatagtccttgaaaacagctttttcctcctagctaacttaaacctttttacacattcttaaccgcttctctcttcccattcacccaaccttgtcaccaacttgtgattttatttgtgttattagtcgtctcttggtatccatgggggattggttccgggatgccctgcggatgctgaagttctttataaaaacatgtacatgctctcatatactttaaatgatctctagattacttgtgatactgaatataatataagcgctatgtaaatagctgtcataatgtattggttttttatttgattattcttatggtattgtagtattattttttattttttcaaatttttcaaccagaggttgattgcagatgcgaaatccacaaatatggagggccaactaatttttaaagctatatttaataaacatttgtttaacccttgttaattgtcatgaaatttaaattagtggattcgagttgaaagaaattttaatgtggttccaaagttcacttaaaagggtgaaaactactcacctttgacaacagacagtttatatcatattttattccatccccataataacctgtcaaataaagagtaatacaggcagtaaatagtacctttagtaaataagtaagcattaaaaattactgtttagtgcaggtgtgctacgtggtaggcatggtaccaagcacttttatataattctcacttacttttcatatcgactctaagatgtaggttttattattttttcatttgcagagaaggaaactcagggtcatttaatgatttgtcacacaactaactatacagcaagttagtattacagaaagaaaatctagagattctctcctactaagactgctggatatatttggaatgagtactttatagcatcattgtacaacatcctgatttcagggttgtgaccaaatctgacactcgtccttccttaaaagccttgaaatagagggagctgagagctatgggacatcctggaaaaatggctctgtaactttggctttgatgttccaaacatatagcaatgattgataaaatataaagatagaaaaacaaatggacttagtcaagtccaaaacagttcttcgtctttgagatccagaaaccaaataagaaaaccacatggttattaaggctaaagccaggggtctgctgaacattttccagcaatagaaagtggtaattagggtttaatccctatggaacaaatccagatccactatttgaagcagggcctgggaggaaatttcttgttcacagcaagagactgggaaaaagtaattctgttgaccactaccaggaactaggatttttacctggaggattgaaggagtaggaagaaagacatggttttgtgacataaaactgaattacccatgtgttgcctctgtgatttaccttgcaatgtctctctatccctgcagcacagcagataggcagcaaatgcccctctgagacccagctctggtacagtagcctgggatgccctagtagaaccaatggcgaaactactagaaagggagaaatgagcacatagaaaaaaaaaaaatcactacaaatgggctttcaaccaagattccaaagtatgtgaatgaatcaaacactagtaaagcagaaaaaaaagaagaaaataattattttgaacagtctgacaaagactttgaaataagcatgtttagaagctcagaaagataaatgaagatatgatttccactgaaaagagtgacaaattatgaagcaaatccaagcagaagtaaaacaaaagcacttgaacgtttaaaactagaaatgttggaaatgaaaaatagtcattttaaataaaagctttgctagataggataaactctagactggtcagctgtgaagagagaatcagtgttttgtaagagtacagagaagatgatctagattagaacataagaagacaaatagattcttaaaatatgaatgaaagggcagttaaaatacatggaggatagactgagaggctccaatctgtgtctaataaggattctgatagaagtgaatggagagtgtcttagatagacttaataactgagtgattttaatcactgaaaattttaagaattgagtacataagtgagatctcaaattgaaattattatttttgtattgagcaagacaaatacacgtaaaggtacagtttgaaacatggccaaaaaaaaaaagaaaactgcagaacactgaggacaaagggaaaatcttgaaatagactaaaggaattaagagccaattctatcctatgaatcttagtcaagagtctgggactgggagcctaaggctaacgtggctaccgacagttccttcgctctcgtaagttacttttcctaccattcctggcattgtcaaagaccaaagcactacttaattatatggaaaacctccttttgaaatgcacctaaaatgtaattgtaaatttacctgcaaatgaccagaatataaactgtgttaaaatccagtgtgtgaaagacagtagaatcctggcttggttatacctgtatgactttagccaagtcacttaattaatctataaatgaggataataatccctcctttatctactcttaacaggactgtttcaagggattttttttttacatacaagttctttatagactaaagtatgaaacagtttataaaattatgtgagctatggttcctgacttcttagagtttatatattagatttatgtaaaaaacaaaaacaaaaacttcacaaacaaataccaaaatgtttgcaaagctacttaaaacaactaagcacaaattatttttggtgcatatcaagtgaaggagtctaaagtgaatagtggagatggggttaatcaggttaggttgagcttctaaaaactacatgttatgaattatcctgttcattttttccagtttttatgaaaatgttcatgtatacacctagattttatgatggttaacatgtagccatttacttatatatgattatatatgtttttttcttgaaacttttgaaagtaaattgcaaatatttcatccctaaatactcagtatgcatctcctaccaaaaagaatgtttacccacatgaccccaataccattatcacatctaaaaaaggtaacaataacatcccgatagcatctaataatcagctgatagtcagattgatatctaaattattctcaattgcctcaaaagccttcttatagctgtttccaccccctccccccaaatcaggatccacacattacatttgctcaagtctttttcagtctctttcatctgttcactttttttttcccatgacaataggccatttcttttgaagaatattctggatttgagggttttttttccccctcatagtaatagttgttcctcttttcaaagacaacaggccatttctctgaaagaatattctagatttgcatttttttctcatagtaatatttgttcccctatgcctgtatttactgaaaactggattgttaggcctaaagacttaattagattcaagtacacattttagataagatactatattggtgatgtatacttcatattgcaactcattaagaggtacacaatgtcacgtcatttccattcttagtgatattaagctaaatagtctggttagagtaattaccatcagctaaatgtaaagatatatcttttgctttgcaatgatcaaaggatggaatttgagtatctcagaataacctgtcttctactagtttcagcatccattaatgattatcctgaaccattttatttggcattgcaaaatggtgaatatctaattttgtcatcccttctgctgtcattcttctataaagaaaagctttcactcatcaaataggcacgacctacacttcctccttaaaaaagcaaggtgcttctgaccctttcattgccaattttcagaaaaagaaattgatgtaatagtcacctcacatggtaacaacttaattttttttcttttctgtttttgaggattactatgcactgattttttttaatctattcagtattttggtaaaagaaatcaaagcagtttgatttctacaaagtataagttttaataattattattttaaattactttttaaaatttggtaagactaaatgtgaagtctgagtcctaatggatggaatggaggggaatagggttaatcagaataattttttaaaactatatattattaagcatctctaatcatttttttaatttatgagatgttctttttaaaaagtctctgagtaccttaaccagagtgtaactgaaaacaagaatgtcaaaaaggcacatttaaattgttctcaaaatcaatcaaaaataatgaggtgctaggaaaaagttgtatccttgataattacatctatcagtatcagaaaacaaaagagaacaatcaggaaatgacaatcccactcccaagtagcacatttaaaaaggctaatgaaaaaaaaagtctcttttaaaaatgtactaaattagcatttcaagtaaattgacaacttaagcgttgataaaggccaatctggggcccaaacaatggaagttctgtttctacttttatctgcttttaaaagaaattatctcacttgactttttttgttgtcttttatataaatgtaagtaattgtcctaagggagatgacaatcctcatgtactctgcaagggtcagatcatacctggagtatggcacttcatttggggttctatttcttaaaacattgacctggagataggtaaccaggaagggaggtaattccaagtatttcttacattgtgcccctatgttcagtctgaaaaggggctaatgtaattgtcatattagacaatggattcaacctcttctttgtagcaccagagcttagagttagggccaatgggtgaaagtggcagaaaaacagatttgggtctagaattaggaagaattctctcataattttagccacacagaggtggaataaatttacctccaagggaatgagttccccaaggctgacactgttcagaggttataatccctttacttaaagatggtgtacaggtgtgcagggatctctcaaatattttgcgaataatctataattataatgagatatgctttaaaggtcatttaacatcaacgttttaaaaattaagggtaaaaatgaattttacatcatggctttaaaaagaaaacccttaacacatcccaatttgcatatcattgctttgtatttgggaaatgtgaaaaatatggtgaagtagagttcaagcttcagtattttaaaatcacggttcattgtttttgatcacagtaaattcttatctagccgtaactttaggagcttatagataagaatatggctttgttaataaaaaatataacatagtattttagacactgttttatgagtggagagaattaatgtttgaattatcagtagtggcaaaagcattttcattcaatgataaaagaaaacttatatgtgtcagttcattttgaagatagtagtaagtgctggcattttattattttggcttttcaagtgattttattctttattattagactggggaaaaaaaagccctagtatattctgccaacatattcatcagtcatcatttttggagacagttttcgacatattgtatgttttactgtgctaacaagagaaaagactagccattaagtttatgtttctttgtttttcagcaaggtcacatatcaggaataatgctagaagtatgctaataaacaatatataatgtaggtcatcagggagtaagaaatattttctaactagttctaaagggaaatagtgttaaaaaagggatagatgttacttacgtaacacatgttgctctatatgtcaccatcaaaagcatcttgtaaacagctcggtgtagtcaatcttccttggtgattgtcagggtgtttgaagtccgtgttagatttagattcagcacattcagttcgcaatatgcctaatgtacaaagaccgtcagatgatttagacagcttccaatggaaatatgcctgtacttccgtagtttacaaggaatattggccactgttgcagaagaaaatattatgttaaattacaataattaggaaaaatttatattcatggcatttataattttaaatcttgaattatgctaaatgtttgtgcttaactttggttttgttcagttctaaagaacttcagttccttaaaattgattgtaacttacaggctggtatttccttattaataccatcagtaaaacaattttatatgatttcaaatgaaacgataattctgtaaaaaacgcttataagaaaatgtcatttatgtgattttacaaatgtaattttctcatgtttgggaaattttaaaaatggattattttcataatggtttattttgtcttccaacatggtttttaattacaaatattaagtttcatcaaaaaggaatttatgtaagtatgtgttctggaaaacacagctaatactctatttattgagttcatctaataggtactgggactcaataataaagatgtaaaattataatggctgctttatgattcagaaatcagagagcctactagcatttagaatcaaaagtatttctcttcccagctgtacggcaccatgacatcaggcaaatctttctatttctctggacctcagtttcttcatttatgctataagaattataataaaaatcttgctctacttcacagggctgttgtgtaaaatgataaaatagtgttagaatgttcattatgatattatttctttataggatgaggtacatatttaaatactaatgcttagcaacttctaaaacatcatttaaattgtagactttagccaaaaattatatctctaaatattttagctagcatccatgaatcttaacttattagccgtattacttatggatatctagaagcaacaccccagttatgttggtcagaatgaaattgtgcctgatcttcaaagacactggtttctgaaactctgtagatttttttttaatactcatgtttttttaaactgtatttctgtaatacttctggttttaaaaaccttctgtttttgagtttagggatctttaaaaatatattatgccataattatgtgcttctgtttcttctaaatgtctgcaaatgaaaatatagtgttgggatcaagccataaggtctaagtaaggaattcgtagaacttgggccaaggggccctgtagtttagtttgttccttagcaacataggtaagatcagcatctcagaaaaatgttttttaaacaaagaaacaattaaaagtccatgtgtctaagtaactctgtttatacttgttttctcagaagaagacctatcaatgcatcaagtgtcagatggttttctacaatgaatgggatattcaggttcatgttgcaaatcacatgattggtgagtgacactctaaaccttattacagatagatgtttcttctgcttgtgtatatcaccattaaacagagttaaagatgaattaattgttcaaccatcattgtttttcctcggcatgattgattttttttttaatttctgttattagtcctgataaggtgttagcacattttattttctgcaagggctagtttagacttctgcagaggattatatatctactgccagtcaaaacacaggtgattaacaaattaaacttctaatcatttttgcattattgaaaactaacaggaatggttaatgaactggatgttagctttccatagagttttagacaggttttaatttcagaagttattatggtaatggcactgttgtgcgttgcttaagcatctttgtatcaaaatctaaagtagcgagtttttgtgatagggaaacataaataatttaaatagccataaaatagttttatatgtatggtttcaacagcctggaaataatcatgatcataaagatcatgtaaagaattcagtgatcattttttattccccaccaaattttccatagattttaataaaagtagtttggggaaagatttctgaagttactccaggccattgtttttaggattttgcatttatcacatggcctaaaaccaaaaggatatttttttaacttattcatattgtcccattatttcttaattcctcatggattactgcctatgttttttaatttgataagcatttagtaataacactaaacgttttaccagccagttaaactttatcaagcagatcatttttctactagtacaatgacaattgctattactttatgctatttttgttactcatttatgttttttatactatgagttttctatttcatactcacttcatggtatttcataataccataaataattataatatttaaaaagtcaaattaacctcatactctcctactatgaaactctgtaagacaggaaagaaaattcaacagtttagactatgaacttgttttcaggggggaataagtttgattgtatactaattagaaatattctaagaatgcttagtggaaggttgttcccctgtcatttctgatcattaaagctataacaaaacttcaatttttcttatataaattaatgaagataaattcaaaagcatgttggaaaattgattgataatttttcaataggatgtgctttatagttttcaaatgataggtcttctggggggttgttgcttataaatgactaagagcttatttgtgcaaaatggaacttatacataacagctaaaatattgatcaattcatctctgtattttccagatttaagtattaatattattcgtgatttctcatatattaaatagtatatccttcaatgtgacaatagcgttgacagctttagtgagtgattagaagataatggcaaaatgtaggagagattcaaatgtttccttgcaattcccttctgtttgagattgtaaaaaataccttatataaacttttaaaacagctttttagaggagaggagcagcttagaaaaaatgaattcctgccaaatgataaatgttaatatttcccgtctctttatttcttgagtagactgtgttggtggcagtcattcatgattctacctcatgctgcacttttagataggcttgaatgaaggcagttcttagaagtctgcagtttatgggaaattcagtgaaattttgtggtcatgcttctcattagttctattcaatgtaaacttacttttgtttctggatttattatttgtcccagtacatagatgaatatgttgaatatattttcaccacaatgttaatactcttttgcacatttagaatttcaattgaatgttcagcataacaggactttttgattttccaattttagtatcattttgcctataaacattaatcagtttgttttgtcttctttttaaattgctttatatcattcctatttgtatttattttatattccttgcatcattagtgctttcccaaggctttttcccttctaccttatagtggattaataagacacttacctcttgggacctgagcatttaacaattcacctttcatcagagaagcacattccattccttttcacagagggtctagttatttaatattcatgccatttttaataataaaaatatgtaattctcttgcacttgaggcctaaacaaatgagtagcatccatttaattgttttatttgttgaccatgcatccaagtccttacaccctatttgtgctgttagtatctagagagaatgcaaaaaccaagggagtcacaaaggctaagatacccctttttagaattccaatgtgctatttagtctttcaaatgatgcaggctgcattattttgttagctaaaatacctccattgagggtaggtatttttaggttgtgtatctgtgtgtgtgtttttttttttgtctaatcaaaaaataatctcaactagacatttaatagaggaagggggattagggactatctgaaaagcctcttactccttttgttaagagggtatatagtgtttttgcagattttgttttacatttcaatcaatgtagaggaaggattatgtcacctgatggaaaacaagatctacagatgacccaatgaggtgtaactttaaattccttctttactcaagtcatttgcatttgctcctgtggcacctatgtttgtgtgcaatctcagtgtcaagcaaccgccacacatctttctggatgtgctggtctcaggctgttggccagggacatttgtgaaagggaaatcaccaatgtttctaccaggtacataccagaggtgctcttcttaagtgcagttttgcagcaaggtgtggacacatggtctgagttgcgagaataattactcgataaaaatgcactagggaattgacttatgtctattaaggaaaaaaagaaaacctccctcttcaccacattttgacagagtttcagtatgaaatcagaccagtgactattcaggggtttcttttcttctttacacacacgcaaaaagagctacaaaacattttaacagctttcctggggaaaagatttccctcttttaagatctgtgccaatgagaaaatttttcctctcttcctttgctcatttcacatagtttatgttggcttttgacctgagaatacaacaagatacaagtgtgtattacgtgctttaatttcctattcacccttctcttttctgaaatcagcatagtaaatatttattgttattttcctctctgagctgtctgttattattattattctttggtatggattagcaaaaatagagatgaaacaagagaatttaaatgtgtttaacccagcaaagggattgcctcatataaaattatgaggctcaacagcatagagtaaatttgtaagtgctctgaataaagggctgttaggcatcagataatataaagagatgacattgccaagaactatttatgagaagcttaattttttcactctgataattcttgaccaataattaccagcctctaattatctattttagttagaaagaaatttcgatcactatggaggttggcattgcaactagcgcataaatccccaaagaaacaaatgtgttccaaacagccacaaacaactgtctcatgaaacatagtgagcaaattgcaagcggctggtggtagacaaccagcagtacactcaccatcgaaggccagtcagcttgacaaaggaatgatcaaaggggagaaataccattatccttggaattgattactatagttatggactttggaggacaagtagtcaggatatagctgtggccatttccaggcctccctttcaaagttcatggatggagaaaatgaatggaataggtacaagccatttacataaggattattttttaaaatatacttagaaatggttacttaatatgttttatttttttcatctgactagagagaccagtgttgtaatggcaaaattgtgtctaagtgtcaggataccccgttttgtaaaagataggaaaatccagaaatagtcactaataaacgtgtcctagatagatcaagtgtaatgttaaagcattttgaagaagcaaatatgtttgtctcttagaaaagcagaactagaatttaggattttaaaggatagctaataagaaaatactgatgcaaaaatactgactttttatttatatctctaataaatactcggtattttatagataatcacgattttcaaaaaatcagaaaaagattaagctctctccagcatatgtaggaagatacgtactctatgtgttgtgttacacatgatatatatcactgatgtcaaggcataaagaatgagtaaatccgttcttaacagtgtggtgaaattttagtctgttcttgtggcaggtggcattcatacttcctgcaatttgtttggtgcccaaggtcacaaatggcattcttttcctttcatttctttagtgggtggtgtactatgtgactaatcttcattattgttttgcgactttcagtatcacctctgaagcatttcagcttgagtgcacttgctttagaaaagactaaaaccagtattttgaggttcatagtagtttaggattttatgtcctaagggaaaatatccaaatatatggatctttgcataggaagagaaaggtccatgtctccctttaaactcttgctttcaccgactggtttcaaaagaatgaatagaaatggatcaacaataatgcctatatgtgtggctatacatatgtgtttataatctccatgctatcctaagaagctcaaaatcactgagattttttggaaccttgatttacattcattctaaatgagaagatgactgaacccttttttaaaaaaaatccttatttgattgcttacaaaattcagagaattaagaaacaagcatttggtgttaaatatgataaaacactggcttatttcatcaagagctggattaaaaaagatgaaatctgggcagtttaatggtaacagaaagctaccctcatgtgggcaatgctggcttatttgaaaagcccataaagggtttctacatggaccatacaaaagggatactttctctttaatagccatctgtacaggagagatgagaagtgggccaggtcatctctcctcagctgtcatgatattaacgtaggtaatggagcaagctgggcgttctgctgggtgttgtttttcatagatgttcatcgatttacacagataattctatttatttcttagagttggtccaagtgaaccaggcagaataacaaacaccaaagcatttcaaatgactttatctttgtttataacgtaacttttgtctaaaaaattgtgtcacacctactgtgcagatggctgcatgatttgtaaaccagccaaaacatttaaacaaatgtgtgatctggggatagattaaataaaggataaaatggagtgtgggccacaaattctaataatcagatgattttaagttgtgtgcagtgtggagtgatggtcacagagatagcagggaacgcttgccaatgacagcaaggtgccttatagatctcaggatggagcctgtggcctggtaggcctcagtttgagaaccgcacatttgctgtacagctggcagctctgtatggggacatcagataaaacttacgtaaaatgaagtgttattgcttagtatgaaattgttcagagagggaatttgcagacagtaactgaaaacagaattcatggtaccaatgaagcagactgtaaatatgaagagggtttaattatctccacaatttagcaaaaattcaggatgtatttagaaaggacatacgcgggcataaatataacatagctgtactgcttaccaagtgcaaagagggggccacaggaacgtaccaaggctccatatgatcagccttcctaaaaacaaagacaatttaaaagaaactcaaagaaaaatgacttcttggaggaaggcagagtttttaagagctcatcgtgattctttggattctcatttcttaaggaacctgggataaagtcttcaggtctgtcactcaatttcagggttaagctattaaaagacaaatcatgtgttttagcttgcgtctagcagctttgatttacaagaataaaaaatactggcagttagtgtactttttaatttataaaccccaaagatagcgtgctagacatttcttatgatgttaattttctgtgaggctgaggattgtggctgaggccatagatcgaagattcagtgtcttattactctttagaacacactgcccctaaaggggcctcagaaaaatgttgttctcaaggagaattactggatgccaccctgtcgtcctaggctcagcacagagacgctaggaagagaggccctaccagttggttacggccatgtgactggctgacatacaatggcagggcttctggacctcattttgtcctcacctttgacttccggtagaatgtatcactaatgtatcggtttttcactcactctttgatatgttccttatcagatgtgggtatctgtttctgaatgaagcttgcaaagcatttccgaatggagggcactaaaagtcatcagtaatacctaaaaagatatagatccctgcacagtcatgcttgcccatgcacacacacacatcgtgacctatttccacagaatccgttcacacacatcaaaggaaaaggtctctgatgacctatttccataggttatttcctagtttcagggccattaatagcagtaaacaaaggaaagggagccaatatggagagtgggtgtcgaacttcagctgctcatattgttgcatttggtgagctgatggggtttcgtaggtcacctttagaattatgcctatgacagcagtagctacctgccaagattgcaaggtatctcacagctctcaggatggcgcctgtggcccggtaggcctcagttggaggggtacacatttgctgtacagctggcagctctgtatggggcagccgtgtgggctgttagggagctggaaaggagacaagcatgaaatttcttctaaccccaactctgtttttctgtactgttggctgcttctcagttccttgacaaaaaaaccaatcaggcaccctttaatccgcctgtgattaccactggtataaaaagagaagcataatgaggaaaaatgcctcgttttgttgccttcaaaagccaacaaattggagttaacttgacaggaagtggcttaataattagattatttatttattcctgacacatatccccctgttactagtctcaggagaccctgtagatggtacgattttcaagctgccattacttcgctgtcttctgtgaacaaagaagctactgtctatcagtcaattaaatgcagtctttaagcagaggctgcgaagtcctcaatggagagagccctgggacattgtggctgatgattcctttctctgtactgtacatcacactctcaactgcagtccccacagagatggaataaagtcatgcattaaaatatcacttgttgatttgtttgctaatgaagagccattgaaatgtttgtgtatttctatggcaaaattgttgataaaagggcctgcttgccagcatattttaagtccatctgctgtgagtgcttatttaagagttattaaaattaaagtcaacaaacaacagaattaaaaaaaaaaaactctgaggtaacaagcgttttcttactattttcatcaaattaagtgaatcaaggcaggagaaatagagaaattgtatcgtttaagttcacgcttacattgcattaattcagacaccttgttttcgctgacataaaaatgtaagtcttcctcagagttttggggaactacatcttttaagtatgaaaagagattacagtctcttttcacactttaagaaaataatattctttaggaaaataatgttctttaggaaaataatgtgcttagaaattttacttttttctttaagatgaatggcatttttctagcggtttatctaacttaaagagcacttgtacaagattttccacagagcacagtgaggctttttaaaccaaactaataaaacgcctgtgagacgtacatatcagacacaatcttgcagccacatggaacgtacagaagtatgacttttcttctccatttgttcctctttatgttttcttctttttctttctttttctttttttttttttttttagcattactttatttccatgtaagtaagtggtgggtgacatttctactagacaaggtttttatctcttaattcatcaacctagtaccatggagtgttcactgtgtataaagcatgtcttcactggagttctctgggcttctattaattggctttatattttaagagtacatctgttattgagctgaaggtctggaggtggaagacttggataatattctgacagctctctgatgaaatatttagctatcggtctgttatttaaagggataaatttggaatattaaacagaggccactgaactttgaaaagagttccttcatttcatcagactttgtaaagagtaagtaaggctttaactatagttttcatgattacctgacaacatgctgtaaagaattaattcaagccgtcatcagatggctgtatttcttatttctaccctgttattccaagtcattttgttagaaaaagcttagatactcggaggtgttctataatacaaatgaatttgaaaccctttcattaattggtgattaatatatttcaggattagtttaagcagggctctacctcctgcccagtcaagtatgttctggttaatatccaattatctgcaccttcgtagttattatgtcttaatatttcagatatgataaccagaaacttgagagtaatgctaatgagaagcatagagcaagaattaaccaatgacatactcagtgatccttggtgaggagagaatctctttttttccccataacacattgcctcggcatcttttgagcactgactgaaaagtaagactttcaattacagcagacaaaaattagaaaaatcagtcgttctctcttttcagtcatattaacctgaatttacagtgttatgtttacctaaaaacattatttcagttcattttatgagggataaaaatagaaaacggagagcctgtttatattgtccaaacaggaaacatcatattctttatcttttccttttagcaaagccacaagttgttacactctcaaaggatgttttaatccagattaatttgggatccctgtaatatttcactaaggaaaaactttttcctgctacctcttcttccgtttctccccaaatttagcaccatgctgcgttcaggtttcacctctgtttatttatttattttttttacaggtcaattcacttttgaacaatctgacttagctcccacaaccgtgcctgttagggtgggatgcactgcttctaaccatgtagctttaaatagtgactttgtgcattgcccctttatatgctgtattgtaatgaagcaacatcagtaaattgcagtgaagggtgattgttgcacagggatgacaactacaccttggggtccatttgcaccagattattctttttattgttattattacttcccatcttctttactctcttgctgccgaacttactgttggcgaccggtacaacacagagggcatcttgaggaacactgcagacatcatttttttctcttatgcacataccaatcaccattcaattccaaaaccagagaccctgggtggttttgcagttctttatcgatgcctctttactttgttgacttcatttacaatgtctctcctcttcatcttcttaaaagaacaaatttactgtaaataaaagtgagacatttcttttcacccattttgtatagatgttataaatctgtagtcaaaatggtcaactattgcccatcctaatttgtccctttccccaaagaggtttaataattcattttaaaatagaggtctagatgggattacttcttaaagaaaagatttgtattttcaatatctttttaggtttgcttaagacatagataaaatcattatgaatattgtatacactagttgttttctttacaaaatagcctgtttcccgcccctggtctactgtttttacccagtaactaatagcaaaataatgtggattgaagtcagagattctgcactgttattgaacagaattgtgaacaagcttttaaccaagggataattagatgtgtatttaggggcactattactccttttgttgtcataattttagtacctgtgtccatttattttcaaattgttagtgcagctgttgttttgtttttctctctctgaggctgggctgttgcgcagcattcaaactaaaatctaggattaaaactgacacaccttcaatagaactatcaagtcttttaaaactggttggccggtgacgccagtcccacgctattcaaccacacacacttccaattgtgggccaaagagcattgatttttagctgtcatttctagtgcacatactgtagaattgaaatttaaaccttaatccactcagtaatgcaattaatttttaatgtgcagtaatactaattgaaatagcctgaatttagtaagtcaccacaagacattttcaaaagcaagagtctccactgagaactgggaggacagataatcattgttacagtgtttacagaataaatgtgaactctgcagacctccagtagaaagggggttttctttaaattagtctatattatatctcttcgagaaaaatacatcgtcaaagagaattcctactttctatctactgtaacaggttaaaatatgctattaacttatttaaaaggcataattgtagttagaaatattttaatgtatacaaaataatattcacactttttttaaaaaaaagcaattatgagtaggtgcaaatgaagtcacctgccaacaatgtcatggtcaggcaagagtctcagtgggtaatttccttatataattatgttttttgagatattatttccagattcaatgaatatgtgtgctgtatcagctgtctataaatctgttgccttgttttgatgtatttttggtgaaccaaaaaatataccatcccctatctgtttcaaagctatgttcctttagcttttacatattatttcaaaatggccttttaaatgttttgtgaagctctttttttcccttgccatagtaaagcaaattttgaacagtaaaatcaaataggttttcagtcatttctacactaaaaaggttctctaaccacatttatctgctagtaaatgaggactttttaaaatgcatctgttctgctgatgaatgggcttgcggagtgtttcaaacgagcaccagcattaagttgaagaaggcaaaccctgtatatcatgctttcatggctctcacattatactatttaatatgccgatagtactgttaaatatttagcaaagttcccttataaccctaccatctattcaaatgggattttaagacatttttgcagcacataagtaaaaatgatgctggagaactggaggcagttgtagcatggcttattttctaaatgaagtgtagggtaacgtggtacaaatgagttcaacagattcacacctactgaatacctcaaccaatttacattctttggattaaaggttcaaactggctttcattttgtcactaagtcaaagtgctgttagcattaattacatagagtactaacttgacattatagcatgttagtaagaagacctgaattgtgattattttaagctgtcctaacatcaattgagctttataataagtatttccattttttttaactgagtaggggaaggggaagaaagagagatgaggggaaatcgatttatagtccattcatagcatattatcaaatcaaattaggatatagtatattgaatcttttcagcctttaatttgggtatgctggagcaaataatgagtattagacagatattgttgtacacatggataatgcataatggatcacctttatcagtttttcttataatatttgatagttattacccaaataacagtaattattcttttaatctggagtgaaaattggtatctaggagccttaggcaaaaatattgccagtaaatatgatgctgacttcattactgtcatcacgttggtaggtttgaattcacatttaaacctttccatgcttatcagtataattagttttgaaggtgtaaaggtaaagactggtcgtttgttcagatttatatgaaatgtgtgtttgactcttctagaagcctgtttgctagactctaattttcatcctattttatatgcagccagtgaccacagtattcattcaaactgcacagagacacatctcatctgtaaaacacggcttgctgatcttatttgctatttgtattctcataagaagaaacataggtttcattatgatgcagtggaagtacattttgttttgagattacgtatatcacatatatgttcataccaagaattttataataaagaatgaataaaggagatagctttaagtatacatgaaggaaaagggaagggaagcgaaatgggcgtcacatataggtgtgtttaatatgcaatgcttgatgtatgttgacctcaggttacaagagtagaaaatcccattttccagcttgtttcaaatatagtaaaaatgctgcttcagttgctttatgctactcacattggggaaggtgcttatactgtgataattatcatcaaggaatattaatgcgttcagcatttgtaacccaaaaactcattatagcttaagctgtgcatcatctgtgaagagagaactttgccagaatttgctcttcacaggggttgcctcctgcttgctgcggagtggtcagagtactgcaagaggtcacttaggctatttttgaaagctgaagttttgcaatttttgaatcactaccttctgtccaaagagcatatcattcttgcctcaaaatgtccttcttctaattgaatgcatggtaaaatgcaaaatataataataataaataaataaataagaggtaactgtatctcattatgtagaattcaagaaggtcagcatatgtattccatatcaagataattgaagtattggtgtcttctcttctgtcatggagcaaagggattcatttacaccagtttccttaatgcaggtgcccttgggtttcagagagaaatgcccccactggggctccacattatagccctctggctggaaattgtgtaaataagactgcagggtcagccttcctttttcggtaccagtgtctataattagtctgtgacgacagtcctttatatgagcctaaaactgttcctgggatcattcctcatacatctaagacgtctatctaatgcataggtagatatttttgcatgtatgtttaaaatcattctctagggggatattgacttgatgggaactagaatctctgggtgtgtaaagaatcctataacttcatctgatcaaaatagctggttaggcagctccattataaattataggtggttagtttcctatgaacattgtgtcctcacctgtagtggggcagcttgttgaaagggagctgtgcgcctgtgatgtttttacgtgattaaatcccattatttttcccccactgatccattgcttgtcatttcccgtaagtaacattgctccatgctgcatgttatggtttgtgtgggccaggcagagagcactaatactgagttctatcaggctgtctggcattgcaggactgctatgtttctgaggtcaaattgtgaacctggccttgctcctgggaggactagaaaaatatgtttcataacttcccatagacctaagcgaagaggaagaaggaaaaacatgaagcccataggctcagtttagatgagctgaaaggttggaatttatcaagcaggaaagctgaccgttgtgtgggaggcttccttactgtgagggatcactgccgtgggtgcagaatcagtcctagctgaggcctttgggggatagggtaatcattcaaatagcccagcaggcacagacacacaagctgataatctggaataaacctgctgaaatagggatttacttacctgttaaaatcacttacatgaaggaatactgatagaatgggtaccacgaattcagggcagatactgtaggctgcttcactgaaagtaatttatgctgctgctgttgctgttgttgttgttgttgttgttgttttgaatgaggcagaaccttttattttatgcagcagagcactaatgccacaaaatggatggatttcctgaaccagagacaggttctcaatcgttttgggctggaatgctggcagtatggtggagaaatagagtagcagcagatcttctgtaaggatgtaaacttaataatctttatgaattttgagtaactcataactccacttcctcacccaaagaagcattatgaaaagattgcttctaaatccttcagacgttctctgcacttatgatagatgccatcctctttaccttgaggcattggaaataaatgtggggttttttttttttgcaagagataaaaacatatactttagaaggagcaaattgtattttcatgttttaagttcactatttgcactgatgtggtgagatccaaatgtgaagaattgcttttgacattatttctgtgtctcctgtatcccagaaccactgcattgttatgctgaaatgtaccatcacatgggataaatgtgatgttggaaacctgggaatagtatgtataatattgcattctatgtccagggtgcttaggacaattgtaacttctttagttactaaaacaatttaacttatcttattaaggatacattatcttataaggatacattagctaaaactacatgtgcatgtgtcttttaagaaaaaattataatcttccaagtgttgtgggtttgtttatgggcaaaaaagggctttcatttctaaacgaaaaagtttttttaactttctctaaaagtctgttttacataatctgtaccttgaactagcacatactatgttatatagtaaactttaaaatacatacatcaaaggtcttaacttgcatgactgatttcagaattctaattcagattttctgtcagtaactatggttttctatttttatggtcctttttaaagataaatttttgtcgtcttctttgtgtatttaaatgtgtgtgtgtcacatgcgtacatctgtgtgtggacatgtacccaccgtcagtctcttccaccacacactcactgctgcagcactccgtgtcttgtgtttagcgtgtttccaacagcttagggagatggtacaaaagtgaaatgaatactgtggagcttatattggagtctgatatttgaaagagagatattggaaaaggatgttttttggcttggctccttttatatgtaattgctgcttcattaggacttggaagagtttcctgtggttaaatttaatcaaatagctcagaataacaaacttgtacactcaaaattccaggacagttctctataagaagcatggttttcctaagtttaaaacaaacacatatacacacatgcacacacgtaaacacacacacatcactaccaccaccaacaactagtttgtaaaatgctgtgagtgccatctcaaacctaactccctattggtagtgatttaataaatgatcatgtatagaagtataaggcataagagcgaaaccccatctctactaaaaatacaaaaattagccagatgtggtggcatgtgtaatcctagctactctggaggctgaggcaggagaattgcttgaacccgggaggcagaggttgcagtgagccgagatcacaccactgcactccagcctgggggatagagggaaattccatccctgccaccaccaccaaaaaaaaaaaaaaaaaaaaaaaaaggaataaagaaaaagaagtataagtcttaagaaatacataagaaatacatttcaaagggtttggggtttgtttggttttgcacttgaacaggtgtcaagcattgattctcctgagccatgatatgaggttgttatcattacttttgttatacagataaggaaactgaggcgtgagcagaacagagctagtgtgcattagtgtacggagagaaactcacacttcttgaatctgtctacatcactttcagctggtgcagtattcatctcttcacacatgcacaagttgctcactgtgggagcctgtgctgaggtgttcttagcaattgctttgctatcattgcatcaaagcctgatgttgatgtcattttctaggcaataaaacctatccttggttcagataaaatttgatctttccattaaaagatttttccattatatctttccattataagtaaagacttagcctaggtattctcttctactttcttaaaacaaactactttgaaacagctaagtatgcttctgcatcagaattctttggcaatggtgggaaatggtgggaaataggcaacaaagtgacaaaaatggataaattcagggtaaatcgtcctgagtatgggacatggctttccataatactaatgtgtgaatgagcagcataaaaatgttcacgtctctgcaaagtagcaagtggttatgttcatatcattttgaaagctgagtggatagatttaaatagcaagagctttgttcggaatgatgtgtggaacccagaatcacagaccctgcgatacatgaaaacatatgtgcctcagtcctgtcttaatagcgcacatgttgtctaattattgttagaaatgggaaatggcttggaaacctccaacatttctagaagcctctttctgtaggtatctgtatatgaattcactataggatgattggaaagggagtaacgcagttactgcacattcatttaaacatgagaaaggaattgacatactatatgcagcttgacaatacgatttatgatgttcatcacagtttttttagcagagttccttttgaaccacagagataatttattagatgccagaatgtgttattagagaaggagtaatgaagaagaacactcttttatgttaatacttttttacattttgtatatgtcgctatgttaggcaaagggaattgaaacatgctctaaattccagtcacaggacaagaacaaaattgtgcaggtttcctcccaaaatccacgaggaacaatggccagtaaaaagaaagtgccatctgggtctggatgtgaggtcattgccaactcttcattggtgctggtagaaagcttacaattatgatgatgcatccttgttttataagtgttcttgcaattggagctgcaaactgattttagtttttattacagacgatatttttgcctagctaaaaagtctggtcatgtagtatatataagcttctctaaaatgtattttttaaaccagtccaattaactagcagcaaatttgcttactaggtgtgcatgtagatagcagccttctcaactcctgaaaaaaaaaaaaatcctcacaaagcagaaagtttgcattcctgtaagtcagaacgggtgtagattcttttcttggacatgctttatttttaaactccatattaaaatctgtaatgtgtaaggtaaatgacacgtttttcctactcaagttttctttgaattcatattttgattgatttgtgtgataccatgggtgcctatgaattagtgcagaggtctcctgcctcccacaccttcctttctttgactcttcctcttagccaagtggaattttaaattggtgacttaaaaccaaatggtcagcaaaaggcttgatctcttcagttcagggaaagatactctcccctgattttctttgaggttcacatctcttcatttaaaaccttcctctgtacctagcagtcataaaatagggtaagtttaaagtgtacaataaaatatgagcactaataaaactagcagtaaaaaaaaaaatcactgaaagtgacatgaaatttagcaggcaagaggttaaaactgttcgctgtgtgtaaaaattttacatagtgaggtcctcagatgtagaacagatgtaggcagaaggagaagggggctggtaagtgctcaggtcacagcgagtattgggagtaaacaccaggttccacgccagcgccgaatgttggagccagccagggagcgtgtgcttatgagtgtgtgcgtgcacgcgcacgtgtgctggtgagcatgtgtgagtgtctagaattttccgggagcagtttcatctttgtcatttattctgtaaggaaagcaacaccggggcggccgacttgggcaagctggtgtaatctgttgcactacgctgcgatccctcggagcccctgtaggcttcgctgccagttgtttgcctgcctctcctagtggaattcatttaaattaaagcagtggaatgaggcccaagtccccaaatgctgagtccctctccttcatcagcattccagcgaagagagtaattaaagcaaaaattaattctggtgtaagcagaggaggcacaaaataactgatattagaggctagatgatgaatgcctggcatcaagggaggtctcctgggaggataaaagatttcacagagtttttgcatatcacagttttctcattatgagacccgacgaagattgctcagtgcatacatgatgtgttaaaagagtagggtgaaaagcagacacttgttcaccagatacatcttaattagagcgctctttagcagacgggcttgcaaactctggtgataaatagactttcgagggggagatgtaaatttagagcgttggggttctgggagacttcctgttgtttgtgttgcattatggggtttattgtggctctaattgctgccagtttattacagatgacactaggacattgacataaatggagccataaaaagactcacacggctattgaaaatatgcctgtatataatggaaagctgcatactcattttgcctctcctaactgctccttacaaataaagtcatagctgtatgcagcagttaatcattttaaaactgagctgtgctgtggtttctagctgtattgtgtgtaaggcatgggcctcattatttacaggaatggtatcataaatgtgtaagtcatagagcctgatttataaacaattcataattttgtaaaggtggcatttttttctgcctcttcgaagtcctaggaaactttccatttattatttttaaaagaatactatggcatgtctgaattgaccataatacagtagcaaaaccgttgatccaagaaggtacaaggtatgataaatggccatttgattgtgtgacagtatgctcaattggtagggagggaggtcatttcaccacttaaatcaaagaatttgtagtctattaaaagtgacatgtgaacaagtccaggtatcacaagcttttcagttttgtaactcaaccaatatttatgctgaccatccacgttttctattctcaaaataactgaggctcattaacagcaataaggggaaggagtgacatgacatttaaatcctccggtatgacagctttacaaagtatgtggtaggctccatgcatcagtcatataagccaaccttgcttgagttgatccatttcaacttttacattacatagaaccccaatgatgtataaataattagtagaaaaactcacatttataaagtcctaattttgccatgctgtgatactgttttatcttcattctccccaaattttctgatttcttattacttccctgacccccatggattccagtgaggtttccctgaggaggaaaggtctaaccacttatacgtcggaggtaggaatggccccttcatcatgtcctgtgacacacaggctattgtgatgacttcttagtttttgaatgcccaacacataattgtaatgtactcaaagtcctacctccctcttcacttctgtattcctcagatcaccttggaaattggtgtagaatttccattaacatgtttgcacttagtgattcttctagttcattgacaggaatggtaatagtgctgtatcatctaattacattcgcttttaccgctggaccttggtcatgttaatgtggtaagtattttaggaaaaatgagaagacttgtaagtacttaacattttattgaaatttaattgaatagttaaggggtgattaaaaatctgaaattaacactctttagaaattaatgacagtcattaagatgtaatggggctgctcaccaacagtgctcagaaaggttgggggatttaaatttgcatgggggtcagagcagtgaaagatgttgtttatagtctcctgagccttgactgcaattttagagttggaacgaaagtgattctttttcttgttgtgttgccaggattactgtatctacagtaatggcaagttacattgggtgagtctgtgtgtccacgaaggtggagagatgaccacgcttggcgagcctgtgcagctgctaagctgcagaccaagcttgcttctctcagggcctccaaggactccctgaaccaatccaaacactcgctgtctcccccacctgccctctcaaaataagcagcagttcattatttatactagcttgaatcctgggtccccttatgagtagagactaatgttcacgtggaatggagtgatataatgtgtaacgattttttgatatgaatttccactccctggagacaacagcagcttcaccatcaccacctgaccagggtggagagatctaaaaagctaatatgttgtctctgtggtggtttcagagttagtgctcctcgaaaggaaactgtcacggagaagtgttcatcccaaaaatgtcctctgatgtttgcttagaaagtaattactgatctgattttttgttttccagaattctagaaaggtatacatataagtaagcattcttatttcaaattgatcgatgcaataatagtgatgttgtttcatttaaaaaaaagaattcaagttgatgtgatcacttccaaaacataaaaatgaattttttaaaaaatatgttaactcttgagttaattagtgctctgtattttcagtctttcggaaaacatactttttgccagataaaatgaaaggaatgaatcttagatacactttgagaataatgatattttacagagtattattgctgaagtaagggaagaatagaggaattattgagttagatttgaaaattggtttaataatctgacaaaatatttccagtgtttcaagtggatgttctatgttaaagaaatagcactggaacatgaccccttttttcttaaattttctttccattttcctccttagtactattggctaacttcgttttatatttttcccattctgctttatctcttgtttccacctgcagccaattttcaattattccccctcatgctagtaaacatggataatctaaaacactttatacaaatgatattcataaaaacatccacatactgctgtatgatacatttacagatacatttacagctcttccaccccaaaatgagaagtgcacgtggggtggttgccttaaacagtcaggtgacaaggaaacctttcactccttaccagaaagcagccttgggaatggttggctacaaaggaatttagcagggattggaggggagaaaggcttgggatggaatgtgtgatgaggaaaaggtgtccaggtcagagggattatgcacagttcaaataatgtgtgaggataatcaggaagtgactgcattttggcctccttgggggctcatcaaaccagcacctatcccctgattaacctctgcgttccatcagccatgtaaattagcacaggcccactagccctgggcctggaagaaatcaaactgtgggaatgtacatattttaataaaaattgaatatgtgtcccacagcatcactgtaggacgcactcagatttatcattctcactggcatctaatgcattattgctaattattgaatctggtaaatttggagaagagtatagaatactttgcgacaagagttttgtaaaaccgtttgcgtacttcagttacatgaagtaaaaagcaccatgcaacttcagttccttgggatttttattcacacaactttaacatgatatctgcctaatagtagagaattttatatgtacaggtggatattgggtggtgcatccttgagtaagcttcataattcatgtgcaaagcttggtttggatgatcacatataacccagaaaagatagctgagactttaagggaagatttaggagtaaacggggtatgttactacaagaatggaaatggaagtaaaggaactccctttccatttatatttgaaatttgtgtttagcatgtcagctttctacacattctctttcatgtcttatctactctaaaacgcatttagtaatgtctatcaccacagtacctgggtgcttaggtactaaaaagtgctttaagaatgcaatttgaagactgataaatcaagtctgtttagctcaggggaaagaaaagctaagtgggatttagtagaagggaataatattcctaaaaggaaatcagtttgatgccagtaagctttttgaagtagaaactaatttgaaagcatagaggtcatgactgaaatggaggactcgactggactatctcatattagcaatttgaggggaagtttctttaaacacaatagatggaatatagaatagcttgccaaaatcggcaatagaaagaggctcagtgagctagttgaatttttggaaagtacagcatactggggtagagccacaagcagcattttagaagctaatcctaggaggcgtgagaaatgtatttattgaatgtctgatataatttcaggcctaaatgggtgtatggttttcctctcaatcttcaaatgttctagcatatctatgctgtcactctctaaatttgaacattaatatgaagaagcaattaatactcttttcaattaaaacaattaatacatgtactctccacctcatgccccctcttcccccccaaaagagaactgcaggaatcatatcatatggtgtgtatcaacttatatgctgcaatacttgaggagaaataaacaatataacactgtttattacagggagacaaattacagtttttgtttcatgtgaaaagtttaggggtggcagcttgacagtaaattccattaaaatctaccctgccagagaatgccaagattgttcttcattcattttagcataaggtttaattttttgccgatttttaataccagtcagtcattcttagcatcattgaattaactctgaaccctatatcagtaaagagccttatgttgccccattttattattacagtgcagtgcagattagaattgcatctgttaagattatattgtgtattggatttcagtagacagaagcacagtagtctcatgaatataacggttggagccaataacctgtaaccatcacatacttgttctattgcaaaatctgaactagtaaggattacattttggaaaagattataaatctgtcaccactaatctaatctttacagtggctttgtaaccgttttaagactaacgatcattacttctcttgctctgattttaatcataacacatatttgatattccataactttcttttgttccattagcacatgcattataaagtgtacaacattaataaatagaggcataatgaatgtgactaattgattttggcagtcaaagactggcatactttttatacaaaagggaatccattcaaagaagcttaactgctattgagagcaagtcttcgatgcagtaatggtttctaatttcgattgtgtgtgaggtgagcagaatgcagttattcctagtaactcaccacttagtttttgttgttgttttgtttataatgctcatttatcagattctcatttccctaaataaaaattttatgtttcagtctacatatgaattctgtagcacaattatgaatgcaattattttaagttgtctgtctctcataactaaaggtacatgatatagacagtatgccacagcttatgttttttgtcccatctaactatattttcttaacactgacttcttaatactggaatcagattgtcccaataaataaatccactggtagcaactgatttatttggacacaaaacaaatttttaactcataaatgcaaatgccaaaatacaacatctagtagatgttagtgaaaaattaattccttgaaactccaagggagaaataggcctgaattgtatgatcagtcttacctttaaaaatgtgcatggccttcaaagccaattttgcctcctttataaaatctttcaacactaaattatgttacacggctacgatttaatagtggacgtgagatcaaattgggtgtcactgaagcattaatcaactaagtgtcattacagatagttaacaactcatgtgttaagctttgtcatttgaaaccagagatagtgtgtaccaacagactcatcacttagtgtagtcaaaactgatttagagaggatgaagaatgactattgttaagggtttacaagaactaaaatttatattaaaaacaactttttactttgcagtctggctctacggaaggacaaagatgttgtatttggctgtaattaggaaaaactctaatgggaagtcagtcattgccaagcacagtgcaattgattttccaccaatcagaatagggaatgagatgctctaagtctattattaaattatttatgaagtcatattcaatctgatcattatttctgacatttcaggttagtgaagattttccaatcactgtgaagataggaaccagaaggttggttttgtgacttgagcattgaacgccgcctttggtggttgtgcttaaatgagataagtgagttttccttaaaaaaaaaaaagaaagaaagaaaactacttctattaacatctgcagcttaactgaggtattgctagtcttattgactgtaaactcttgtttatgatttgaaatcagaataatgtttattgggaaagaatacaccctagatcagtattatattgttaataaaatggctgagtagtgacacactttaagtttccttcagaaaaagtcctaataagatgcaaaagtattttataattgcagcataagtgactcatacataccgaagaaaaacagtgaagatttataaggaccttattagtatagtgagattaacctttggatctcttactctgtttttctaaactgctaatccagttaccttaaacatattccaccatcctccacactctattccccaccctcatttcagtatcctagaagcaacttcaggacaattgctcttcaagaatcatgcaaattgtaggtcgtcatttatttaaaatataagagataccgattttaccatcttagatgtgtcatttgacctctggtttttcgtatttataaagtaaagggatggtatttaattattttaaactagtctttattaaaaaaaatagtgaaagtaagacaaatctcaacacaaaaattgctggctttgcacacaatacccattgtttcatcaatgacttgaaattctgggcctgtaccagacctggacatctgcagtcctgtgacaagatgtaccttgtatgagctgtccaccctcaggaagtcactttgtcattctgggtcagctgttttatctagcaagtgtggattgaaaataccagtactgggcactttcatgcaactctcatgaagatcaattcaaaagacatgttaaagttccttaaaaacagtaaagcaataggaaaataatagatgtccaaaaatatatgtattttgcaaaccactgtaggttccatagaaactagtgaggctaaattaagatgacctttttgttactgaaatagttggacagttaaaagggaaagccaaaccacctcaagaaggaaagcaaagtatatattctgtccatggaattataatatagtgccaggaaaatgtaggaggaataattgtggaaactattacctgttacagttcctttttctgtccctcacacaatatgaaatacacacacacacacacacacaccccagacacagaaaccagtcattgtaggacccagtgatacagtttgtgtactgagtctcctgctaaactgagatgatgggtaaactactgcagctgggagaaatactaacctgccttcccagtttactcacacttagtgtcgatcaggtcacactgacatagacacagagtggtgtatatgtcaaggaaggtactgtacgtgcctggaagatatctcaggtaattggcttgatacttccagcaggagtcaaaagtgtaaggaatgtgttcttactgtatttgtagctcacgcagtttagtgactttggcacgttctgactatctcttttgtggagataattgtatagatatttaactgtcttctccccttcttcccctatatttaaaatcaaggttttgcagttgtctattgtggactgctttttgttgggaagtctgtgcctctcctggtatgtgtttgggaccgggtgcacactacaccttttcagttccacagggataggaccagatggaagaatttgattatctagcagtagaggaccaactgttcagttggatacagaaccgggagaaaagggttgaagagatctaaaatggctgtcgtatgtggagccaacagtttccgaagggaaccaggcaggcactgaggtgtagtaatgcagaatctcttccaagtaccagctggggctttcaggagccgctatccccacagcagacactcagcaggctccaagcagcttgactttaccatatgtggaactttttattctccacctcgctccctagagggacgggccacagggacaccagaggcaggtgaattgctcttaatgcagagcactaaatcactgggttaacatgagaagcctggagagaggaaatggatctgcagaagactgactcggagtctcttaaccttggagctattctgagcaccaaaaaagataccgcataatgtttcattaggctttcaccttgtgcataccctcttttatgcgagtgaccttttcatccttgtacatattttctaaatgcttttaaaagccattcaatacttcagaatgctaactgtacattttttattcacacagaatcatacctttaaagtaacgagggagcggaacagcactgcaatctgtgatttgtgggaatttcttgctttctctccgttcagacaccccagtttgacagatggggcacaaagccacagagcaatccataactccagtttgtatcataaatttttagtccctcctcctccaccaaatgcctgcttaatggtagctagaatactcatgcaacagtgttggcatgaattggtataatttgagacatttcttcatattggccatagaaaagcattttttaaataaaaagaccaagaaggtttttgaggtttcaaaaataacaagcatccacctttgtccaaaaataagacaaaaatacagatttactcaatatggtccttcttcaagaattttggtcaggtaggttttgtgtcttccaattttactggatttatcttattcctaaaacacttctgtcattttggagtattttacctttagaattagtattaatactgatacctgcctttaaaaattcagcctattactgtagaagcacttacataaaacaagtgttttttgtatgttttaagattctgtgaactttgggctggtaaagagacaagcagcccacagaaatgtggaaaattgtgaatgtgaatctgtaaaaattaaagtatacttaagacagggcttccaggtgaactttcatggcaccatattgattaccatttggtgaccacttccctgtgagacagtaagtacccattcagatgaactaggttcacctgtgctaggaagagaacaattaaacctcactttcttaagccttaggaatgtgtgcttggctaaggctgaatcagcagaaaagcagtgatgagaaatatataaagtaaagcaaatttaagtttattattagttaatgaaaaaaagtaatcattattttccaacactaatagcatattagctcaataatattggttaatccatatcttcaacaaatattaatgtacgaactaaatcaaatactgcaccagtaatcatacagttataggtggagttggactaaacattaatatcaatatttaaatatgtggcgctgtcttataaaagaaagctaattctgccaattgtctagttatatgttttctataataattcatgttaacagaaacatggatgtttgtggcatgatttaggggattgcaggcagaagcagctatgttcctacataggaaaagatttgaattatatttttgtattaaaagtctacaaacaacagaaagaagaaagattgacagtgttcaatatagtgaagtgtatttctattacgtcagtgggtaatgtgtgcatatgtgtctttatctcttctttaaaaataatgatttgcaatctttttaatgtgcaggcataatgatctagaaccagaaatatatcctatggcaaaatgataacaagaatcttgtttaaaaaaatccagttaacttcagcccacacattgaggcaaattctatttatctagtgaatttcaaatttactcagctactttggaattttgaatatcgtgatagcaattcattctgtttatgcttcccacttgagctacagtcaaagggtagagaatgaagtatatagcaacaggtttgatttgtagaaaaatctgtaccccgtgtcttttatttcattaaaaagagtagaaaaacttgaatgtgatggaacagcagagattgtgttgagaaagtgagttttaaagatttttttcaaatctgtatttataaaggaaaactttaaaaaatggatagcacttttgtgttatatgtggactaacctacctttaagactttttgacaggagagactagaagcggttggtggtttctggaaataatggctgtaggctgtaactgatgatttaagccaattaaacacacagagtggttctttttggtgttgtttggcagaaaacgatgaaatggtgttgcctgataaggaagagcccagcgtatgtgtgatttcttatgcacatgtgctagaatcagtgcaactcataaattcaaattacttttaaaagctggtcatgatacatttgctcattaaccatatggaaaatggcactcaggaattttctacagtgtgttttcaaagaaagaatccaattgcaggcagacattccttagtacagtgtttatgcagctgtacttgtgattaaattacaccaactcaggcccacatgtagccacagaacttattactttgagtacaaagcaccttgtaggagtatgagaactctcattgtgatgttttttggcctcttggccactgtatcaagcaagcatcaaaagtcatgaatgtgctctgaggtctctggagaaggagctgtgggacagaacagagctgctcacactgtatgaggaactttgacagtctaccgggggacggtgggattgctgctgtcagcagttccaacagcgcaaacagtgtgaagaagcttccacagggattgaattactgaagacttctgctccgtgttttttggtataattgagagcacagagggagcttgatttctctgtcttatgatttgaaggtgaagacaagagcctgcagggctctgtcagagttatgggcatgctcaacccagacttcagaaaaatctaattcccataaaaccttacaaggctgaattgcttacctgaatataaaagatttactttcactgaatcatttaacacacaaccatattaattgcattttgaaaaagaaaagaagcatagaatacagtacaactgaaaaaccatacggggttaaaagagtgcttcagtttaaaatgcatgtttgaaagtgaaactggtgtgtacagatgctctgacatacttagccacacacgaacacgaaagtcatatctttcggaaagagcacgacatcggtgttcattattatctctattgaaaatgaattaataccccttcctctgtattctggaggggcagacctatccaggtgtattgcatttatactgcgcaagtgggtataactattattctgattacacaaaaacaaataagagtaaaaaatgccagctggtcatcttctgtcactttcagcataaatagtgaattgagtgcccccctcctgggggtgcccagggaggggcagcagtgtgatctcctggcactctaaccaccttttccttcctttttcacacatagtctgacccaaatgcttcccttgtatggggagaagccaaccgtgacaacttagtcccagagcgagggcaaaaatctcctgagatatgctcccaaataggaaaggatagcattgctatacccgcatgcagtttaaattaaactgatagtaacacacaggactactttgatcttcctagtttctttccgtgcaaaaatgtggtcaaaatgcatgataaatatgaaaccttcttgaaatggtagcttgctgtttggactcaggtgctggcctgggaggaagtgtttcatgtacaggctttcttcttgcaaaatgaaggtgttccatctttgaccaccacttaacctcatctattggggttggctctcctgccctgtcacgactacttggacatctttagacatgcttccatcagaaagcaagttaacccactccggggacagccctgcaaggcacagaagctgcaggagtatttacacagttaaccagcatactttatttaactattcctacttcaagctatttggcagggaagtgggggggataccaccctagaacaaataccaattgttagcttcactttcacattgccagcaagcagatcttttccaactgggagtaatatcctgttagctatgtttaattcctattttacctgggggattgagagtaccaaatgatttcagctgctcaggcattacatttcgatctgtcctctccttctgcccctgtctttctcacatactcctcctgggaccttcctatcatttatagtgaaaggacagcttttctgtaaacccaaaccagcaggccctgttccgaaaaggaaccttctgatatgtcgcgagggaaagacacacacctaccatcccacacacactgttctacctgtgtttttggcaaaaagcccccatacctgcaacacagcaattcatcctgcatcagatccatttctttttttcacttggcaaaatggttttgagcaggaacgtatgtgtatgtgtaacttttggttagaggcagtttacctttagccatgaaatgggcactgtgtacatggtgttaccacaggcgttctgttccaattgcattgtgtcttaacaacaaagccccccatgaaactcaataaaattaccaatttcacagttgattttcttcctgctctgctctgcagccctcacactcctggcctgtctccacacactgcaggggatggtgtcggaccaaaccaataacacggtgctaaaaaggggcttgatataaaccaggccaatcttaattctaattagtgtgtccagcaacttttaaatctttgagccatctttgttataaaaaatactgccatcagcttattatgaataggaagaagacagttatctgtgtggttgagatagcactgtttgattcaggccatacttgcattgcacagaacatatgtggatccattttatttatcatactatgctgagttttctcctctgatattattgactatgctaactttgataatttaaaatcaatcaaagctgtaggacctacggtatataaaccttggttcattgattagaaagcaagcattctagatctaattcagctactaactagctatgcaatcctgaattatagtctcttcttgcctgcatctctgcaaatgaaagagcaaaatacagatggaacaatggagaaaaatatatgcaagtgccattttatgttgatcttagattaatagttaaataatgaacatattttaaggcttaggtgaatccagtcttagcatattaaaccctacagggcttgttaactacagacaaaaaaaaaatctaacctaatgcctcctgtaagatacagcttaaaaatcatgcttaaattgtaagtgtcttgttctgtgattaaaatactccagacacagagatcacttcctttactttatttcaattactgctatttattcttgtaggaaccacatccaaccccaaatccatgcctgagttggatatgaattttgtcactgaagcatcattggcagtcattttcactgcatttttacatcaaataacagactgtctggtctgatggccaagccctgttggacttgctttacaatctctaatgtcttatagaaaacatttaaaaatgtattggcatgcaagagaagtttgttggatgattgattaatcaactgaatgaatgagtaaacttagatgataattttgtgtgttgcagaaatagatgtagtgatgccctagttatttagaaacactgaaaattattatagaattccgtatccatacattataataataaatttgaaatatcatcttgcttttatgtccttcaattattattcttatctttattttgtatctttagtttgattgaaccttatctatttttgcagtcttcatttgcaagtatcttagaatgatagttattctcatgtatgaatgttaaggcctttttttcccatcaattctaacttcattgaaacgactatttgtaacattgaacatttgatttcaggttggaacacagtcattgttctcttcatgatcacatacagaggaaggaaaataggttcaggcgagctaaaagagtgacccagcaatggagtttctcttgggaaaacatgagtcacagaggagatttaaattttcttacattttctgtcctgtactccactcccctgaggactaggaagtttgaaaatcccacagaaggtagttcccatgtgcccaggaaccactgcttgtcatgttgtaacccgccatcattgttaatgaagtggttggggaatttcagaagtctacctgcttgtctgtcttttgggctagaaatcagaatattagtagcaaaaagattgcagtgccctgttagtctgaaaatattgaacaaatcacatcattttagtgcttaacctactctctgtacattagtcagctctttcttgcattaactcaaatgaccagcaagccgttttaaaagttaacgcatcagtgtgtgatgtacatgcagtcttccattcattcaggagattctgtgattttgtaagtttcaaatcagctcattgtcttcaaaagagttttaagtgaaattaaatctagtcatttatatctgtcttcaaataattattttagactgtgactagtgggaagaattgaggaaacacaccattttacttacaaacagccttcattcacaatgctggccatttcaccacacatcatgaaccttaaaagtagctgccaacaaccattcccctccattgtgtccataaaaagtggcatttctttttctggacccccacagcaactgtcacacttgatttccatgagattttctatatgtacttcccaaataacgttaattgccttagaacaacttaaaatccttcatgttgaaggaaatgtgtccaaacaaaactgcccccaaccaccgtgtgtgtggtatgtgtgtgttttagaaaaattattagtgagcctgccttccatcaggtgctttgagggagaaggagacaaagggagtgtgacgtactaggaggcctctggtttgaggtgctcccgtcacaagccttcataatgagtatattgcatattgccatgagttatcatgactgtgacctgcctcaggaggtctcatgccacatctgtattaacaactgcatctgcttcagggtcaccttattagcttgccgcagctgagccaggggcctcaggaggtatcagactgggtcctcagggaggcctggtacttctgctctccttaaattcagtttggtgcccaaaatttaacatcaggacctgctgaattttatttggaattatctactctagcatctcttaacagaaaaaacacacacatatacacacacacatccccctaaaaattgtcaacctccccaaatgtcatctctcattcccattatggcatacggcttgtttgtttcacatgaaaagcaatggaaatatcagaggaaaagttctcaccttgatttgtttttcttctcaccacaggaatgtacaaagtgctgtaaagaacacaaaacctagagaacacatatgcgcgaacttatctgtggaacttttacttctaaacctgacaacgaagatagtaaacaaaaattcatctgaatgagtggtgatgtgtgtgtatgtatatgtgtaatgtgtgtgtgtgtgtgcataagtgcagtgtgtccatgtatgaaagaatccatgagtgagtcttagctcttgcaaccaaattcctaaaaagagccctttaatcacttgcttcaaattaatcacgtagtgtggaatttggccacatgtgcatcattcattcaccctctggacagtaagagggacagagaagcatcagttcaccagggaacatatctaggtcaacatcttacaggcaaaattcccagagtgcactggtggctgcactgttctatcctctgacgggcaaaagtttacccgatttcattttcatgactttttcatttaatgttgccttgacagtaaagacgaatagagtagtaacaaacatgcggctaaaataaccccctgatggctaatccagattgtgcctaacaaaattccaccttgaaccagaagagtgtcctggcaggtgagttgtctggtgcctttgcataccctcatcttcccatctctagaacttccaaagtatttccttaagcattttctgatatgattacaaactaatgacacattattttattttggcatttttaaggctattttcagctgtcatttgtagaataccttgcactgagcttagcatgacacatattgtctcatttactccacccgcataaccatgtgtactattatcttggtgttacactgagaacaccaaggccgaaggatactgagtagcttgtccaaagccacatatcctgagtctttcttagtgagtgtaactttgttgaccccgatgtgacatttctaaatttggcacagtgaagtggcccccttattctgtccagccctatcaaggttcacagcttctttcctctcccaagtattaactgtgtaactaccaaactactctgaattttgcagtgacccactcaatcagtacctagctggaggactttccctcatcatccacagatgtgatcgttatttagtcatcaatcttacaacccaaaatatctatggttttttttttgttagtgttagtcgtttctcctctgcagaaagcaacactcctgttttttacatgttccctggtttagattcttttctcagccagtaatagcagaaaacttaaacatctgtatgtctttctttagatcacaatttctttctaccctgcccccaggatattcctggatgctggggttatccaaactttgggcaacatagcaaataaatgtactgtgaagaaaataaaaagaaaattgtcatggaagaaactgtttacctcactttgtagaatacaccccaccatgccaagtgagcacaacttaattgataatgatcagcttctcggttacctttaaccattttcttgtaaccatatcctaaagttgcagcactttacatttcactgtaaagaaggctctgaatgggggcaaccgggcaaatcactctgatgggcagacttggataaagcagtcttctgtgattttatattcttatttatctctcacactttacatgtttgctggatgtttccttctttcatttttttgtttggtagttttacctttctttttttttttttaagatggagtcgcactgtgtcacacaggctggaatgcagtggtgtaatctcagctcactgcaacctccaccttctgggttcaagtgattctcctgcctcagcctccagagtagctctgattacaggcacacaccaccacaccggctaattttttgtatttttagtagagatggggtttcaccacgttggccaggctggtcttgaatgcctggcctcaagtgatccacctgcctcgacctcccaaagtgcttgggattacaggtgtgagccaccacacccggctggtattttttcctcttcttacctcatttcatttccttttcttcttccttccctgtgttctttagcatcctcaactgttttacagagtgtctcttttcatgctttcgtggtttcatggataatagtgtttccttttcctttgaagatttcttccctaaaaatcagagaataacaatatagagaagttattcctgtatttcctttgaataatctgtatttttgatgattatggccaattgggaaaatgcagaataattaattaaaatttaaattaattaaaaaattaattactcagaactgtaagaggtggtacattgtagcattttggaatgttttcttcaagttttttctttcttcagccttttaaaaaatttatgcaaatatacatgcacatgcatatatactttaaatatatatatgatcttactatatacaatataatattttaaatggtttctgcttttcctcctcaaaattagtacataatacacctatccctttgtcattaaatatcttcaaagatatcaagtatttaacgaaaccacaactattctatgagataggtactactgttatccccattttatattagagaaaactaagcactaaaaggttaagtaggccaggcgcagtggctgatgcctgtaatcccagcactttgggaggccgaggtgagtgaatcacctgaggtcaggagttcaagaccagcctggccaacatagtgaaaccccgtctctactaaaaatacaaaaaaattagctgggcatggtggcaggtacctgtaatcccagctcctctggaggctgaggcaggagaatccccttaagaacccaggagacagagcttgcagtgagccaacacagcaccattgcactccagcctggatgacagtgcaagactccgtctcaaaaaaaaaaaagaaggtttagtagcttccccaaggccacacaggtaatagttggcaggatttgaactgagcagtttggaagttcagagactggttctaaatcactgagacacagggactccttctttatattctttatatgccttaatgattgcaagacagttcctcacacacttgtgcccatctttgcttaagcaatccacttagacgttttgcacggtctacactggacactgaattgttaccaacgtgttgctcttctaatagtattatctctgattatctccttaggataaattctgtgagtaagaaagtaaaagaacactcttaatgctcttcatttgaactttcccgtttctgatcactgaagttatactgaatcacatctctatctttgtatgtgaatacccattcctcataaacttgaccacactaaatcgtagacttttttaaacagacattttacattttaaaccctccatcagatatgtagcaacaatctgtcattttaattttcaattttttattgttagtgagattgattatttgcttttttttatttttatttttgtgagatggagtctcactctgtcacccaggctggaggcagtggtgcaatctcggctcactgcaaactccgcctcccaggttcaagcgattctcccacctcagcccccgggtagctgggactgcaggtgcccatcaccatgcccagctagtttttctgtttttagtagagacaggttttcgtcatgttggccaggctggtctcgaactcctggcctcaagtgatctgcccgcctcggcctcttaaagttctgggattacagcatgagccacctttgccatttctatttgttgttattttggcaagagctccttcatgcctcatgtccactaaaaattggtttgctgtcttcatattgatttctaagaactcttcacgttttaagactatgagatgttttgtctttcagaatactattttccctttatttgctatttacctttttagtagtgtttaatatgcatatatttttcattcttaggtatttttaaatgtaacatatagattttccatatatatgaaaaacaattacatatatatggggtactagtagcctttgcaaattacaacagtcatcagatgaagaaaatactcttgcctggattgtatatataggtaatgtataaaatttaagtcaagatttcaatggattaaaccaggtccagtctttctactttgctcattagactttttaaagtgtattgaaatatatatgcacatgtgtgaattttgcatctctgctttgaagagacgaatgagcgtgagaaaatgtttcttctgaaataaagaacactgatgtataggtttttatgcagtgaaatcccccacacagaatgcaagtacctagaggaaaggcactgtgggaagttcatagaaatggatgctgatgggaactggactctcaatttggctctgccattctaattgagtggcattaaacaagtccatttccccttattttttaaaattgtctgtatttaaggtatagaacatgatgttacaagataaatacatatagtaaaatagttataataatgggaaaacctaacaaatctatcatttcacatagttacccatttccgcctgctgtggtcagagcagctataatctcctcattttagcaaaaattctgagtacagtacactatcactaactatagtccttatgttgtacattagctctgttgactagttcttcctacatatttgctttatgtcctttaaacttaatatctttcccactgttttattctctatatattttatttaaccttttattaagattacacatataagtgagaatattcaatatttttctttttgtgcctggcttatttcatttagcacaatgtcctcctggttcatccatgttgtacaaatggcaggattgcctcctttttttaagactgaataatattctattgcatatatttataccacagtttatccatttgttcatacatccaaacatatatggacaactaattttggacaaggacaccaaaaagacacagtgaggaaaggataggcctttccatacatgctactgggaaaaccagatttccatttgcaaaagaatgaaattgggcccttatcttacactgtacacaaaaataaactcaaaatggataaaagacctaaatgtaagacctaaaaccataaaattcctagaagaaaacattggagagaagctctttgacattggctttggtaatgatttcttggatatcacactaaaaaccctaggctaccaaaacaaatataaataaatagggctacatcaaactaaaaaacttctgcagagcagaaaaaaatctgctgtggaaaaaagcaacaaaatgaaaagggaattgctagattgggaaaaaatatttgctaactttatatcagagaatgggtcaataggcaagattaataaagaactcatacaactcaataggaagaaaacatacaacccaattaaaaaatgggtaaagaacttgaatagatgacaggacttgaagtaaacttccccaaatatgatataaaaatggccaacagttacaagaaagagtgctcaacatcactaatcaaggaaatgcaaatcaaaaccactatgagatatcacctcacacctggtaggatagcaattactaaacgacaagatatcacaaatgttgatgagggtatggagaaaaggaaacccttgtctgttggtgagaatgtaggttggtgcaaccattatagaaaacagtatggatgctcctaaagaaataaaaaatagaagtaatataggacccagcaatccctcttctggccatatacccaaagaaaatgaaatcaccacctcgtaaagatatctgcactcccatgttcattgtgcattattcacaatagccaaaatatggaaagaacttaagtcttcatcaatgcatgagtcatcttatttttaaagagaaggtgtgtactagacaatttctaaggtcttgttcagctcacccttctctgagtttatcaaaaagtgtattttatcaccttttagcttctagctcatctgatttgagttatttacaggtagattatttgagttatttataggtgattttattaaatttcagggtattgaaggctaataaaatttcttcccccaaagcacttgggatgaggttggtacctcaacttatattaagaatttgttgattgagtgattaaacttctgaagttcacttttgcctattttgcctcttttccttcacccctacctgatggttccttagaaccatcccatcagagctaggtgaatgactcaggtattcacctattttgagatgtctctgagaaaaatctttttgtccacatttcatgtcagttggccaacttgtataaaccttggtaattaattaatggagaaacagcaatagcaattttagaactggtgtagagattagcagcttcgggccacagcatgtttctaatttaataatggctttaatagttgtagaaaggaagccttttaagaaaaagttcatgttgaatttgggacttttttccccaaatagcttgaaccagaatgaaatcaacaattctttccatccaggataccctcattttactaatggaattgactattagggaagagtaggttcagatttggaagatggtaaaccatctgaatggacacagaacacagaacttgacacttcctcgttgcttctttaatcttgtcattgtttctgtgacttctccttttgccctattcctgatttcttagaaccattgacattagaactggaaatactcaggattgtatgagggagataaagtatctgtgcttgttttgttgtgttcttgatattacgactggtgaacctttgtcgcttcctttagaactgtgcaaaggcatgttggagaggagaaggaggagaagaggaatgggttataggacaaaagaaaaaaaaagcaatcatgctaaagcctttgaagtgttagacgatccatctgcctgtttgagtctgaggctgaatccctttttaaaatgcatcaaatgtttgagtgtgaagttcggtcctgacagcatctgtgattctctgtggagacatccgcagtgcagtttcccagatgctgtctgtattcacacgagaagagtttgatccaaagacctagccagactgggaccatgtggagttgaagtagacaggccgtttcagcaaggccctgtgaagtctcagtagccaggccccataaaatcagagtgggacgagcttgaggcttttaattccaacctgaagccatgttgtcaagcttctcattatcccagtaccagaaggtaataagagagggggcagggtagaacaggcttccccatgacttcataaatcctgcttgtgatgaaatgtgtataggcagtgtaggaaataaatttttaatttgaaagcacagatttttattagagagttgtagtatcatgatttccatttacatgaccaagtgaattacttaaaatattagtataaattatatgcaacttgaaagtttagctgaccaacattctccatactgacagcattacgatccacttagtaatagtacttcatgtaccaaaatacatagtaaacacagccatcagcaccattagaaaatatacatttaaaaccttaaacctagctgtttcactatttgtcagtaactattttataaagatcacagggtttatgttttaagacaaatatctatacattttatggtgtttggggggtatttcgggtcagatttcaggaagagtaacttccatcccatcgtggccatccccaagactcttgtagaaaagcagtagctctgtaacttttgcattttatctctagtaattccactgttttcattaatgccagcgaagtatcaaaaatagaagacaacacggaagagcagaaaaaaagagattaaattcattcctcatgaaattaaacctgtagcagatctcagacctatctgcaaaacttcaagatgtatgtagtcaagagagttttctgtgaacgggcgtttttccacttaccataacacaatatcataattttccggggtctcctctcctttgtacccgatgtaaaacttttaaaaaaatgttaaattttctctggcagtaaaaatcccttggtaattggttagacacttagggaggggcatttagttttagagatcactagaggatagctttcttttctttcttttttttttcttttttttttttgagaccgagtctcgctctgttgcccaggttggagtgcagtggcacgatctcagcttgctgcaacctctgcctcctagattcaagtgattctcctacatcagcctcccgagtagctgggaccacaggtgtgcgccaccacgccaggttaatttttgtttttttagtagagacggggttttgccattttggccaggctggtctcaaactcctgacctcaagtgatccacccgcctcggcctcccaaagtgttgagattacaggcgtgagccaccatgcccagcctagaggatagttttctaaattgcctttgtagtgtactaaataaatgtctaaacaaaggtattctgatcttccgggtggctagggcttcaaaaatgtgtagaaagattccacagtgagggttcataaaaacggtcttttgggatcattcctcattaatactctgggagatctgtgtaggcagtggaatgctatgttagtgcttatgctctctcatgtaaaaaaataaccatttcaagccagcatcaagagatctgccaacccccgttccataagaaaggactggactttgcttagatcttttgttcatagaagtcattcattatttgtgcaacatgaatcctcaagtgaaatcctctttaactctgattgacagtcttagcttatttttggggggcttttctagtatttaaacctggatcctgggctgtgaaagagagctgtgagtttctcactagtctgcttgtctgaacagcaagctcagattcaacttctgcatgatgcctgccttgactccttcctaccctactgctaagcgagaagccctaagggagtggggtgcagagggaaagagttgaaagaaacgataaaagtctcgtccagactactagctgaacacctaaagactcaccacctcccaaaagagcctggtccagtcttcaaagttctgcttaaagagtgggccattcagtcagtcaatcatttattcactcaacatatcattgggggtaaaaagataaacagaatgttatttttcttctaggtgataatagtaacaacataaatcattaaaatctgctaagtcacaaggtgttagaagatgaccagaagtgattaaatgaacatgcctaagagggtcaaagaaggtttatcaaagaaacttctgagcagaatcttcaatgatgagtacagagtcccaggaaggccaaggaagaaggatatgaatcagaggaagagtgtatctaaagcatggatttctaaaagattcagggagacactcactcctcagagaccctgtttccaagccaaggaagttgggttttatttttagggcgatgaagaggctttgaacagattttagtcaggggagcaacataagacctggatcagggccaggtgcggtggctcacacctgtgatcccagcactttgggaggccaaggcagaaggatcacttcccagctactcgggggctgaggcgggaggatcacttgagccaaggaggtcaaggctacagtgagccgtgatcacaccactgtacttcagtctgggtgacagagcgagactctgtctcaaaaaaaaaaaaaaagaaaaaagaaaaaaaaagagctggagccagctggagagtagaattgaaggggtgagagaccacatggggggaaatataactagcccaagagatttagaggtggatcagaactaaaaccatgggaatggaaatggagaagaaatggaatttagaaatatttaggagttatgacccaatagatgtgaaagataaaagagaggaagggatcccgggatactctgagtctgtgtctgaaatttccattcactagtccacatggaaaaaagtccttattctactataaagtccttcatgtattttattgtggctgacatcttcttctcttggtttttctccaagatcaacatcctctggtctcttcaaacactgcttatatgtcctggtttcaaaaccatcatcacttctccaactttgctcctttagcctgtacttatttatttatttacctataattttttatttccgtaggttttagggaaacaggtggtatttggttacgtgagtaagttctttaggggtgatatgtgggatttgggtgcacccatcaccgaagcagtatacactgtactcaatttgtagtcttttatccctcacccacttcccagccttaccccctgagtccccaaagtccattgtatcattcttatgcctttgcatccttatagcttagttcccacttatgagtgagagcatacaatgtttggttttccattcctgagttactgcactgagaataactggatggtctccagttccatccaggttgctgtgaatgccattaacttgtttctttttattaacctgtactcatttagttattatctaatataagccagggactttcattaattgtgggtacaaagatatactgagcatatctcagggagctcatgatccataggcagaaagaccaaaaacaagaatagttattgctctctgttataaaaaagttttgatggaggtgtctgtagaggggtggttctcagaattttttctgctcagagcatatctgatatctgtgactgacatcatcagctatcattgctcacccaggtggcagagtctcatgagcaccattgtctcatctttcattatggactctatgagcacccattatgaactactacaagatatgaacacccagaagtgaggcatagcttcactttagctgtggcccccagcttcttaagaatcagtgaagtaaaggttgcaacagaaatgtcatacaaaatttatagcattctcaatgagagtgctgcctgtgggaatgcagttaaccatctatagatagaacatcggggtgcaacaagagatgagaccagctcttccatgtaactcagccttgagtctggtttaaacatgagccaatataaaggtctctattagccataaaatatgggcttcctttaataaaatcattgcctgcacagatatctatgataattatgacatcatagataattataagaatatcaaccttatatattggccccacatcttctggttatcaaagcaaatttacacgtgttttaccatttaatactcactataggaaagttctatgaggaaagaatcattctctacccataacacacacagactgaaagaagacctacatctatggctgattcaatcatagcaccttagaagttacacagtagcacctgtcttccccttcataccgcatggagggtctgcctcctgtctttaaggttcagcagctacatggacaaagacctgtgccttaatgcttcatcctgtgtgccagaagcaagacagcagactatatttggccagtggacacccttcacttatcttcacctatcaatagttttagggatgtggtgaaaaaagaaaagtcctttcaaattaggaagacatcatgggtacagttcctcttctgtacatttgttttatgctccgagttcatttatgtgagcacactgaaaagggacataacagaagctggtacttgtataaataatagattggttgctatatttatagcaccaagctattatattgactaaggaatagtagtcttaaataattgtatcttttaggcatttctgatgttaagcattaaaatatcatgtcttcccaatctctccttgagccctaatttatgacaagtgaaaagacttttttttttaattcgaatgctctgaaaaccaatccttcactgactatgaccgaaatttgtcactcacaaaacacagttatcttacagttttgcagcaggtagacctccctttgctagtacaggttcagggtatctggaaataaactgaacattttgctgaagggctttttaatttctcataaggatttatccattgacctagcctgtttccagaatatttatacttaaaagaaagcaggaagggaggaatggagggaaagaagaaggagagaaggaaaagaacagaacagaaactttaatttttttaaaactcaatgcatagaaatcagtgaacataaaatagatgacagatgtgaatacatagtgaccaaaaactttgaactttatcccatttccagaccacaagaatatccatcctctggtgagcctcgtatctatactcaatcaggataactaagaatggcataaataagtcctgtgcaaataattatgtcacgtccatttatgcttcacattcatacatgccctactaattgaatcaagtgtttaatcccaggattcattatctatttccctatctaagtcttttttcccatttatatttagcacccagctgtccccttctccaaatggtcaactgctgtctcataaaagccttcagattggcctccggaacccctagctttgtgcagcaattttctcagtaggggccagctggatcttggtgtgtccctgctgctggcttggaattgttaaagaaagcaagctgcatggagatggggatagaactcagcccttcctagcagatattccaggtagagccaggcatggtgttcggtcaggacagggtacggctgccttttgtagtagtcagaataaagcaataaaaagatcagttaaaatgcttgctggaagttattgatagaaaaattctttctgcacgaaagattataaacagagtgttatctgaagatggatttgttttaatttggcattgatgtatttgatacctggtaggatcaaagaaaacagaatcaaagggagaaatacaagcagccctgtttctctgaatataggcctcttttatagatataaaatctcaggactggagtgctcaaatttatttgtactgatgtttgtttaaagatcaatattaaataaattggtctggaagctatagtcataaagcagctgtcgaactaatgtaatcccacaatgccattttgtctactgcatgaaacctggttaactgtgtacttctaataacgtggaaatctgttgaaaaagaaaatagctgaaccggattttctgaacttggactaacctgcagtcaaatgtgaggggaatttggaaaatttatagtttggtcccttgcaagatggtgattgattcatttttatggccaagtattaaaggttcatataacctaaaacttccttataaaatatgtaaaaatgcccccttagactctattattacacttcagtattaaaggtaaatctcaagacccttgttatgactggttttgttgaatgttgacattattattatatttcatcttattgttggcatttgttgactgatttgtttttgatcattgtctttgcagttggcttgttaactgtgagctgggatgcattgttgtgtttataaacctcaaattttaaaatgtttgccctgctctgtatcctgcaaactttcagaagaagaaaaccaaagcagaaaaccctgtggtcatgtatcctatatctgatgcctatgtaatcatactcctactatctttgtcacacatttttgagcatccagttttgttttatttacaaacacgtaagatgtgactcctgctatcaaggagcataggatatttatacctgtatctaggtataaagggtttatcacaatgtaataaaacatgggtaaaaaatcatatgagaaggataaattgtgaagacagtggagagcaatgcattttataccaccgagtcatcaaggaggaagaggacttgaactgggccttgatctacaccactgttttttggttagggaaaggagaactaaacaatgatatggcataattttcatagaccctaaagaaatagttacgattaaccaggccaagtggcaagggttataaaagtgaaaaacagtttttctaataaagatggggggctttttttgaaaagcagatagtggagtagccttttttcagagaaaccaatgtcatggcataaaagatgctcatttttatgtatttttctctatcctttctagttttctatagggctccctgcttgttttctttgttgctaaatgctttttatatatcctagccccaaaggacacctggaagggtagttttataaattgcttatatgacaactatgagaattaagcaagtcttttgatttcctggaattgcatattcctataaattgcttatatgacaattatgagaattaagcaactcttttgatttcctgaaatttcctggaattgtttattgttcattatccacttaggagggttagtaagctcagtggttagaaaaacaggcctgagtgttagattaacaagtagccaaaactctgcacttgctagctgtgtgacatggggcaagtgacacaaccttgcaaagactcagtctcctaatccataaaataggaataataatagctaactaataaggttgtttgaaggttgaagtaaaataatctattaaaaacattaagcaccatgcctggtacacaattaagactttataaatggtaactgttgtcatcatctctctttctaaaggtttcccatgttgtcatatcctagaaggcctgaaacagtttcatttccactttctaagcactaggaactatagcgttttccagaagaagattaaacactagaagggaataaattagatgatattattaatttgtaaaagtgaaatcaaacctatggaaaagctggaatttcgaatgctgtttttgtttctgaaggctcagagtgtgttttgaataggtagaagtgtaagaaagtatttagtcctgttaactcttaaaccaagtacttcttaagtcttttgtccttgctcaaaaagaggttgttgggcatcacaatattggatgtcaggatttgtcactcgggtcattcgtgctcagtgacagacccaagcttaagtcaaatggaatatgtcttttgagcactcctaccactcaaatatggatgaagtgacatccgatatgatgaagtggaagaagtttgttttttattttcattttgttgatggttgtggtggtggtggttgtgccataggttttgccactgttgagagtaaacaaaaactatagatcgataacaccaaagaggcctaggaggttaagttatttgttttaaaaagttttaaccttcaagaattcagtactctcatcctttcagtaatattgatgtaaatatttagggaaattcagggatgtcaataaagagggggagaaatggcaaagggagactgatatttctcttgatggctaactggctttgtgtagttaagagaacacatagtggacaatggccagaaaagccctgcatgatattgaaacctcagtctggttacaaaagtcaaagttagcttcaagcacagtatggaaaactatgtccacaaccagggctacagagatagtttttttcagcatgaaagggtgcgatcttggaggagttccacagacagtcatctgcagccagcagagctcttgcatgctggtgaacttacttacatatgtgagtcacacaaaggggagaatggagttctttgttccacgtctgtgggataactgagttttgtatgatataaatgggggcttagcactgcagtagatattttcttggacagcatgtagggacaatagatctttagcctttatcttgagattctaaaatcactctttcctcctgcgttttccagttaagcaaaggctaactttaaaaatgtgaagatgttttcatttgaatagtttcaataaatatctgctttcctcaacttcaagtgtttcagccttggtttctttgattttttttttctttaaagccttaatcatagataactacatggcaatgagttgcatttcttacctgggtttgttctatcactctggaatgttttaaatgtccaaaagtgatttcagttagcgtcttgatttagcatctttaaaaatccatgtatatgtatccagtttatatatttctacttttcttgataaagatatgaaacttaaagtaaaattgtagctgattgtgctgaattattactctaagatagattcatcaaatctcccagctgtataagacagggcttactaatgaagttccctatcaaaaagaaaagcctaattttgatttggcttaggtaatgaacttctttttcctggtgtgattatctgcatggggtggctaaaagagtagcaagagagagtgcgctcacagaagcattatgcaaaatgtcttttgtctctttttgctgggatatattaaattttcaatgtagtctatgtaatataaaattatgataatgacttttggcccactgtgaaggcagcttgctggtcctgagcgtgtgtgtctggcttgagcactaggatacactgtgggagttgccttttctattaacaaacctctagatacctaatgatgaattttctttcaccaaatgttctccttttgtctaaaatacaagcattttctaaattgcttttgagaaaaacaagagagacagagaggtctatggcactaacaagggatactgaaacaaagcaaaggattcagttagcatcattcttgtaattataaaccaaccaaaaggttgtttcatgtaccagtgaaaatatttactagcttattggtataactgattgtatcacttagtaagaggacaaattgaacaattgcctcataaaatatttctgttgcttctagtcttgtgaaatttgatggctgaatttattatggatagttatcgcaactttctgtctctacaggcccttctaatttgggaaaacacgttgtttcttttttaaatttttaaataatagaaatgtataaaataatagaaatttgtatttttgttacttagcatctttgctacaaggtatctgaagaaagcttcatgaagatagttacaaatactatatatgtcatatcacttttaattttaaaatgatggtgaactttaaactgaaggctagcagtttattctaaacaaaaccatccttgcccagaacaagaccttttgatggtcctcagagccagtttacaagatacacaagaaaatctatctcatttacttacacacttcatatttccttaatttttcatctctttactcctgaaagcaaacatctacatgaaaaacaggactctaactattggtagttatatccccatctcttaccagcttgacatgataataaatttctgtttaggcattcacagttattagggaaactcctgtgatgtcacaaagcatagataagatatttgctataaaactagctttagagaaaatccactctttgatactatgttcaaaatgctaaaaaaaagagtataaatgtagaaaatatgataaaaagtacatgctgacactagatgtgttatttcaaagttttgcggagcatcagatgcttattaagtcctctagttatggtagtctgtgtcaagggaaggtcaatgccaagtatatctgcatatctgttgataacaacatgaacatctctagcaggtgtgattttgtttatagtcagattaatatctttggaactgaattaccataacctgttagaatagttcattaaaattgcttttaaaacccgaaccaaaggacacatgtgaaataggaatctcttaaataacagtctcctgaattttatttctaaaactaatagaaattatcacaaagtagtgttaatgaatacttctgctacctttcttagatgcaaaaaaataacttacaaaagggaatgtacaggatctatgaaaatctaaaaaaaaaaatcaaatttcaacatattggttaaaatgtgtggcattttgtagtgagctggctctagtttttctctcttctgggcttgggttctcaaggttccattgcttagatattctaagacttggtagccacatcttttccatgaaagtactattctccttgtcatcagaaaagaagtcccaagaactcacaaggtaggcagggaggaagcagattaagaattaggtcgtgtgttaattagctgtcattccattgaaggccactgagaatgaggccagttccgatgatgttatttcaatcagttttgtttgggaatgagaagccatttttgaatctagacaatgcttatggcaattgcttgatcttcttttttaaaattaattttaaaagtcagtagtgatgcatctgaataacccaggtgctatgcctggtgagctgcctgagcttggtagtagccagagatggatgagagaacttgaaagatctaggaaattaggttggtaaagtccaaacggtgtcagtctggtttatttgatgaggtgctgtgcttctgtgactactctactgctgagccaaaaaacaggatccctttggtccaagctcattcgtccatatgttccctttttggtgtgatgggggaggagggtggaaacagccctttaggaaaaacatttagtgtcttaagctacacaagatgatgtttgcatagcagaaagacagttcttggcagcaaatttttatgtttttgcccttaattctgtgtctgtgttttatcagctaaaccagacaggcgcaaatgagcaaaaacttcctagcgcatggaatgttggaaagttacactggtcaccgacagtcatatggtgatgttttggagagggtcatggctctataattggaaaactggggcttattttgtttatactcattagagtattgccgaaaaagctgagcatggagtaatcatttacaagataaccaggagggcaagaaaggctttaaattaaagacaccctaacctgtggacaataaacactctcctgaaaactaaccagaaaatcccaagtcagatgaccagccacctttgagcctctgtagactacaaagagtgtaaatcctgaagtaaaagtacacacaggcttccatctctggcaaagagcagtaagttattcacttcatagagacttattcaactgaagacttttctttacatgtagaaccactaagggaactctagaaccaaatttccattttctgtgctctaaggaagaacggcccccaggggatgccctaacttccaaagactatttcattacctaaggtcttacaaagcatgtgggtagtgtggtactaaaaggtattgcattttctagcacaatttggcaggaccaccacaccttttgtgcacatcacatataaacagccagctttttttcttaacttttttcatgaaacaaacacgtaatttttaatttactactcagagggtgctgagaacaaaattcctctaattcagtcaaaacgtttgtccaaataagctgagggtgccatttcattaaagcattgttctggtcaccaacagctggaacccattgagttgctggaggcacttgtcattgttaagctttcagttttcttttctttcgatctgcttcttgagaggaatcaggtgaggcaagattctgtgtaatgggtctgtttgaagatttcttgaagaagcgagagtgcctttggatttgattttgttcatcttgttgggtaaatatctgtgtttctgctttttgccgcttagcttgtctctgaagtaattgagtccattgaaagcagaatgttaagcaggcctttgattttacttcagccaaacccatgtgtttgcatcagcgattattctgtaatcttggcatcatcacagttgtatgtgcactttgttttctacactaaaaaatcttcaggaatgtaacaggaccaatacaaatgccctccctctcccattttcccttgttgggagctatatcttaaaggaatcatttgtcattcttatcaaaacggcactggccttctcccctctgtctccccatgtgttgaaaaatgtagccattattatcccacccagttttatgcatcttccagatgatttaactgaactgatgctatggaggatatgctgactggcacttttcccatgcttaatgtgttaacaaaagccaatggtgtcagttttaacagttttagctaaattcccacgacactcttaacaaacgctgaaacctctgccatgtcttaccctgacagatttcctgccgtcattgcacacttaaaataaatgtcatccccaatcaaaaagttcacgttttctctgacaatataatttgttactttgttcctgctttatctctttctttggcacagaaatctcagccgagagatgttacttttcttcatgttggctgctttcctttttgttcttccaagtatctgagtggaataagaaagggaagctaagaagggactgccttttcatttcattcaggagtagatagaaatttctgatttgtgatttgatgaagcaaattcatgtaaatgatgagttgataccatggtctcctttcacccggtgtctttgtccatttgcgctgctatataccataaactaggggcttataagcaacagaaaattatttctcacagtgctggaggctgagaagttggagatcaaggcacctgcagattgtgtgtctggtgagggccagcttcctgcttcatagacagtggcttgtttccgtgtaccttacttggtgaaggggcaaggaagttattcgggatttcttttataagggcattaatcccatttgtgagggctccaatctcagaacctgaaggcctaatacctcctaataccaccaccttcagggataggatttaaacatatgagttgggagggagacatacacattcagtccactgcactcaaagacctagtgctgtattacttaacacagagcacttgtagattgaaggaatcaaactaggttccaaagaaagaacttggactttggagtggacctgggctagaatattggctctctgtgtgtaataatgggcaggtcaggtaacatttctggccttgattgtcttacctgaaaagggctgtaacacctctactagaggcactcagcagatggcagctctcttctgtgtcatacctttcccaagggctgtggactgtaagaccaggatatttccctgggacagctcttctgcactgacttttcctgtatggtcttttgctacagattcctttgctcttaaaggcttattgtcttttttttttttttttttttttttgagacagagtcttgctctgtcgcccaggctagagtgcagtggtgtgatctcagctcctggattcaacctctgcctcctgggttcaagccattctcctgctttagcctcccgagtagctgggattacaggtgcctgccaccacacccagctaattttttttatttttagtagagacggggtttcaccatgctggccaggctggtcttgaaatcccgacttcatcatccacccacctcagcctcccaaagtgctgggattacaggcgtgagccaccgtgcccagcgtctttttgcattactaacttggtggaggcacatggaacgcttactcaacaacccaacaggcatatagattcttcttgatatagaaaagagtttgcctttcttctgcacagaaaaatatcccagcagctaaaacccaaccatcttgtacaatgtccttacttgctggacttaacagagttccctccagtgccctgtggcctgttgaatgagtaaggcagtgttcgtgggtagagcacaagataggatgggaatcacaaggccaggctcctgccaccaaattgatacgtggaaatgaggccaagccagttctcttctctcaacctcagttcctcagtttccttttatgttaaatcggggcattgaatgaaatggtctttaaggctcttccaggacaaaattattataatttgaaaagtatgaaagatctgtcacctgcaactattattttttgatcatacattttctgttcattagctttgagatggtccacagacttctaagctaatgctttatcgatgaaatcagctcctttcttcctgcttttcctgagctctgtcctccccacccccaccctccactctctttctcagagaataagaggtggctttcacagcagctggttaatttccctggtttcacactactgtttaatgatccgtttctcgtgtgccacctctctcatctacggaaagataggtacaaattgtacctataaaaattagaatattattcagggttatcttttttctttcaaaattttcaacctcaaaataactttccgatatttgttttccttcacaagttctttgaaatatgttgaggtctttgacaccctctgttttcagatgctgagagagtagatgcctttaatattctcagttgtattcaaagcatagcagttgaatccctgggaggtatcagccctggaactggaccagagtatgaagcatgtgggcaaggttgggcttgctggttcctcagtctcccaggaagtccttggtactgttttgtgtctggttctaccagcggaggccctatcccagtgggtgaggatgtctgtgtggaagtccttacttaagaaagacctgagaaattgattgcttgtaaaatggagtcactaaacaagggcttacagaaggagagtttctgaacacccccattaataaagactttttttgcttttagtaaaacagtgctgcataaagaacggtggccttaggattaggcatccttaggatcaaacgctagctttgccacttactaactaacacatggaagtctcttattttctctgggacttggttcctcagctgttaaatgaaggcgttggactcgatgtctgtcccagttcttccccaatgaggttgaggctcactgctgggatttaggaggtgtgtgtgcacacacatgtgctctgtctgtctgcttgtccataaggaagtgcagaatctggacaggaaaaatgaagaagacggacttgatttcctgctgacattttcctctgagccagtcagatcagtcagctgcactggactccatgggaccagtcttcatacctgtgattgtctgcttagtggaaggtctaaatgtggtaatacaaatgaattggccattaccggcgagacaaatcctgataatacagttaggaactgtcagaggaatccgccaaagaaacaagagcaaagcttgtaggggcagcctacttccaaatatcccagttctaacagtagagaaacctttgcccgaggtgatactgtggggcagggtttgaaggagccttctccaccacttatagctgctggattgtaaaggttattttggtttgtgttttaaaaggaaagctatttgcactcatgccatacactgtggttgttctttaacactgccttggcaagcagaggagttttcaggaaggacgttagcaagaagggttatagattttggctgttttaggaagacgcagtctttcaattacatttaaaaagcaccagaaatggaacacttgtttttatagacgtaatcggatttggactggactgtggtgtggcgagactcatcctggaggttacaaggagacagaggaggatccttttgggaggtcagagggcacagcagcaggaaccaggcctccctgcctgtatttttcccaaggtctcttgtattcccccagtccaacaaccacattcggcacactcactcacacacacatgtggtgtcccatttggtttaacagttcaaattcatataggaactttcaatttgaaattcagctctgtgggtgatcttttggggcggagaatatttcaacataatctaatggaatgaaataattttctgttttattactagactccaaaacaaaggatctggcgtctggtgcccacacctctgtaatcagtgcatgacaggagagacagcgtagcctagtgattaactctggtgtccctggagtcaggaatccctcttcccactccctgcttctgcccttctcacgtggtcttgggtgagtcattcaccctttctcaacctgaacctctccttctatgaaaacaataaaactgatcattgataataatagtaatacctcaaagggctatagaaagaattcaatgaggtcacatatgcaaagagctcagagcagcacctaacagtaattacccaacccatgttagacattattgttgttattattgttgtgtttttaatacttagcctttctgactcttgttttcttacctgaaatgtgaaagagttgaactaggtgatctgaaaactcctctatctccaaagcttactaaaatattgatgtaaaatagggactatatagaagtattttaaacaaattggcatgaacataatatcaacaaatcactatgcactttctgcattaattgcatagaaatgaaatttttctttccaaagaaactgtatatccagaagaagaaaacattgggaagccaacaactttttttatatattattacgaaatttttggtgcatttcttttaacaaaatagcttattgatttatgtgaagggaaaaaggggaatatttctgtctactttaattttctctgatttttttgttgagtagcaataatgtattttatcttgtataatctttcaaaagccttcacgtttttaacaagatcttacagctgtttatatgttatactgaaatataatattgactaagctgacatatatattaaaaagcaaccaaggaataaagggtattgttttggtatataaatcaaaaataatacagcaactggtctttcagtgattaaagctgcctttccctttaataactctcctaagaaacaggaaatgtaatttccctacacctttcctggggctctccaatcagctaggtcctctgggggttccctactgtatattccttcatcaacaaggagtcccccaaggggcccacacacactctgttaaaattagctgtgctccacattagtgacgggagctgagtattcctcagaggggtacacagttgtatggtgctgcttcctgtttgagcaaaatcatatctttaattgcagagaatttttttcattacctgttaattgataaatcatgcttgctcctgctgctgtggcttgtgtagcaaacctggtcatggagccgtctccagcccaacccccatcatccttccaacccaaacaaaaaggaaaagaaacattatggccagagaaggaaaacaagcaggttggatttctgggcagtagcctcaaggagttgcattaaaacaaaacaaagacatacacacacacacacacacacacacacacacacacgtatacatatacatgtatgtatgtgtacatatataaaataaggtaaagaagccatttaaaatgtttctcttttctttccccctccttttgtcattcttgtccttttattcatgtttctaatctgggtagcaagaggccactgtcttggcaagaacagtaaaaatcctgagtatagtgaaataatttagctgataattccccactgtataattttctacgcttcctgctagctgaccttgtgggctcctgtcaagttgctaagggaaatccagcaggactccagctcagttcctttacttttaagaagtattacaggatagagtggtgtgtttgtggcagcttagttatggggccgtacattctgtgtttgatcaaatagcactaagcaccccctccccaccacttgcttggatcttctcctcccacccctctttttgtggtagctggaagatggagaaattgctgcaaagtgttgagctggaatcatgagcttgatggatgtcatcagaatgtgcctggatcccttggggcgtggccaggggaggaggctggccaaactgaagacatctaatggagccttttatctcagagatgtcagtcttagtccagattgggatggagtgaaaagctgcaaccgctgcaataaaaattgttttggagttggaacacatcacccccaattccttgctgtctgaagtccgcttcccacatccccagtcttgctgggctacatcagatgcagtttgggcaggtagtagaaggcagagtaagcagatgggaatattgtctttatcataatgttcacagaccaggcaaaagttaccctgctcattaggaatgggacacaatacaccattgatttgtgtccaagtaattcccaggtaattataggccatcgatctaactgagcagtagctatggtggttatattctgcaaatctcatgttgcctcacacctggtgactgcagcgccattacatnnnnnnnnnnnnnnnnnnnnnnnnnnnnnnnnnnnnnnnnnnnnnnnnnnnnnngatctagaacagtttcctccttaagcttcctttggccacagggatgtgtggagactgtgggatggttccagaagtctttaggaagcctgatgacttgtacttgcagccactctgcaagccttgttctttaaaattccgtctgttaggatacaagaggtaaggcagcttcctgtttgtagttgctgtttataggccgccagcagtaagacaggaattgcatcagctggctggttttgtgtctcagctgtcaccaaaagagtgtagtaatattcctgattaaatgtcattactctgtggcacaaaaatgggaacactgacatgattttggatctgttcctgttaaaattcagccctagtagcaaattatgtctgctatggattaaacacagctatttttgagctatattctattgcaggctcagaatttttatcaataagtctacacattatacccattgattccctcaggcctttaactaaaacattaaaaaaaaagagaccctaagtaatagaatgttgaaaactattgttcaatcagcagctgctgtcgactcaaaataatgtggttaatgtcctagattaaaataaattgatgataataaagttgatttggtaacaggaggtaaaactatagtgtgagaaaataaagtttatttttgtatgcattgttgcatatatggatatgtttagatacacaatagtctccattacctaggaagaatttattacttgtatcataattatcttttagtggcttatatgtctataatcagatgataaatggttatgtgggtgaaagagaaaagaaagtgaggtcttaaagaatttgaaaagtcaattctaaggaaatagtcacagattgttacttcttgccagaattaaaattacatcattgccaaatcttagcctcaagaaaatgaactgtaaaacctgctcatttgtccacttccagttcctttagctgattacaagctcatagccagatgggagcaaacagaagtagtgaggggagacatttgactcttaaccacaaatgcacgtagaatctatattaggccatgttaatacattcatctagattaggataataaattcaactgcatttgacaatactggtagatggtattatttattgaactctaccaagagaccttgaaatggaatatatgaagctgcttcctcaattgtaggtactgtgtccactgacctggcatttagcagataatgtgatatcactgactaagcggcaattaggaaacctaccaagaccgcccatccaacagaccaacacaccttttgcttcgggaactcagctgatgccgcacacatgtcctgctgttgaataggttccactctcagatcggggcagacggtagaatttatgctcccgtttggcatctgtatgtttccagatcggggctttgtctcctcctcttgctagataagttgaaacattgacaggcagcgcgttcctttttctccccttttattacagtaatttataagatattttagctaacaggagaacggcccaagggggcattctcatgttaattaccaaatgtgggcttgtcaaaatcaaatagctccaggaataatgcaagtagctctgcatcattatattgtttggccctcaacccaatattagctactttttaaaatctgggttcattaggcttttaaatttaaaagaggaatcactactgggagccttcagaagaatgtaaagcacagccagcagtgccagagtttaatgtaaatgacattaaaaaatagtttcatatcacatactcagggaaacataaaacaaaacaaaacaaaattgtgcctgaaattaaagtatttatttttctctttactagcagtctgaaatggaagacagtgtttaatagatgattatttcaggagtgtgcagttgctcatgttttattcctaaacatcctaccatttattgcagtcatcaagttagtgactccaaggaaatggaaaaagttagaagttataaaacactagtctgcttagaagatacagtaggtggaaatgtaggattctttgttgaggagcatatcctaaaagttattcaaagatttgtagtttgtgatgaagatccttttcccagaaaaatgttcccagtactcccgtttcacaccatcactcaagtagctgcccctttcatcactgtttttatctggcttaccttgataacctcctttttctgactttgggatctcttgtgcctttaagtccagaatcttgggtagggagaggcaaataagtatgtgtaacttgtaaaaaatcctttctttctagcttctgccatgctcttggctgcatacaggagtaaaagtagatggaattggcgacaatgtcaatgaaggacataagtaaacagctggtgatgtcaacaagaagttaaaagtaagatttgctacactaaactacaatgtggaataatcctctggtgtataatcaagagttcactatatatacaagtgagaattagagaagtgtgaactattaaaatattaactagaggatattactatagaggttgtggtgaatcagagcttgaagattcacctcccgatgtttactgaacaagcatttattcagcacctactatgtacaaggctctgggctagatacgagggatataaagacaaatgcaacacagtggttttctaaaggagcttgggtcaaatttggcaccagacatgcaaatgaatatttatgtcatgatagatatttgtcttaggaaagctaggtaccatgatcaactggagcacaggaaaaagtatttgacaaggactgcctgggaagcttaggggacacttcgttaggaagagaactccctaactaatattcgaagaatgagctggaatttgcaaggccaaggaaggattttcctgtgtgtacaaaacttcttgggaaaattgtacgtgggatgaatggaatgaaatgatccagggtggacagagaaatggagccttaccagaccatcaagaaccttgtatgccatgccaaggactttaagttttatcttgcagcccatggttttcttgatgaaatttgagcatgagggtgatatgttcagattttcttgtaacagggtcattctggcatcagagtggattgagggcactgttggaagccacaggagcagtaagaagcaatcttctctttctcatgctttcttccctttggttctctgtggctgctaccaaacttttctgattacactattcattttccacataagtataccatggagactctccaatcggaaaaaaagatatattttggattgtgtaggattgattgattgattgattgattgattgattgatttttagagacaggatctcattctttcacccaggctggagtgcagtggtgtgatcataacccacttcagcctcaaactgctgggctccagtgatcctcccacctcagcctcccaagtagctgggactacaggcatgcaccacaacacctggctaattattgaattttttgtagagatggggtctcgctatgttgcccaggcctatctccaactcctagccttaaggaatcatctcacctcagcttcccaaagtgctgggataacaagtgtgagccatagtgcctgggctggatttatttctaatgaataaactttcttaaagcagttttagttttacaaaagagtttaacagaaagtaccatttccatattgtttttcccccatgactttattctcccatcattaacatcttgcagtggtatggtacatttgctacaattgatgaaccaataatgatacattaaagttcacggtttatattagggttcactctgttttgcacagttctatagattttgcatatcatgtgtccacaattatagtatcttacagaatagtttcactgcccaaaaaattttctttgttctatctactcatccctctgctccttcccctgaagccctagtaactactgatattttttttactgtctccatagttttgccttttgcagaatgtcatatacttggaataatacaggatgtagcttttcagactggcttcttttacttacaatatgcatttgagattcatccatgtgtttcatgacttgatagctcatttctttctattgctgcataatattccattaaattggcataccacacttcatttattcatttatctattgaaagacatcttagttgttgcttccagtttgggcagttataactaaagctgctgtaaacattcgtgtgcaggtttttgtgtggacatacattttcaaatcatttggggaaatacctaggagctcaattgctgaaataatatgttaatattatgcttagctttataagaaagctccaaactgtctttcagtgaggcagtataattttgtattcccaccacaataaatgggggtttctgtggctcagcatcattgccagcatttggttttgtcagtgtttcggaaatcagtcattctgacaggtacagagtgctatctcatcattatttttgttcacaattcactaatgacacatgatgcagagcatctttttatgtacctatttgccatctgtgtatcttcttcggtgaagtgtccagatcataccccccaccccgccactttctaattgagttgtttgttttctaattactggatcttaagactattacatattttagatacaagtcctttatcagacatgtgtttgcaaatatattctctcattatatagcttatcttttcaatctcctaatattgtcttttgcagagcagaagtttttaacttcaatgaagcttatcttcttgaattttctttcatggatcatgcttttagtgttctatctaaaaatttattgccaaacacccggtacctagattttcctgttgtcttctagaagttttgattttgtactttacatttagtctatgatccatcttgagttagtttttgtgaaatgtgtaagatctgtgtctagaaatctagacacagattaattattaataataataattattattattattattattccgtgtgaaagtctagttctagcatcatttgtttaggaaattatactttcaccattagattacccttgcttctttgtccaagatcagttgactatatttgtgtgaatcaattcagggctctctattctgcttcattgattcatttgtctgtcctttcactaataccatactatcttgatttctgtagttttataataggtcttgaagttgagtggcattagttctctgattttgctcttcttcagtatcattttggctattctggttcttttgccttttgtataaactatagaatctttttgtcaatatccacaaaaataacatgctggaatttagattgggattgtgttaaatttattggtcaagttgggaagaattgacatcttaacaatattgagttgttctatccattaacatgaaatatgtttccatttatgttgatctttttaaatctcttgcatcagagttttgtagtttatctcatatagaccttgtacatatatcattaggtctatacgtaggtatttaaattttttgaaattaatatgaatgatgtgttctcaatttcaaattcttattgctcattgcttgtatgtaagactgcagttgacttgtatattaaccttgtatcttgcaacattgctgtaattgcttattagttccaggattttcttcgttgtggttgattctctgggattttctacataggcaatcacgtattctgtaaacaaagttttaatgtctttttttccagtctgtatattttttatctttttcttatatcagctacaactttcagtatgatattgaaagggaatgttgagaggagacatctttgccttgtttcagatcttagagggaaagcttctagcttcttaccactggtatgatgttagttatagatttttgtagatattcttcatgaaattgaagcagttaccccctattgctagttttgtcagagtttttatcatgaatggatgttggattttgtcaaattctttttttgtatctgttgatacgattttttttttctttagtctcttgacatgatagattacatcaactgattttcaaatgttgaacttgccttgcatacctagaagaatcccactgggtcatacggtataattgttttatgtattgttggattcaatttgctaatattttattgagaatatttttcatctgtgttcatgaggcatagtggtctattgttttcctttcttgtaatgtctttgtctggtttctgtattaggtaaaggctggcatcatagaatgagttgggaaatgttctctctgattctgttttctgaaacaaattttagagaattggtgtcatttgtttcttcgatgtttgatacatttcactattttccattatccattatttattttcttttccacagagaccaaatcaaccaagtctgttttggattgggttaatttttttgttttaatttatttttctttaatacatgtactcttaaactcacaaacatgactataaaacagtccgtgcatgctctccaaaagcaaaattattataagtgattaccacacttgaaatgtacatatattctcttaatgcaatcaatattttccaaaactcaaatttctgaatataaattcatatttgttggctcctttccaaatcattctggatcgtatctttttttaggtctttttctaaaacattattgtgtttttgattaggcaagttgcataaattctcctttttcctcagtttccttttttaacaaaagcattaataatagtacctaacatcctaaagttattatttccattatttgaatgagttaatacatgtagaggatgtagatctatgctgggcatatagtaagtgcttaataaaatttagccattgttaatattaatgctattactctgctaggaagtctctatgtcggtcctctttatcccactctgtatcttgtcctactactgtcacctacagatcaaaatctaaatcccctattttaaagttcaggaccttcaacaacctgacctttatatccattgtaaggtttttgttatctacccacacaaaaatctccttttcaaactgattatttcacttcccccaaacagcttccacatcatatttcctccctcaattgcatcccccagcccaatcactcattaatagtatggcgtgtctttgtatttaaagtatagctttgcaacatttgtcaatctgagctttattaaagtattccccaccaataatacaaacccatgatgtttttagatctggcacagaccttatgagtcacttggcccaaatgaataaaccaagtcctggagaggtcagatggcttatccaagtttatggtgctggaggctatcagactaagatgtcctttcctgcagtgccaaaaaatacaagtgcagtaattacaataatttaattctttggtttttttaatttttaattttgtgttacattccaaataacacattaatcactgtaggtattagaagtagaattttctcctgatttccaagatttatcttattgtgcttatctctaatgtaggaaattttaaagtataaaaagacttttatccacttaaatagatatttctagaatggttgtatgtggctcctattcagtcctttaatagtccccaggaggtaaacgttattcatgagtgactttacttacttcacaaaacagagctgcttcttcagttgaataaagatttttaaatatgacacaggtacagagaaggaagtaaatatctgtataactaattgaaactacagagggaatagaaaaacagaatgttgttattaataatccctctttttatgtggaataaactattcatttgaggaactagaacacagagtagatattgcttcatttaaatttataatattactgtgtagaatgtaagcataatatcaatagcctgacttcatttatgagtttgcaacttaaaaagttagatgctggagaaggaaagaaggatattttctggtcaatttaattgggaaaaaagtgttgagaaaccaaagattgcttgtgagacctgtttaggggttagagaaaattgctcgtgtattaccatgtggtctgtgtcaccaggtagtcgaatccactttcaagttttcaaggttattcattcctgtgagatgtcctagaggagtctatccagtttcttgaggctcttcctaggatccaaattcctaactaaaaactgtataaaggcaaacataacatttatgaggaccattgaaggggaatatggtgcacaaatattctgacgccaaaaagcttgctacaactagaaatagaatgtcagataaaatatacaatttcctaacttcatacttgagtaatggccaaattcttgcaaaatgtggactaatatccacattaaaacttaaagtgccagccactactggatagcaagcaagtttatttcttggaaataatagcaaaaccacaaccaaatcatacctttctgcttatagtatttaaaaaaaaaaaaagcagttttgaaaactaaatctatcctggagaaattccctagagaaagtgcatgacaccattacacatacatacacacacgcacacacacacaccattagtgcccacttattggatgccacatagtcaaagagatagctgatgcaatcctactaacccataatcaaacttgtttaatacacacaacatacacacacacatatacacatacacacacaagacctattcaagatggtttaccaattactgtttcattttaggaagagagattaaaccacaaattgaacatgaggtatgtcttgatatctgttagtattgggcctaattttcttaatatgaatagactgttttgaaatttattgttaatcaaacagttctataaactgaaaagtgtaaaatgccaaactgttgaattgaatcaaagacctcatttcattcaatcaataaattagataaatataagactaatgttcaacaatggattattgtctatcatattcccatgtggctagataagattcaaatttcactgaaaataaaaacagaagaaaatccaccgtttcctttgaggtataaactgctagatttatgggatcaaatattatgtggagggtgaatttatacctccaggatactatcggatccatgcatactctttgaggtacttgtagtagacacataatatcaactaattgaaatcacttttatatatactgtgctcataaatggtgtccaggaaattttggttgaatgttttaacataatgccataataacacttccataagcaatataaaactacttgaagtagaactagttgttactgtgagcatagcttggatttatatagctcaaaacatttgcacatatatctttctaacacctatggtttaaaatcaggagctttggaagctgtatcaacactgttagaggagtgtatttgacatagatgttaatttgtttggaacaaaatatctctgcttatttgatgtaacttaaatagatagaatttttactagcattttaactgtcagcacagttaagtcatttatttgtttctccaattgaaaataagataaagtttgcacaacacaagaacagcaatacgacaaaaatggagaaggaaatctgagtaagagttaaggacaagaaaagggggaaatgttcagtacaaataaaagaagcaaaaaataaaggatggctctgaaattagcttatatttacactgtaaattcataaaggcactctcaattcttcaacttttatcatttcaccaaatgatctgcttatgaaaagcagtcaattgccatgactttattcatgtattacttagtttctgaagcaggacccagtggccagtaagctaaggagaaaaaatgaagcaggactgcagctgttgttaaaaataaaaggtatacaaaattagggtagttactttagttcttccccacctcctcctcatcctgtatctcttcacagatccttctacttgttgatgggtacagaaaggggaacagaagaaaaacttacccagttacaaataaaagatgactagagatttttgctctcctcgctcttgcagttgaaaataatagaaatttagagaaaagagcattctgtcggcttcttgttttcataagaaagctgagatccataaatgatccatcacttaacgcaggctccaagcagcactggggccaggacacagatttcttggctcccagtcccgcaagtatatctctacaagatactggaatgatggcttatggaaataacaatcagtcgagtgaatttgaattgtttacaaagctaaaggtgatgatttatcaaaaaggttaaagaagggatcatttctttcatgagaagatcttttaaaaaatcctctatcatccaaaccagcatctggcaaaaatgtttctaaattctgagaaccccaaaccattagtaactaaatatggaattcatgtttcttatagaaagcacattaggtcaaggtaggtcaaggttatattagaaagtgtatttttatgaatgttaatacgcactttaaagtgcactggagtcctctgtaaaatcactgcatacagtctactctccctcccttccctctgcaaggaaactggagaatgcaacaaccaaggctcagggttgtgattgaggagacttgcaactcagtttcttcctttacagtgaatagttgcatcacctaggttaatctctttactatcaggaaatgaggagattgcttgaaggtactttagctctaaaggtttttgacttggaaaacattaatcttatttcacggaattatttcaattgactgaggaggtttgtcactttcccttttgtccttatgtcattttctttatcatttctgtgttttcttttaaactgagtcttgactcagtattttagtccccagtaatgccattgtgactatggaaaaaatatagcatgctttacaacagttccctgacgatgtggtctgtaagtgaatctttgaggcaaaaacaaaacaaaacagtgtttgcttctcttacttctttgttctaataattatctgtacttacaaatgactcatataatgagtcatttgtaagtacagataattattagacatctctgtaataatcttccaaatcccaaatagaggaatgtctagtttatatttttaatatttggtataatggtcaccacttacagtagatctagcttaagaagcagatagaatctcatcctaagttaagggctctatatttgaccaaaccaaaacacctgtgactggctgagtgcgtgtgaattacaccttccccactgccacactggaccaagtttcatgtcccattctgtaagctagttcctgatgtttttttctctccttcctttttttcatcatgatctaaaacttgtcagtttctattctttctttgataatacttatactacaagttaccaattttttctgtgccacccacaaccaaaatttatttcttttcttcacattcacaagctaccttcattccaatcagagggagaagtgagacattaaatttcttaactgcttcatcagtaatagatcaacattcaggtccataaaaagtggagataaatctatattagaaattcactttacttcttgaatatattctaaaagtcactcacttatttgataggatatatgtaattctagattttacattggggcttgtttttaaataaatattagacatttccaggtagaatataattttaggtacaatattcagaatatagtatatacttaaaaccatgaaaataccaaaaattataacttaaattatctgaatgttcatgacactctgtcacttgacagttacctatttttcagatatttttctgtacatctccttcagggattttagtcataggtatattagccacttgaaattgtcccacagttcattgatactttgttcattttttttcactaccttgtctctctgtttcattttggatagtttctgttgctctgtctttaatttgctaatcttttcttctgtaatgtctaatctgctgttaaatccatctgtatttttcatctcttcaagttcaatatggatctttttatctctttcatgtccctattgaacaccttcagtgtttcttctatgtcttgaatacacagaaatgtagttatagcttttttaatgtctttttctactaattttatcatgtgtcatttctgtgtcagttaatattgattgattttttgctttgccctatgtgttgcattttcctgcttctttacgtgtttggtgatttttcattggatgccagacattgtgaattttaccttgctgggtactggatatttttgtatttatataactactcttgagctttgttttgggaagcagttaagttaagtttgtaatagtttgatcctttgaggccttatttatatttggggggaggagttgcagagcaacctttaatttagggctaatttttccgcactactgatgcaacacccttctgcatactctacccagtactttctcctctcagagcccctcctgttgttccttcactgtccccctccagtggtggggaaggggatggtggtcactctgctgggtgctttctacttccacatgcagttatttcatgtcatctaacacttttttaagactttctggctgggtgctgtggctcatgactgtaatcccagcactttgagaggccaaggagggcagatcgcaaggtcaggagtttgagaccagcctggccaacatggtgaaaccccgtctctactgaaaatgcaaaaattagccaggcatggtggcaggtgcctgtagtcacagctgctcgaggctgaggcaggagaattgcttgaacctgggaggcggaggttgcagtgagctgagatcgcgggcaacagagcgagactttgtctcaaaaaaaaaaaaaaaaaggaagaagaagaagaaggctgggcgcggtggctactcgggaggctgaggcaggagaatggcgtgaacctgggaggcggagtttgcagtgagccgagatggcaccactgcactccagcctgggagacagagcgagactctgtctcaaaaaaaaaaaaaaaaaaaatactccttcttccctttcactctattatttaggggttaaggaaaaacaaattcagtattatttttttgttttggatttttctccaaaaacttcttgaccaaactatgaaatttactactgagaaagataaacttgagagcatagatgacccatgacctgaaccaggtttcttaccaccttcctgaacagcaggtctatgctgtgttgcccccactgccagtgtcttactgcagagtgaaggtgaaagtgactgtaatgagaaaagactgcttcaaaagtgagaagaagggagccaaggtatttgttcacagatcagtttttaattctaaaggggttgatctgtttattacagtaataagaataagaaaaggaaaataattttatttgatttttattccttttttttatatctatcaatgtcccttttagtatactcatgtggctgactgaattatggttataggccagtcctactaggtttttttgtttgtttgtttgtttgtggtttttttttttgtttgtttgttttagatggagttttgctcttgttgcccagcctggagtgcagtggtgggatctcagctcaatgcaacctctgcttccagattcaagtgattcacctgcctcagcctcccaagtagctgggactacaggcgcatgccaccacacccagctaatttttcgtatttttagtagagatggggtttcatcgtgttggccaggctggtcttgaactcctgacctcgggtgatctgcccaccttggcctcccaaagtgctgggattacaggtgtgagccaccatgcctggcctgatcctacaagttttataaaatctgtttaaggggttgatattaaggttatgctgacctcataagaggaatttctgaagagtttaagataggtgttattttttccataaatgcttgttagaattcaccaatgaaaccatctgatctggaattgtgtctacctttcttccttccttttttaataagttcaatttctttaatagacaaaaaaggctgttcagattttctgtttaattttgtgtcaaatttgttggcataaaattgtaatattctcttattggcctttaaatatctataggattaatagtgccacttattcgttcctgataatttgatatactgataatttgtactgtcttttcttccaatcagtttagctaagtttgtcaattctgcagatgttttcaaatgatcaattttcttattttattaacttttccatggtttattttgtatttcattgatttctatttttatctttattgtttcttttcttatactgatttacgtttaatttacccttctttttctagcttcttaaggtaaaacttaagtcattagttttagacaattttatgtttctaatacaagcatctgtatctcttaaatttctttctaaaaaatgtgttagctgcatcccgtaaattttaaaatattaaattttcagtatctttcctttcaaagtatattctaatttcccttgtgatttctttttggacccatggattatttttttaattttaattttttaattttaatttcccaatatttgaggttttcctagatatctaattgttactcatttctaatttaattccatatgaatagagagcatactctgtgtgattttaattctattaaatttattgatacttgttctatgggtgaacatatggtcaatcttgatgaatgtattatgtgcacttgaaaacagtatgcattctgcagatgttgagtataatgttctgtagctatcaattaggtcaaggtggttgagagtgttgttgaaatcatcatctatgtgtctagtcattggcgggggcagggagctagtgttctatcaattgctaaggcaggcattcaaatatttatatgtgattataagattgtctttttaattgctaagagacgttcaaatatccataattgttaagattatctttttttcattatattctgtccgtttttgccttatatattttgaaactcttcttaggtgcatacacatttatgtctgttatattttccagagcagttggcttattttgcattatgaaatatctctttttatctctggcaatatgatcttgaagtctgatattaatatagcccctctagcattctcatgcttactgtattcgtagtatgtatttgttccatccatttgctttcaacttctctttattgttaatgtgtatctcttatagacatcatatagttggagcttccatttttattcattctgacaatctttcttttaattagtgttcagtacattataatgtgatgtaattattaatgtggttagatttaggcctcccatgtctttgctatttgcctcatttttttgagtcatttcttccttttcttcccccttttggactttctgaatagtttttataattccattatcatttatttgtaggcatttcagctatatccctttgccttattattttagtggttgttgtagggattttaatatatataattaactttcacagtctccttagagttaatatcttaccactttatttttattaaatgtagacactttgtaaccatatgtcaatctgtgatatagatttcatatgtattatgtctacataggtaataaaccccataagataatgctataattttttgctctaagtaatcatacatttgttaaagaaattaaaaagaaaaataattatttaatgtatactagatatttactgtttatgttgctcttaattcttccctgaagacccaagctttcatctggtctaatatcccatcagtctgaagaagaactctttatagttcagttctgctaaagataaattctcttagtttttcttatatggaaatattttaatttcaccttccttcttgaaggatattctttattggatataaaattataggttgacagatttctgtagtattttaataccttaaaggcattagtctgctgtcttctgagatctattgactctagtgagaagacagaaatcattcaaatcattgttttgctctgtgtaatatgcttttatgagtttggggtttgtttttgttttctatttggggagaggttttttgttttgttttttcctgcttttaaaatgttccctttgtattgcttttgaactatttgactaggatatgcttatgtggttttcttatacttttccttcttggagtttgcgagattcatgagtctgtagagttgtatctttcactaaatttgggacattttgccattattttttaaactattattttttcccgttttctttctcacattaaaactacagttacccatgtgttgatattatcctactggttattgaggctctgttcatttctcttgagttatttctattagtctattttcacattcattgactttttcctttatcatattcattaaggtgttaagcccatacagggattattttatttcaaaaattataattttcagtttaagaatttccatttgatacccttttataggctatttttcctcttttgtgatttcctatgttttcattcatgaagaatatattttcctttatatcattaagcatagttataatagctgctttaaaatccttggatgctagttctaacatctaagttaattgtcttttctcttaaaaataggtcacattgtctattttctttgtaaattgtatcttggacattgtaagtgttatgttgtggatacgatggattctgatacattcttccagaggaggctgatatttttgttttagcagacaggtacctctattgaactcagactgcaaaccatcatttggaccgtagctcaaatgtcagcactctctctatttatatagagagagagagtgagggaaaacactagaaaggaaagagcttggtagagatggggaaacacatactgtatacaaactcttcataaatccctgaccaaattctgaaccatacaagagcaggactgactggaagcaatctaattaaggatttgtgtgtgtgtgtgtgtgtgtgtgtgtgtgtatatatatgtgtgtgtgtgtgtgtgtatatatatgtgtgtgtgtgtatgtatgtatatgtgtgtgtgtatatatatacgtatatatacatatatacatatatatgtgtatatatacgtatatatatacatatatatacgtatatatacacatatatatatacgtatatatatatatacgtatatatatatgtaacagattttccccttactttccagtggctatgcttgccccaaattatgttttctagttcttcaagtcagacataactgaagctttctattggagtactgacatccacatgcgtataaaatatgttttttttaaaaaggaggaaattcatcttgtgttattcccttcttcatccaagtgttgactctccagactctgcctgcttttattcacatgctaatgccttcaggttgatgattgtttgtcttttgtctgaaatttatagtagttatctgcaagaggtttgctctagtaggagtttattctgccaatccaagtggcactcccattccacaaggtttagtgtgtagggtgatcctagagaatgtggagatttaatgtactctaaatataattttaaaccatgtttaaggggttaccttttgttagtttttgtagtttgtttatttttaaataaactgattcccagaatggccctcagttggagtctcactcaaccccaatgcaacccattatctaaatctaaccaccaccttccaaagaacccactttctcattctaacccaccttctccaatcaactccttgtctttttctcaccctggattctattccaatggcagttcagattgcccctgatcatttagcacagcttctgggtagggccactgataagagcattttcttcttcctggagtgcctaaaactcttagcagctgagttctacagtgctccagtgccacaggagaataccatcacaacagatcgcttcagtcacccattgttcttgagccaccctggtcactgaaagttccagaataaaaatgtcattttattcaaatatttggtctttttaccaccttaaccctaagtgcttatctctattaatatactgctttgaatattaggttgtctaggccaggatagctagagcattattgaggttttcctggcggagaaattgaggtcaagctctttgtaaactcactggagtcaggccctgcctcaaagcaagctgtggctgaatagacaaccagccttgagcagcctcaactccctcaaaacccactcccctgaggaagacaggagattggggcttgaacattcatcactgaatgacttttttgttagtaatttagtaactctgttttcttaagtatgtaatggagactgtaatacacagaacacaactgcttcacaggaatgtaatgtgaattcatgatatgagaatgggaagcattataagttactgagaagacaaatctaaacatgcatgttacttttatttattatttagagagtctttactatataatactttatgaacagaaaagcccatgattcatgccctgccataggtataagaaccagctaatgaaaagtgccattgattttctttttctgtttttttttattcgttaaatttaaaggggaaaagagatacattaaattccaattctaataatagcccccaatggggactaagtggctaagacaatgggaaaaaagacctttcagcagtaggatttgctttgagcctaaatgaagtctgccatgatcgtattatttagtgaaatgaaatcatggaaagaagttgatgacttctggtcagccctcaaagaataagtgtcagatccccaaattatgtccacggtagtaattaagcttcactctctgcagagagccctcagtgacttaagaggcagtgcttttgagaatcccagactatagatttccagttattcaagtaacaaatggatgccttcactgtcttttctactcccttccattggcatagaaagggaccctgaattcagcttttgtgtgttaataggacaccattagaaaacagcaaatttataaaggaaaacaatattcataggaaaaaaaataaaacaagaatttacaaaaggaatattagcaaagaacaataaactacgttgcacatacattttctgaagcaggagctgacacttttaatgaaaacttctgtgacatccttgaggcatttctgaagaaccagagtacttgtaattaattgtattaatcacaaagactaaatttatccttagcttctatagtgtgttaaggatagagatgtttacccaagaagaaagctaacatggcattctcctatgcggatgtaattttcacttgacagagtgagtatttgtgtggtaggtgtttgcttttcatttacccacttagagttttttcatccttttggaaatttattgatttatttcgtggagtgcagagaggaggaaaagaaaaggactatgatttgtgacaagtgtacttcctgagtgaaatacttatttatcctgcccactatgctattctctccatcatctcttatcagttagtctttgtatattataaaccagaaatctaagacctcattaacctcacaatttgtcaacaaattataacagctgtaatttttaaaaatatagacctcagttttccccaatttgacctctaaagaattgcattttgaccactcctatcaaaaatatggagtagggggaaatttgtaatctcttggtataaaaatgacatcctcttttccaccagtattgcagcattggaaagcaggcatgaaaggtttgcactgtggatatctatatcccatcttgccaaaggataaataaagggcattcattcatcagctttcaagctgccaccctcttttctttcccccaacccccacccctccctgaaattgggaggagggagattctgattatttttgcctatttctagcagagctaggcatgaacaattaaatttagggcttccctgtggtctgtgaataacagtgcacagtgctaaccatgagggcacaaggcagaaaacaaaaaaaaaggcttttttattttttgtttacccttcaggacactgtttaccttatcactgaagggaaagttatcatctcatctttttaggaaattgtactgggtttattctctagtttccagtctcaaactgtccagtgatagagtgagtatgtcagcctggggctagaagatttctgtaaggccctgctctctcccccgtctctgtgtgtgtgtgtgtgtgtgtgtgtgtgtgtgtgtgtgtgtgtgtgtgtgtgtgtgtccgtccgtccgtccttcggtctgcctgcctgtctgtctgtctcaggcatttgctgtctctagcacactcccacttcctcgttctctccacgctatctcattcccttttccttgatttttctgtcaaacctttttctttttctgcctttcaaccagaatgattttttcccttttctccctctctaaatttacttcacagcagattgtcttgtagtaaatcaccaaaaacctaaatagcactaaagcattctgatacaacattagcatttgcttaacaagcacaagataaacattaaacaaagaactgcatttctttattagaggctgcaagatacataatccatgagcacaagaaacatgggacccagtggatatgcagatgtgtgttatttcattggcgctgggcggccttgttagaaaaggttttcatctgaaggcttgggggtggatggttgactgtccctggtggggctgtaactagatacagagactgttgcaagctaggctgggctccctggtggacctgctgattggacagcctgaggaaaacttgggaagcatcgggaagtgaactcaatcaccttggggatgatagggtagagccagatgaaggcatttgacttcttttgtaactcccactaaggacagattgccagtgcgatccagcctccataactgcaaatcaggccctttccccatgccgatttcattagaatggccagcatggtgcaaagaggaaaaaaaaaaaaaggttagacacagtaattttacaggcaggcgggtacaaaaaaaatctgcataattaagcagtcaaggctgctaataggggagtttatatgctctgggaccaggcaagggcagcacatatggatatagcactggatattaaatctacggcatgcagacttacttcagggccctcagagaaaaggctaattatagagagaggaattgtgtttactggtctgtcttgggcaaagatggtgaaagaagtgcaaccaagttttgcagttannnnnnnnnnnnnnnnnnnnnnnnnnnnnnnnnnnnnnnnnnnnnnnnnnnnnnnnnnnnnnnnnnnnnnnnnnnnnnnnnnnnnnnnnnnnnnnnnnnnnnnnnnnnnnnnnnnnnnnnnnnnnnnnnnnnnnnnnnnnnnnnnnnnnnnnnnnnnnnnnnnnnnnnnnnnnnnnnnnnnnnnnnnnnnnnnnnnnttagcagtttagctagccctgtttaaaaatgtcagtgcttctgggcatgagctcagagtcagcacttaaatataaatggtgaatttgagtggaagttgtagtgggcaggggtacgcctttctagaaagggtgtgtttctggaaggggccctgatgggatgaacattaacatttcataatgcagatcaaaggtaaagagaaaacccaaaggcccctttgtcacgggcccctagcgactgcctcatacatgagctgagatgatatctggatattattaaagagattcatttcatatttgtatgtatgtatgcagatatgtatgcatgcacttatttatttatttaactccatacaaagaacattttctgaagaggacaggagagtaggccatttgccccaggctgaatgtgccaaagcatgcctggttgtttcagaggactggagcctcctgcagatttggtttccagagaagcagtctggaccctttgtcctttagggaagcttcccacggaaaacagcagccctctcctcatagtgatctgcggctgtgggcacaggccatttgtgagcttgttgtgcattccattactccgccacgccgaggagggccagagaagaatcccactgcctcgtctcaagatgcagtaaaacctcgggcttatgaaagtaaacagcatctgatcagccagatactgggtcaggcttgcctgacatctgtgctcttcttagaggcagggaattcagtgctaatgagaagactcgagcctgtgccttggaaattgagagttgcaaaggctaatgaatgggcagtttagccccttaaaaagaaggaaagcatcacattggcacacagggtgttgtgcacctcttccttgtctgcacattgttcactgactgaccaggggtgtcagctttacttgagaacagctggtcagatattatgtagcagttggcaaagagggtaaagttcttgagagactagtatgatgcaaacacccaacgcagatatttcatactgaatttttaaaatgtatttttccctagtaactattaagttaattgagcctttaaaatcacatgagtcctcagaattttcgttaaacacaatgacttctaatatcgtctggtttctagaggttacaatgaggtagcactctaaagaaattgtgattgcccatagattagtaaggacagtgtgggacaagtggaatgcagtagcattgaagtgcttattcagaccattcttttaatctcattcttaaaatgtaaaataaagaaaactttgcagggaaggccaagtagaggtcagcacctggaaaatggtagcagccaaatgtagactgcctagggaggaagctgggcaccgtttttctgcttgtcgagaaaatagaacactagcaggcagtaaggaggccctgctaaataaaaggaaaataggccaggtgtggtggctcacgcctgtaattccagcacttcgggaggctgaggagggtggaacacttaaggccaggagttcgagaccagcctggccaacatggtgaaaccccatctctactaaaaatacaaaaattagccaggcgtggtggtgggtgcctgtagtcccagctactctgtaggctgaggtaggagaatcacttgaacctgggaggtggaggaggttgtagtgagctaagattgtaccctgcactccagcctgggtgacagagcaagactctctctcaaaaaaaaaggagggggaaatgttattttttagatagaaataaatacaggagacagtgcttctatatttgaaacacacaattttttttttttttacttttgggctagtcaaaagtaagatagctgggcaagaagcctgtcacaagtaaaggaatggtgtgaatttgaaaagatctctttgacgacatattgaattatttgaggatacaaagaagaatcaaccatgtgcttctacctcgttcatgggtggacttgaaatcccttataaccctgcggcttcaccaaagctgtctcttccctccctctctcattctctccctctttttctttcttttttggtctcctgccttccattcattcagtcaacaacaacaaaaaccatataaaacaaaaccccacacttttgggattttggatcaggcaggatgcaagggggcaggcaggacccaaggcgcaggcccacctctcctcacctcctcagtcccgctgatagcattctgctgagcggactcggtgtttcagcccttacagccattgcctcagttttacctcccagatcctgcaagacccaccactgctttggggcagctgacagaactgactgtagatgggaaacccactttgataaaactctgctgtctcctgtctttctcctgtctaaacacactcctggaagcagggtccctttctgccccacagcctatggcttcttctcccttttcttccttctctgtttttcctatatggaggagaagaggaagaatatagaagaagaaaatcaatataagaattataaagattaaaaacacttggtatagttcaaactaaatacaaaacagctttggcacagcagaagaaataatcagcaggataaacagacaatcttcagaatgggagaaaatgtttgcaaattgtgccgccaacagaggactgatatccagattccacaatgatctcaaacagcacaacaagaaaaaaacaaacaattccattaaaaagtgggcaaaggacatgagcagacattcctcaaaagaaagacatacaagtggccaggaaacatgcaaaaatgctcaacatcactaatcatcagagaaatgcaaactaaaaccacaatgaggtatcatcttacaccagtcagaacggtattattaaaaagtcaaaaagcaacatatgttgtcaaggatgcagagaaaagggaacacttatatactgttggtgagaatgtaaattagtacaacctctatgaaaaacagttgggagatttctcaaataattaaaaataaaactaccattccacccagcaatcccactactgggcttctacccaaaggagaagaaatcatataaaaagacacctgcgtacctgtgttattgcagcactagtcacagtggcaaagcaatggaatcaacctaaatgcccatcaatggatgattggataaagaaaatgaagtacatttataccatggaatactatgcagccataaaaaagaatgaagtcgtgtcctttgcagcaacatggatagagctggagaccattatcctaagtgaactaactcagaaaatcaaattaccacatattctcacttataagtgggaactaaacaatggatacacatggacataaagatggaaataatagaaactgggaactccaaagtgggggagggttgggggcgtgagggttaaaaaaatacctattgagtacagtgttcactatttgggtgatgggtacactgaacggacgtccagatctcaccattatgcaatatattcatgtaacaaacctgcacatgtaccctctgaatctaaaatttaaaaattaaattaaaatcaaataaattaatttttaaaatctagccaggtgcagtggctcacacctgtaatcccagcactttgggaggctgaggtgggtggatcacttgaggtcaggagtttgagaccatcctggccactatggcgaaaccccatctctactaaaaatataaaaattagctgggcatggtgacacaacgcctgtagtctcagctactcaggaggctgaggcaggagaatcacttgaaccagggaggcggagatggcagtgagccaagatcgagccactgcactccaacctgggcaacagagtgagactctgtctcagaaaaagaaatatcaaatttctaaccatagctctattgtatttggtaactggaaattccccctgcttatttttttcatagtttgcagctatgggaaacaggttttaaaatggaataagaactatgaattccaatatctattattactaacattgccaaaatgataaaacactaaaatggtaattgtaaaagcagtaaaaagataagacataaacgtgaaaaaaaagaaaaacttataccatatatgttacatcttcaaagttgtttgtgtaaccccaaaaacaacttttaaaattatatatctcctcatgcttttaatttggcacctataaaaattttttaatcataaattaagtcattgaaaaaatgcaattttcagtgcactgtatattgcatatactttaagtatatttttatcattaacatttatctcattcaattggatgagatacttgccatgtaatttaaaggacaaagccagtcttcactgtcaaagtcataagccaaaacaaacttacacttaatgtcagaaaaagtctgactttgacttgaaaatgaaagtgttaatatgcattcctgtgacaataatctcacttctaaattctagctctaagagagatggagaaggcacaagccttgtgagtctcccacctggatgaaaaaggcactgccctcttcagcatgttgtaccatgacaaattttgctttcacccttgcggatctattccacagcaggtatccagtttttgaatcccccagaagatttttgcagcccaggacaaaacatgagtaagattgagaaagggcaggaagtactcccacattttgtacaataggacaaggttaagtataaggagaggcgagataggggaaccagcagaccacaggctgcttgcaggcagatcagttttaggaaagagtccatgtggagttttaacactgaaaatcagttccctctgaattattaccgcagtctgcatacttctttgaaagcctctatgtacactcaggttgtgcattcacagtttagtggtacacatagctgccttccatgtatacccagcttgaagactcttggagtattctaaatattatttaaaaactcaaagaaaatatttacaaggatgaatatgataacttccatttctgattatataaatgactagatattcagagaaagtcttccagtatagatctaaaaattatgcatcaaaactgtttaatcttttaaaataactggctgaagtgttgggaaaacagagtaagatctgtatcctagataataagaaggtaaaaatgctgagtgttaaaagatatttcaacaaaggaacaaacatttgtttcattcttaataacaagaataactcacatttactgagtagttaccataggccaagtattatgctagatactttatatatgttattttgattgagtctcacttctacagtcccacgacataggtacttgatattcccgtttaatagatgatttgacgaaggcaaggataaataacctatgtgaaatggctcagcttgttagtggcagggttgggcatcccacccgctaagtgatcccaaagcctttgttttttgaacctctccaccatgtcgcatgggaagaaaggctttggggatgatgcctgtgctgatttctataaatactgtctcttctgtacactatagtgtaagttactttacatctgtagtagaggtctgtgtttgctaacataccaggcctagtacatgccttgtataccaagaatttccctcccactgtggaagcaacttttgtgacagtagaaaagatgacagattataaaactggactcactagtaatgatctgcttactaaccaagctcaaaccctatgttaaaataagaggattttaaaatatatatattttaaaagatgtagtgggtgactattcagtatctgagcattcatcagaaattaatatttaagcaacacacaagcaggcttaattgcattcgtgacctgctttcttatatattggggagggtggagatgaaaatggagaacacacagtagaagcattttactgccagagtagaactttacaatcgcaccaggggaccttttggtaatgttggtaatgtgctgctattgtgatttaggaaagaaaaatgctactgctgggctttattttcaacggatttttttttaaacatcaattaatgcaatcaaatgtagtacagggaaatctaactttttatttacatttctgggggccgggagggtttgtttgtttttgttaaccccaatcatttgagctgtacagtatatggttttcctggtattttccaaatcaactcagtaagtgatatttagcagtatatgtgaaactctccacatgaggaagagaaaacaaccttgtaacgggtaccatttgttgggaaacaaatgattctgtcttgtttcatacagtttgaaaataatgacattttggattttcaaacagtttgttaataaaatgaatcatatcagttttctcacccataagagcaaaattgaaataggttatttcttcatgaattagtcagattttttaatgccaagttttaaattaaatcttgataaattcagaaacaacaacaacaacaacaaaacgaataccacatttttggccttaatgaaaccttaaaagggccctaaaataaaccatcaaaataaccagaaaggcccaagctgaaagtatatttttctaattttctctttattgctgttcactgccttaactaaacatacgttatcaacacaagtagatggatgatctcctatcttcctgggcatagggacccagtaaactaagcatcatacacgatttaactaaaaatttgctccgatactgaaatttagttgttttcttttctctaatctggaatctaaatccatatttgagccaggctctcagtaactacccatatcacttcaagcaaatcagtaaagctcttcctaggacttgagttacctggagaaatttgtgttattgagcagattaattgagaatggatgtatataaacccacacccacacattttgaaaattgtaaagggctatataaatacagtagttattatatttataatcatcctcagagataaggggaggagaatgtaccattgttataatcttagcaacaataagagtctcatttttatggggccttcgacatgcccatgagtttgacttgtgtagacacttccttcaacatcttgtgcttaaaagtcaagttggcctaagcacaaagtctgatattttgcagaagatgagatcatatttagacctactcgggtgaattaaggccatagtgattactttgatttggaatttccctgctgttatcagtttaagatagaatttctaatattcatttcaaaagagagatgcctagattctaggtcctgtgtgtcactggttgcattcttccccttcctctcgatgttccctttggagacgtgtctagctgaattgtgagtatctggtagaggaagaagaagattcagactgaactacatgagccagaatgccagtctgtctcttcatcaatcccatgctgtcctattgagagagcaatagttatgtctaattctttgagaattattttatttttaattctttaaaatagcccagggcaaaatttaattaagaaaacatctcttcccgtcccagagaaaaaaaattattttgcctgggcatttttctctaaatataagtatctatgcatgctgaattattgcaattggctgaaaatatgctgaaattatgtattcacttttttattttctgcacattcataccatgctaatctctatttacccactcttgtttcaatttctgaactgtcttttctcctgtattctgagatgagaacttttgttactggttcagatcagaccctacgtctcctgttttacgcaacaattacagttccacaaaattatataaaggtattcgcttttctccagattgtcaaatttaaaaatcctcatgctaatctttgtctttaaggaaccaaacattgctactgctttccagaagcaaagaaaagggcaagaggccaggtcatccctataggtcactttctgtcctggacttttatgatttctttaccaagaatgaaaccaataagtgagctaaatatgacttgctttcagaaaggaaataaactttacagtccttggcatcagacttctacttagattgtttaagacagcattggaattctgtgcttattgtatcacatatcatgcaaggcaaaacagagcctttaaatatataaaatgttttaaggccattgacagatattttagtgagattatgtcagtagatttccttttgtgttaggagagtcattatcagcctttatattgacatagtatacaatttttaaattttttaagtggatcttgaatgagctggttcaggttatagaaaaattgtcataaagataggggattaaaaatttattgtgccccagacatatttataatttggcattatagacttagaaatatttaatagctttaaagaaggtaatataaggaattatcatcggagaaagagcactccataactattatgtctcattctttatttaacagatagacttattaactaatccatggtttttgttgggccctttttcatagtctttagctttggtttttgacatagcaaaaatacccagagacatctacttcttcatcacacttcataactaagtagaaatgagaaagaaatctttcttaccacgagtcttttgtctttccttcctcccttcctccctcccttccttatttcctccttccctccctccctccctcccttcctctcacccttctttcttccctcccttactccttctctcttcccatcacagaggataacaactgtctcacttagatagctcttgattgacagaaaacagcagaaggaactagaaatgagtatgattcattgatatgccagtaacatcttggcttcagcatacagtgtctagatgtgctagtgtatccagaatggtgcccaagagagaaaagtaggttaggaatatattgagctgacctattttccatacgtaagtatggggttatgtttctagtaagccacacactttgggttatgcatgcagtctcggtttcttctcaaacactcaatttaacactatatcggggaatgatccaggtacttgaagaagtacagttagctataggcagaatagaattaagaaatcagtgtttgtttttgagtaattataactccataaaggagcactcaagcccagcctccacagggttttgggtaacagtttaagcaaatcattgggttattgtcatacagagcatcagcgttcagccactccatcacaggttgtataatcgggaagatttccttcagactgacagctcagacccaagtgctttacctagcccctctaggagcaccatctagggagataaaattccccatatctagagatatctctatctctagatatgggaaatttaacttcctataaccaaattttccagccttccaacaggtgcatcacatcaacttaggcttcccttccctaaaaggagaagaaaagctttcaaggggtgagagagactttaacagtagctgcttaagacatagggggatgaggtggatttgaataaattcaggccttgatttgtcagggagcaaaggcgtcaccaggttggcatggaaatagaaatagctccttgcacatcaataagagatctagaaaacagtaactgctgttttgtttccttgacaacttacattgtactaagggaggaaataacttcttttttaagtgaaggttggtgggacagtataatcttggattcgggaagcctgaattctggtgctggccatgaccataaggcttttctgtcatgggtgtgttggttaatatctatagtctcaggccatgcatggcagcacacacctgtagtcctggctattcaagaaggattgcctgagccgaggagcttgaggctgcagggagctatgagcacatatactgtactctagcctgggcaacagagcaaagacccctttactctaaaaaataaaaataaaaactatatatatatatagtctcaattttctcatcttttaaaaaagtccttagttagagcatctccaagctccttctaaattttatccagtgctccagtgttcagccaaatgtaccatgttgactctttccctttcttttttcctccactctcctcgttgcttgcttctcctcaattttacatgaaaatctttgaaaatacttaagccaaaaaatacagttttgtgaggtatttattagaatgtcttttaatttaaaaaattatcttttaatttaaaaaaaatgccaaatagtagccagccaattcttgtgtgccttcccagtcgtgtgtcccatatcacatttcagatttctctgagcattaggagtgttatttgtttttggagggatattaattgctttatagtagttttaggccatcgtctatttttcttcaaacataaaagctttatccaaaatatagtctggaagaagacactacatggattcatgtgctgtacatttatttttcttttaagtgtatcattgctgtattttcctttgctgatatattttgacaccttatagttgtaacctgctgttctctttaattgcttattgttattaattatatagtggtaacgtagttggctgcttgagccacttggctgtaaagaaattcatttatcattattgctgttggagctacagaaaattaccagcattctatccagagatgaatgttgttgagttcacatccagtaaaattttgaacatgggtcaaatctgtaagtgttttctccctactgcttccctttgcttctgctagtctgtgctttgagtacctacattttctttcatcttttgtttcagtccttgatttgctgccctttcagtgaagtttacatattgttctcagcactccattcagtggcctgtccaaagaataccttttcttttctcctcatattcctgactataaattttccttcctagaatttatttatagtaagattcctgcctttacaactttgttacatgcacatttcattttaaatcattaatgctgactggagattgccttaagccatgcctttctgtgaaaggggtcatcatgcccttaaaaacatctacaaaccccttctcctcattctgtaaatgatcagctgtacagctgtccgttgggatatgcaggggattgattctaggatacccacttccatgcatgcacaagtccctcagtatatgtggaacccctatatgcaggtttcacatcccgtgagtactatattttcagtccacatttggttgaaaaaaatctgcaggtaagtggacccacacagttctaaccatgttgttctagggccaactgtatttagattcctaaattggaaaactgccagcatactgaatgactgaatgaaagaatgaatgatgtacacatgcaaacatgggggcgtttatttacacacatccagctatttactgatatctgtagtttctttaaaatctgggtttaatttagaatacatgaccccacagctgcatgtgccacagaacagccaggccagaatgctcctctgccttctggcagcatgacattaaattcacactagttaagccaacttaaattgagcctccttgaaccttcctaaataaaactagtggccttaattacaatcaggcaatttaaaggttatggagctctaactagtactgcagtatatcactttaataatgcacaggcaaatttctctaaggggtggcatcgtttgattagaagaattcaagtttcacagcacatttccaataaactgtttttagaaatcttattgcgtttattgtgccattaccttttttttttttaattcttcaaggccaagtttctaaggtcacaccaatagaacaataaaaatgtgactcatttgcaaatagcatgcagtattgtgatttttgcattgctgcttaatggttttcttaccattgccacaaagtgaaaggagcaggattgagccccttggaaattagagagattttggcccccttaacacccccatgtgccattgcagatatgacgtgtgcttttgtggtgaactgtgattctattaataaacagaatcagaaggagagaagatgtcatctttgcaataagtaatcaataatatagtttcttagaaagaaaattagctttgaaaatgcttgacttagtttctcatctaaacctgtgagcacttaaaacccatggttgtcaaggaccataacatttgcagaagctgttgaacctcactcaatttcttgtgtttgtttgatttgcttttgttgtttaaaaaatcatcagcagtagcaagccgtgctttctagcaaggataaacagcttttcagtgtttggagactttctccttcagataactagtggctttatgccaagaagaagaagattaaaaaaaaaaaaaaagaaagaaagaaaaaaagaaaaggccctgacccttgccataaactcagcacagcaacaggaaaacatgcctgatgagtgccgtgtccagcacatggcttgtgttgcgggccccccgctgtgtggaattaatattgactcttgcactgtctcagttctcaaagatgttttcccaatagatttaactttaaagcaggttacatttagtttatgctgcatgaactatcctctttcgatcttaccaatttgtgggggttttgtacagtactcaaaggtaaatatacctgtacttccactactgccggaagtcccagatgtaagggcattaatagaaggtatttgatatcaaacaagagaaattttaaacaaagagtataataaatgcatatacatctggtttagccaattaattaaaagaatggagctttgtaacatgagaatacagacaattaataaaaattgtttattggtcatggatgtacggtatagagacttctctatgacttgggacaaataaaaggtaattatcccttctttgatatggcactttttggtatttcagatataagatacataataatatttttcttctggaaataagggataagttttggcttatcagtttcttgccagggataagttggcaaattagacagctactttgttaatgctttatttgccagagtattttcatcttattttgggaaataaagaagccaagcactgtaaggtggattttgccagtccgctatgttatatgcacagggtttaatgcacaagggaacggagcaaaattttgaaacccaactgacaaacaatagatattgttttaccatcagtcttggcattttattctgatgaaattaaatatagggtttgctaagtagttatttcccatgaattcaataaatatttattgagttccagctatgagccatgtactgttctaggtacttcgtgtacatcaatgagcaaaacagacaaatacccttgccctcctggaacttgcactgtagcaagaataggtgaataaccccaaactgagttctcaacactcttatggcattgagatggtcagagctgccacacaccactctttgtaggcaaggcaaaaactgaaatgcgttgctgaattggaaacactgctgtcttcaatcattccattcatctagtctgttatgtgaaatggaaacaaatgttttatacttgtatttgcgtgctcacaaactttctttcaagtcagagaacagaacagcactaaagattaggtgacaaaaattttttgaaagaaaaaatgtactctcctgtattcaagtgggtataaatgagggggagaattgactgttcaagtaaactggatccttttcagtgcaacacagtggcactgtgttaacaacatccaagttgtttaaaagcaactccaatatctaatcaaacctggaggacatacatcagacttagttggtctcagtcctcactcccgtccttatccctgcccttgccttttccagaatatttgctaagaaatatccactactttcttcttttcttggctaacaatttttttcttgggatggggagaggaagaatcaaagtgattttatcagtgcccttccaaaactggtgtttgcagtttttttttaataaaaaaaaaatgagggcaaagttttacctttaaagctatttgtaggcaccatgttttctctgagacttcaaccatggggtccatgtttagattcagaatgtgaagaagaaaagaaggaactagaggagctaatgtactggccaggtttgaaaaacattgtagtctgtgtgcttatccccattccctacttgtgccaaaataccactgctgagtcccctcagttgaaggaaagccacctttttggtgggctgtttgttttactgtttattgtttgaacaacattccaatgttttctcctacatgagaatattctaataagtacttcacacaacctataataatagccaaggaattggacgatattgcatctcagagcatctaaaatcccactgcctgcctctcctctccctacccacctggacctcctgctagtttccaagctgctgatgtttatggggctctaggcagcccccgggctctttaaaatctgctgggtaccatgcagcctaccccagttgaatcatttcctgctccagccctgctgataatgagaagttcaaggcaggaaataacagtggcaatatcagtggctttgcttataaagtccaaaagcattgtagcctttagaccattggctaaaaacagccagtaactaagttaaggtaagcttgcacctgtagatctcctggaagtgagattctgactgaggcacacaggatgtgtatcctgcggctcttgagatacctaagggttaggcactttgtgcacacagtcagggtccaggaacctggagctcatttcctcatgtcccagtgtccttttcctcttattgtaagagtctcatgcctgtgtcttctgttcctctctcatgtggcgtagaaatactgacagtgccagacactcccatattgccagtgacaaaactcctagaaggtgctagcgtcggtcttcaggctgcattcattttcatggcaactcgttcaaaaaaaataagggcagaactttttaactggtatgagaaaaaacgttcccacaatatgcaattctctcaaattctgccttactttgggggcttaatgactaatctaccggcagactttgaagcctaagtcatattctccattgccaaattagcaccacagtgtgtttatgttacagtcatgaaacatgtgctgtatataatacaacaaattatcgtggctgagtgctatggccctggaaagaatgtgatggctgtgtgcatggcaaattatactgcagtctgcctatttttctactcctggtttctagggcgagccaatgtagccgaggggtgagttttgtcatgtatggcttttctttgttactcctcggacccctagcttataaatgtgtgcttggaaattaactcaaggaagaggagaagcaaagtaaagggtgggaggttgggaattgggttagggcatagttttcttagatttaaaaatatatatgaggatacagtggtaacacacattcgaactggataagttacaactgtagggcatttgattcctctgtttggattctgagggcagagtttactcccactcagatcagagcttttaagtatggccccggccacatggtgatatagcaggaggggtttctatctgtggactttagcctatagatttatgcagtggaagaggctggaggacccttctggccagtcttgagggtaaaagggagaaggagttctacttataaactgttacaaattggccctcagtaatggctgtagcgttgatcagacgatataagggggcccccagtgattcctgggataacagcagcatgtaagtcagccactgaacatttgcttgtagccactctagatttttgtttttattgaaggaaaaggagtataaacatgggacacacagtctggaggctgcttaaagggtttctcttgtttaaagcttatattgaaatgtcagtgtcttgtgttaaactaccaattgccaccttggagctcataatttaaacctgtgcttgagcatccaaatggtaactaatatttctcctgttataaaacaggctaataaatagttatgtaggtccaggttttataaattggaggtatagaagttgtcattcatctttgaactggctttagacaagcagatggttttcttagagcacaaaattttgtaagtgattagcacgtttcctactaagtcagtgaggttgtagtccaattatgtatgcagacgctttcctttgaaacatttaatattggagtaaatatttacattagcatcagtctcttttatgtagacttgattcctgtttacatttatgttcacagttaaatgaagattaacaaatggaaataattattttagatgaaatttctatacatgtgaaatgatttcttaattatactcaaagcagctttggtcatgcctttccagtgggtgaccaagacaggaagttgctggcttccagcatgttctcaatggtaaaggccccactctgacactggacccccattgctaggcacatatacctccctcagtatccaacagagaggggtattctgtgtgttctggaaagatacaggctcatacagaaagctccatgtttgctcatatagctaaattgcattctgatagttctttctccctttccttgtgctaatttttgtttttgtacatacgtggctagaatacttttaagtttaattgggcaaaactagagtttttctagacttcataatattgctcatttcctatctaattttttagctagcaaaatttcagtgttgtaatcagtcttcattaatagggtttagaaaaggtaggtttttccctctctctttcaatttcaaagtaccctacaaggcaaattgtgctcattgtagaaaatctggagaatatagataagcaaaaaggagaagaaaaatctagaagtttcgttcgaagatcccatctataattcttaattaaaaaatagggctgtactagcctattatatccttaatggaatattgtaatggttattaaatcaattgactctgaatctctttttaataaatgagtcaggctgtattatccaattactgtcagctgctacctttccagagagcagaattggttattttgattgaattttttaagctttttggcacctttaggaagaggaggaggaaagacacaattcaggttatgctttgtgggcaaaatcctgaatagaggtgctgatagtatcccatcaagaacattggctttaaaaataaaacagcagttacatttactgttctttactaccttataccagataggggaaagaaaggagagttttgaaaagagatggggtttaactcagccagatcccccccacccaattctaagggttttcaagaattctttgaaaagtcagacatggctctcagccatacaaaggtaaatatggaattagaagagaagagttaaagactctgaataaggataaacttttgaaattcttactataaataagtttcattttcttttactacctgtgctgccctcaattaaaaaaaaatacaaaatgaattatattaaccagttgttagaatgttttgtgttactatctctctttctcattatacatttgaccttgaggtaataagcaagtgtgaagatgggggaagggagtagggaaatgaacaaaggtgagagaaaaggagggactctaaatgtccacctaagagcttattggcttttgctcatcttataatgtgctgtgtaacaattcatatatattttctctcctatggaaataactaggagatcagtaactaggaaagacctcacagtgtaacttaaaaataaaaggcaggtagaacttccaactttttttttaacattataacgtgcttttaagctgtaaaaagagttctgaaaatggtagatgtgattgttatcattgctgtcacttagcgctttcacaaataaaagatagaatatgtagaaaataagtcttccctaataatgcataaatacctttatgcctgtgtgtcacctttttatgaattcacttgactgaatttggattatttaacattttgggatgcaacttctcttttctttgggtaagaaatacataaaaatgaatgagtacattttccctgcactcatacacatatgtcttatttatttttccttctcttatttttccaaacaaaatactcatagtcaagaaagataatattacattacagaacatcctaatgtgcataattcactttatgctcatgtgacagtcaattgttatccccaggaaaacctgccagatctattacatcacacctattgcaagttttaaaattctggaacaagtgtatatcagttcatatccataggccatctcttggttcttgtgcaaagcacacataattttaaaaggagatgaaaacccgtagtaaccttcttactattcaaaataaaggtatgtagcattaaggaaatagagaacttttaaagttagcaagtatttttctgaagatgcacttgccaatccaatttcttacaataaatagtgttttttatatttcttaatgtctaaaatctggaaattttttggtgacttcaggattttaaaaaaaggaaacagatgaaaaaacccttgatcttatataatccctaaagctttttgtataaccccttgtcatgtcagtatgcacaattaaactccctcttacataattataatcaaggaatttactgtgccacccagatacagagtaggtttttatctcttgtgaaatgtagacagtactgggtggcttaattagtgctttgcttctctttttacaaattccaatcctctgcttctaaagactcatacttgtatgggaagaaagattaggaatacaaatagagtgattttactcacagttagctaataattactcactttgtaattgggacgtggtattaccagtaatatcagctggcagaggacttacacatgcatgttgtctttgaatgaaagaaaataactgcagtgtagacttgttacccttgtagtgtgacggtgtctttcattccctagacctagaatgtcttagtagcattttttaatcattgctaataggagaatataaaagtgtaatgtgataacaagccaggttaaagtgcagcctctaccctttagtaagtagtcttggaagtagtgggtgtgtgccccaccatatctattaagatatgtcccctgaggccagagtgcccaggtttgaatctagactgcctgcgttcaagttctggctcttccaattatgagtgcttgtgactcagagcaaagttacttaaactctctgcgcctcatttttctcatctgtaaaatgagactaatagtagtttttctcatagggttttagtgcaattaaatgaatttgtgtctctgagcagttctgaaacacagcaaacactaaatcagtgtcagctaggctgctagctctagtgcccctggttttttataccttacaattgcacaatgaaataagttaggataatccttacattttaaacttcaattttaaattttaattttaaatgtttaaaatccataaatgtttaaaataacagtgtctatgtataacacaaactctccactttatatagcaatgttatgacatcaaaatatttttctgccccctcattcttaagatatccaagaaaaattcagggctagtcaagtgagcctggaggtcacaaaagtgctttggagaaacagaagcagagtctggttctgggggtaaaattgaaactgtcttccagagttaagggagagatgaactaggaagaatatgggagactggaggtgcgaagcagagaaaagggcatttgtaagagactgtcctattaatgatacttcaaaattgccagaaattcttggaaatagaaaaagatagtctgtatcaactgaataccactgaagacctatggttagaaatagacacttccaggaccctctggataagccagagtagaatcactgaggaagaagctgtccacacttttttattttagggctttggaaatacagaccccagaaaatcatggtaatgagagaaaaggaaatgcctcattattgatacaccaattatattttaaaagtgtaataaaatgcattagccttaagataaaatctgacttctgattatctttggattttaaattccagaactgttttaaattgatataaactcatgaataatgtgaaataaccagaaaccatatataatactacatatgtatattaggtgatggaaatagtttaatatatgcaattaaagataactctctagtgtattaaagatatgacaggttttcatcatttctcttcatgtgttttccttgacagatgaaggactgaaccatgaatgcaaactctgcagccagacctttgactctcctgccaaactccagtgccacctgatagagcacagcttcgaagggatgggaggcaccttcaagtgtccagtctgctttacaggtgggaagattatttcaggannnnnnnnnnnnnnnnnnnnnnnnnnnnnnnnnnnnnnnnnnnnnnnnnnnnnnnnnnnttcaatttggggggaagatgtttgatttctgctttattagcattattgattgcagcctacttaaaggctcacatgagcaggaaggttaactgtcaggatgaacaaaggcatttcaagttctctcagaagtttgcacttttccatttggaaaactacatacatgttgtgttcacttttttttttctctcgatgttaaaggttaccaagggtaaggctgcctgcacagagctgctttttaatcacaagatgttcaactaaaagtgcagccgtgttgtcagcgcatgtctgctacttaaacatggagaatttcataacattctccaccagaaatacaaagatagtattaaaactcaccccaaattctctgacatggaaaacagattagatgaggcatttactgcctatgaaattggatttttagagtagaagttgatctacacttatacttttaagaagaaattttttaacagatacgatagcattgcagattttagcagaaaaaaaaaagtaaatctgaaactctcatttgaagcccatggaggttgaaatatgatcacacatatttgtggtattcccctaacaatgacaaagttattttggaaaatcctttgtgattattttgcatgtgttttggactcagtggttaagcccctcaagcaatgcctttttatttgttggaggagggagaatatatccttctctcaaggatgacttctttgtttgcagagcaaaattccaagcattgattatttaccttcactgaactgagcctatagatttctattctgtgataaagaggggccatgttcattgcacagctagcacaattactaactgagtacgttgatggctctgccttcaacagttgcctgtttggctccttcattcaataattccatcagccactctccatccttcttttggaactctttttattcttccaggtttatacttaaaaatatatactgctatggtttaccatcagtagtatatatcctaacatacaacgagtcaagagtctaggttctttataaaagctcataagtcttcataaaggaggactgggtcataggtcacctcacgattaagacccctaataaaataggtctttcatgttgtagccagaagcctcataaaatgtactgagttatatgcagattagctgcaaatctatgtaaaaacctcatttcttcttgttgatacggataaagagacaaaaatgcattaatcgtgcacagtctgcattttctgtgcagacagacgtgaattgttttagcgtatcttgaagtaatttagaaataacaatttttaaaaaatgcttccaatataaagtgtgttaggtgggaaaggaaatctgagcagttttttaaggtaatgagaaatgtgattaaaatgtatgactcacaagaacaatattctaatattttaggttggctggcaattagaataattttaatgattagagtggagtcaaagtcaaatgccaacatctttaataaatcctttccctgcctatacagattaatattgtagatgcaaacttttttaggtcacagtgcaccaggcatccatcagaagtcagttctgccaacccaaacactgcctctggcatatacaatttaattattaatagcgtgtctcctaggtaaactgttacacagtcttagggccttgttttgtagtcattaaaattgaacatgtttatattattgaaacccttgcattcagtgtgtaggctgagttgatcttaaagtatccaaagagaatttacctgccgttctgtttcacatttatagacagtgccccagagtagctgtgggatatgatttttagcattaacacatttaaatagagaactgtttgctagctataactttaggcaaacacaataaacagggttttggcatctatgatttcttaacctgtgggttgctgagaaataggagtcatttctgttgagacagagctatgcatttgacagttttcggctttattttttaaagatttatagggagcagggcctccataaacctttactttggagctgtttgggttgaattaggtgctccgtagagtgcatcttaacaaaagccagagacccaaccatgagcaaatgtgactcagctctccccaggtctcaggcagtaagtcacacctgggaggcgtgctgtccggcctgctgtctgttcatgcagagtcatcgactgagggcatttcggaaacaaaataacccaagttcatcattcttttatcatttcagtatttgttcaagcaaacaagttgcagcagcatattttctctgcccatggacaagaagacaagatctatgactgtacacaatgtccacagaagtttttcttccaaacagagctgcaggtaatgtcctcatggggaggactgggattgaactcagttgctattcttatagtaaacaggggcattttaaatctggattcacagtatcactcaccctgggccaccatgatgctttgtgtgtattgggggcaaagggaaaattagagcctggattaatagacaccaaagtaattttgcctctggctgctgtcaatcataaaaagaactagaacagacctataattggaccttctgacccagtgtgatagacttagaggtcaggtttattggactgtgggatcattcaccttgcttgtcatgactcattctcccaaatcctgttttattcatgttctgttcccactgggctccaagctgggtggatgtccaggttattgttgtcctgaggggcttaaaattggaagggagaggggaagaaaagaaagaaatcgtactcttgtccagtatgtatatcttccatttaatggaatagaataactgttacttaaccaaagccttatagttgaaaattttgcacccaaagacattgaatctagccttgagtggtccacttgattaatgtgtgagtaaccttggactgtaagtcctctgaacctcagatatgaagaaataaacaaacatcacacttatagggctgttatacagtgaaaatgaaatgatgggtatggatataagatataaacataggaagatttggttattcttatttttcttagctatagactggtagtttaaaaaaaatgagtcagagacctagattctattccagaagtatcatgtattataaaggaaaataatttattttttaatgttacttcaccttgaaaatgggtataatgtcttatccttatttttctgatgaaatgatctgagagtaacatgctttttgttcaatcttattggttcccgtggaggagaatagagtcgaactgaaaattattctgttggccgggcacggtggctcacacctgtaatcccagcactttgggaggccgaggtgggaggatcacgaggtcaggagatcgataccatcctggctaacacggtgaaaccccatctctactaaaaatacaaaaaaaaaattagccaggcacagtggcgggcggctgtagtcccagctacttgagaggctgaggcaggagaatggcatgaacccgggaggcggagcttgcggtgagccgagatcacaccactgcactccagcctgggcaccagagcgnnnnnnnnnnnnnnnnnnnnnnnnnnnnnnnnnnnnnnnnnnnnnnnnnnnnnnnnnnnnnnnnnnnnnnnnnnnnnnnnnnnnnnnnnnnnnnnnnnnnnnnnnnnnnctcaaaaaaaaaaaaaagaaaagaaaagaaaattattctgttattatgagtattattattaacaacacaggtatttagcctaaaatgagggttgcagttaattttcacagtgaatccctgaaccaaatgaaagagctgatctggttgacttgggagaggcaagactgagggactgggagcccacccactcctcagtcttccatcccacattgggtcctggggcaacttcgtgcttccttgggccctgatgaaacgagatttatgtgagttatgtgtcaaaataaggaatttgcagtttatcttctcagttatcattctaaaagtgaacaaatagtaagttaaggagatgaaatacaaaatataagaaagaatgcttgagcccatttagttgtcataacgtgtcagtggatccaaattaaagttactatcttaccttgtatcgcttctaaaaatgctattctgtcacatgtgttcatgaattgaatatagaagatgggccaagttagactattgtttaaaaatacatcttattaaaataatctaaatttctgtttgaaaaaaatactacatttttattgcataggtatcaaagcataagtcattttgattttgtgaatctataaaggatatggccaaaacacctagtgatactgttaattagtatgtaaactgtgaggcagaattaagtaatcgtttaaaatcaaagctgtagagtttctttagagactgattcctacctagtgttcttgaaaacaaaaatgtttgcaacaaacttccacttttgtactgtattagtagattcttacctggtggtaccatcaatgtctttcattaaaagaactcagcactgtggcagcggtggcctctgacccattgtagagcagacaaaattaagcaattaatcacatccttcaagattccaggtttcctttatgatgatgtattttcaggttttattctatgtggaacatatagtattcactcttttctacgattagtatagaccaatcacagactccttgatctcaggatgcctttacattcttagaaattattgaggaccacaaaaggctttggtttatgtgagttactatcattttccatcttaaaaatcaaaactgagaaatctattaaatacaagaatacaagcacatattctattagctgtcagagagatgatgtcatcacatatcaggtagcgtctagaaaacttcactgtaccctcttgagataatgagagtgtaaagggcaaataatgtctaatattattgtgaaaatagtttgaccttacagacctctcataagtgtttaggagaccacagaagtccctgggccaccctttgagaaccacaggcatagaaattttagtgcagaacacacaactctttttgagtttttgtgacctttttagtcaaacatctaccaaaacatttctgactcgctcatacaaattgtgatctgggccaaacagagacttactctgtaatccaaaactatgagccttatatttccaatcccacaactctaaattatatatatttgctcttgatgcgaatactcaggtttaatatgtgaatcattccttagataagaacagtatttatggtgagtatgtgataattattatgaatctgagatgagatattgactacacagtcaatatttcgcaaaactataattcatagttattggaatctctatgtgggtctagtttctgaaatcctcaataatgtcagtggctttagtttcaacacattaagaaaaatggatcagagttaacttgactttttctagttttgaaagtgtttttatttttatattttaacttttggcattcatggtcctttgcatttgctttcattacccaaattgcatttataccagtgcttagaggatggaattaatgtaattttaaaatattgatttattttatttgctgtatagaaaatgggatggtaagtgtacaaaaaccatgaaacagttttgttattttcctaggacaagtgaaaaaaaattttctaaaattcaggtgacaatagaaaataggatctataaccaaaataaccacagagtagaaaaatgaagccattttatcagccactgtagttcatgccttggtgtgcaaaataaatgtaaattttaaaccacttgaactcatctacttttttatgccaccaaagttcagaaataaggacttttcacaagagactataaaactaaatgtctaagaactgcaatcctattagagattttaaagtatacaatttatttggcttttctatcaaggtgagaataataggttaagtttaggataagcattctggaattgaccatcaacatcactatggatatcttttaaatgtacatgaatgattttatgaccataatacataatttacatttcttttggtttatgcccagttgaaaatatgaagcatttttttgtggatagaagtgctttgttaggtatagaatttatatatatgcgtatatatgcgcatatatatatatgagggaatgttaacgaaaattacttgccaccatatatgtatacacacacacacacacacacacacacacacatatatatatggggatgtataagtatgtatacatgcatgtatatatactatgtgtgtacatacactatgtatgtacacatatatatagtggtgtgttaccttcatttgcattgcctacaaagccagtcagaatgtagataattcttcactatacattgttcatctttaggagatcaagcactcaggcaccatcctttgaatatcacaaaccacaagtcctttaagatttaggccagatgaagcccttatttctatgaaacgtttaatctaagtcacactttttgccagtgtagaagttacgttcatcacacaacccataaaccttgctgaccaaatgttctacatatacagatatatatctggactggaattttatataatgtgtataatataaaattatatcatattatacttatatatatatatacacataaaaatataatataatttgtagcaagatataacctttctcttttggcagagtttccctccatttttgcaagaaattctaatacacttcaaaggccacctagcgtgctgccaggagaggagatgtgctttggaataagagtccattatttcaactcaatgaacattttattattttttaagtgaatgaatgtgttcaatgtttcacatgttttcctaatagacctcaaaatttttcagcagaacctaaggaagctgctttgagagaggatggtatggtccaagaataatatcctacaatgcatatttgtatccaaagtggtttatgcaggtgtgagcaagtggtgtttgtaaaaatcctgttgaatagaccacattctttcagtacactaattgctgtttaattggtgcctccagaaaagctactattggatggcaatgatcaaatcatcctctctcccaatgtgtccacatagaaagttctgtcaggcctcttgttataaatttaatgaagattgagggaattcctgcagtacgggtagaagaaattggtctagttgaactttaggctctgaaattctagtatttcaattccttttgaatcaaagattatcttaatacccagcccttcccttcattaagtcatgagtgcagtgtttcctacattcaaagtgcagtagtaatttgacatttgagggatataccgagactttcagaaatcactaaggtttaaatgtgtaattgtcactatagctatttgatttccttctcaaatcacttccaccaaatcacctgattttgatgcatatttttcacaccacagtttaactggtgcttgagtgttatggtcatattgctgaaggaaaaatgaattactgcctatgggatgggacgtataagacaacaatacagcattaaattgtcaccattgagtggcttgctgggtcacttgctaacttagctactggtcctaaaccagcttctcagtgagtataacacaaaatctgtctcacattattaaataatatgtgatgaggcctttaggagtccttgttaatagtcagaattacaactgctatattacatactgctatagtccccatgccattattaagaaaatatacttattaaaaatatttacaggccaggcacagtggctcatgcctgtaatcccaacactttgagaggctgaggcaggcggatcacttgagcccaagagattgagaccagcctggacaacatggtgaaagcctcatctctaccaaaaaaaaaaaaaaaaaaaaaaaaaaaaaattacccaggttgaggtgcctgtggtcccaggtactcaggaggctgaggtgggaggatcacctgaacctggggaggttgaggctgcagtgagccatgattgcaccactgcactccagcctgggcgacagagagagagagagaccttgtctcaagaaaacaaacaaacaaacaaacaaacaaaatatatatatgtaaatatataattccatctttttaaattcaccatgatgccagacacttcaagacatacttaaaataattagacatatatttacaatctactaggaaagagaagataggcaaagaaatagctactatatgaggtgatatgtaatcaattgttataaatcttcccagaaaaggtgtttcttctccagctgggagaattgggtgggaggcacccctgctggtttggatggatggttatggaattcggagaacataatagacactcacagaacgttggctctgtgaccttcttgctgctttcctagtgctgacctaagtgaacaaaatccagattcatcattatttgaaaacaaaatctctacctcagacatatcagaactttcctgagttctctgttctagcttacgagaataattttgcaatgagtcatatctggacatggtttcatgttaatcagtttccaggtaaaaattcttatttttaaacatttatctttttcaagtgattaggagtcttgggctttgttttggtttttaacctctaactacaaaactaaacatgtatacttgctttcagaaatgtattccaaactaatacactcccctgtctttcatccaattacggaggtgtggctaagacaaacggttttattttaccccttcacgaaagacaaggtagaatctgagtgtagtttggaaaaaagttttagtttattttttcatattttcctccaagcgaggctgaaatcctcttttgcaaacaagaggaatgaaagggtgtgtattcacagcacatccaaaggaagtaaccctcatccccgttttctcactttttcatatttttcaagggcttactttttatttcctacagagcttaatttttttttttttttttttttttttgagacggagtcttgctcggtcgcccaggctggagtgcaatggcaccatcttggctcactgcaacctccgcctcctaggttcaagcaattctcctgccttagcctcccaagtaactgggattacaggttcacactgccacacccagctaattttttgtgtgtgtattttagtagagatggggtttcaccatgttgcccaggctggtctcaaacccctgagctcaggcaatccacccgccttggcctcccaaagtgctaggattacaggcgtgagccatcacaccaggccaaaatttcttttattatccccacacaaaatataaaactcaaaaccctgttatgtcttgcctcttatcatgtgttcttctgctgggacccctgggttggaaatatttgcccatcaccacatctagatctggcatatccgggtcctatactgatcagtttggaggaaagccagtgtgggggattgtaattcccaccccttcctggatggtctgggcctcattcctttgctctttacatccttagatccactgtgcccctgtgtatctcttgttcttggggctgaaatcgcagcccttaagcacatcacaaagacttcaaaagtcacaggagtataaattgtgtcaaatgagcacgtggttctggaactggtccatttcatacatcacctcatttctttgctttgtgggcctgcagggctttggaagtaaattggtgctacagcaacttccacttaatttgctcagtggttaaattgatctatctcttttatttgatcggatctccaggaaccgaatcatttgcattgatttattgattggtgctatgttttcaccattagttttgatcactttcagctgttaatattggataattcaatcaggattgattggccttaccattgaaggcagaaagttaatcacataggacacaaacaggacatggctaagctaacctcagtttgttattctctctccgttccaaccccccatcatctatgcagtagcaaaaagactagagtttttcttaagcaaaggagggaggttgcagttgtatagcattcataatgcgtctaaaggtaagatagttttatttggctttttaataaaattgcatctagaaattaagcaagcatacagaaagataagcatgattatcacaatgaactcatttggactaaatgagtaaatgcattttcaattacctgttttgtacaataaatgcctcatctgtgtgtgcatgcttggaggcacaacctgggctcacctttttctaaatttggcccttcctgcttcaccatgtgtcctggtagtcaaattttcaagaatcaagtggttaatatgactgaagtaagggcaacagaggtaattgcaataagctgaaaccactttatttgcatttgaattgtttctacagcaccccagctcagtttttaaaaattctccatccattaatttcttgatgttcatattgatggctggttttcgctattaaaagagggagcaccacctcttcattctaggactcgctccctcctccaacagccctgttgttagcgagctgccattacattatttttttgtctggcccagagttgacgacagatggccatctccgaactgccatcagtgcggctttatggagcatccagccagggtgtactgaagagcactgtggccagttctgcagccccctccctcccaccccctggaaatgttcatcacctctgccacattctgctttggctgggctctgctggccctgccatcttccatgtcgccaagacagcctgctgccatagcaccggaagatctgcctccattaggaaggaaagactgcatgtgtgactgtcttgtaaagacagagctctgtctcagcgcctttgtagtcggatcctttggagaaatccagaaatccaaatttccaaaacattctgcaatctagagaggcacatggaattgccacctgtttctattttagatgtttgcaccacacatggatcagtttcctcacattagcagagacaaagtggcaagaatagaccctttatgtttacaaactttcctctaactattggaaaacaccacttccatatccagctgttgtgacaattagggtaagaaagatagtaatcatgggcttccactataaatcccctgaaacgagcaaagaatccattccagcgtcttcctgatccatcaatgtggcgatccctcggacagccgggtgaaatgagctgctgctgtgcatttggagaaagattgataggctgctcttgatcgagtttgctaaggccaggcagcttcagagccaaacgtgtattttaagaggaattcacatttgtatcctttattgttatatttgcaacgaatctacagcttggaacaggctctgccctgcagctatgaaggagtaagttccccttattggagagagagagtagtgttctgtaaaagcctgagatgtggcggcgagatgaatagtgcttaaaagctgtgcttgcggtgctgtcatttagaacagcaactccgaggctttaaacgggagtgaaaggcagggtaaacgagtcctttaatagtggtgaaattttaaactgcctaaaataacaggtctccttcattgataacttcattgaatgagtgagtggaaactaactggccaggaactgctttcccataggagggccaagtttgcaaaagcggggctttttccttgggcccctccatgtctgggaggacagcttctttcctgcgtgatccctgcccctgccttgatagcagctcctggctggcaggagaccatccttcactggaaacccaaagcgcccataaaagacttcctttttcacattgccaaaacttaattttataattgtctgacttacaccactgggcacatctgctaagcttgtgtgccttctagacatataaaaggctactgtgataccattaaatatcagcagtgtgctttgctgtgctttgagtttataagggtgaaaggtgattgtgcaggaaaatggaacagtatatttgctgtgagacaggcaccaagacttcactcccatactcagttataattcatgacagtactggtgggaagcccttatccctctgtggagttaatgcatctccactgaagcctgctgagagcaccttgcgtccccccccaccatctgtgcgctcacttcctagctgtcttctctctttcactctctctctctnnnnnnnnnnnnnnnnnnnnctttcactctctctctctctctctctaactttttcctgagatctcttggtgttagtatagtcagactgctactgaattgtaaaactggttctccaaagcagaattgtcatttaactaggggaagagctggggagaatgtattacagcattgtttaatgtctcatttagaaaatgtcgattagaaattagagaagcagcaatgccttaaacccgtcgctgactccgagagccgaggctgtgctgctaatcatcaatgagtaagagggacccatggcctgagcgtggatggaggccagggacacaaaacaaggtgtgcatcacaacccaaactaaccaaccctgtgctgaacctgagttcagtgttctggaagtcgaacttgagtgagaccaaggtcctgagaactgcttgcccactctgtccattggcctgggccaaccagtggcatgagcgccaatccagaccccacgcactggcgccatctgccatgcgatgccacccactctgaggaccagaactaattgccttggagctacccaagtctcagttcaaaatgatcaaacccctgggttgtacagaacttcacttaaaagagcagtggtgatttgtgcgatgcaagccacagtctaaagtgaaagaagccaagatggtcaaacttgttgcagcccagagccggcagagggtcacagaaataggtggtttgttcccactctgtcctatccctttgtgttctctcccacctcccccgccctctgcactcccactttctgctgggagcccagaaggtgatgggacatgcagagggcgtgtgctgaaacaaaggatgaaactgcacctcgttcatagccaacccaagattaatgtgcaacgtttcatagtatatattcttgccatactccattgttagtactccttttaaaagataaatcaaatccgggtctgaaataccagtgtatgcatttaacagatgtgatgccataggggacctactgtgttataagctgcagaaatggcctttttatgccttagactccacttattccaaaggggctttagaactgcagcggcggggtgagaggtcatgcattaagacagcagcacccacgcataattctgcctcgcgtgtaattggctcacggtctcattctgatgtttgggtggcattagtcacatcgtctcgttcatcctgcaaaggaaaagtagggcaagaatggccgtgttcactgtccaggttttcttgggtgaaagatcactttgagatgacacagctgagtagtcagcctgaaatcctggttggtattttattaattttgcaccaagataaatcctgaaattctgacaaactccatgacaggtgaaattccttctttcagaatctgcgcagcaagaggctgctcatttcgttctgttccgaggcaggcaacaggagggcagctttataatcagccctcaaaggacccccagccgccccagagtctcgggctgattgaataactcctgggcctcttcccctaggcctccatcagcgggggccctgtggaaagccatctcccgcagactggcactgaagtgagctttaaaccaccattttctgctctccagaggagcccggagtactaaaagatagatggactgcagatattttatgagaaactgtcagaagaagagcagagtaaatgttttttttttcttcttctttgagtcacacactacatcactgttgaatttctcccagaatcttttacatttcaagtgagaaattaattggttgctaacctttaattctccccgcctccctcttcttcgttgtcttcctcttttttttcttaaatattcacacagaggccctctgcttaaccacagttgcagaaaatcagtaccatttgcaatgaaatatttataatgacagaatgaaaaattggattcattttctggactgtagccgaacagtctgcaactttggtgcggcattgtttagcatctctcatccctccctttcattggcgtcgttttcggaaacataacgcatggacgttcacctatgctttggagggatgcctaccaaaacacagagcctgtttttactcttaaaaaaaacataagaggagaaaggcacatgtttgtgttgtgctgctatgtggggggcacgcggatgtggcccataaaaaggtagagaggacgtgaactctgtcaaaaggaagggcgtgcttgctctgtagggaagagctgggagaagtttataaggaatacaggagacagtctggcctggactttgtagcagagcacaaatagcaatcagcatgccatcgtatcttggggcagatttataaggggaacgggaaggcagaacagaggtgagtaaatacacgttgaataacatagctcacgttctttcttcccttcagtgtttgctgtgtaggctttccttgccatgtgacccttgtattcagagctgtctcctaacccgggctgatgaccgcattttttaagagataagagatgaaaggattttgctaggacagcccagtgttgtattttaaacaagtctgcctcacaagtgtgagggccacaacaatacactgactcttattacagggctgggtaggatttgtagcaagctgcctaggcagtacatttgggtctagcaaataagtttgtactcactactccacagacaggcccaaagagcctgcctgtttcttctccctccgttggaacagaacaagggattataccctataagggggccatcccagccttccatcccaggcctctgtgttaacttttctttgtcctttttggaacactgggtttaattagttttagtgttgttttattttgatggtttttcaaaagtgaaaatagttcaggtagattcaagcgtcaatacaaatagcctcaaattccaatattggaggtttccttcactgaatttgcatcatgcaattgccaactccacaagaatcaataatccatattttattatataataaaggctgcctgtaagtgaattggctcattcattccatctgattagctcgattgtattcatggagagaaaaaagaatacaaacttaccttcaccaaaatattgcattatttggatataaaaagcttccagcactataaaacaattgcatagggataagagataattcatttcaatatttgtttaccctaagaagaatatgactcctatcatcctgcaatttttggtgacaactttaagtttcacatccattgcgtggaactggtctccggtcagcctggtctgagcaccctgtaacaggtctttcttccaaccaacagcaagaatcccactccagaattctgaaaaacaactgggataaacagtctttttcttttataacccttggagagattcaccttttacttaccctaaggccatttcctcttattcatccacggattaccattttcgaggtttttgaacgctcactgtgttctctgaagcaaaatcttagcacagatttgtgcccactaaggtgatgagaaacactgagcaggaaaggagtggttcattactgggatctctcaagatcatgatgcttagtttaacttgtgggtgacacatactttctcagaggcttggaggttttatacaggcttccagatttgtcgtttcattgcattccaaaaaaaaatgattttgagaaatatgctgacagttcagcatgaaatgatgtgtgttctgacacacactgcattgcagcttaggaatctagcctgaagtaatttttctgtagcgtttctaggactctgattcaggggagaaaaagaagttccctttaaagcatatgttttaggatgtgacaataacttttctcctgcgccgtgcgtggattcagtagactgtttccacttaacccttattattgttttctttcttgagtgccagggttaaggagaagaaattttttcttccattagtttttcaacaacttaggtgagtctgaaatatatacccaagtaaatgggaactgtaatagtggtgtgttcagaatcaatctcctctgcaggccaggcaaggaacattgaatagcgttcatttatgtactgccagatgtatttctgcatgtgactgggctcgccaaaccgctttgaatgattttcagtgttattaagcaaactcacaggagcaacaggacttgtgacagaagtaaagagcccggtggcaggagtcattggtgaaggaaagttgcacggaaagagaagcaccacaatgcagactctattttaatatctgagctaacaactctctgggaatatttctcttcctcttgtccagctccttctgtgttgtggctggtttgcatttgtgtttgaaatgccaggcggtttaatgaagttattcttttataaattttgcaacactgaagcaagcatgagggctttaaattagaataagtgccacttctgtatggcaggttcctttgaggactgattagaatgaggcctcccgttgcctggccctttatgcatggcagtgttgctgtgtgttcttgtttacggctcacctttgaatttgcatgagtttgcaccatgcctgccgcctggccctctgttagtcaggactgtctttctttcaggatcatgttaaatacttcactttaaagagatttttttaattatattgctttattgtaatgaattaaaattaacttggagtagcaaattatttaaggatgtgagggttatagattactctcaccatagctacagcacatctctgcgtggaggaattaaagggttctctttccagtagctctgtgcaccataaggggtgaggaaactgtcccacagagacctagaagtaaagccagaaaaggtgcccaggaagtgagaggagaatgggaacttcacgtgtgggtttctgaagcaaatagaagctcttcttggcagggtagagagtgggggcagctctgccattttaagaccttaaagagtataagacaatgggaaatcgtggacaagaaagaataaaaatatatcttaagaacaggtttaatagagaataggaaatgcacccaaccattcctgacttctttgtgcctgtatgaacttgctaataaaccgggatgattttagggggtggggagggatcgttaaagaaagagacctgaaattttcaacaatacacaataacatacagggaaaagagaaagaaaagcaagcacacaggcaaaaagaaaaaagcaccaaacttgagtgtgaaatgttttctcttctccaaacttgggttttttatttaaagtaggggataaccaaacagaattgggcctgtgaaatacttgcatttttaaagggcttgcttagatcttaaaacaagaattacttggggctccttctaattgcattctccatgcaggaataagtccccagagagacagaaagatcaaaggcaaacaccaggaattttacctgtagaagcaatgcatgtatgtaactctttttttttgccctgcgcaacagtcgcttaggcgtggaaatggacatgcgcacaggcgtattcccgtgcgcgtgcacacacgcacgcacacacgcgtgtgcacacgcacgcacacacatgtgcacagacacacacatgcacgcacacacacctctcaggaggtggctcatacttaacacagtttatctaaattaatacattgtcctttcacagttttatttttatatatctttaccaaagcatatgccatagtagacaagctttttttttttttggcttacggtggggaaagatgtttttctgttattcttaatgatttataacatgtttgacttactcttaatgtgagtttacctcctagggagtgtggcagtgtttttaataaaagaaataatacactacaaggaagtggcatttcttttgctttttgcccaagttcaataaactatttttcataattattggaatttggttgaagggaatccgtgtccctatcaagtggaaaagcagaaagagtcttggctccctccttcttcctacaaaggttaccctttgaatataaattacaacgccctgtgcttctctcattctaatcagatgaccttttgaatctggtggaccagagtttaaatcctaagcctgccagtcagtttttaaatcaatgccctgctccaccatctttcagtgtgtaactaaatttcaatggatttcaaacacggaagtgaagtaaatgatgccagtggaatcttgcagctgactgcaaaacagccaaacttaactctgagatcttgaccaagtgatatgattatagttaattttgctgactaaattctcttcaaaaaccttccgggattcaaaatctaagagaaaagggaggagttggaattttgtaatgtttgtaagaggacatttctgagcaattatcaatttaagcttccattatttgctgctaattggtacacaaggctgttaaatatttagcagaagtttgtttaattgcgtttgactgggaaggggatgcttgaatatagcttcagcagcaagagttggttgtgtgcaccgagagctggcggagaggaaatttgtattcgcccaagatgaacacattacaatgtcagacaagccttcttttttcttccttccaaagatttatttatctttaaggtatctaaaattagagcacgaagaaggggcactgttcatggatgtaaaattggaaggaggtcattcttaaccttgtttacagatgttctagtttagaaagcgccagtgtgataaattaaacattacaggggaaaaaattaaagcttagcaacaactggcacatggacacatctgtctgtgaagcactgacttaatccctgaatatcttattagacagtattgcctatcaaagccttctgtcccacagtacgctggaatcctgcaattccagaatcttgagtgaaatctttacactctccctctcactggtgctggctttatatagtttgatttaaattttctgctggcttcttgcatggaaacagacagctcaattcattgttttcttttaaaaataaacatcgtactctttactatatttcccagtggccattttgctctttttcgcctgttcttccctttcggcacctttttcccccactctcaaggtagtacatagtgcacgctattgtcagttgcaaagagggaaattttcaagcttgtcaggtatgcacaacagataggggtcagcttgcaactacaattttactactgtttttaagttcttaatggaaaatgggattgtcacgatgttaacatttcccacgtatgacgtcacagcagaatttgtcctttggaagctggtggactaaagggcttgttttatatctccaaaatgtttaattgtcaaaatactaggaattgttctatgttagcaactaggacttagcattatttaaataattagtctttgcttagtcttctgaagactcacattagactaaggtcaaactgggtattcttggtacatggtaaccgccatgggcttttccagctcgtttgatattgcagaaaatagcaaaatgtggtgaaaataggccgtttttgaactgactccctacctcccggcacagccggacatatctgcagctccaccagatgcctcagctcctacacagttcctgccctctgccctctgccccctgccttctgccctctggttctcagctttgctgctgctcttccctctacttcgggggccattctctccctttttacctctgcctcctcatctctcccgcaccaggcatgtgtgactcctccaagaacaaagcctctgacataaggtgaagggcccttcctctgtgtcctagagcaccctgtctctccagatagaaggtctgggctatggcaatgagtgtcctttatctgtacagctggcccagccgtgggactaactctaagaccttgagtgttggcttcaaccctctgggacttaattttctcatctataaaataagatactggaccagatgctgctatgtaccacccccaacccccagctctgaaaccaattttttctttctctgcagtattacttacaggtgtagttgattcacctgccattgagtctagaccaacaaattgaggatgatggctctgtagttctttcaaagtagatagttttttccattccccaaatactgatttccagagtttaatatttgggtacctttaaacattattagattgcaaatatccctaaagcagcataggttgattgccactaaaacgtaccatctttgttcatcaatggtatatggatggtcttgataagtcactaaaagaatgaacacttctggaaatacttggttctttacataaacaatgccattatatatctcagaagaattctttctacagtttctgtatacttgcccacgttcacccattgactacgttttactgcagtacggtatatatttactgcagtacagtctcatgtggtatatgtgtccctttgcagttctctttttaaaatggggaaaataccatcttataatgaagacaaagtagcatactcaagcatggtatagcaagctcaatgtgttttcaatacaaagtaaattcaaaacaattatataccttccttatgaccacctgttcctgtgtctgacctctaatttaaacctgtcaataacaagacaggtcattaacaagacctcctcattacagctatttaacacacctcatagaccaccatttcttcttcccctttagatcagttcctccctgcaaattcttcaaaacccttaaattcagaaccctccttatttcccagctttcatttattcatgcacaagtgtttttcaaacagtataaggcagtgttcctcaatatctcccctggtgggagagatgcttcccaccaagagatatgtggcagtgtcaggggacatttctgcttgtcacaactgggaagatgccactagcatgttggcagtagtggctgaggatgctgctaaacatcctacaatacccaggacaaccccctgcaacaaagaattgtccagcgccaaatgtcagtagtgctgaggttgggaaaccctgcttgtgtaaggcaagccccactggccttctaaaatctattttcaggctcctctctggaaccaagcaagtgaatgggatgtgttttatgtaatgactgagaaatggtgtactggatggtcttctaggttgctttggatgagatggatgaacttttatactataggtacatggtctagtgtttggaacataaactcatcaacatgccagtgtcctcatccttcaggattatctcagatcaccctttttctggacgtagttagcacaaatgtccagagaacaacaacaaaaatgtccttcagtgaggtttattagaatgcgaaattgtttcctatgggaggtatgatagcaacttcattgccagaatcattcaaaactggcctaagtgtgtaaactttatcaaacaattatgttcctacaaggggacaaaccaaatgtcctaatagtccttttccttctttaatatcttgtattcttctgatcgcttctgatgatgccatttcaccttttgctttaatatagcttagtgtcatccagaaaatgctttgagatgtcagaccaagcccatgtgaactgttaaatgtcaaaagaaaatgcatcagtgtttctgtaagttcatggtgatgacattaccatatgaaaaaataaaaagggaaattctgtcagtgcaaacatgatcataaatgcaacattcatggcattaaagagaggggcaaaagcatacatgacaatttggaaatgccattgctgtgtcataataaaagagtagaacttcattctagcagattctacaaatgtaaagattatgagtcaacttccctggctatgaaaaaaatccactatgcatatgtcttttcgattctcatagcacttagggaaaatactgtatatttgtcctttaaaaaatatgcattgaactatagcatagctcacaaaaatgcaatatccacagatatggtcctgatgtttacctggtaaggtccataaaaacacaattaccccagatttcctcagccaggaattatatagttgtgggcagtagaaactttggggtgggcaaagtagggtacttgagggtgattttggtcttcagtgtaatttttagaaaattcctaatggtactcccagagccgtagcaatttacttttaatcagttgaaaattatgagtacttttgtaattgtgtggactttgaaaatgttaatttattaacattcacatcctgttaaccttattaagatgcttaaaggtcaccctttgccattgtgactattttttctcttaacgttcaggggaaataacccaggatcctgtcatcattagctgtatacacttttaaaactattttactagcataagaagttgggaatgaaaaggagagaggatggaaatgtaaaaatcttgattagaaagtataatttaatagaacatgtattgaaccaaatatattgattaatgtagaagatatagtacttatattgattcgaaccagagatttagtactaaaagctctaagccaaaaagctgttgcagattgctacaaaagtcagtttaatgctgtccttgagaatgccttcacaaagaaattcttctaatgtttgaggactaggtagaatgcggtatatgtcagtctgatcccggagggttttattttgtactctaatagctgttaggagcctacattatatccaaggagtaattttccttaggggtgcccagctcgctttgtgtcaatattctagcattttaagtcacgtacagtatatgcttctgggaacggggaaggagccagccagactcataatggtctgcattcattaataaaggcagaagcttctgtccctccattgcccactacagggatgcctctttggccttcagggacccgtacagacacatttaaagaaagctttattttgagtgggcaggagatgaaatgtaggacttgcaggcatttcctaagtcagctatatgcccgagcacaggggtgaccttaatgggtcaaagaagaatgcaggtcaaaagacttattatccagcctgttggaaaccaattgcttttgtttaaaaaaaaaaattaaaaatgaaaaaaagcaatagtgcttaaaggtggacggtaatgtagaattctgtttgcagcctgtaactgcacgactgtatgtgaactagaatatacttccagaaaaataagagcataccgattatcctcagtgtttatggataaaggtccaacccaagtgataaaaggaagggtaatataattagttaatcagtgatgattgattacggatgtttgtgttcttcaactaaagaaaaaacaacatgctgccatggtgctgtcaccatctgttgaaagaaacagccacatttaatctttatatttctttatttcttcccaccttgcattgtttctgagccacaattgcctactatttcatctagttagaaaacatctcatttaaattaaatacaactgcagtttaaattcgggtttctaatggcatagtgaattagtggtggaaagcttgttattttttttcattcctttttaaaatagcgtgctggctcttttacttagttttaaaagcttgtcagaatttgtttgaaacaaaaggctataaataaacaagtcatggtaaaaatgattaacatctttgaatcaacagatttcacaaaaacttccattcaaatgccatttttgtttttatgaccactgatacgtaacattttgccgatgccaacagagtgttacaaagcacagacgagacacggtctctgccaaagaattagaaaagtgaaggcaatctctgggcataagttttggggttgggaatttaatttttcaactctaggaagataggttccccctggctttcctccaaagctgaatttcatcattgatgtaggtgcaaaaattcaaatttacatcaagattgcaggaaaatggaatgtctttagccaaggtgaacagtttcaaaggatcatggatttttatttttacttaaaaatatttttcttggattgcattttaaataggattaaactgtttgaccagcaaatgtggtcagctctcagaaaaaaaggaggctgaattaatcatttgttagagtgccaagcccaaaatgagaattccagtcttgtaaaatgaaaggcatctcatatttaaaaagaaatacatagtgctagaagggaatttttaaggccctcgtctgttttttagctttctaagtttaatttcacatttatagagaaaaaaaatacatacagcacactccttccaaatggggccctttacagtaaagaaagtgtttttgaaacctcgctattaaggtatcatacctagatggatcttcttttcagctttaaggtatgttgtggatttgatttttttttaacacaaacccccctcgtgtaaaacaactgttcataactgggattaatggtttgcaattttcagttacttagacatggggtctccaggagatggctttttgcagagtagaatatggctctctgtgggattacagaagttttcttctcttcctacttccttttctgtcttcaccccccaccttcaccaatgttgcactgatgttcttctcaattatgtaaaacactttcccttcattggaacagatattttttctcataacctgtcattgcattaaagtacttaagggactgtgaattgctgtgtaaaattggtgagattacccactgctttgttctagtgtagtggtttcctctggacctaaagagctgaaaactcttgcacagagagaaggctgcttgtggatggcctggcagcatttttctgctttctgctcatatgcatttgtgtccttgctgtctcaggactggttctgtggtgtggcaagtagccagggggagagcagactgggcctcagagcctaccctctctttgcttggcgcttctgctgtctacttttttatccttcccacttgcctcttgtctccctttctaaagaaataatgtctatgagcatcagaaaacacaaaaaacactgagtgctcccatgaagctctattcagagaatctttagtcgagaccagagactaggacttcgcatctgttctcaccaacacctaaaagccaatcgaataaaccatggctcagatattccattccttcccccagagaatgaaatgaggccatttgtatttccagtggacttgaaatactgcgtgggggaggagaacagacacatcccccggatcctcaaaggtggcaaaggcaagcccttgaggatggagcagaatcccatggcggggttgtttccaacacaagtatatccattgcccaagaagctctaggaacgtgctgccttccaccatgagcatcactgccaatggtggacagccaggcctggggacaccctgccatagcactctgttgggctggagcaaaaaagggaaaccaaacaaaatgagaataagagacctccgtggtctgcaggcatctccacaccaagaggacttcctgcccttacatttctcatgccagatttcttaggttgatattacttacattgggttgctttatttttgaatttcacaagccatacccttgcccttctcacaagtgatttatattcctctctcttatatgcaaaacataactcctttatgaaacaacttcagtctgttgtagtaagtgatgtatgtgtatttgttcatgtccttgcacctctgaagagacttgtatggctttgattgaggatgaaagcatacaacacacaaccattgccaactgttatgggcagtttgttttgggttcttgtagcatcttgatatgagcacatataaaaacaccaggaaaattgcactgtgtactcttttactaacccctagaatccaatcacatgtggagtgtccatcataagcacttaaacatttgaaaataatgtaattaaactgttttttttttttatttggtaagaagaaaaaaacacccatctttctgtcagagtcctatcatttaggtaaatacaggttgagtattccttttttaaaatgcttgggaccagaagtgtcttcgatttcagagtttggcatatttgcatatacataatgagatgtcttggggatgcaacccaagtctaaacacaaaattcatttatatttcttatataccttatacacatagcccaaaggtcattttacacaatattttcaataattttgtgcatgaaacaaagtttcagtacattgaatcagcagaaagcaaaggtgtcactagcttagtcacctatattccatcatgtcagtgctcaaaaatttcagattttggagtatttggattttggattttcccatttggaggtgctcgatctgtattatcgtatcttcttgtacttatttggtcattgtttttggactttttaaaaataaaaaacctttctataaacttgactctgagatagcaaaaggtataagaaggcttagatgtggtgtattttgagtaatcaaacttttattgtttataacctttccgaacagaatcatgttgatttttcagaaaatagcaaagtttttcggtctcattagtacttttattaccctttctgtctacatatcggtgacaagtacttttcagaagtattaaaaatcaatatacagataaaagagctggcataaaaacaatttgctatttcctgtattcactctgaggctgggactattaagatatgttttaaataagggagagtgaaatactggtctgcatcatgatttgtcatccatctttttcaaaaatgagctaaatttgaaatggaacaaggaagacctaagtcctcttcacaaggctcccagccccccgccaacttctgcacgcagccccaattggttctcagctgaacctctggtcattcagcctgtattcagggagcaggcagtttgctagttgctgtaaaggatgaagagataacaaacatctctaagatgaatccctctgcttaaaatactccaatggctcccttaacctacaagacagtctcagctctttagcaaggtagataagacagctcatattcttgccccaaaccagctccatcttcatgtctcgtgagtactgttgattcagaacactccagaagaattcatccaatctaaacaagttgcaggtctgcaaacgtaccttgcatattcctgtttcattgccctgacccatgtgggtcccttggcctagagtgccctccctgtactctctgctcatgtctccggctgtcagtgtgctggatccacttggaaccatccccaatggctaggcaggtttaggtgtatccgtgacatttctgtgttcttttctaatagactgcttgccatcttgctttacttttatgtacccacatgaccttctttagactgtgagcactttgaaggcatgaaggcaaggaccatgcccttcctctccagtagcccttgccttgccagccagtcactgagatagccaaaccctctttcctgagcactgcagcgctctggcatgtgccaggtgctgatgtgcgttttcaatagatgcttgtagatgaatgaataaatgaatgaacatcggaattattggcatgagtgagagccaggcctacaaataatcatgagacaagacctaagatgcatcctatgtaagcagtataaagtgcagcaggaaatcagagaagggagagatcagtgttagatggggtgaggatggaagtggtgatattttgagctgggccccaaggttgtaatacaaagggattggggtcaggggatacaagtgagtagtgagagaacatggctccaggaaagcacagaggaggagagtggagatcaggccatctccaggcttatgctccaggcaaatatcctgcagatctgtgaccatcatccaggcctggttcctggcgaaccaggttatctcttcatcctttacagcaactagcaaactgcctgctccctgaatacaggctgaatgaccagaggttcagctcaactttcccacccggcgtccaccctcagggcctggctggtggtcctgagttgcccagcaatcccagttaccctctcacaatttggaaagagagtgttcactcagaaaggggacatgctagcatagatgagcagggaccaccaatatacagcacaggctgtgtcagctgagaaagagcatccggggacaaggggagacctggcgggctactgtaatctgcccctgagccacggtatgaccacagcccaaagcccaccctcaggaggggggctgctcccactgtccatcatcagccagctaactcttgcatttcatacccatattcaggggcagatagagcccctgttgtcaagatgttacagtctcagagggattggaacagaggcatatgtaaccaatggaaatcacgcacagatccataaaactgttaaaacagtgctacctgctccttgaacactgggtcgtatcttaataagaagagatgatggatggcgggagggtattatagaaaggcatggcagaggtggagaaaaggcaaggtgccagccagccatctcacattaaggaggcttctgccctggcctctccttccaggccctcatgggtgacagcaggttcagaagatctctgggtctgtttccccctggggaagaaacattagattttttttaacattagagggcacccatgagcactattcatcagagggcagaaacttcattgttctgttcaagtcattatgaattaattacatgtatatatgcttggtctgatgaaaatgaaatcactgaagtttgttttccctctcttctctttttttttttttttttttttttttttttgttatttacagaatcatacaatgacccaacacagcagttagtgcaagtacagtctctcaaggagaattgattttgtggcacaaaaagggaacatgttttactctttgcacgaaactttcattgttaatgtatattattcagaaacattgtattgtaccataaaacttgtattatcaaactgttggatgttcatgtgtttgaacttttgcgcaccggatagaccccttgtatataaagtgttgcacatgtattatgtcgtctgatactaaaatggtcttataaagacaagtggacttgggccctattcaggcaagattaaaaaaaaaaaaagactatgaccaaaatggcttaagataaagtatttttaaggaagaaagattaaaaacaactgttatacatgagactatggttggacttccttttctttacacttaagcctagaatttctctttaggtatatcagcgcttaaatccaagactattttttattgctgaagattcttgcaaaccatgaagagatgttctcacagaacagaaccccacagctggataaggcccgtatatatatatttgtaagccttgcaatgtgacaggtagcatcactatatatgcaatagttgttatgtagactgtcaaagaatttttttttccctggatacatttgaagctttgagtgttcaaggttttccttaatgatttcacgcagccaaattcttgaatcagttgaactaacctgtatgttactgttattaatgtttactctgcagtctgaacctggagattactggaattgttttccaagaggaaataaattcagtttaccattag

SEQ ID NO: 21 - DNA, 4690 bp, Homo sapiens
ttttcagaccccaactgtaaacttgaagacaagactgaagatggagaggcactagattgtaagaagaggccggaagacggggaggagttggaagacgaagctgtgcacagctgtgacagctgcctccaggtgtttgaatcgctgagcgatatcacagaacacaagattaatcaatgtcaactgacagatggagtggatgttgaagatgatccgacttgctcttggccagcttcctcaccttctagcaaggatcagacttcccctagccatggagaaggttgcgattttggagaggaagaaggtggccctgggcttccatacccgtgtcaattctgtgacaagtcgtttagccgcctcagctacctaaagcaccatgagcagagtcacagtgacaaactgcctttcaaatgcacctactgcagtaggctgttcaaacacaagcgcagccgagatcgccacataaaactccacaccggggacaagaagtaccactgcagtgaatgtgatgctgcgttttccagaagtgatcacttgaagatccacttaaagactcacacgtccaacaagccatataaatgtgccatttgtcgccgtgggtttctgtcctctagttccttacacggacacatgcaggttcatgagaggaacaaggacggctctcagtccggttccaggatggaggactggaagatgaaggacactcagaagtgcagtcagtgtgaggaaggctttgacttcccggaagacctccaaaaacacattgcagagtgccaccccgaatgctccccaaatgaggaccgagcggccctccagtgtgtctactgccacgagctcttcgtagaggagacctccctcatgaaccacatggagcaggtgcatagcggggagaagaagaactcatgcagcatttgttctgagagtttccacacagttgaggaactgtacagccacatggacagtcaccagcaaccggagtcatgcaatcacagcaacagcccttccctggtcacggtgggctatacctccgtgtccagtacgactccagattccaacctctcagtggacagctcaaccatggtggaagctgccccgccaatcccaaagagtcgagggaggaagagggccgctcaacaaacccctgacatgactggtccctcgagtaaacaagcaaaagttacctacagctgtatttactgcaacaaacaattattttcaagtcttgcagttctgcagattcacctgaaaactatgcacttagataagccagaacaggcccatatttgtcagtattgcttggaggtcctgccctcactctataacctaaatgaacatcttaagcaagtgcatgaagctcaggacccaggtctgattgtttctgccatgcctgccattgtctaccagtgtaacttctgttccgaagttgtcaacgacctcaacactcttcaggaacacatccgatgttctcatggatttgcaaaccctgcagctaaagatagtaatgcattcttttgtccccattgctatatggggtttctcactgactcttccctggaagagcatattagacaggttcattgtgacctcagtggctcccgatttgggtctccagtgcttgggactcccaaagaaccagtagtagaagtctattcttgttcctattgtacaaattcgccaatattcaacagcgttcttaaactgaacaagcatatcaaagagaatcataaaaacattcccttggccctgaattatatccacaatgggaagaaatccagggccttaagccccctatctcctgtggccatagagcagacatctcttaagatgatgcaggcagtaggaggtgcacctgcacgtcccactggagaatatatctgtaatcaatgtggtgctaagtacacatccctagacagctttcagactcacctaaaaactcatctcgacactgtgcttccaaaattgacctgtcctcagtgcaacaaggaattccccaaccaagaatccttgctgaagcatgttaccattcactttatgatcacttcaacgtattacatctgtgagagttgtgacaagcaattcacatcagtggatgaccttcagaaacacctgctggacatgcacacctttgtcttctttcgctgcaccctctgccaggaagtttttgactcaaaagtctccattcagctccacttggctgtgaagcacagtaacgaaaagaaagtctataggtgcacatcttgcaactgggacttccgcaacgaaactgacttgcagctccatgtgaaacacaaccacctggaaaaccaagggaaagtgcataagtgcattttctgcggtgagtcctttggcaccgaggtggagctgcaatgccacatcaccactcacagtaagaagtacaactgcaagttctgtagcaaagccttccatgcgatcattttgttagaaaaacacttgcgagaaaaacactgtgtattcgaaaccaagacacccaactgtggaacaaatggagcttccgagcaagtgcagaaagaggaagtggagctgcagactttgctgaccaacagccaggagtcccacaacagtcacgatgggagcgaagaagacgttgacacctctgagcctatgtacggctgcgacatttgtggggcagcctacactatggaaactttgctgcagaatcaccagctccgagaccacaacatcagacctggagaaagtgccatcgtgaaaaagaaagctgagctcattaaagggaattacaagtgcaacgtgtgctctcgaaccttcttctccgaaaatggcctccgggaacatatgcagacccacctaggccctgtcaaacactacatgtgccctatttgcggagagcggtttccctcccttttaactcttactgaacacaaagtcacgcatagtaagagtcttgatactggaaactgccggatttgcaagatgcctctccagagtgaagaggagtttttagagcattgccaaatgcaccctgacttgaggaattccctgacaggctttcgctgcgtggtgtgcatgcagacagtgacctccaccttggaactcaaaatccatgggacgttccacatgcaaaagacagggaatgggtctgcagttcagaccacagggcggggccagcacgtccaaaaactgtataagtgcgcatcttgcctcaaagaattccgttccaagcaagatctggtgaaacttgatatcaatggcctgccatatggtctgtgtgccggctgcgtgaatctcagtaagagcgccagcccaggcattaacgtccctcccggcacgaatagaccaggcttgggccagaatgagaatctgagtgccattgaggggaaaggcaaggtggggggactgaagacacgctgctctagctgcaacgttaagtttgagtctgaaagtgaactccagaaccacatccaaaccatccaccgagagctcgtgccagacagcaacagcacacagttgaaaacgccccaagtatcaccaatgcccagaatcagtccctcccagtcggatgagaagaagacctatcaatgcatcaagtgtcagatggttttctacaatgaatgggatattcaggttcatgttgcaaatcacatgattgatgaaggactgaaccatgaatgcaaactctgcagccagacctttgactctcctgccaaactccagtgccacctgatagagcacagcttcgaagggatgggaggcaccttcaagtgtccagtctgctttacagtatttgttcaagcaaacaagttgcagcagcatattttctctgcccatggacaagaagacaagatctatgactgtacacaatgtccacagaagtttttcttccaaacagagctgcagaatcatacaatgacccaacacagcagttagtgcaagtacagtctctcaaggagaattgattttgtggcacaaaaagggaacatgttttactctttgcacgaaactttcattgttaatgtatattattcagaaacattgtattgtaccataaaacttgtattatcaaactgttggatgttcatgtgtttgaacttttgcgcaccggatagaccccttgtatataaagtgttgcacatgtattatgtcgtctgatactaaaatggtcttataaagacaagtggacttgggccctattcaggcaagattaaaaaaaaaaaaagactatgaccaaaatggcttaagataaagtatttttaaggaagaaagattaaaaacaactgttatacatgagactatggttggacttccttttctttacacttaagcctagaatttctctttaggtatatcagcgcttaaatccaagactattttttattgctgaagattcttgcaaaccatgaagagatgttctcacagaacagaaccccacagctggataaggcccgtatatatatatttgtaagccttgcaatgtgacaggtagcatcactatatatgcaatagttgttatgtagactgtcaaagaatttttttttccctggatacatttgaagctttgagtgttcaaggttttccttaatgatttcacgcagccaaattcttgaatcagttgaactaacctgtatgttactgttattaatgtttactctgcagtctgaacctggagattactggaattgttttccaagaggaaataaattcagtttaccattag

SEQ ID NO: 22 - protein, 1083 aa, Homo sapiens
MQVHERNKDGSQSGSRMEDWKMKDTQKCSQCEEGFDFPEDLQKHIAECHPECSPNEDRAALQCVYCHELFVEETSLMNHMEQVHSGEKKNSCSICSESFHTVEEKHMDSHQQPESCNHSNSPSLVTVGYTSVSSTTPDSNLSVDSSTMVEAAPPIPKSRGRKRAAQQTPDMTGPSSKQAKVTYSCIYCNKQLFSSLAVLQIHLKTMHLDKPEQAHICQYCLEVLPSLYNLNEHLKQVHEAQDPGLIVSAMPAIVYQCNFCSEVVNDLNTLQEHIRCSHGFANPAAKDSNAFFCPHCYMGFLTDSSLEEHIRQVHCDLSGSRFGSPVLGTPKEPVVEVYSCSYCTNSPIFNSVLKLNKHIKENHKNIPLALNYIHNGKKSRALSPLSPVAIEQTSLKMMQAVGGAPARPTGEYICNQCGAKYTSLDSFQTHLKTHLDTVLPKLTCPQCNKEFPNQESLLKHVTIHFMITSTYYICESCDKQFTSVDDLQKHLLDMHTFVFFRCTLCQEVFDSKVSIQLHLAVKHSNEKKVYRCTSCNWDFRNETDLQLHVKHNHLENQGKVHKCIFCGESFGTEVELQCHITTHSKKYNCKFCSKAFHAIILLEKHLREKHCVFETKTPNCGTNGASEQVQKEEVELQTLLTNSQESHNSHDGSEEDVDTSEPMYGCDICGAAYTMLLQNHQLRDHNIRPGESAIVKKKAELIKGNYKCNVCSRTFFSENGLREHMQTHLGPVKHYMCPICGERFPSLLTLTEHKVTHSKSLDTGNCRICKMPLQSEEEFLEHCQMHPDLRNSLTGFRCVVCMQTVTSTLELKIHGTFHMQKTGNGSAVQTTGRGQHVQKLYKCASCLKEFRSKQDLVKLDINGLPYGLCAGCVNLSKSDGINVPPGTNRPGLGQNENLSAIEGKGKVGGLKTRCSSCNVKFESESELQNHIQTIHRELVPDSNSTQLKTPQVSPMPRISPSQSDEKKTYQCIKCQMVFYNEWDIQVHVANHMIDEQHECKLCSQTFDSPAKLQCHLIEHSFEGMGGTFKCPVCFTVFVQANKLQQHIFSAHGQEDKIYDCTQCPQKFFFQTELQNHTMTQHSS

SEQ ID NO: 23 - DNA, 67963 bp, Mus musculus
  misc_feature (1)...(67963): n = A,T,C or G
agctgtaggtgttcgcatcgccgtcgcctgcatcgtggagctcgggccctcttttacccgggatttttgttgtcgcctgaaattagcggtgacatctcaaagggcaggcccggcagccgccatggtggccaaggattaccccttctacctcactgtcaagagggcaaactgcagcttggaggcgcccctgggcagcggggtggccaaggacgaggtaggacgcgccctccacacacctgcacctccgggcttctctgccacctcaccctgtgtaccgctcgctttctctccgtctcccccacgtgctgcgcttctccagatcgccccttcaagtgttccctctcacgccttctctgtgggtcctctatcgctgccctgctccctgagctcgggaaccgcagatctttgatgctgcttctttccttccgagcgactggcagaccgaaccccagtctctgtctagagcctgcaaaggcacctacctacccgctgccctgttaggaaggcccgggtgtcgagagagagcctcgtaaagcaatgtctccccgtccccggccggggttaagagagctaagttcttggggaccggttcagacatttcaccagacacacttggttttgtagctgtttgagagcaagggcgggacagggcacctttacttgtcacaagtaaccaataaaggaggttgggggaagggtgtcgttcattttgggtctgagctaaatgagtaattgaggctctccttcatgactgctgaaaacgagctaaaacgttggtgaatgggaagctgacttgaaatgctagaaacagttcccattctgggaacttgggcgcggggagaggggcagtgcccttgggtaatccagggagtcctctcagtttggctttcttaggctttcctctcccacccccatgtgtcctgtctctggcaaattgctgactgcccttagaagttggttaggttcagttgggggagaagacgattctcattctttttcaaggttttagagaagacagttaattgtcttatcagactccagttttgctgtggtggagtccgtaggaccagctcatcatgtcgtctgtctgtgtgtgtgtgtgtgtgtgtgtgtgtgtgtgtgtgtgtgtgtgtgtgtgttcgttctccactttcctctgcctcactctgagagactcggggtgggcagtgacgctggaggcaggtgtgtgtcccgccttgtcacagcactgttgattccacctacacaacacatgtaggtctgcttggtgtgtgcccttgacgctctgaattctgtataggtgtgttttgggggttggtagcatcagagatccatttcctccaacaagattgcctcccttcaacaggactccaccagattctggttagatcctcctttttgtttgctgagcacaagataagcctctggcctttccgtagctagttgaatatttgtagagtttgtagtctcagcagctgtggaagtgtagtgggctctcatctgtttggtaccgtcatggagttcaggttgatagagcctagaatggatatgagttttcagtagcaatgggactggtggcttctccaactcctgggaggagataaagcatacctggtttggttaatacattaaagtgggccagagaagataagagtgaaaatcgctgggaattctgaccaggctttttttttttttttcatctttttgtcttgagttttggggtcctgtggtaaaggcttgagtgaacctgtctgcttattccttcttcccttgttagtcatagtctgtagatatatatgtgctgtagcatttcaggaacagttatgctaattttcctcactactaataggatccacaaaataaagtatatcttattttccctttgtggggatgtaattatgtaaaaacaaggatgggaggtgagtgcttttggggaatattggtatttttcagggatcaccattgagttttattaatataattgtctttaccataatcaaagtacactttacacaacttgatggctccgactttgttggtcagctataaatcacttcccaataatgaagataggctagattggaaaaagaaacttaagtgggtttcagggcaagtttcattagcacaaaaggcgactgaacagaaatatatattttctgccggtaggtgtcgccagtatttataaatgtctaacagcaacaaccaaaaaccacattccctcactgtcttaaaaaaaacaagattatataattgtttataaaatagatattaagtcctgagaacgtttctttttcaagaaacttttctttttttgtaaaaagaacgataataaaaggaaacctgtgtgtctgaaggccttcctgagatgacaggacctgttgaccttcagggcgcttgtgtcgagcacctgtgcctggcacaattgtgtgatggcagttcctcctgagcatgttcgagggaagaccgtgtgtgcagtgtggccgtggctgcagccaggttcttctagcactcagtcaccagcaacttgatgttcacttaacagaaagctcagcggggaacaggtaaccatgccatctacctgaggaaaaatgatgaatacattctcttaaaagcaaataataaaatttctcttcagggtttaattcaaatgcttctttttaaaattttattgatagtttccagtggaagcaaaaacgatacatgtttacattttttctttaaaataatccattttaaactttaaaaaaatattccgcataggttatgatagtgcatgcctgatattttgtatcaactaataaaatagtgctgcttcttctgccatttcttacatgggttggattgcaaatactgctcctaaacctggcgtttcttatgggtgtatgcgttggactgcaaatgtttaggtgtaatgcccctgactaactagccataaaattctccagctctcatcatcactgtgaactgtgaggagctttttacacagctttggattttcacagaaaattgtcacgtgatacaagcagtttattaatgtaaccttgctcagtttatctccattttcattgtcatgaaaactttgatctctgctcactccaggactgctccgagtacctgctcagttccctaagtgggaagctgagaacgctaatgaaccaggctgattatcagttcaaaatctgtttctctgtggtaaggtttactttaaatagaaggtgaggtttactttaagtagaaaattcagtagccaggcatggttaaggaagttaaggtgagggcaggcttctaagagttgtaggtcaacattatgtttactatttgtgtgtgtgtgtgtgtgtgtgtgtgtgtgtgtgtgtatgcatgcgcatgcgcgcacgcatatgtgcaaattcaagcatgtgaaggttagagaacatctacctctctctctgaaatgttgaacgatctggggattggactgaggccattaggtttgtatacctgttgctcttacctgctagtccatctccgtgacctcagtttcatttttaatggaatccagacatttttcttgtgttaggcttggcatcctggtaggcttctcactttgggcatagatgtgttccttggcatcaggcctcattggttggtggtatttctagccattgcttcatctcttggtgcttataaaaatctcagtgcataggtaataggtgtagttcatgaatagttgaatattaccctgggctcccaaaagtataggttctagtttttactcaatcagtagccttgcatagtcttatgaataatggcatacagtggatataaaattaaagcattctaccatgccaggatctcttaagactccttgtagctcatcacaaaacatatattaaatcccagctttgtgaataaggacaccaaagaaaggtgacttgcagaaaaaatacaaagaaaatccaactcgatccaagattcaataccagattttctgatggatttagcctggtgttcagtacttaaaaaaaaaaaaaaactaatggaaaaaaatgaaggtaaatgcaaaacagacatatataatgcccccaaataaatactgtcttttaaacaggtaaccttaactgagaatgtacctctgaagctttagctacaggacaagctgggccccatgttcttcggtgatttgtgcctcccccagtcaacaactgtatttgaaagttgtacccacttagaggtacactctttgggtaccagttaccgagctaagtggtcaactggttttctggacttagcttttcttggaatctacattgtatagtattgaactgtcagtctatatgggcatgcaaacagccatggcagctattacaactaaatcctaaaagttctttagatggcttagtaggcctcagatttctctgggtgaaaagctgcacagtgacccagagagaggtcaccactcactggtagttctgattcaggtcacttgttcccctggaagggtgtcttgcaggtacagttctccaagatgagcacatagtggataagatatcttagaggaagggaagttaactttatccatgaggacttttaggctgttccagggattgactctggaataaggctatctggtccccttatcttccccacaacctgatagtggagtgacttgggcaaaccattgtgctagttttcatgatcataatctaaggtaatgatagtgctgcctcctagaaatgtagtgaaggtcaaatagggaagttcatgtagttcctggcacatagaaatctcagtgagtgttatccagcctggtgtggtgactcacacctgtaatctcagctctaggaggtagggtggaagtattcatgagttcaggtcaagcatggattataaatcaaggccttgtgtcaaaaaaagagcaaggtcatgtgcatcaccctagttaatgaatacacacacacacacacacacacaaacacacgtatctcaatcatccatgcatggggggagctccatatgtatgtccttcactttgatcataatcacaatgatcatatgaagttagtgctaccctctgtctttgttagggttactattgctgtggtgaaacaccatgaccaaaagcacattgaggtgaaagggtttatttgacttctatttccacatcacagttcatcatcaaagtcagggcaggagctcagaggcaagagctgatgcagaggccatgggggatgcggcttaatggcttgcttcccgtggcttgctcagcctgctttcttatagaacccaggactaccagcgcaaggaggtagtaggctgatactactaccgcagcaggctgggtcctcccccatcaatcactgattaagaaaatgtcccacaggcctgtgtatagcccaatcttaacaaggcatttttcttcctcctctcaaagttgcctcctctcaaagtgactttaggatgtgtcaacttgacataaaactacccagcacgtcctgtgttgtaaaaagaaggaaagactctgagaacgatgtcatggctgagctatgtggtagaggccccaagactcacagcttagtctggctgtgaagtctgtactttcccaaccacatcacattgccacaaagtgactaaatcaccggtctcctcaccacacggcacccgaagggtgaacctgctgcctgccccagaaattgcctcacaatccaaggctcattttttcttcagtgagtgagagacccaacctccagacagtacttcagtagcccacttcatagagtagcaagccctgattgaggaggttttgctaatttcaactctatgtgtctcaagaccacaaaggagatctctgccaaaactctccgtgtccagcaatgtgaagctgacaccagtacttctattagtcattttgcttatctacatgagccaccagccttccacataaaccagtattgagggctcaactaccatctggtttctttttaaattgtgtcctttttttttttttaaagacatccctaattgtgcaccagtgatactgtatttataaatgatggatgaaaataaattactggtcccatcctaatcaatcttgcaagccctcagtaaatttaattgttattaatggtgcgtttgtgtatctggggcgccttcattggtgatgtatgtgatcagttgccttgtataatttgtctcgtgaagaacttgctgtgattgcatttccccttgtgttaggtcagacactgttggcagtgaaggccagaggtttctaatgctctctcctccccatccccacccccacttgcccttttttggttttggtgtaaaggagctactggcttaggattaatgtacattgagtaggagaggcttgtgaaccttcagctggctaggaagagtggtccctttaagtctaggagcacttgaacatgttcctctgagtgttgggccattgtgttcttttttcaagaaggcagccttggttattagtaaacttcaattaattggagctgaaccagaaagcttaacagtaaatccattggtctttttttttttttttcctggctcttacattgaggaggaaggagaagcaaaacaggctttgcttccagggacttaaaaaacaaatagaacctgctagggaaatgaccctaggtcaccgcatcagagtgccctggtctgctgggaacaggtgcccagctctcatctagctgctggatgcattcgatctctgtttaccacttccagggagagaaagctcccagtatgtgagaccatcttctggctttgttcagtgtgcttcatgagaagatcctctggttagagcactgcttttcagagctgttattctagtgtactttcttgtgtatcctaaatatttggaaattgatgtccctctcctaatccctcccagttcacatccttgctcacaatcaactcaggtgtgttcattctgtctccttgttttccttatttcaccaggacatcctaattgtgtccagaaatcttgaatattgattagcccagaaatactataattacactatatcatgatgttaaatcaacaggtttctttcttgatgtaatatgcttccttaggtaggagaagtagaagaatactttgaaaaatattttagaaataaaaacaacagggctaggattagtatctctgtcatataaataatctatacagatataaaatggtctactgacagataggcaaaagacaagaatacgcagctcacaatcaaagaactgagggctaagattgttttagatgttcaccttaacagaaattataattcatacccaaataatattatggctatttcatagaaatgacaaaacacagtgttgtggatattgtctaatgcaatttgtttgtgtgtgcacactgaaagacagaagacagggttttgcacttgtgatcccagcactggggaggcagaagcaggccagtccctaggatctgctggccagccagcctagtccgcttgttgagtttgaagccaatgagagaccctgtgcagatggtacctgaagaatgacacccagggttgttctcttgttttcacatgtacgggaacataagtgtatacacagagatagatgcacacatggacaaagacaaaagagatttgattcagatctttgggcctactgttcaagcttgcttgggaggaaatatatgtgcagagttgttcataatgatgcttgtggtagtgttcattctttcagtgtgtgcattttagaaatcgtagagcattcttatatcctttggctcacctgaatataattatttgtttttaaaacaagtgtacaaaagggaaggaagcttcagtggtttccccagggtcatacagatggaaatggcatagtcagaggtggaagtccatcatccttgccccaccgattctggacctatggtgagacagaacatcatggctgcaggatcatgtgacagaggctgttcacctcttggtagactggaagcagagagaaacaaagggactggggaccaagtctaaccttcaaaggcatgctcccagtgatctgattcttctacctggcctcttgcctcctaaaatctcttagtgcttctcaaaatagtgctagtggtgtcttagggttttattgctgtgaacagataccatgaccaagtcaactcttataaggacaacatttaattgggactggcttacaggttcagaggttcagtccattatcaaggtgggagcatggcagcatccaggcagaggcatgatgcaggcagagctgaaagttctacatcttcatctgaaggctgctagtggaagactaacttccaggcagctaagactagggtattaaagcccacagtgacacaccttttcaaacaaggccacacctcctaatagagccactccctggcccaagtatgtatagacaatcacaagtgactagagaacaagtcctcagtatgtgcctgttagagacattttatacacactgtagtactggataagacaaagacctttttttttttttttttttttttaaatcaaccaaggcaagaaaaatgatgctcctttttcccagtcttcaccactcggcttgccaacatggtgaccgaagcagctactcgttagtaaatggagttagctgtaagcagaactgcttggaaagtgttacaaatgaagcccattaaagttggctagaactgtgcacaaagtgacttcctgtttaggtcagtgaatgggtgacctttgccctggtctgtaattcagaatcccaaactgcaaacaaggacttactttgtcctcagtaggagatcactattagagtgaaaaacaagccacaaagaatggatgaacataaacttctgcacatgtaggtgacatgtgtcgacctgatgctttttgagttctacagatgcagtagctacagaagacacaataaagagcaaggagacgtacatttcccaagatgctctttcatagatagtattagaagctggcagtctgactgaatcaaatgaaactgagagtctaggtcaggcccttagaatatcatacactacagtgcgtaccggctgcctgatttagacatttggagtatttctgcgagaagaagccacagaaaggaaagtaaatcaaataatggaaacagctgaagctgagcctagtggccagaagggctaaggcttccgtctagtcatttctggcctgaacttgtggctggtgcaagctccctcctcaaaggtgttgcaacaatcccaggtacagctggagaagatatctcagaggtcactggaggagaggtctttctgccatgttgcagattggactcaggggccctctgtgctaatatgcacatgctctcctgctgagctgtttccctagtgaagtcttaattctagatgtcacacatcttggaaatgggggttggtagggctaccagtgtcctgtagtcctcatttgttttcacaggccttgtcttaccatcctagtgtctgcttggtgaggtgtgtgtgtgtgtatgtctgtgtgttgtgggccaaggaacttgtgaccttgccaagggacttggaaacaaacctctgtgcaaagggaagtaaactcttagaagaagataaaaaagtctgatagctaaagtgtgagccactaagatggagcgtcatctccacccccttctgcctccccaccggtttccttccatgagtctgtgcatgtttcacactgaggctctaagggcctgcaacagtgaactttgttctgacatccacagcagtaagtggaagctggcttcgtaaggctcctaaatgcaaatgtctaacttggctctgatgagagcttcccactagagaacaggacacaggtaggctcgaccactcagaacccctgagtctttgcttctggaaagggaggactggactcagtcattattttccaaaagataatgtcatgcaacttgtgacagctcaaatgatgcagaaataagagccaaagtaatttaagtcactttttctctcctgttatcttcccaagggtctgactaggtcaggtcactttgaacctagtatatctttatcatccccatcacttgctaatttccccttttaacaaagtgtaagaatcagcttcagggaagggcaaatatttaacaagagcctaggaggtaggagtgtgcatgtacattataggaaaagatctttagaagtccacttctggacacacactctgtggcctgtcttcagctcccccagtactaagggttatgggcatgtgctgccacgggcagccttttacgtggctgctgaagagcaggtcttcttacatgactttttttcatttaagggggttgatactttgtttttacaataagtttactgttatttaacaaactaacaatttatgggtacagtatgtctcaaaaaaccaaaaaaaaaaaaaaaaaaaaagatggtttctctgtgtagccctggctgtccctctgcctcccaagtgctgggattaaaggtgtgcgccacctcgcccagctttttttttttttaagatttatttattagtatatgtaagtacactgtagttgtcttcaaatgtaccagaagagggcatcagatctcattatggatggctgtgagctaccatgtggttgctgggatttgaactcaggaccttcagaagagcagtcaacactcttaaccacagagtcatctctccagctcctgagctgagttcttaatcccaactctgggctcttgtaagttgaagagaccttgggcttgacttgccctcttaagtgttgcttgactcaccatgaagtaggatttccaaaaaagaccaaaccaaacaacaacaacaataacaacaacaacaacaacaaaacgcaaaatggggaccacaggacttcagttccttagcagccacagccgcttctatttagagtgtaggtctttgagtagaagctagggtggtcagtctatgtaacgaagttactcatcccttcctaggcaataccaagttggtttcccaaatggtccaaatggaattgttgttgttgttaataccaagtggtcccaaatggttcaaatagaaattttttcttgttgttgatattatagttattgttattgttattattattactactactactattttttttaataaaagatattctaagcacactggcaagcctcacatctttctttgcaggtaggcgaaacatatctgtggtgtgattttatagttcctagcatgagttttaaacaggagatggtgtgtgagtctgagtacagatgcaccctggccattgaggcagcttcccgctggcatatgcatcatccaagactcacccagggctgaccacagacaaagggaaaccgatgagggtggatttgattgctttgagctcttcctgctgtagtctagcaggacatcttaattacaaaagggtcctttgttagaagtgtaggggaactccacagtgtagtgactccattggtaaagaattgagtaactaaaaatatgacctctagtgttctttagctgtcagtgaacaagtactgagacctgactgtgtctattgtttctccccacatttacaaagaaagaaaaaagcatgctttctgtctatttgagtgtgaccaaatcattagcaaaactaaaatactgatacttatggtcgtccgtctgtgatggggtgctcagtgaggaacttgaaagcctgtgaataccgtgtattagaaagtagtccagtgagaccactgatgctggaggttgtctagcccaggtctacccttagagggtcacgtcatgtctgctggaagcacatgggtactctggtcccagagtgacaaggctagcaaacagcaggctcagcttctcctgttttcattcctgcctcaggcttcacctctcttctgcctgtgaagttgcagttttccatccaggttccccctggattaggaaactagaagaacccaggcctttagacaggcgagtgaccttgagctctgtatttgctaggtgatcctgggcaaactctaaagccctttaagtcttctttgcttgctctgtgaaatgggacaataagtaccactgactcaaggcattgatggacagaaagcccttggatacagactggcagggtacggccctgtgtatgccttgctgttgtgccttgggaggtcagggtgggagtggcaggaaaggctttcaagtcaggtagatttgaatgtcagctctgctgattaattacttggtaaaacttggagcaagtggtttcctttccttggacacctgcttcctcttctataaaatagggtcctggcgttgctgcctggggtagacaagagagtatgtgctagagtcaggcagagaacagccttggcagcagggcccactaaggcttgcagggccagctacctaaatgctgaggtagaagggagaaggatccagtgcagaatgaatcttttctccatccacgtgtcttttactacctgcattgggggttggaggtgggagtgtcctctaccccagaaatacataccatattcagcaaaactgcctttgtttcttctagaaacttattgacacctgttgcctctgactccaaagctccatcattttgtttgacacagcaatctgtgactagtcttcctttttttttttttttttctggtttttcaagacagggtttctctgtatagccctggctgtcctggaactcactttgtagatcaggctggcctcaaactcagaaatctgcctgcctctgcctcccctgctgggattaaaggtgtgcgccaccaccgccccagctagtcttcctatttttaaatcacattagccttcagtctcctgattatcttttgtaattgaaatgagctgaactctagagctcactctctcccaggctccttgccgccttgcagataccttcttttccatattcgcacatgtatgaattctagtagaccctaaatgattcattcctttgtattaaagtctgggggctagaaagaacacacaatcatggttcaaggttgcaaatgtagagttgagaaagccagggtctgaggtgagctggaaaaatctcttgttagtgaacatttaaaaaaaaaaaaaaatcctgtcttaaaaaaaatgtgctgcaccatgagaagtggccaagcaaacagcattgtgttctgcgtgagcgtgcacacccatcctagggaatagcatttggaactatttataaacttacttgaggggtgtgggatgacagaggaccatagaaatctattgcacgtcaccaccctcacacttaactgagcagcctactctctaccttatttattcacataccattgctcattgggtggcatggtgtcaccccaacatgaaggtttaaattaatacacacacatacacacacacacacacacacacacacacacacacacaaacacatacacaaacacacacacacacacacacacaaacacaaacacatacacaaacacacacacacacacacacacacacacacacacacacacacacgtttccagttcactgatttttctcatgtcattgtttggttgttttttccacgtagaataaccagatttgggtttatcctgttctctcttgggagctgaatgttctaaaatgttctgtattccctggttggtaaagtgtggggacttgctgctgagggcacacgtgggccaggcatctgaagggataaaacgtgccactgggtacagctggcacatggcagaagcatcacacgtattttatgtttctttctggaagtcacgtccctgaaaagcttccttgctcaaaaatcattgtcaaagctaagaagtaaccagaaggcaaaggagtgtatctgctctctcctgcagcctgggtctcccgccccatgacaatgcaggttttatctagcagccaaatgtgatccctgccttatcttcagccttatcttcagccagactgcagacctgtctgtcagctcagctccgagcgagatgcatgtcatcatcccagattcagctagaacactctgtcctaccctttgggacaccaagatggagatctgcgcacgtggctctttccatctctgtacttctatttcattttctgggaagctaagataatgaatgctgaactttgggagatgacaggtagatagagaggcgacacatgtgaatccgtagtgtccttactgaagcaaaaggcaccatgtctgtgtgagaaacgttctgctttgtatatctgatggaataaatacccagcgtacctatggttgcttaatcccagacagtcctggcgcctggtaagactgcgtaccagctcctgtagagcataattcagcagagtgttagcagggcctatctcgtgcagacctcaagaccagcgtactggctcccccaaccctactctggttgatgtcttaggatttcaccactgttttttgtcctccagcgtagccttgaatcctgccaagcctctctcagttttactaaacagatgataaagccaggaatgaggaaggagaagccaggaatgaagaatgaaaacatgccagtggtcatggcagtggaaggtgaattaggaagtatcagggaatggcagcgggctggcgagcaggttggaggaggaagcaggctgccctttgcactttggaataggcaagtgctctggtctcatctgggggctcccactgaggtgggcctatgacacacacattccacagagtctcccatgctcccccacacaactctaggagggtcattgtacttcacagctagcaaaccaagccacaggaggttacattattggctcgaggttctaaaataatagtctctggctaggaagatgggcttatatttatcccagtatactttgtaaagaattgctacattctttgatcaaactaacaggaacgttgttaccttctgcagaggcttttgtgagtctgttcctaagctccccgggagcctacaaaatgtcttaaaagtagtcttgagatttgtacacgccagtttcctcaactctaaagcagggttggaaggcccaaggcttgcttttctcctacccagcccagaggggttggggtggaagccaggatatcccttccacagtgataaacaaggacagaacttagtcccacccacaagttccaagaagtcagtaggaagtagctgaggaactccaaagccacaaaggccttccttagggcccagtggccacgatcaggctattagccatctcttaggtgtcccatgggtttcatctagccggtactgtccccagctgtacctcattttccagacctggaaatgggactagcatgtggggcatattacttaacatgtaacattcctgcccaaagtgcccttcccgagattcagagcctgggggcacagtcctgccggcaggcctcctatctatcttgtcagaaggtctgactcctgaagtgacacacagctctaagattctggccctgtctgcttcagtagagtaaaaaaaggtgctgcttgaagttgggcaggcagatgtacagccaggccacagagagacctaaatgtttggcttcctctttctctgaaggtctgtagaaccgtgtctgagcatgaccaagaagagcttcaggcaatagggactggcgctgactgaaaggaacttacaggggtgtgggtgtgtgtttctccttctgcctagggttaagtaatagcaacatcctgtgtaagagaatttgaatgtggttttcagctaaactccaatattttagggctatttattagatgtgtttaatctcgggccaatttagccagtagcagactaataaaataacaaatgtgggcttgctgccaggacaaatgttgatttacccttctaatgttgactaaaatgaataactttgaaagtaattgaggagggaggccttagccagcgctccagtctgaaacagtggctctgtttcattttactggcactcctgagagattgtgtgcataacctgggctgctgcctgttccagctctctgaggggcccatattttactgagttattttccaaagttcttttctttcttttttttttttaacccctccccacctcaaacccataaacctccattcaggaaaaaaaaaaaaaaaagaacgtcttcgtggcaggcaagtaggattctttagtttttcaaaatggggcccaaacttcaaggaaatgagaaataaggcaataatttacgctggggggaggtatatgactctagtgtagtgcactagtggaaaggctggtgaaggaacgaacacccttgtttgaagccaggctatatatgtatagtgaaaccctttctcaaaaatagtaattttaataatttgttgatattctttcttcagaaacaaaagagcacaccctggacattacccccttggaatttgttatggaatgaattgtttctctagagtacaccaaggttcacccctcctcactggccccagccagggcttcttcattttgctgttgagtttaataaaattcgagagggctgcaattactttgccagcgttgtcgtaaccagtgagttcatttctgttctttctattgttttgtttttgtttgttctgttgcactgtatgggaagctgtttgggactgggactcggatgtgtctgagttcagccagctgtcttgatgtctctctgttaacccaaggctttcctaaaagcagatgcctcgcagactgatgctagctcaggaactatagctgccagtggacctttggagctctctggttcaggcaaagtgcttgatacacaaagaacaaatgtccttcctttaatcttagcaaccttgtgctgtgttttagtgccgtttttgcttgcttggttttgggtgttgaatcaggacttcacgcatgtcgaaagcgtgttctaccactgaggtctacctcaagccctgcccggtgtgtcctgtttcatggcttggagtcagcacttcagctatgacttctccgtcatctactcttgaatgttaccatgacccaaggtgggactgctcttctgcacctttgtccagctgtgtgacaggctatgtatggtgtgtgcatgagcctgagctaatgtggtgtgctccctggatggagattatgtcttctggctctccttgttctcccattaggcaaaacaaaacaaacaaaccctaggttgttttttgttctcctctgaaagaaggaaatcggggtgttttcctcctagcacctgatataaaagaaagaattgagccatttcttacatgggaaatgctccctgcatgcccaatgcaggacgtcagactcacagctagcacaaacaaacaagggcatgatcctgtgtggagatcagctactccacaactccacagcacaagtttcctggtgcccttctgaggttttgtctccaaagcccagaatccctgttgaaatcatggatcaacatctgcaaaggaaaaattaggattccgagcagagtttgaagagcgtttgctcatcttgtgggttcaaaaccagtaattctgaaacccgtgtcacttgcttaatcaatgaagccaggtttccgctggaatttgggcttcattatttgcctttcatcttctggtgacagatgacacccatctaattaactatgtgccaagagaaagagagcagggaaaagaataatagtggaaattttggaattaagagtgatcatttcattactgtccttttgtttccaacaaaagaaggtagagttggcagccagctctaagaagccatcttctcttgtcttccagcctcactcctctgttgctcaaaccattctaagaaggcctcctttttcgatctgtgtgtcctgtctaactgcctgtcaccctgccctgcatgctaaccccctcacctgcccctgctcccttccagctacagatgacactggctcttggggctccttcaggatctacctttgtgtttccctttgcagctgggagacactcctggaaaggtaacacctatgcacttcagtgaagctcactttgtacccactaggtaaacaaatactccctccaacaaaagcaccagttatgacctgtcacggagggaaacccatgggcaccttctttcctagctcctgtggcaaagacccataacctgagtgatggaagcacctgtgcactgtggctcccagtaactggtaccaaggtgtcctctgagcctgcccaggactactcccctgcctcttctgctttctattgtttgcttggaattaagaggagtcattggtgttgtctgactttgtgaatgcacaagtccagtctttacctctctgtcatcatatgtccagatctgtgtgtctctgtctaaatcttctcttcagataaggacatgtatgactggactctaactagcttgatctcatccttttgatttatttataaagatcttagttcccaataaggttacagtcacagacactgggtttagagcttacgtgtatattttcatagatagctggactgaaaacatgtctatatatatttttttttgaggggttaccatagccacatgtctaagctgacatcactagttatcagacccaacaacatcacgtcccctttgatataatgtgctttaaaaaagaaaaaagtagactccttggatgggatctcaccagaatacaaatagcaaactccctaaacctcatcagtaaggaacatcacaccagtctacactgagagacagtctgtatatgaggaccagtgttctttcaatgtatcagctagaaagctacagtatggggctggtgagatggctcagtgggtaagagcacccgactgctcttccgaaggtccagagttccaatcccagcaaccacatggtggctcacaaccatctgtaatgagatctgatgccctcttctggtgtgtctgaagatagctacagtgtactaacatgtaataaataaattaaaaaaaaattaaaaaaaaaaaagaaagctacagtattttgctgtcagattatgagagagcattgtgtgtatgtgttgcggggggtgggggattgtcactgattgggagaaccatgacagataaagcagtgaaatataatgtggcatttccaattggatcctagtgggaaacggggtaaagtcccagggactcccctaacatttaaggtcacggtgttgggccaatgctagcttctcggttttcataaacattctctggttgtgtaaggtctgcgctttagaggaagtgtggtaaaaggtataggaaacactctggactatttttaaaacttgtctgtgagtctaaaattacatcagcatcaactttttgaaaaaacaatagacatatatggagtggtaagttcaccgtctcttgaaggcaaaggtggaaagggatcataagggacatacctgtttgcaagtcctgttccagacactgtgcattgagcacttgctagtcacggagcctgtgccctgtgtgccatcattatctgtgtggtagagtggcagagcagaggtgcgttacccggtgtatggtccatatttcctctgctgtcagaggtatgcgacctcaactgggtgtctgtgatccttaggcctctgtgcactcatctgcaaggtgaggatatgatgtgagctctgttctgaagatgccatgagcatatcatgtaaagatctgaggccagtgccagccacaagattccaaggtcctaataaaagacagctggtctccccagaattcgccagagtcgttgtgaggttctttcccaattttccccttgaagaaattgtggataacatgcatagcacgacacaggaagtaggaggaccagaccaagagaaatgacagcttgatctgtaaaatgcagctccttcgcaagcactttgtccaaaaaagcattaacccaagagggaagactattagtagttcttggaaggacaagctacgcagcagattgtccctgtccgccaaggggctgtttgaattacagcttagggttttgcagggggcagaggcggtgcaagtgttggtcagggctgattgaaaacaactgatgggcaggaaaggtgttggcaacagcaggtgtggcctagaatgaaaacaactgatgggcaggaaaggtgttggcaacagcaggtgtggcctagagttcttgaagagtgagagtcttgaatgtcaactgtaaatcccagcgaacactttggggctctaagaagagggtggtagagggctattgcagagtaatggactttacattgatttgattggcagaagcactttagagtggggaactaggaggccttagcttcctccttcctagaagagtggaaatgaaaagagaagcttgagttgggagggagccatggggaaagcaaagcatgctttcaaatcaagataaatagggcagggtctgaggactcctgtccgtccaggacagtctgatcctcaaggcatcctttttctgtaagcttctatagtaaatcagttggcctccactggatcattttatgaagtttagtggttcggagcttgtgtgtgaaagcattaataaaagccgaagcaacaacaacaaaaaacaacagaagtctagtaatataaaagtgtttggggatcctggcgtctgggtgcctccccagccttgactcaatgtcatgacatggctctcccagcttccatttttccagtagtccacatcttagttgagagttctgatgctcggcggaggatctttctgccctatttcttttgttctgatgatggctgcttctggtccccctctatcacagggttctactaacaaactcagggtctcctctctctccccttctgcatctgatgatacatttttcagaatgattttctgtccattataaaaaaaatatttttaaaagataattttgctctgtgccacctgtaagattgcagccaagtctgttctttggacagttgtcgaccagtggtaccttctgttttcttcatctctcttccctctacctccttttattgtgatgtggatctcagcaattgtgtcagttaaaagggtctttattcgtacatcagaggaagctggtattagtttagatggatttatttaggaagtaaaatgtagggaaacagggatcagtcctacagaaaggaaactaactatgcctcctgctcgtcaggggaggaccctacgaccccagctccagggaggaaatgcaaccaagctcgtgtcatgccaggagcccccgggggaggtaccatgcctaagggtgccatcttaaggtttgtcacttacagaagctgagctgaggttgaggaccactgagaaccatgtgactagacagcagccagcagtcagctctggcacacttcctgtgaggctcacattaaaaagaatgtgtttttaatagttgagaaataatatttttttgacatgaaattgtatgacgtttgaatttatgtgttcatcgatgaaaggtttagtggtccatgctcacattggttaacttatgtattatttatgtctgaagatgagaggatgagtgtgttagaggctgggtgctctagagagtctaagctccttactttctgctcttttacagaaaaagttagccagccaccaggcaggacatggctcggaggtcaccctgcttcaaattatagtgccttcctccattttttttcctatccagctgaatcattttaagcaagtcaatcagttgagacctcagtttcttcatctatcagatgggcataataggggttaacttaaaaacatattgagataaataaactagtggattttatgtgttgacctctgaaataagaacctgtagccaagctggatataatggcacacatctttaatcccagtgtttgggaggcagatatagtcgggccggtctttgtgagttcaaggccaaactggtctgcattgtgagttccaggtcaccaagagctacattaataagaccctcacaaaacaagaacctgtaaccagtattaacatgttatcatttatttatgcaaatcagttaccatgagttataagttagtgtttaacaggaggatggtgaaagccactttcaagtgttagagggtggactagaggtgactgcaaaggctccccattcaaacatccaaatgtttgaaagttgttattggtttgtttgtttgtgtatgtgccctatcagctcatgggcaaaggcatcccctggcgtgcacagtttacacctctgtcttgccttgccctgcagtgatacatatggtctcagacactatgctgacggctgcattctcagccactcctgcagagtggtgggggctcagtaaaggttcaatctcaaggcagctgcagacacggtgcacactcctccttttgcacccagccccactccgtctgaaacatgaaatgcagagacaatgaagggttccctgcaggtctattttggtgaaattgatttgaagaaagaaaaaagagaaactgtgctacgttgtgttgatgtcgtaggcagctttgtacacaatacagtctgctttgctttttacctcaggggaggagtaatcaggagccaggaaagtcactgtgcctccctagaagggagatataaaaaacacgttaagaaaacctcgtgttgacttttggtatagcattggaaatgtaaatgagctaaatacctaataaaaaatggaaaaaaaaaaaaaaagaaaagaaaaccttgtgttaaaaatacaatcatgccgggcatggtggcgcacgcctttaattccagaacttgggaggcagaggcaggcggatttctgagttcaaggccaacctggtctacaaagtgagttccaggacagccagggctacacagagaaaccctgtctcgaaaaaacaaacaaacaaaatacaatcacaccgagttttttgttctgtttggtttgcagttagcttgtgagattctttaaactgttgaataaattcctttatggaaaaatatgacctctgtggccatcttcattatctttcctcccctcccctcccgtcccccttcttttacttcttttttttcccctttcctttcctctgaataggaaaaaaaaaattgtaaaagtcaaaactaattcatgatagaaatttgcatcaaatttgatataagcagaactttttctactgataaagggtgtctctttcatgctcccatcaagtacaataaatataaaatgaatctttaaaaataactacattggcggggctggcgagatggctcagtggttaagagcgccgactgctcttctgaaggtcccgagttcaaatcccagcaaccacatggtggctcacaaccatccataacgaaatctgatgccctcttctggagtgtctgaagacagctacagtgtacttacatataataaataaatctttaaaaaaaaaaaaaaaaaataactacattggcaagtaggggagttgaagaccaagctcggcgattaacagtccttgccactattgcagatacccaggtttaatcctaacatccacgctgagctcacaactgtctgtaactccagttccaagggatctgacatctggtaccttcttctggcctccaagggcaccaggcacactcacgacacacacttgtatgatgcaggcaaatatttatacacattaaaaagggtttacataaataaatatttcatatatgtgtgtgtgtatattttaaaacacacacacacatactttgggacctgagagcctggggacatagccatatcaccactgagaattaatggcaagaagatcaggtcttggagatcagcctccaccacatagttctaggcgggcctggactgtacaaatacccacaacaacagcaacagcaacaaaatcattttggagtcagcaattagactagtgtatttgtaacttgtaataaacactctacaagcagttctagctagtgtaacaaaacaataaagcctagaaaagactaaacagaactgttgtattcaaacttgctgcccctccccccactggtctagagtagtgctgtgttagactagactggctctctgcaggttaagttctctcatcttccaatgacaaacctgaaaagaccctcggtattgcatttactagttagttctcagtaatgctatttacttagaatcttagaaatattttctcggagggttgtttagacaatagtaagatacagctggagacagagtgaataaatgaaaaagaacaattaattaggccaagaattattttaaatctcttattctcacagaagccctcaaggatagctccataattcatacttcactcgtgaggtcagacataaggcttccctgcttagatcctgttctggggcttacacctgcctgcattgccagcactaaatcacagcaggatggcttctggttcattcttctttgcttagcaatgttagatcaccagagagcagcctgctgttaactcacttgggggccatgcctctgagaaggagttctaaaaaggattccatgtattagcagtgtgctgggttagtgttgcattgacgatgtatcctataactatattaggatgtagataacacacatctgagtgggccatctaaacggagcagcaaagtcagaccaaccttagaacacatgacacgcaaggactagatcctcctgaagcctgccaagtgtgcagcattgttccctgtcctgctttaaaagcaagatgccccagctgctgctcactcttcaacctccccattctgatacagctttaactgtgggaatgagactcagcctctctgggctctgaggtgcatgcaggattattgagaccaagttctttcccctgggatttttctcgtgtgctgcaatgcggtttataccaccaaaggaagcgagatcacaacatggcatttctagactaaagcagaagccatttggaggaattcaggggatacttaagaggctgtgtgtgcacacatgcgtggacgcagcatgctgaggatgcagaaacggatgatgtaaaaagggagactcttaagatcatcctctgggcacagatgctcaggagcccaggcaccgggcagggagcatcctgaaggacatcattgcctggaagcagatggcttttggacttttctcttcagcaccttatcctttgtagtggcagccttcattttaggagctttgtctgctgcattttaaaacctagccttcctagtgttcctagtgctgccttctgtctgctcagcatagctcactgagaagccagaggtccctggcttctggatccattctgtcttagaaaagcaactgactgctttgcaaaccacacagcttactctttgataccatggaactgttttgaacgtctttaagtttaatttttttttttctacttaaaatgtcagcaaagttgatagagtctcaagagagggcttctgatttctgaggctagcaagggcatcgggcgacatgaaaacttcccggctgaattccagattcatgaaggatttctccaagcatctgctgtgtttagaatggcctgcaggaaccccttgaagaatgagaaattctgagtcaaactttgaaagcaatggctgaaaaggaaagatgaaccctttggggtaggggtcgggcgagctgccttaggaaatgattgacgtctgctacaattggctgacttggcattttccatcacaatttgaggtcttcatgtgctgtccagcatctactgcaggtcagatggagcataggaaagcaagggtaactgtcctctttgtcttgtaaaatgtttgctctgtcttttccctctttcccccagcctgttttatttgtattattcttgttaacatttattggattaagaagtctccctctcccctctcagccagctccggagtaacttacagatttgcaatcgatgttttctgtggaggtgactttgaaaatgtgtggctataaatagtatagaaaccaaaaacccatgatacaaatttctccctgtacatttcctcttgccattagatattttaggaattttaatacgtgcctctctgttattataggttcaaagatgctttcttatatcctagaaatgaaacttctttaaaaatgtttggagctggtcagatgtcccagcaggcttgccaccaggactgacaacctgagtctgatccctgggacccatatggtggaaggagaggaaccaactacagaatgttgtcctctgactctctcccccctatacacacagacacataaatgctttttaaaataggtttttaaatttgatgaattaaaagcaatctttgtaactttagaaaaatgaatggataaagcatactcaaaaatggccctggcaaggtgacaggaaggattttttgaaaaaatgaaaccagaaacaacaacagacacgccagtgtctggcaaggtcactggctgggaactctctacagcaatgggaagaagggttctattagaagctttgactgaaaagctgactgattggggggtggggaagggggggtaggatccctacctttctgtcacccactgcttcagtgtgcctcctccgtcttttctctttcatggctccccagccagatcacctgtgcagatcctggggcaccgttcacggtctacagatcaccctgtcgcctgcaagtctcagagcaggatggatgtgatgttgtggcagacatctgtaagattggtcttgacactgtcctcttttttttttttttttcttttatacaggaacctagtaacaaaagggtcaaacccctttccagagtcacatcgctagcaaacctcattccacctgtgaagaccacaccattaaagcgcttcagccagaccttgcaggtaagggaacgtgggcttgggcttgggcttgcagagagccatgctgtgctcatgcacctagcatctctgtgggtctccggtggagctgaatcaccacttgctactgtagaagagtgcacaggtgaaggggaataaaaggacgagaaatgtgtgcacgccacaaccccgggtcaggcagggtcagggccacttctgatagttcatagttgtatgtctatgtcataggtcctatccgagtgtatccttactggttttgtgcagcaatttctctgaacttctgaattatcagtttgtgatatgagctggataatagtagaacctggtggtttcagccagagttagaaagctatagggttagggggaggaggaaacctgcctcctccctgcccatggctcttgaagatgctatcaacttcaagtgtttgtggggagggggaatgaaaaggatggtatttcttctatgtgaaaaccacatggaattttaacttcactgtccgtaaggcgcttggttgaaacacagccatgccagtctgattacaaaaaatgtttgttggcctcagggttagaacaaaatacccaaagtatcttggttctgtccattgaagactgccagtcgagggcaggtgacttaacatttctaagtctcgcttttattcctcagaggtaaatgtatcatagagtcaccttttgtggctcacaatgaaccacagctcctttgtagaattgtaaatatttatgagacagtaaattcacagggcctttagttattactagctatgttgtggctattgtctacagtagtaattttagttaacaagtgtgtgtggttgcttttaaactctatgatattttatttggagggaggcatgtgtatgcagtaatacttaacttaggtggaggtccaaggactacttacaaggaatcagctctctccttccaccatgcagacccagggatatctccatctctggttgtcaggcttgggggcaagtatcatttcatcagacctactctttaagttttttttttttaagatttatttatttatttatatgtaagtacatacactgtagctgtcttcagacgcactggaagagggcatcagatctcattacgggtggtttcgggtgctcttactcactgagccatctcaccagccccatcagacctactcttaatctcctcctgcagctcgccttttaaagtgaaggttgagatccattcacaaccttgaaaccaagtcataaaaatcttgttttagactgaaccccacaaaaggcatacaacgagggcctcatccccaccatagctgagtgagtcaggaatctgccgtatctcatttgtctcgaatacttgcacttagcaatgcttttatcttgaccttaaatgtttaagaaaattgtagaccaccaggcggtggtggcgtacacctttaatcccagcacttgggaggcagaggcaaggtggatttctgagttcgaggccagcctggtctacagagtaagttccaggacagccagggctacacagagaaaccctgtctcaaaaaaccaaaaataaataaataaataaataaattgtagaccagctgttgtcagtgaagatttctccttgattcttatcttctcaaaggaaaagatttagttaaacaggaagtttaagcaggagtttatgtagtaaagctaagtattcacggcagagagaggttggagaggttgagctaaagacatgcctcatgctgaccatcagagctggaggatgctatgagggtctcctggacccctttgcatccctgcttccttactgtcagagtggatgcgccacagccctgtgatgtcatccatccccactgctcaccccctttgcttccagcccctctgttacctctgctaactgttactcatgaatggtttaccacccagttagccccggatttggctctgtatgctcagtccttgggactatgggctcctggttatactttgacctcttggtaggaagaacaaaggaacaaactaagattctgtgggggggggggtgtagtcagcctgcagagctggttggtggagaaggatgtgtttgcgtactgtgtcccttgtggccagtgtctcaaccctctggacgacttcactgcaggcttttcctggaagactcattatcacctgagtcctgcacatctggtcttttgctgagttctgctttttgaaaagtctttagactgtcgactgcatttgactctttcctttctttccaggctaatgaccatggttcaagttcactgtgagctctttcttcccttgatgataggactgttctctggtggcctctctccctgttgtctcccccaggatggcccaccctgtgccagggcggtttccactcgttcactgggcactgggcttctccagcattcagggtgcttttttcagggtagagttgccttctggtagatttagggcagggctgtgctttctttgcaaaatgacagtaacaagtttgattagaatagctagccagctttcacctgcaagtgtcccctactctacagttattcttggagcgctgggtccctttacttactaacaatgccttgcctggcttgtagacctttgaatttgtatttctgagaacactgtgttctccccaggaacctaccttgattgcatacctttaccacttttctttagatttcccaggccatctttattctgttttctggttcctagggcacaggaaacactgcagaaaacagatgattgtcttagaaatttgcattgacctagagaactggggggagagaaatgagttaaggcatgtctgaaaatttagcagactgagaccaagcgaagatgagagtcagacccaagggagaacccgccatgtggaaattgccttctaaagcttcaaagatatctttcttttgcgatataaattttctactgaacttttgtgactgtcatgataaattgttaaccctaggctgtgtgtatgagacagaaatagaaaagttattcataatgcttctacacaaagacacagagaacttgagcaatgtgttattatttgaagggatgagattagtgcatagaaatacatctctgagctcagatctgtacacagcatgctcaggtaagatctgtgagagtggtgaacgccatcctgcacctggctgtctccccgtagtccaccttgagacatgcaatataagcctctcggccgttgtttaacaaactacctttctgcttcttgcctcccgaccccattgctttccctaccaactagaaagggaaaagaaacggggaacatgaagggaggtgccagcttccaaggctgccccggaaccagtttcataagccttcaaggttcctttaggtctccatgccatttctattgatggagaagcaagacaaggggctactgctaagggcccaaccctcctggtcctcagcacctactcaccctatatacctgtgtgtgtaatttctcttctatttcaaaaatcatttgagcatgaggcaagttggcttatttgtttgccttctatttctttatttcacttttatttttataataataaagattaaacgtagggtcttgcgtatacaaggcaagtgctttttgctttggttttaataaatttttattacgtttttattagtgcgtgggggtacccctgccattgtgtgcttgtagaggtcagaggagagcttatgcaggtcatttcaccatgtaggtcctgatgactgaactcagattatcaagcttggtgggtgacaagtgcctttagccactgagccatcttttctgtgtgtgtgtgtccctctctattgttagtgagacagggcctcactgtgtagctcttgttatcctaagactgtctatgtatcgaggtcatcttcctgcccctgcttccaaaggacagggatgaaaggcatgtgccaccatacctgacccctttttatattttttaaatttgggaacaggatctttactaagttgcctaggtgggccttgaactctctctgcaacccaggcagtcttaagtttttgattcccttgtctcagcctcctgagtaactggggtaccaaagctgtgccaccagacccagcaggcatcttggttttctggtatactactcttatttcattggctcctgcactttagagacatatgtatcctttggatatccagtttcgtctctaggttgtgttcctttaatgacaggccaggcagtgacttagacccaaacacaaggcttccatcaatacttagtggttccccctctggcttcctgtgagaccatagttagcggaggaggacacaggggcactctgggctggcagcctcttgcagaaagattaaaaagccatttacaaatgtgagtggtctttgaggcaacacactggcgggtttgttttctcttgcctcccagcacccatatgggctggaaagttgggtctcagcacaaaggcagcatttacggtgtcgactgcatgatactctgtcagttccttaccagaacggtttagcacagggctgctggtaaactaaagcacagatgtctggatcccccaaggcccataaattccctcttcagggcgcctgagagggaaacctggcccagctctgaaaggggccggagtgtgcacctctcatgtggaacagggaataccagctcccttgggccagctacatgctgagctctgcctctccgtgcacagctgcacaggactcctggacacatttgtgccaagtccagcgaggacagagttcgttgccttgtgatgtccttcattggctttggagaggaacatctttctttctgtttcaaaagtgtgtgtttttgtgggaaagtacagaaaaagtgaaaggaaaaactgaatgtgttaggcttccactccaaaacaacccttttaacattgtaacctttctcctcagaatgactttggatattagtgtatactttatataccctgagcctaacgtaaggtaacaatctgtctagtcacacttgtgacaattgggggtgcaagtgagtgttcaatgtctcttggcctcacttgggggcgatcacactttcattaaagtcaagatctctgtttatttccatcaatagttttagtttaggtccccatccccaccccctgtttttaggttgttttgaatcaaggtctcctgtagcccaggctggccttgaacttgctatgtagctgaggagaaccttgatctttctgcctcttcttcctcagtgccaagatttctgtcacgtaccattatccctagttaatagggattgagaatcagatctgaggccccatgcatactaggcaagtgttctaaccccaggcttgagaaggaacgagaagtccagcaccatctatctacacctgagacataagtaggaagttcccatgggtatatggacttaagggaccatgtctgacaactatggtttcttttcataaatttgctgtgaatggcaaaagttttgggtccctggttactttgcatatatgcaggtgagcgtccggcacacgatgggacagctgagaagttcccagtgcctcctgtcaagagggactcctcatcctagcttgtccttttttgtagagttataagtggcctttataaatgatcaacttgtaattgtctgcagtgttgcagcccctattccaagtgcctgacttccatggcctccagtcacctcccccagaactctacagggtgattcagggtcatctatagagcaaagaaccccaagctttaaacctgggcccagggtcacacagtcagcaagtgctgcaaggagacctgctggccgtgctgagtaccacttctgtggttaggtttctaaaaaaaaaaggcaaaacactggtcataataccgccagtggtttgccaggagctaaaaatagccaccagactttggatctgaagcatcctgcattcagctggcccttattttgttcaccgcagtgggaagaggcattatttccagctggtggaatactttgtcatgggcattatcgtttaagagccattcatggagctggattaagatggtgggtggctgccccaagccactgttttagtttgggttttttatgactagtgctgaacacattggtaatggtttttccacacctgtatcaaatactgtcttcagcttttcattcattccactaaggatttctttgagctccaggagggtattcccttgtttggggtcttaggtgtttggcacttattgattctaaagtgtttggacacccttccaccgtgttttcaatggccattcattcatgaaccgtgcgtgtcaagatgtgttggtgcagtttctcttaaagtcggtgtccatggccatggctacttgtcaaccaatttggttttcttagttatctctttgttatatgaagtctgcaagataaatgtagagaattatgaagttgaagataaaaccccaccatccaagggtagacccctgttaccgttttgtgtattttaaatggagatctctctactctttacttggctctgtgtgtaattttctacttacccttaagcttttcaaaaaacaaaaaacctgttattttatttttttaagaaaagactgtcttttaagccatatgctgtttttgttttgtgataagactttactccctgttgctgagcaccctttggccatatccaggtttgtttgttctggagccgaggctaccaaatgtaaagtctgatgcgtgcaaggcaagctctgtaccaccagctccacgcccagctgcttatttccagatactgggcttttataaatagcagcgccatgctgatggatttctctctcctgctggttattttagtgaagttcttccaagaagctacttggtcttaagtcactctgagatgttactgctgttgtctgtggatgaaagcatccaagtatttcccccttgtttgtgacttcacttgccccacttaaggctacccatgatcaactatgatttaaaaaaaaaaaacaacaaaaaaaaaactgtaaatgaaaactgctaagaatgaacaacttatatattaacaataattttgttgtatggattagctgtgtgtacctgtgaccaggcgtctgacaaacacaagggaggaatgatgtgttctggatcgaggtttctacagttgcttggccccatgaatttgagcagagtgtcatggcggcaagagcacatgacggaggatgggtgtctgcatcctcatggaccacgagacaaaaggagaaatgcctgtgtcctgttggtcctctcctttctctcttccattctggggttgcaggaagcccaagggatggcacatgctccccaccttcatgtctggtctttctttctcatttaatctctgccggaaacacacccagaattgtgtctcaatctgctaggtattaaggtaataaagaaaatcagtcttcatagttataatgtattgctataactattcttttattaattattgttaatcttttaatgtgcctgatgtatgaagtaaactttatcataggtatgtatgtatagacaaagcagagtttatattaggatctataatactgtggattcacacatgcaccagaggctcttgggacatactatcaatcattgccggtcccatggataggaggggactgatgggtataacaagtgttattggtagtattaatggtcttgcaatagtagataggtttcaactgctgtgataaagcaccatgaccaaagcaacatggggaggagaagaaagggtcttacaggctacaatgcatcatcaggggacgcaaacacagggagttaaggcggtgacttagtcagggttttactgctgtgaacagaccaagaccaaggcaactcttataaggacaacatttaattagggctggcttacggattcagaggttcagtccattatcatcaaggcaagaacatggcaacatccaggcaggcatgggacaggaagagctgagagttttctgcatctttatctgaaggctgttagcaggatactggcttccaggcagctaggactagggtattaaagcccactcccacagtgacacacctgctccaacaaggccacacctccaaatagtgccaccccctgggccaagcaacgttccaaccatcccaagcagaaacctggcagcaagaactgaagcagagaccacggagacctgctcagcatactttctttcataattcacgaccacttgtccatgggtgtcactgcccacagtaccacccctactatcaatcattaaacaagaaaaggacccccacagacttgtgggcccacaggccactgtaatgggcacattttctcaatcaaacttcccctttctcggaggactctaatttacatcaagttaacataaaaattagcccaggtaccagccatctcctgccactgtgtattaagcatctggctaagctgttgccctacctccaaccctcacttcagctttgggaggttctaagtattgtcaaaatatgagtctactgaaagccagagacatgagttttcctagccacatggattgactcagagccacatcagctctgggagtaaagcctttgtttccaactcaagtctgtgttttggagatgaaccactgtgcacacagtccctagtcctatccctggccttaccgtgtgccagtcacttagtcctctggtccctgactttctcctgacccgttccttgtagaagactagcacgaaggtccgatgtgatagagccactctgtgggacgaaagtgctgctcctcggtttcagcagactgaatggagcctttgggaaacttcttcgggatactatccaggagtctttagcaactacggtctggaactttttgctttaacccaccgctgcagccacagtggatcacatttctttttccggttccatcctagcttccaaactgtttactgttgaaccatctgctcccagatagctctgtagtcaggatcgtggagagactgtgcctggccctagctctgtattggaacatgttatctttggctatggagaccttctgttttttacgaaaggacagagcaagcacccccactgacagacagctttaacaaatcaactctgccccacagtgtctacctgctgagcctacatttcctctgacatatgtaaatggacctgtttcctacccaacagacaatctgctttccacctgcaacatctttcctatattccagcttgggtataaacatgagtagccattttcaaaatctgcgtttgtctgtctcccacatggctattgttattttagctgccaacagttaacaagctttgggtttctacttattttcagggctcactttcctcatggaaactctggcttattctgggacagttttcattgctatcctcaaatcctcccaccccagcaggtctatgtacttgtttctgtggttatgtggtctcatccaaggttgagcctgtcactttgaaatggaccagtgtttctcacctaaggggacataggtagtgtctcaagatgttttgagcacagatgggttgaggatgctacttgtatgttgcagttagaaaccaatacaaaccaatgatgttgctaagtgttcaacaatgcacaggacagctctccataataaaagaacttgtctacttcagaactgagtggccacaagagtgagaaactgttacaaactaagaagtagcatgaaactttggctcacacacgccttacatgagagcagaccaggattgtcatttcgaatgccacaccccctggtttaaatgaactatttattcacttcatggctttcatcaaatttcaccttctgtgagcctcaagtgtcctatctgtaaaatgggtgcaagactcctacttctcaggttttgaagaattctaaagattgtctctcagtgcgggcatagaacaactctctcctttccctgacattcacttttttacagtgcccaagttgttgtgccctcacaggtgtgaaatgctgagaaatctaccagtgagtgaagcagaccttgtagatatttatcattgcggtttccatatgaagtatctatagaacctttgggaggtggcacttgctggagatagtggagcaggtcttgagggttttgtggttcgtcccagcttcttgtctctatgttctgcttggtgactgtggactcattgtgagccagcaactgccctcatgttctggcagccacacctgttctgtcgtggatagattataaattctaaaactgtaaataaaaataaatccatgagccgggcgtggtggcacacgcctttaatcccagcactcgggaaacagaggcaggcggatttctgtgttcgaggccagcctggtctacagagtgagttccaggacagccaggactatacagagaaaccctgtctcggaaaaaaaaaaaaaaaaatccaaaataaagcccttcctcctgtaagtttcttcttgtcaggtttttggccccagaaatgagaagaataaatggatttgtcttctgttatgaagaaacagggaatcagaaagaagacagcaagatcatgaagggcaacaaggttgtgaggcaaccatccaagtacagaaaaataaagggtgtggtggcagggacctcggaagccttgtggcatttgtcctttgggattcttgtagcaggagtcacttcttcccccaactcagtcctcctgggtataactgccatttatgtcgctaaccaggccaggtgtcattcctggtttgtggctggcaccaggatgaacacctgccggtgtctgaagttcagggactagcagcggccactccttcctagggtcagacagctgtggaccacacacctgactcagttccattacagacagacccaggctctaaatctggagtttggttggccaccaatcaatcattattcctaaaactgagcccggtgcattttctttccttaagccagggtctttcctaggaggcaggacataggtctgctctctcactgaaaccttgggacaacctgtgagctcctgggactaatgtgtattttggatcctgtctgggcaagtgtcttagcacctccccatccaaccccagtctcagtaaatgaaagcagaccctcattctatgggggtgctgtgcaaatggaagattacatccaaagggctgaggatcagtgcgtgaagggcccttaagataattcccgtgacaccctgaggttggcagtcactaagaaagcccacacgaggagtcctgtgagggagctcctgtagggtaggtattcacctcttattttccccaagtagcaatgacagaaatctccaatggactgagcaggtcttgataaatgcatagaaatatgttcattatttcttatatccacaacacgatactagaatgcatgttgtgcactgatttttgtctgtgagatgacaatgaaatcccatctacccgaatgagagtgaaggcatgagctactctgtttctatctgggagaggtacccgccggcagaatagcctgtttcaaggacaatttggggctggtgagatggctccgtggataagagcactgactgctcttccagaggtcctgagttcaaatcccagtaactacatggtggctcacaaccatccttcatgagatctgataccctcttctggtgtgtctgaagacagctacagtgtacttatttataatagcaaatacatctttaggccggagcgagcagaggtcctgagttcaattcctagcaaccacatgatggctcacaaccatctgtacagctaaagtgtactcatatacattaaataaataaaatctttttttttaaagaaggacaatttagtaactcattttagcattgagtattaatgtgcttatttgagcaaagatgagatcctggaacccccagcaattcaaataagatgcaataaaaataaataaggtttgatggtctttcgactaagggaatccgccttcataaatatcagcccaggcacacaaagggcgttccctcaggtacttcttgtaactgtgagctgtcagaaatgatcctgctgttcatcaggagggcaatgagtaaggatgggccccacctagacatcagggtcccacatagcctctgctaaggagtaaccttggaggtgaagaaaatgtttgggactaggaaattgtttttggataccactaatttgttcactacaaagttggctaaattttatgttaccagaatttgctctcaatgtttttacttgaaagaaattttctctcttttcaattaactttttatgttagcaaacaaaacgagtttcatagtagcgtttccccttatattctttcctacattacacacaattccacacaattgtgttttgttttgttttgttattcactgaggtaggttttgctctacaactcatgttagttttaattgtgtacatggttggagggggtacatgcatgtgagcgccaaagccagtggagcccagaaaaggaagctgggttctctggagctggagttacaggtggttgtgagctgtgcagtacggatgttaggaatcaagatcaggtcctctgaagtgaagagctgcaggtggtgttagccactggacccctggctaacccctcagttacgctttgaaggatgagttttatatactactacgaaaaaggtatagttgcctgaaaagagaaaagcttgggttttgttttgttttgttttgtttgttttgagacagggtttctctgtttagccctggctgtcctggaactcactttgtagaccaggctgtcctcgaactcagaaatccacctgcctctgcctcacaaatgctgggattaaagacatgtactaccactgcctggcagaaaacattgtttttagaaaaaaaacaaaaacaaaaacttaggggaaaaaaaaaacttggaaagatgttaaatatgacaatgattgatgccaagaagtgcattttgggaaaaagtatttgtatctttaaaaattacattagctgggcgtggtggcactcaggcggatttctgagttagaggccagcctggtctacaaagtgagttnnnnnnnnnnnnnnnnnnnnnnnnnnnnnnnnnnnnnnnnnnnnnnnnnnnnnnnnnnnnnnnnnnnnnnnnnnnnnnnnnnnnnnnnnnnnnnnnnnnnnnnnnnnnnnnnnnnnnnnnnnnnnnnnnnnnnnnnnnnnnnnnnnnnnnnnnnnnnnnnnnnnnnnnnnnnnnnnnnnctcttgggggaagtccagtgttgctcagattgaagtgtgacgagaatggtgactgatcccaccaagtgaaagtggaaactgttgctgtgacttgtgccttctttgtgtgccttttcttctctctgttctaggattcccatctgcccatcagaaccacagagagagtgggccagtgactcactgccctctgcagacctttcagtctgtggttaattgattctgagggcaggcaagctacgtccacttggtctctttgctgtttattagggcgtgtttcagagagcctaagacttgtgcaacaccattagtaacccgggcaagccctttcttgttgtcctgcctgaagcaggttcagattcgtaagctcacctgaagctcctgctagccctggcacttgcaagactacaaaaaattgcttccacaaagccctggaaacaccccaaagccccttggaaacttcctgtaacattttccatttcctcaggggggaaaaaaatcaaaaagtaagccagaagtcagccatagcatgcatgtgagagaaaaaagagaaaccaacagcattttaaaatgtcggcttgcatgtggcttgcataattatgaagtgatcatacacagattttaatgctggtgaattttgcatgaaagagatttttagaagctaaaccatctcacagttttcttaaaggttagacagttctatcaacaggtaattctaatttatttaacggtgattttaacagtggagtcgtctcttcagtcccacccccaactctaatttttaaataaattaaaaacttccctgggggggatatgggggactttgggggaagcatttgaaatgtaaattaagaaaatacctaataaaataaatgtttaaaaaaaaaaacaacttccctaatgagttgtaagtactgaatttcatcgttggagctcaaataactgaggtctaccctatataaccttagtgatacaagctcacatgtcacattcaaaatcatttaaaatcaagttaaataaatagagaaagatgtagccactgtcctgtcagaggtttgttccaatggcaaaataggagagaggacggacattggtgaggcctttctaaaaaagagctaagcccggcagtggtggtgcacgcctttaatcccagcacttgagaggcagagaaaggtggatttctgagttcgaggccagcctggtctacagagtgatccaggacagccaaggctatataaaaaaaccctgtctcgaaaaacaaaaatcaatcaaacaaacaaacaaacaaacaaacaaacaaaaagaactagcactgggttgtattctgaagacaggtgaggagttggttgggaaatgggagagacacctgtgagaaagagacttgcttagagaagcactgagggttagcaacaagaacaaaaattaattaattagttaattaattagtaagaaaccactctagagagaggcatggtgatgggggagtggcagaagctacttctaaatatgtcactgtggtcagatcctttgccaagctgagtggagggtcacatgaagggcccagggacagtgccacaggaacatttgtttggggaggggtggatattactagttttttagctagataagttagcacacacctggcagcatcataagaacatttattaaagtgtatgtgtgtgtgtagggcccgggggtacagggatgttactggtttttagctggatatagtagtacacacctataattcagttctttggaggctggggtaggagggtgctgagattgagaccagcctgggctacacagtgagttccaggtcatcttatgttctgtaaccaaagaacctgtcttcttaaaaagatttattttaatattttaaagtatgtatgtgtgtgtgtgtatgtatgtattgtgtatgcattcatgtatatgtatgtgcagataccataagaggtcagaaaccagagacatcagacctccctggagatggaattatagttgtgaatgctggaatccaaactttggtcctctgaaaggcatcttttttttgttgttgttttttgttgtttttttttgtttgtttgtttgtttttcaagacagggtttctctgtatagccttggctgtcctggaactcactctgtagaccaggttggcctcgaactcagaaatctgcctgcctctgcctcccgagtgctgggattaaaggcgtgcaccaccacgcccggcacctgaaaggcatcttaacagctcggctatctctccattcccatgagaacttatctttttagaaaagaaaaaaaaaaggtatctttatgtatgtagtaatactctttgctttgtccgtctctagggaacatgttgaaatcttgcagggtaaagactaaagatgacacattaccttcctttggatgctttgtggttgtcatgagaaagccccatggtagtatatttcactcacaaggctggactttgggcaatcagatctctgttgtttttttttttgtttgtttgtttgtttgtttttttttttttgttttttcgagacggttactctgtgtggccctggttgtcctggaactcactctgtagaccaggctggcctcgaactcagaaatccgcctgcctctgcctaccaagtgctgggattaaaggcgtgcgctaccacgccaggctgcaatcagatctctgaacacagttggggcctctgcaaaagaacaaaacatgtcgggggtgggcaccatctggtctcagtatgcattttggtgccacattttgagttgatagaactctaactactggagacagaagattgtattagcccatggcttcaggcatggtgagatccaggatggtttggtttggttaagtttcctccctcactcagtaattctctccagcctttatcttgtgtgcccctttcttctcacctgtggtaaatagatttgttctgtgtgatcagggagaatggccacaagaaacttctgtgtgtgtcatctctgaactcacaggaccagaggaatactcctgctctttctcatccctgaatggggatcgtggcactctccatttgattggacctggagaagccaacgcagactatacaaggggcacccgggatagtggggtcctgttgtaggagatagtgggtttttgtgtatggttatccaccactgttttccgttgtgcttttgaagaataaacatcaaagggtgtgtgttggagagctgccttttgtgtgagcctggcctgccatggttctttagttcactcagtgtccaggtcacacagagagatatgtgaaaaggtgcatgggcggcagagggttcccactccttaaaagctttggccatgcccttcctttcttacagatgatttgtgtctgtcagcaacaggaagttgctcaaaacagatccacccagtcctgctgctgaccctatggtggtttctttttgtcgttgtgtagcggtccatcagcttccgcagcgagagccgccccgacatccttgccccccgagcttggtccagaaatgccacctcctcaagcacaaagcggagagacagcaaactgtggagtgagaccttcgatgtgtgtgtcaatcaggtgctcacggccaaggagatcaagagacaggaggtaagctcgggacccctggagctgcctgtgtgtctgtccatcagaaggttccctgcagacaagaatcagtttatcagcgctcagagccaggtctcgtggggagggataatgttgtaaaaaaagcaagcgatgttgcaatattgaagctaagtgtccggttaggattcatccactcacaaagacaatcatcttcattttatttatatctcttaccttttattgttattatttttgtttgtttggtttggtttttgctgttgttgttttgtttttgttggtttttgtttgtttttgagacaaactctctctttagttctggctgtctggaaactcactatataagccaggttggcatcaaacccagagatctgcctgcctgcctctgcctctcaagagtggggattaaaggcatggactaccgtgcatggctacagtcatttatatttttagtaacttttaggaagttttaaaaaatatttggcttttagaactttggtacacctttataaaggaaaacttctttcttgtggaggacagttaatttgcccataagttttctataaccccatctctaagtggctgtgatggcacccccttctctagagggtttgtcagtacagctttgctcgcttcttcatacatggtgctgcaaaacttgcagagaaccctttgcttttcctcctgtgtgctaggattattggtattcactagtatactggttctctctctgtctctgtctgtctatctgtctgtctgtctgtctgtctgtctctctctctctctctctctctctctctctaaaactacctgaggaccctggcaaaaggggtactaggagctattgaaatactcaaagtactatatggctgtagagattgagatggtgtgtttgtgtgtgtatgtacgtgcgtgcgtgcttgggtaacttagtagatgaagcaaggcacaaaacagtgctaccacatatctaaaatgattgtgtgtatnnnnnnnnnnnnnnnnnnnngaaatattttcacgcatgcacacacacatacatattatatatatatgaatgaatttgtgtgcatgcatgaaaatatttctggaaggatgcctaaaatattggcaacagtgtttcttcctgaagttcctggaagaagggcctgagagtgcaggttctttccagggtgtccattctgtgcggtctgtgttgggtaccatataaatgtattgcctatcaaacagtgactacagcctttaaagtaatgcaggcaccctccaaagtcccatgtggaaacatgacaacatcttatgtgatattaggactgtgggtttgatcttcacctgtggggcatgcagagtctcatatcctcaagcagaagggactacgctgcatgatgactgtcagtgatggaagcttcaggctgggtgggtagcctctagtaaaacccaggggggataacagcagtcagacttccgcactgtcctagttttttgtttgttttttgtcaacttggcacagttagcttatctgggaaatggaaacttgattgaaaaaaaaaatgcctccatcggattagcaacaggcaagtctgtggggtgttgtcttgatgaatgattggtctgggagggcccagcccaccatgagcagtaccagccttgcacaggtggtcctttatagtagtagaaaacaggttgacaggccagtaagtagcattttcctatgacagtggttcttaaccttcctaacgctgcgaccctttaacccagttcctcatgttgtggtaaccctcaaccataacttgttttcattgttacgtcataactgtaattttgctaatgttatgaatcctaatgttgatatctgacatgtgatcgaaaaggggttgcggcccacaggttgagaactgctgctctatgacctctcttctagttcctgcctctgggtttctgccttgaattgagccctgagttctctccgtggtggactatgatccgagagttggaagaggaaatcaaccctttcctccccaggctgcctttgtttatcccagcaacagaaaccaaactaagatatggctctccctgctaacccctggggaaggagagaggctgatggttactggtgataagcaaggaccagtgatttcatctatcatgctgtctgggtctccatagaaacccaaaaggccaaagttttcagagctgaataactaagcatatgatgttctgggtgcagtaggtctagtgagggtgtggaatgtgtaagttgcacccataacttcccctgtcctaacttacctgatgcttttatcctttatgatatcctataaaccagtgaatgtaaatgttgccttgggttctgtgagcagttgtgacaaataagcctgagggagggatcatgggaactcttgacttcccaactgttgatgagagtcatgggtcaaactatttgaagtcttgactagcttagggtgaggagtcttggcacagagccctcatgtagggaacaagatgctgtttccaggtaggtagcattagaattgatggccaggcagcggtggtggtggtggtggtggtggtggtggtggtggtggtggtggtggtggtgtgcctgttatcccagcactggggaggcagaggcaggtagatctctgagttcgaggccagccaggtccacagagtgagttcaagacagccagggctacccagagaaaccttatctcaaaaaataaaaccaaaaacaattgagttagaagatacttacttagtgcctgctgcagaattcattgtttgcagtgcagaggaaagtactcatggcgggtggtagaagtgacctgtgttgtgaaaatggaggaggaaaaacagaattagggggtggagagaggagagtgagatgaagaaggtaaagaagacaaggaagagaaggaaggagaaattgagtttgtagtttctatattctcagagtaaacaagatgctattgtgggtgatttaaaattcccttatgtttttctgtattttttaaaatgttgttgataacacatatataacacatacagtctgacagtgtagaaaaagaaaagacagatgagaaaacattaagtcagggtgaacaatggtaagccacagccaggatttgaacctggctcttctcttacctcaaagccaaagttcttttcactgtggaatcccatggctctcctcccttggtggagaggccagtggtcagtatagttgatgagcaaacggctaaggaaaccagaggcaaatccatataagatgccagtgttggagacagccagctgatgggtacacgggacgtctgtgcagcttctcatgtgatagtgattatttcagtaagccatgacatgaggctttgctgggccttggggaaggttgtccctgcagcccagtatcttgccccacctgctctgttccatttcgtggccctctggtccctaagcctcaggatggcaggcatgcctgaaagctgttgactcctcctctccagctggaaacagtacagttgctcctggatcatcatcagagacttgtagtcctttaataccataatgtttgcccagtgtttagattcccagatgagagagggtgttctgcacatcatagctctttaaattatggtggcctaatggagccacattagaactggtccatttacacactcacaaagagccagcccctctaatcttattgggacttgagagtggattgaccccaccagattctatttacagtaataaactgttgcattcctcctataaccccagtcttaactagatgataggaatatagctttctgctgagacttgccttctttgggtaaaagagaacagcgtgtgatggtctggttaataacactgccaggtccatttgacacagttccttgtgttggatttcatcagagttctgaaacatcgcgggtgactgtgtaggttagaaatacacgattctctcacaggcaaggctctgccttgaagcttttagctacaagaacattgcttcaggctaatttacctatgactactactgctgctacttctactgcgttaccactacaacactactactaaactactctttccttcctttcttcctttcttcttctcttcctccccatccttctcaccctccttcttcctccttcagatcctcaccaccaacaaataagtcccccccaagcccctaactccatttccatatgaaagaggagaatcttaatctgcagggtattaaacccaggtgtttgcacacactcaacatatacttccctgagtattacccccaggctcatctaacttaagggtatttggagctttgagtgttggtactttttgaatttggtctcatagatgaaagaactaagccagtctattttttccctgcaggcgatctttgaactttctcaaggtgaagaagacttgatagaggacttgaaattagcaaaaaaggtaagctaagacaccatagctgtttgagtcgctccgtgtttatctctgccctgtgagtcatctcagagtcctgagatgatgcttttgagtagcctctttatgactaactcaagtcaccaaaaaatgaaaagaccacaaacccagcagcaaaggaaatggctcaaagcaagaaggcaagtagctctctacactgggcacctgccggatgcctctgcatgtcttaaatctgaaagtgctcatggaggcctgattttgtgtgcatttcattgtcctagaagtctctcttgagcttctcaggaggctgaggaggagggcctagagtatgagaccagcctgggcaacacgtcaagtgcctgtctttcaaaacatgtcaaacaaggagtgtcacgtagagtctctttgttcaccatcacttagagaaatgggtctctaaatcaggataaagacatttgagtcgtggaaatggggaaagccaagggtttgtattgtataagttagggtctttcatatggaaatggagttaggggcttgggggggttatttattgagtagtgaggatcacatttagatgaaaatatgttaatcagcagctatgggaggagggtagaaacccttgccttctgtcatgtacattcttgacaacaaatctctccattctagtgaccttcctattttaaaagctcaattcaggctgctccggcttttttgttatgtttttgagggaatcatgacattggaagaatgcttcttaccttagggtcctccgttcatcattttgctagtaggaagctcttcctcctatactcaattagctttatacaattccctgaaggaaagagtcgacatccctgtcttatttggtatatgtctatgtgtagtctacatgtatgtatgtgtatgtgtgtgtgtgttcatgtgtatatggtcacatctatgcttgtgggtgccagaggctaacgtcatgagtcttcaccatatttactgagattggttctcttgactaaacccaaagctcatcaatatggctactagtctggttggctagcctgtgctacaactctcttacctgttcaccttccaagtgctgggattgtagaagggccaccatagccacccatctttgatgtgcattctagagacctgaaccaaccaggattggcaaacagttttctgtctgcttaacaccaatagtgaaggatctaaccacttttcttttctttgaaaaatgtacatatttgaaaaggcctgctgttagctaattttaaataaaatggggggggtgctaaagtgtgcaatcatgtttactttcggaactttaaatcaaaactgctctccaagcaggatttttgcttcttcctagatgtaggatatactaaagtgtagaaggggggtgggggtgggggtggggcgggcaacaagactaccttggcttatcagtagtcacaaaaggctgacggcagaactcaattctctatttttccaaccacacctgtctgctgtttgcatggcattgtgggagaacttataggaagccagtttttttatttttattttttttatacatttgcacagcaactgggctcctctgcatttcaatatttctgtccttctcttgcccgtctttcgcaggcctaccacgaccccatgctgaaactctccataatgacggaacaggaactgaatcagatttttgggaccctggactctctaattcctctccatgaaggtagggttttggtccccgatgagtcatggcttgtcgttttctgatagcaaatctgtgactatataatcatgggaggagcccagcaccttctgccacctctgctcatctttgagtgcctaacaaaataagcgtttcatttatttcttgccagagctcctcagtcagcttcgagatgttcggaaacccgatggctcgactgagcacgttggtcccatcctcgtgggctgggtaagagatgttctttggtcttgtttgaagatagatttcactttaccttgaatttttctttgttggcaaagacttgattggttattatagcagataaaaagttaaactcttaacatattgagggtttatgtcttcaaagcatggaaacaagtttttcctgttacaggtttatttcattgaaagacaacatggcctttttccaacaaaacaaaggaaaagaacacacaaaactgttcttagtttcacataaaataaaatgacactggattatattggatctaggccaattaaagtattaccatttctactctaagtttaaaatcaacattttaattttttttaagtgcatgctatataagaacctaatcactgagctatatctccatatccccttgttttgaggcaagttcttattaaatcgcccacactatccctgaactcactttgtagtccagtcaggccttgaatttgggatgcctctgcctcatccttccaagtagctgggatttataggcctatgacaccaggcctggcttggcattcttattcatcgataaaagtagcttttcaaccgatttaagaaatcttgactgtggtataatttatgatggtatagcttttgcttcgaaggtgcaaggccttgggtttgatccccagtactaagagtggggatgggatgggatccatggtttaaatgtagttttacacgcatgccaatgagtgcatgttgcttgtagttaggacatacattcctggtcctaagtgactgctggttatacatctggcataaccaatccctttcttaaggaactaagatgtgaccttaggttagggctcataagataacattcaggctctttctgaatctgtgttcagttgagcgtgtaatggtgttcctttgtgtcttttgcttagacgaagcatatgctattttgtcaccatcccaaccactcctattgtatcccgtcttttcccttccatgagtaagggatgctccatcccaattgtgtagggttagtggtgtcctgcatctgttctgccacagggctaggctgctcagggaggcaggaaatgggagtttgaccgtgcttaccccacactgttgttgggtgggtgtttcactcctgggcttggggaatgcagtctgaggctcaggacagccagagctggcccaggggtcccgggcctgcaagtcggcccgaggccttctggttctcaggctctcagacacccagacacctctgggagccttggaagagcagagaaaagaatggtgacccgcaggcagaatctagcctggggccgagcttgggcttgacttggttgtggccatgcctgggagtgcagagtcacctcttcaggagattagatggcagctgctctgtaggcaaaggcctccagggttccccatggcagatcccaatgaaaagaggcagtccatggctttaaggcatttattgtcatggcagaaagtggatgagtaaaactgtaccctacttctcagggcaggcctgaggctaaataccttttgcagggagaagtgtctaggaaggagagtttattggctaagcctctaagtacctcattaaaatggagatctgtcttgaggctatgtgacctgtagaggggtttggggctttgcccttatgtgactgatggtcacaaatctgtggaggcctgccgccttgtgccaggagcctgattctctgggaacagggaaatatctaccacccctttagggttaccagtgtttctagccttagtcaaccaggaatcaggctgcctttcacagccctacacaattctagatatttttatttgttatgaagcaggtaatgaaagcagacaactttaatgacttcttctaggcagaattaggtctctccatccctctgatggggctagtattccaggacaatgggcagggagtgtactgatagagaggggttttaggtattattaatatactggtattctctttccaggtaaacttgttcctcaccttcctaaaaccttctggttctcactgacattacatgaatgtgcccaaaattcttaacattggtgtctgacctgatgcctctcagttactgccaagatctggaaccttcgaagggttctatgacttggctttagttcagaagtcaattttagtaccaaggcggaaatatctcaagaatatctgcgggacaagtaatgttctcagctgaataatttagatgaaacacgctttaatatttcaggagagatcattcatcacgaacttttgactttgcgttctaagtcatggtattgctctaaacttcttcaacccacaaagaccttcctctaaagagagtgggtcaactggagtcagaagtggttcaatgtgtttttaaacttcctcagactgtggacttccttcagagttagcagggctcctgctctgttttttatgacacagtaatgtagaatggtggtgcctctttaagcaatgtgtgcagattgtgacagtgtttcagcctcaagcttgaagatttagcctcactttttttcctgaaatatacttttgtctctagtgttatggggttagtttggtctgggaaaggctttagcagttgtgtcctgtacatatccagaggaagtgtgaccatgccagtcagttgctgtctggaccctccaggcctaaaatggggactggaagcttgaagagcatcctgaaaggaaacaagtggcccattgttaacagatctcatgagaaatggcccttacttatgaccaaagtgcagctaagtgcttttcctctttaatctgtttgagttctaccctttttaacagaacaaaatgaacatcttactggacactgaatgagaaaagtcagagtccattcaatccatgggaaattgagttattttcctgcaaaggaaaaaaaaaaaaaaacttttgaatgagtgaactgccccctaggacagtatcagcctttgcctgagaccataactagttagaatccataacttgtgctttgaagactttaaatggaaggcttggttttcttgggggagctgccctggttacagatgccaggagttcccttcaagcaggtcagcctatttgagcaagcatcccatgtcgcaaagaaacaatgtcccaagtgactggcctcaggaataaaataatttataagctctccaaggcagaaagtgggtgctcctgccaatttaggttctggttcctttttaattctgacgagagagagacagggtacatgaaagtaaaaatccagattcattcatgattttttttatgatagactttctaaaaaaaataagaaaaacagaaaaaaagtgttatccatatatacatatacatgtatacatatatatgtatatacacacacatacatattccatatatttaccatatatatatgtgtgtgtgtgtgtgtgtgtacacatatgggtcttttacattttttattctttgacagtttcatacttacactgaattttagtggttttgccttctgctcctcaccttgacccacccccctctcccattgacacctttccacttcccagcaagtcctttcctcctcttcttttcttatttaattatagttgaatttaattatagttgtttgcacaagagtgagtgagcaagtcaccagtggcttctaccactgaagaaagtgacatccctcccccagcaactactaactgcccaaagggcctcagggaggagtggagcctcgtggccccacccccatccaccaggaaatgttgatgggcacagtcttgtgcagatcttgtacagatggccaactctgcagtggccaacttgttcaactgtaacccgaaacctgttctggttagctcctccccttaaaggctagatgacttaacatctctttaaacagatgatcaagaacttattgggggagccttggcctcatgggcaccagcactcatgtgaacttagcccccctccccccatatgcataattaagataataaatctttttttttttttttaaagaatgtatatgggagagcttaggaggggggatcaagcattcagggtcatctgcctttatactaagctcaagatcaggaaggggtaccttgtttccagagattccagtctatttcacctactcgacggtcagtgaacatcatataaggaaaagaaaggatcgaagagtcagatgatgggttaaccggcagcaaaatgatatcttctgaccatggcacatctgtttgctttaattccagattagacgctccagagtgagaccttatcttaaataataacaatgtaacaacaaaacaaacaagaaaaccatagattgtaataatagctagtacttaatgcttcttacccagagggtaaactgtgggctgtgtattttatacactttatcccattaatggggaaaggcttttattatggcatcttttaagtggagaaagaaactgtggtacagaattgtcacccacaaacacctaaggttttttttttaacctgatgctagattcccagagtctgttttgttttgtttttgcttttttaaactgctgagcttttacctgctttttaaagagcttgcatacatatttgggcatctgtctacatcctgagtcatgcccaggaaatgagcaccctttcaggtgtgaacaaaggagcggagcttaacttggctcccatggtagctagcagcaagatcagagaaagtaatggtccattggacggggcagccagagttcctcggtagttcataaacacgggtcatttccaggcctttaaagaggcgaggaagtggaaatgaaattaagagggcctgaggtggttttgaactgattctgaagatctaaattgtaagcatcacgaggtgggaggcggagacagggtaccaattatcattacttcaaaatataagcttgaagagaggattttctgcagctgttttaacacaaaccgaaaggttgttttgtgtgtgtgtttgttcgatcaagtggaaggaaggaagacacttccaagaagccaagtcagtaatgactcttttaaatactgcttctctggagacgttttctaccctgtgataaggaaataatttcaataagaagcataaaaacagtggcagaatatttcaaaccttcaaatgctgccgccacttgtatgtctgttgactttgttcctttgcggttttgttgttgtttttatatgcgtttgtgttgtgtgtgttgtgtggttgtgcatgcatgtgggtattcaagaggacaccttggaggagctgctctcttgcatgtggaactcagcttagctcatgagagtttgtttcttctcactgtctaggtccaggggatcaaacctgggcttggcagtaagtgcctattttatgccccctttcttgtttgtcttttgagacaggatcagattgtgtagcccaggctggtcttgaactctcgtcagttcctgcctcagcttcctgggtgctaagattatatgttcgaggcaccgtgctcagcattttgtttgctttgtgtgtttatttatttatctaatcaacttatttattcttatgtggttttgattctgatattctctttgggagagcattgatcccacacagctaaccattttctgctcctatcatccatgaacctatatttgttcatccagaatacagattgtattgtttaatggtacaatgtaaaatcctgaggatgaaaaaacaaaagagacctttgtcactgtctcccattgaatgctacaaagagagtgttgtggtgagcgcggggtcttcattggcttccactggctgcacgttactgctgtgggtgtgcagccaggccacgggctgcacgttactgccatgggcagctttgcaccagcatgtcaggggaaggagctgttaagagggaggagtagagggggatgagaagttctttgcctgagtctctgatgtggtatttacacaatgtgactgatgggcatgttggggaaattatcgttttactggaatgaaggcagtgcagttagagcgttccagtctttaaactgaaactattcttgcatgctgggcgtggtggcactcaccctttaatcccagcactcaggaagcagaggcaggcggatttctgagtttggggccagcctggtctacaaagtgagttccaggacagccagggctatacagagaaaccctgtctcaaaaaaacaaacaagcaaacaaaccaaaagaaactattcttgcgtgattgtgtgatgtgatccagaaggcagggccaaaaacctttcccggcctgtcagagctcccttagaagatttttaataaacaattcctacaactattttctttaaatcatactattgcttgaacttcttgaggcccctgatggttgggccacctggaatcattggctcttaagtgtggaaaagcctgcactgagccacataaggcctaggctgtgagtttgacccttgctttctgtgtatgccaccgagtcttatagataagtctctttaagagactcttcaaatgaatcttgctttacaagataaaaggtggtgggctggggaagtggctcagccattaagagtacttgttactcttccagagggccacagttgagtctccagaagccccataggatggcacacaagcgcatggaactatcctgttctgggggttctgacaccctcttctggcatccatgggtacctgcacacacatgatccacagagagacaagcaaagccatgcacatacatacacaaaaacaaacaaaaagaattaaaattaaatcaaaatttaaaaatgaaaagggatctgaggagacgggttagtaggcagagtgcttgtgtgtcagtatgaggatatgggcttgaattcccagaatctgtgtaaagccaggcacagtctcaggtgtccataatcccagtgcttccacagtgagaggagggacagaggttaggatcccagaagcttgcagagcagtgagcctggagtattcagatcagcagcaatcaacaaagagaccctgtctaagatgagagctaatacctagggctgccctctggtttccacatgagttctgtacatatccctcccccatcatcgtctcattgtcgtcatcatcatcatcatcatcatcatcatcatcatcatcatcatcatcatctatacatggaggcacatagagctcacacaaaatttaagaacaaggtgcatggcacccaaggaatgacagccaaagttgtctcttgttctccaaacccacatgaacaccaaaaagtacacataacatgaagtaaatggctagcttctccgccttactgaggacctggaaagggttaggaaaattcagagactggcatggagctcagaggtagaatatcaaacatgcatgaggtcttgggttcaatacccaacactaatgtgagcatgtgtgcaggcacacgcgtgccacacacgtacacatacacatacacacacacacacacacacacacacacacacacacacacacacacacacacactggtctgtatgcatctgcagtactgattcttttgtttctagtttaaattgccagaaaaagctagcaagttctgatagggatctctaaaaagtgaatgcacaactaataagaggacctttttgtgtcttgcctgtcatgttgaagcgcctactagttattttcttccacctttacagataaaaggacagtggctgggtctggagaccagtttgatgtctattcatgcctgagtgatgccgacttggcccttaaagcaatgacattgacaccctgccttctctttatgtttccttcccagctgccctgtctcagctcctacgacagctactgcagcaatcaagtcgccgccaaagccctgctggaccacaaaaagcaggaccacagagtgcaggacttcctccagcgctgtttagaatcacccttcagtcgcaaactcgatctctggaatttccttgatattccccggagccggctagtgaagtatcctctgctccttcgagaaatcctgaggcatacaccaaatgataacccagaccagcagcacctggaagaagctgtgagtctgcctgtctttctgtctgtttctttccttcttcctgtgtcaatctccggaacactagggtcgggtcagtaggttccttgtacttggggcccagcagtcttgggtttcagacctgctatgtcacagattcctaacctataaaacaagtgtttatataaagtagcttaaggtccatttggttgtgtgtttgtgtgcctatttgtttgtttgcctatttgtttttgtttgtatatctaacacaggctcgggctagtataaaactatcgatttaggctggctttaaactcacggccatgcacaacccctcagccccaacctcccaaatgctaggattatgggtatgtgccaccacacccagctcaggtttgacgtttttcttgacaattttcgtgccattctatcctggtatcagcattgttaactgtgagaactaagatctttgtggagattttatatggaaaaaattgtctttggtaagaaaatgggaattggcttctagttagctggaagctcatcgtgaagggacatctgtttaagatgtagctcccatccttacccaaatgcagtagagtatgcgatcaaacttcctgtgtgcaactgcaccctcacccagcaaatgttgcctgagtatgggctttgcgagggccagtaacctcagcacttgagaggcagggaatcccaagtttgaggacattctgggctccacgaaagttaaaaaccagcttttcatgggactacaggatcaatatacaaggcttaccacccatcccatctgccttgacctggtttttacaacttcacacctagatatccttccactggcttccttttcccttagtctcatgaccagtggttctcaaccttcctaatgctatgactcttgaatacagttcctcatgctggggtgacacacacccccaaccataaaatcatttttgttgctacttcatgactttggtactgttatgaattgtaatataaatatctgatattcaggatatatgatatgtgacccctgtgaaaggatcgtttgactctcagaggggtcaagaccaccagttgagaaccactgctctagacaatcttggtcctctattcagcagagagtaacatgtctcagattgtaacgtgccacatcttgtaagtgatagggatttaaaccctgaatctaactatttagaaaactctaattacattacatggaaaacttctggagttgacttcaacccaggcctgaagaagattagaatcctgtctcaaagacagaacaaaaccaaaaaaacccaacaacagaaagaaggctagtaagatgaccacattagcctaatgacctaaattcaattctcagaacatagctttggaagaagagattcaactcctgaaagttggcctccacttgggtaccatggcatgagtgtgtgtgtgcgcgcacatgaannnnnnnnnnnnnnnnnnnnnnnnnnnnnnnnnnnnnnnnnnnnnnnnnncacacacacacacacacacacacacacattttaaaagaaaagatagaaggtggttgaaggatgatgagggctgtaagagaccacctcaaaggctcatttctgatctggcataatgataggagcatttatgttggtgatttggggatcagaagtctgaagctgctggataatcaattgcctgtcatctcacagagaagagcttatttcttattgatagtaataataaaaatagcgatcaatgatacttaccaagtactcagtaaattgactttctataattgccttccgggttattgtatctcgatttgcactgattacagcctgtgagattgctcctgtagctgatgcttaacagtccggttcggtgaagtggaaagctagccctgtctctgcacccctcttactgtggaattgcagagagctgtcctgttatgaatgagctttgtggctaggccttgaggttacaaggctggttcaggtgcctccatgtagggaaggaaaagaatgagcacagattccctcctgattcacgaagcatgcagtgcctgccaggtctgtcatgcaggaccagggccccgttcccaacacacagagggatcacaggcaccagggatgaggcctgtcttacttcttcatgtctgtttttattactgggaagagtgtgatctggttgcctcctctcttcatcccatctctgtgagtgtgtagtctgcagggagccctggccacgctaaataatgacttgtgtgggtcccgtgagcctatgctcagatttactgtaaagatttctcctttctcaatgcataccgtttaaagcacactgtcccctttttcatgtgagctggtttgaattttacaaaccaaacagataagaatgattgtttgcaacgggaggggctgtgccagatacccatgtccctgtgcttatagccttcgaaggtttgcgcctgcgcctcagtatcagggcaggtctgggcatgaagcatgggaaactttcatttgcaaacgtctacagagcaagtctcctgtgtgtccatttacacagctgagtgtgtgttttcctctctcctttccacaacccgtggagcatgtgaactgtccatagccctgtattgttgggcatgttttgggtatgtttggtaaacacaaaatctacagtaccagtgtggcttggccacacattcctggataaattctgcatctatgcaaagtgggggaaaagactattgaataaggctcttctataccaagggagttagttccattcactctgtgactagatctaaagatagggcttgcttttaatcaaagtatcagctacatcctcattcctccattttcttaatggtgtttttgaagaggtagtgggacttgcccccaagaagaactttcttcttcttttttattttttattgatttgttgagacagggtctcatgtggcagaatctagctgtttgttctgaccctcctgcctttgcctcccaagtactaggattagagaaatacactaccaaagggaatttcttaaagtagaatgttgactatccacttatttaatgatttcaaaaatctaaggattgtctcagccagagaaggctcctgcccaccattgcccctgcatgaaacagccttgcttttaatgctgctgcagtgagcaatgctatgcttggttcatgtcaggagctggtgagtggatggcattgtcccacaagggattaaacaaacagggtggattccagggtgtgctggctccttactgatgcatttttcatttttgcagtagccacatagatctcagctcttggccttagatatggtagtgtctggatagcctcaaggctggctccaagtctctggttgtaggtggttggcttacttcccccatttttactattcttatttgtttccatagataaacatcatccagggaattgtggcagaaatcaacaccaagactggggaatcggaatgccgctattacaaagagcggctcctttacctggaagaaggccagaaagattctctgattgacagctcaagggtcctgtgttgtcatggagagctgaaaaataaccggggtgtggtaagtagttactctcctgggggccttgccctggtacttccctatttctatcctcagcctgcctgcctgccttcctgcctttcttcctttttacttttatttttatttttttatgtttttgtggtactaggaatttagcctagttactcctacgaggcaagcgctcaccactgaatacatttctagccttctctttttgaattttgagacagtctcaattaaattgcctcaactagcttcaaactaggatgagtcgcgccatactcctgcctcagcctccccagcagctgggattatgggtaataaccactcactgtactcagctctgtgtcccacttggacttcagaaaatagtgagccagacgtgctggcacagattcataatcccaagtacttgggaggctgaagcaggaaaaatttaagttcaatgcctgtcagggctacagagagaggatgagaccggatggatctgtataacagatttcagttcagccagagctacatagtgaaaacctgcctccaaaaaaacaaaaaaggatttaatttaaaagagattgattaaatttaataatttaagagacaccttttcaacttatgtgagcaggtctgggaacatcccttgttgttagagagtatcgtgaatagcttgttatcagccataccatttgtaatggggccaactgaaaattgctaaagttattgtatgtggacctgtatctgtgccatagatgattcctgactgccggaaggttgttttctgcttcttattgatttccagaaagcaataggggatttacatgatgtggcactgggttccttgaaagttccttctaggaagtcctgagactcaggaagaagccttgctccgcagaggtggcctggtcccttctcatacaccagctaaggctggaggcctctccggttagacgtacctacggcagaaggatgaactcctcaggcagcagagtttggagcatgaagacggcagatggggtggggcaagagtgttgggtttggtgcttgccagaggtgtgaccgttattaggaacaaaatcttggttcaggaaaaatagtgtagaagtgacagcaagaggaaactgagagcagccagagatttcagtgaagacttagaaatgaagggcatttgtaagacatggcccagacaatcccagctcaactgcctgcctcagctaaaagatggagtggtgtggaaacaaaagaccctggctgttttaagtttcgaacacaatggcccaaccctctccctctccacccctaaaggaatatttttaatatgtttctaccaccaccatgccccagcgaggaaaccctagcgagttttccctaggctaaactcaaactcactgtttatatagcccgggctagccttgaatctgcactatcttacctctgcttctgactggtaggaagatgaaccttctcacctcccaatgacttgtagaattgttggtgtctgcggtatgtggaatgtgtatggtaggagacctatagatttctgttccctcaaatagcaaaccgtggataacgcagagcatgcttcctctgctccaacccagcttctcatcttgacttgttactcctccccgttagtggcctcttttgagagtcctgggttgacattcccacacggtttttctaccagaaagtcagagcccagcatcagagctacagtcattccatcttaactcccgaccattcccacggatctgatgcttggagttgaacaccagagatgcgccccagccccacataggcagcttgctctcactgtgtgctctgaggcatgcctttgctttctgagattttttttttctgtcccagctccatactggcaacttgtttgtatgatgtgtccatcttttagggttttcttttagcctataacgcatgtcagcagtacagcctggaacacactctccagagagcccaggtgctgctgagctcactgagaagactgtgaggggcatcttcctcgggctccagcagtgtgctccgggtcctctcgggcaagcagggtcccagtcggagttgctggctaaagttgatgatcagcccagtggttgaagaaacacacgttttcatgggtttgggaagccagagttgttattaggctttgatatacactctcagccttgtagactatcattaacttgatttcttagaattgtattgatgccaagaaagtaataattcctttccccatcctgttctttcttttggtcgagctggagactgtgtgtgcatgaataggttgtgaactgtaatctaaatagggttctggctacagttaagtgtagaaaggctttctccagcaggctcctaaggaggaacctaaattaaggcagtagacaggtgtttctgaaaacacttcaaatctgcccaacttctgagcttgcactcataattcattatgaacctagctagttcctagagacctcttgccgcagagacccacaaactcaccacttagatggttgctcaggacaatcctgtgggctcttttcttctagaaactccatgttttcctgttccaagaagtgctggtgatcacccgagctgtcactcacaacgagcagctctgctatcagttgtaccgacagcccatccctgtgaaggacctcacgctggaagacctgcaggatggagaagtgcggctgggtggctccctgcgcggggccttcagcaacaacgagagaggtatgtgtgggtagcagactcggtgacacactgaaccgtttgatcgtagaaatatggaaggagtggctggctggagaaaagtgaatagcaaactgtcccagtgttaacacttcacctactgatggatggacagtcaagttggacctctgagccgtcagctttccacttatctgcttttctcttgagactgctttgggcgttaagcagcagaccatagtacatgagcccagtcctacgcagctgcatgcagctggtgcaccgtttgctctctggctctgtcccctactgctacatcaaagtatgcttaataccatacagtctctgtgtgggcactggttgcacagtgcaaggttttgtagttgttctgatgtagctgaagagagttaagaacccctctcatgtctcttcctccgggccctcccatatctctcttccctcagtccctcccttgtctcttccgtccaacccctcccatgtttcttcttcctaacccctcccatgtctcttcccttcagccccttccatgtctgttccaagggcttctaacatacaggcagctgttgtcaatcccttgagctaagagcaatctgagctaagagaaagcacaaggagctgaaggggtctgcaaccctataggtggaacaaccatatgaactgaccagtaccccagagctcgtgtctctagctgcatatgtagcagaagatggtctacttggccatcattgggaagagaggccccttggtattgcaaactttatatgccccagtacaagggaatgccagggccaagaagcgggagtgggtgggtaggggagcagggtgggaggagggtatagggaactttcgggatagcattttaaatgtatataaagaaaatatctaataattaactaattaattaattaatatttattaattaatgtgagaaggcaaagaccagtttaaaaaaaagtaagaaaaagaaaaaaaaaaaaaagaaaatctgagctagacctgtgtcactccagtcaaataagtgtggcaccagggtagaaccaactgagtcctgcatcagttagagacattctgtaatcagtgtctgggatacgcccattacattagggccactctgtgtgatattgttagccttgacaaatacctacccattgactctctcttcatgtgttcttcatttctagttaaaaacttcttcagagtcagtttcaaaaatggatcccaaagtcagacccactcactacaagccaacgacaccttcaacaaacagcagtggctcaactgtatccgtcaggcaaaagaaactgttctgtctgctgccggccaggctggcttgcttgactctgagggactggtccagggtcccggcactgagaacagggagccacagggagaaacaaaacttgagcagatggaccaatcggacagcgagtcggactgcagtatggacaccagtgaggtcagccttgagtgtgagcggatggaacagacagacgcttcctgtgcaaacagcaggcccgaggagagtgtctgacagaagactgtgaccctgctagcagcaggctgtttcttacctgtacagtgtttgcattccacacgtgaactgtttggagaggcactttgtaatactcctgtgcctgtgttggcctagttccctctgttccttgtccctagtactgtaactgccgctcagtctgtgtcagctcacagcagtccttaccctgttgctgtatctcacaagcatctggatgagtggggaggaactgaccgtgttactttaacttgtcctactttcaaaacagaaagggtctctaaactactgctctgcatggactgggttgacaaagccttcgtcccatgcttctctatttctcatgttcctctagctctgacctagtagctgtagtcctggcattgagagagttttgcagagaacggagatggcattggaagagaaggcagaaagtctaattaattaacccttagcgtgagctcaggttctgtgttattcaaccagaaaacatgaaaacatccctgagggtttctgaggtttaattttgcaaaggaggaagccttgttttgaagcctgtggtttcatccagtgcaagttgaatgtaacaatctatgaagacctgaaacagaagtggctttagagagggccaagacaaaagcagttgccagacaggcctggtggcacaggcctacaaacctggcacttgggagcagaggcaggaagatgtggagttcaagaacagccttggctacataccaagttctagttcaaactgagttccacagtataaacaaaacagagctaaaagcacctgccagctctgactattcagctgaagtgggggacagctgtgggaagtgtttgtcatcgccagtggcttgccattagaaaagccatttctagcctacgacaacagagattgccaggggcccgagaagatctgccaaggttataggaccccatcaaccttatgtttcatccacctcggccactcctcttttctagtggaagactgtgactgcacctgggactctgtttacaaacaagagagaaggacttgggggtgagaagcgggtcactgtcactgaagcctcctgtgcaaaccacggaaactgaagttactccgggcggtctcaggatttcctgctctgctttcaggctctggttcttgagctacagtcagactggtggttaattcctcttgaggccagtttcattagctctcattatctaggatcagctagccaaactggaaagttctttgttccagccttgatttacagagcaaggatgggttcaaacaaacaaacaaacaaacaaacaacacacaccatgaggaaaataaaatgttcacaaactaaacagcttcttgcaagtgtaaatacttaggggatttgtacaaaattatacccacaccagcactagtagtaatgattctaaattattgccaaaaaagttttttgttgttgttaatttctgcatcaagtttacagaaaaggaagcagcaaaatacaaagttgtccctttactgtacacatgggtcatgtgcattcaaagaagctgtgtgacaagagcaaccaatagaaaaacaggtatatgacatggttatttttcaagacatattatgatcagttctaccctgtaaagcatatttctgtatttatagattttaacagtggtgaatttttttctattacaagtttatttaaaaccattttgtttcccaagttgctgaataaacaaacctgctccaggcagacacagtggaaagctgagacaggacactggatgatggagaaagcttcaactgttctctgtagagccgctggccacggtggccagtgagtcaaggtctgtcagcctgtgggaagagagtggacggatgttttggtgaaatgaatacttttgtataatggccttaaacttttctggaagcatttcaaataaattgcat

SEQ ID NO: 24 - DNA, 3629 bp, Mus musculus
agctgtaggtgttcgcatcgccgtcgcctgcatcgtggagctcgggccctcttttacccgggatttttgttgtcgcctgaaattagcggtgacatctcaaagggcaggcccggcagccgccatggtggccaaggattaccccttctacctcactgtcaagagggcaaactgcagcttggaggcgcccctgggcagcggggtggccaaggacgaggaacctagtaacaaaagggtcaaacccctttccagagtcacatcgctagcaaacctcattccacctgtgaagaccacaccattaaagcgcttcagccagaccttgcagcggtccatcagcttccgcagcgagagccgccccgacatccttgccccccgagcttggtccagaaatgccacctcctcaagcacaaagcggagagacagcaaactgtggagtgagaccttcgatgtgtgtgtcaatcaggtgctcacggccaaggagatcaagagacaggaggcgatctttgaactttctcaaggtgaagaagacttgatagaggacttgaaattagcaaaaaaggcctaccacgaccccatgctgaaactctccataatgacggaacaggaactgaatcagatttttgggaccctggactctctaattcctctccatgaagagctcctcagtcagcttcgagatgttcggaaacccgatggctcgactgagcacgttggtcccatcctcgtgggctggctgccctgtctcagctcctacgacagctactgcagcaatcaagtcgccgccaaagccctgctggaccacaaaaagcaggaccacagagtgcaggacttcctccagcgctgtttagaatcacccttcagtcgcaaactcgatctctggaatttccttgatattccccggagccggctagtgaagtatcctctgctccttcgagaaatcctgaggcatacaccaaatgataacccagaccagcagcacctggaagaagctataaacatcatccagggaattgtggcagaaatcaacaccaagactggggaatcggaatgccgctattacaaagagcggctcctttacctggaagaaggccagaaagattctctgattgacagctcaagggtcctgtgttgtcatggagagctgaaaaataaccggggtgtgaaactccatgttttcctgttccaagaagtgctggtgatcacccgagctgtcactcacaacgagcagctctgctatcagttgtaccgacagcccatccctgtgaaggacctcacgctggaagacctgcaggatggagaagtgcggctgggtggctccctgcgcggggccttcagcaacaacgagagagttaaaaacttcttcagagtcagtttcaaaaatggatcccaaagtcagacccactcactacaagccaacgacaccttcaacaaacagcagtggctcaactgtatccgtcaggcaaaagaaactgttctgtctgctgccggccaggctggcttgcttgactctgagggactggtccagggtcccggcactgagaacagggagccacagggagaaacaaaacttgagcagatggaccaatcggacagcgagtcggactgcagtatggacaccagtgaggtcagccttgagtgtgagcggatggaacagacagacgcttcctgtgcaaacagcaggcccgaggagagtgtctgacagaagactgtgaccctgctagcagcaggctgtttcttacctgtacagtgtttgcattccacacgtgaactgtttggagaggcactttgtaatactcctgtgcctgtgttggcctagttccctctgttccttgtccctagtactgtaactgccgctcagtctgtgtcagctcacagcagtccttaccctgttgctgtatctcacaagcatctggatgagtggggaggaactgaccgtgttactttaacttgtcctactttcaaaacagaaagggtctctaaactactgctctgcatggactgggttgacaaagccttcgtcccatgcttctctatttctcatgttcctctagctctgacctagtagctgtagtcctggcattgagagagttttgcagagaacggagatggcattggaagagaaggcagaaagtctaattaattaacccttagcgtgagctcaggttctgtgttattcaaccagaaaacatgaaaacatccctgagggtttctgaggtttaattttgcaaaggaggaagccttgttttgaagcctgtggtttcatccagtgcaagttgaatgtaacaatctatgaagacctgaaacagaagtggctttagagagggccaagacaaaagcagttgccagacaggcctggtggcacaggcctacaaacctggcacttgggagcagaggcaggaagatgtggagttcaagaacagccttggctacataccaagttctagttcaaactgagttccacagtataaacaaaacagagctaaaagcacctgccagctctgactattcagctgaagtgggggacagctgtgggaagtgtttgtcatcgccagtggcttgccattagaaaagccatttctagcctacgacaacagagattgccaggggcccgagaagatctgccaaggttataggaccccatcaaccttatgtttcatccacctcggccactcctcttttctagtggaagactgtgactgcacctgggactctgtttacaaacaagagagaaggacttgggggtgagaagcgggtcactgtcactgaagcctcctgtgcaaaccacggaaactgaagttactccgggcggtctcaggatttcctgctctgctttcaggctctggttcttgagctacagtcagactggtggttaattcctcttgaggccagtttcattagctctcattatctaggatcagctagccaaactggaaagttctttgttccagccttgatttacagagcaaggatgggttcaaacaaacaaacaaacaaacaaacaacacacaccatgaggaaaataaaatgttcacaaactaaacagcttcttgcaagtgtaaatacttaggggatttgtacaaaattatacccacaccagcactagtagtaatgattctaaattattgccaaaaaagttttttgttgttgttaatttctgcatcaagtttacagaaaaggaagcagcaaaatacaaagttgtccctttactgtacacatgggtcatgtgcattcaaagaagctgtgtgacaagagcaaccaatagaaaaacaggtatatgacatggttatttttcaagacatattatgatcagttctaccctgtaaagcatatttctgtatttatagattttaacagtggtgaatttttttctattacaagtttatttaaaaccattttgtttcccaagttgctgaataaacaaacctgctccaggcagacacagtggaaagctgagacaggacactggatgatggagaaagcttcaactgttctctgtagagccgctggccacggtggccagtgagtcaaggtctgtcagcctgtgggaagagagtggacggatgttttggtgaaatgaatacttttgtataatggccttaaacttttctggaagcatttcaaataaattgcat

SEQ ID NO: 25 - protein, 564 aa, Mus musculus
AVGVRIAVACIVELGPSFTRDFCCRLKLAVTSQRAGPAAAMVAKDYPFYLTVKRANCSLEAPLGSGVAKDEEPSNKRVKPLSRVTSLANLIPPVKTTPLKRFSQTLQRSISFRSESRPDILAPRAWSRNATSSSTKRRDSKLWSETFDVCVNQVLTAKEIKRQEAIFELSQGEEDLIEDLKLAKKAYHDPMLKLSIMTEQELNQIFGTLDSLIPLHEELLSQLRDVRKPDGSTEHVGPILVGWLPCLSSYDSYCSNQVAAKALLDHKKQDHRVQDFLQRCLESPFSRKLDLWNFLDIPRSRLVKYPLLLREILRHTPNDNPDQQHLEEAINIIQGIVAEINTKTGESECRYYKERLLYLEEGQKDSLIDSSRVLCCHGELKNNRGVKLHVFLFQEVLVITRAVTHNEQLCYQLYRQPIPVKDLTLEDLQDGEVRLGGSLRGAFSNNERVKNFFRVSFKNGSQSQTHSLQANDTFNKQQWLNCIRQAKETVLSAAGQAGLLDSEGLVQGPGTENREPQGETKLEQMDQSDSESDCSMDTSEVSLECERMEQTDASCANSRPEESV

SEQ ID NO: 26 - DNA, 249838 bp, Homo sapiens
  misc_feature (1)...(249838): n = A,T,C or G
ttcccaggagcccatctggtgagctgagagttagtgaggggcccaagagaatggggcttgctctgccctgtgctttagatggaccatgtttgatagaaatatttggtaagtagcacgtagctgataattacagtcatttttctcgccccagtttgtggctcttgtggattaggcggccagaaaaatcttgatgcaacttggtggagctctggggcaggatcctggaattggactgtctggccttaccctttagtagctgtgaggcatttctaaatctaagctctcagtgccacagcttcctcatctgttacagcccttattccacagggcccccgtgaggattaaatgagttaatcctcataaaaagcacagtacgaatagtagtagtagtatgaaaatagtactaatattaccctcttttactcagaattacctcatacccgccactccctttttttagccgtcattgaggtctgccaggattcagcatggtggcttgctgtttggtgcagtgctgaaatcagtggccttgacattaccttcctttctaccacatgagctctaacaagcctgacgcagttccactcccacatttcactgacagtttgggaataaacatgtttttatgtgtggccccagtcactgccaaaaacagcatttatggagcatctaattaccttggagactgtggtgggtcctgtattggagtcaataaactgctttaagcaatgctggctaatttaagaatttttggcattttaaactgttaggatcaacagaacatttattataaatgcccatatctgaggacccacttttaagattgcaatgttcattttggaggggttgggccacctacatatggatttattagtttctgatcaatatagtattgaataaaatataaagactttcttctgctcctcccagggcaagaagcccttacggagtacctgtttgatagaaactagtaaagtatggtatctagagatataatttttgagtaaagagttttctaggatttgaaaaacatgaattgacaggatgcagtggctcacacctgtaatcccagcactctgggaggccgaggccggcagatcacttgaggtcaggagtccaagaccagcttggccaacatgacgaaaccccgtctctactaaaaaatacaaaaattagccaggtgtggtggtggtcgcctgtaatcccaggtactcgggaggctgagacagaagaattgcttgaacgcaggaggtggaggttgcagtgagccaagattgcgccactgcactccagcctgggcaacagagcaagactctgtctcaacaacaacaacaaaaaacaccttctaagcgttgattatttgatcgaaatctctttaaaatgttaagaaaactgagccattaaatgttttaaattgaaattacccttctattaaaagtataatatgcacacagaaaagtttaccattaatctccatggatatttttatttgcagatgtagaaaaaccagtgaataagactaatctctgatctttattgtttttattatttttttttaagtcctgttatacttcatgtaaagagaaccaactcagtattggctctgcgcctggtacatagtaagtgtttgagtttccatctcctttcctctgttgtggctgcttctgcaatggttttaacatctgtttctctgttcatcaactctagagccagattgcctgggtttgaatcccactctgatgcctactagctgtgtgattttgggcaagtcacttaacctgtctgagcctcagttttttcacctgtaaagtgggagtaacaaatatatctactcataaaagttttttgaggacaaaatgagttagtatttatttagcattcagaacagtgtctggctatgacacagtgagccctctgtaagcactggttctttattttttatttattattattattattttttgagacagagtcttgctctgttgcccaggctggagtgctgtggtgcaatcttggctcactgcaacctccacctcctgggttcaagcgattcccctgcctcagcctcccgagtagctgggactacaggtgagcaccaccacgctcggctaatttttgaatttttagtagagacggaatttcaccatgttggccaagctagtctcatactcctgacctcaaatgatccgcctgcctcggcctcccagagtgatgggattacaggtgtgagccaccgcactcagccagaactggttctttttaaacagtgaacccttgacaacgttctctatgacagagagattgagggtactcccagtccatatgataatgggcagtggtgctgatgagttagggagcccatgacctgatcccacatccgtctcatcagtggagagctttggtcttatttcaaacaaggaggaggggccctcagtgtcggtgcgtgggaaggcagagcacaaacaaggagtcctggttagaaaaatacactctcgggaaagaacaggctctccccaggcaaaactttagaaaaataacaatctgctgctccttgattaaagggtagaaaactaattatcctttccggagggacgtgaggctgctctctgccaggctgtgacctggaggtgcaggatgtggatttccttaggatgtaatgaagcctttgccattgaaaacgtgcgatgattcagatggatgtggggggcagggggaggggagagggagaacgatccctttgcttttaaaagcaacttctggacacttcagaaacatttgcgggtcagcactttgaatatggaaaactgattttcttaaattagatttccagaagacctcttacaaaacatcccttcaaaaatgttctgtaatttttgctaattagaccagctgacagtgagcttaggtgtttgaaagcttggtgctgccatctatccgctgatgatgcagatgagaatgccaaatgaggtagtaactgggaaacactttttttgtgtgtgtatgctgaagaaataccaagtagtattaattttagtttctttagttaagggaagagcatgaaaaattcgatatttatataactagtatattatattcctcattgtctcccacaccatactgttagggatggaaatttcccattggcctgtaccatttggctgcagatgtcaagaaagttcaaaaaagtcttacaaatagttattgagcatctaccatatgtctagagggtggggataaaatgttaaaaagataatgaagtggctgttctcagggagctcaatatatacatatactggagacagagtcttgctctgtcgcccaggctggagtgcagtggtgcgatcatagctcactgcaacctccacctcctgggcacaagcaattctcccacctcagcctcccaagtagctggaactacaggtatgcaccaccacaactgtctaatttttttattttttgtagagacaggctttcgctatcttgcctagtctggttggagctcatattttaatgacttcggtggactgaccaatacctaagctctctgtcaatttgtattttatatgaataatgcttcttaggtatctttggacaagtatctctaagctctctttctccatttcactaatgttttcttgtcaagtcaccaggggtctctgctttgccaaatttggtgggcacctctccatcctcctgcttggtgaaatagtagagtctccctctttgaagcactgtcttcacttggcctccgcgttgtccctctcttggttttcctcctaccctcatggggctcttctcatgtctgcaagctgatgatttctgaaaatagtctccttatatttagcagctaattccacatctctatttggaggtccatactatttcaatgttatatgtctgctcttgatttttgtccccaaatctgctcttcccatagccctttgctatcttcccattgttcaggctaaatttctttagagcagcatcctttactgctcttatttcaccttctgtacttaatccacagtagatagtgttattcctgccttcaaatatgttcatcatgcccaggcgcggtggctcacgcctgtaatcccagcactttgggaggccgaggcgcgcggatcacgaggtcaggagatcgagaccagcctggctaacacggtgaaaccccgtctctactaaaaatacaaaaaaattagccgggcgtggtggcgggtgcctgtagtcccagctactcgggaggctgaggcaggagaatggtgtgaacccgggaggcggagcttatagtgagccaaaatcgcaccactgcactccagcctgggcgacagagcgagactccatctcaaaaaaaaaaaaacaaaaaaactgttcaccattccactactcctcaccacccccactgccaccatcttgttccaagtccctgccatccctcatctgggctgctgtaggaacttcctcacctcctccctgcccccgtctcgccacctggagcttctgtctccatacaacattgacagcaatccttttaaaacttaggtcaggtttgttttctgctcggaatcctccagtggcctcccctctcccttggactaaaatccagagaccttgcagtaatctgtgagacccttgccatctggtttcagctccttctgtgactctccgctcttgctcactgcttaccccactccagccatattggttttgctgcccctcagccgtgccccaggaactttgcatgagctatcctgtccacctaagacaggcttccggctcttgcagggagaagcctgccctgggcactccatactaaatatcagctactcccaccacccccgatcccctaccctgctttgtccttctccatagaatttatcaccttctaatgtaagctctgagagaagaggaactatattttttcctctgctgtatccctatgcctaaaataatgcctagcacatggtagacactcagcaaatgtttaaagccaacatttattatgtacttggtgtgaaccaggtagttggcgcagtgctttataggaattatttatttacttctcaaagcaaccctaggaggtctaagtcttatcatatccattttcaagttggaagctgaagactgggaaagttgtataagttgtccaaagtaatttgatggacttgggcttgaacccaggtcttggagactgcagagcccatgcttctgaccaccttgggttaccgttctctccctgtggtggcctgaattggttctagaagtgtttatcgtagctgaccaacacacagaaatgtgaatgagcaacccaaggcccatccatggacttgaaataaggaaatagataggagtcctggtgcgtttgttatgatgagataaggtctctcaggagtgtctgggatatgaatgtgctgtggggcagatactctctcctggatgaggagacaagggaaccacaccaggtggggttagtaaggtgaaaatcatgtataacccaaagtgctttttaaaatttttttttattttttgagatggagtctcgctctgttgcccaggctggagttcagtggcaccatctcagctcactgcaagctccacctcctgggttcacgccattctcctgcctcagcctcccgagtagctgggactacagttgcccgccaccatgcccactaattttttttttgtatttttagtagagatgaggttttactgtgttagtcaggatggtctcgatctcctgacctcatgatccacccacctcggcctcccaaagtgctggaatttcaggcgtgagccaccgcgcccggccttaacccaaagtgctcttaaaagccctgggaaagggtcatgttggggcctgactgtccatctctcattaaatccctcatggccggtatcctcttcaatgctgttcatttggacagctccagaccagactgagaagttggttggcatttgagggcctttttgttccaaaagtgcttatttataaaggatccagcacggcctgagagacgcctggggaaaaggagatgactggggtgaatacagatccacagccccatgtcaggcttgcttcggggtccctgccgggcgcttagaagaccccatgagatggcttccactatgcatgttcttctctgtctctctctgaagtgcatatgttgtattcatgttctttcatcgtgtatggaagcctaccctgtgtattggtgaccacagacttactgagggccgcaccatgaattcattctcattatttattaagctcctattagctgcaaggagtgcagtgacagcagcgagtctaaaccagatagtccctggctttccagagctggttccctggaagagggctctcttacagggtcccttctgtgctccagtcactaagagctttacgtatattaactcctctactcctcacaacagccctgtgagaggggggtcttgttagtaccttcattttacagatggaggaactaggaatcagagatattaagtcacttgtccagcgctacacaggtggtgagttgcagagccggctccagcttctgtgctcttaactactgggcgaagccgcccctgtatggcagcactcaggaagcactgacagtgactattgcagttctccttctgggagattgcacgcatgaaaagttgttctaaagatacaagcttcgcaggaagctaaaatacagaaggggaacacagcaaaatggctcttaagtgggagcagaagacagaccagctgttgctgctgaatctctgagcacagagacagtgcaggggttggagggggaagtgggagtgggaggacatgcagaaagccagaaggtgtgggagttcttatcatcgttgagtgactcaagtaaatatatgcctcagaaatggacttgtaggactgatttctcacaagtactgataaaactccaccactaagccgcttccatcaaatcccaggccacattaaaatgcttgctttctcagcttatttaccgaattttctcttctggagtagttaataggattttatttcacatcattattccgtgtggattttttccattaaatatgtttcttttattttgcccgaaaatatttttatttcaccctcacttttcaaaaattgtagtagaatacacataaaatattaccattgcaaccatttaaaccattaccatatttaccatttcaactatttaaaaatgtataataattcaatggcattaagtacattcacaaggttgtgcacccatcaccactatcgaattccagaaccttttcatcaccccaaaaggaatctgtgtactcattaagcagtcactcctcattcctcctcttcccccagcttctggagctaatctactttctgactctatggatttgtctattctggacatttcacataaatggaatcatataatatgtatcccttgtgtctggcttctttcactttgcatgttttcaagattcttccatggtgtggcatgtatcagtacttcattctttttttaatggttgaataatattctgttgtatggatatatcacattttgtttatccattagttgatgaacgtttcatatgtaccttttcttttctttttctttctttttttttttttttgatacggagtctcactctgtcaccgaggctggagtgcagtggtgcgatctcggtccctggttcaagcaattctcctgcctcagcctcccaagtagctggaattataggcatgagccaccatgctcagctaatttttgtatttttagtagatatgggatttcaccatgttggccaggatggtcttgatcttctgaccttgtggtctgcccacttcgacctcccaaagtgctgggattacaggcgtgagccaccgcgcccggcccttatatgtaccttttcaatagggttattataataccagccatgtgccagacacattgctacatgctatgtcctgaatatatgaaaaattcttattgatcaatcaataagaaaaaaagaacacttctttatataaatgagcaaatgaactgaacaagcgttttacagaagaggaactacaaatataatttcatggatttaaaaaatcatttcgatctcgtctctagttaattctggaattgttttgaatagggtagtcctatattatttgcaaactatgcacatgtatttgtttgggatattacctatttaggggaagaatttcatttgttgctttgttcaagtagatctttatacatttgtgacctaaagatgatttggtatttacagatgtagtactacctctctaaagcctttgtaaaatattttgtccttttaacgtttctgaattcagatggacactaacatccttttggagaatgcgtcgtttttagcaggggttctcaatttatgtattttggttgtcaccaactgctaagacatggagcagtggattttcacagtcagaggttattggaaacggaatgccttatttttctataactgtgctgttcaatatgatggccacatgccacatgtgacaactgagcacttaaaacatggctggtgccaatgaagatgtgtcataagtgtaaaatacacattggattttgaaggcttggtatgaaaaaaaataaagtatctctaacacttttttcctgttgattatgtgttcaataatatctggatatactgggttaaataaactatactattaaaactaaacttatctattcctttttacttttaaaatgtgactaataggctgggtatggtggctcacacctgtaatcttagcactttgggaggctgaggcaggaggattgcttgagcccaagagttcaagaccatcctgggcaacatagggagaccccgtctctacagaaaaaaaaaaaagctagttgtgctggtgtgtgcctgtagtcttaggaggctgaggcgggagtatcacttgagctggggagttcaaggctgcagtgagccatcatcacgccactacatttccagcctgggcaacggagtaagaccatgtctcaaaaaatatatatattatatattatatatatataaaatatattttatatatattatatattatatatattatatatattttatatattatatatttaaatattatatannnnnnnnnnnnnnnnnnnnnnnnnnnnnnnnnnnnnnnnnnnnnnnnnnnnnnnnnnnnnnnnnnnnnnnnnnnnnnnnnnnnnnnnatatattttatatataattaaatatataatatattatatatattatatataatatattatatatattttatatatattaaatatatatgttttatatttaaaaatatatattatatattttatatataaactataatataaaatatattttatatatataatatataatatattttatattatatataatatattatatataatatattatttatatattatatatttatattatatattatatatatgtcattatatattatataataatataattaatatatattatattatataatatatattatataatatgtaatatataatcatataatataatatattatatataattgtatatataatatatataattatagtaccagtatatatgttatatataatataatgtttattatgttatatataatataataagtattatatataatagctattttatatattatataatatatattatataatatatattatgtaacatatataatatataattaaatatattatgtataatatatattatatattatataatgtacataatatgtaatatattatacatataatatattatattatatattatgtaatatatttaatatattatataatatattatataatatataatatgtataatatataatatattatataatatataatatgtataatatataatatattatataatatataatatgtataatatataatatataatataatattatataatatatgatatgtacaatatataatatataatatataatatataatatataatttgtataatatataatataatattattatatataagtatgtatatactatatatatatgactaatagaaaacttaaattacatatgtggttcacatgatatttcaattgaataatgctgtatttaaaaaaaaaaaggctgggcgcggtggctcatgcctgtaatcccagcactttcggaggccgaggcaggcagatcacttgaggtcgggagttcgagaccaacctgaccaacatggagaaatcctgtctctactaaaaatacaaaattagccgggcatggtggcgcatgcctgtaatcctagctagtcaggaggctgaggtaggagaatcacttgaacccaggaggtggaggttgcagtgagcagagattgcgccattgcactccagcctgggcagcaagagtgaaactctgtctcaataaaaaataataataataataataataattaaaaaaaaaaaggctgacagagggtggagaatggttgagaagagtttcagtggacacctatgactcccttgccttcagaatcttgaaagtgtccctgagacaggccacacagggtctggatgtctgcagtagcctccagcttatctctgctttcactctgaacccctgactctcttttcccctcccttgccagggatatctttctaaaaggcaaatctcatcatgtcactccatgcttcagtggaaccccatcaccctatggccaaatccctgactctgcttccctgtccagccttgcccacctatccagcctcatctcatgcctttctgcctccttccccaccagctaatatatgttattataatctgcattatgttcattatatgcaataaatccacaatatattttcatagtaaaagactaagaaatacataatataaaggataatgtccacatttatgctgtctaaataccaccccagctatgtaatcagtcactgtcaacagttgggctgtgcccttccagggccctcatcctacatatacagacctaattctgtatctttgtatagcattcatctctgtacccactatacatccaacatttagtcatatttgcttcagattttgtgtgctccaacccaggccctataccttccctctctccctggaggtaatcattcctctccggttgaaatagtcttaacatctggagtttttacatttttattacatatatatgactataaacaatagagtagtattttgtgtgtttctaaataatatatcatatcatatcatgtatatctcctataacttggattttcatttttttctttttttgagcttttttattaccatatagttctatatgatcttccactataaaaatgaatgtagtggccaggcgcagtggctcacacctgtaatcccagcactttgggaggccgagccaggtggatcatgaggtcaggagattgagaccatcctggctaacacggtgaaaccacatctctaataaaaatacaaaaaattagccaggcgtggtggcaggtgccagtagtcccagctactcaggaggctgaggcaagagaatggtgtgaacccggaaggcagaggttgcagtgagccgagattgtgccactgcactccagcctgggcgacagagcgagactccgtttcaaaaaaaaaaaaaaaaaaaaagaatgtagtttcatttaatctacttccttatcaataaacattaaagttgtcatacttcttccagttcttcacatgtgctatattctcctttatttacctcttaactcttgatgctttttatcttctatagaagtttgtataagattgaaatgatctggtttttgttttttctttggaaagttcggtagaatccattagttaaactgtctggggctgacattttctctcatttctttattaattataaggctattcaggctttctatttcttcttgggacagttttaataagttatattttcctagggatttctgcattttctttaagttttcaaatttaatgccataaaactattgataacattcttattgtagtcgttatttatttgttaaaatggggccttcttatggttgcccagactagagtgcagtgacattatcatccctgactgcagccttgaactcctaggctcaagcagtcctcccacctcagcctgctgagtagctgggattataggctcatgctaccatgcctggttaattaaaaaaaattttttttgtagagttggttttgctatgttgcccaagctggtctggaactcctggcctcaagcgatcctccttccttggccacccaaagcactgagaagctttaaattttaattgctatttaatctgtagttatgtgaccctattcataacagtatttattagtgtcctttccacctctttttgaatttggccagttttatctatttaatgtctattttgtttgtcttttcccttctgcctttttagcatggttttcctttggcttggcctacttttcccttttctcatcacctgttgagtccttcttctctgttaggtctcagagaggcctcattttctctgggaggtctttctggctcctcaaactttggtcgagaccctgcggcactcctcactaccacttaaaaaaaagcaatttgccatgttgtaattttttggaggggaacagggtggatctgaatgccctgtgaggacatgaaagcaggaactgaatttcttgtccactgctgatctctaatgtctggcaccatgcctgacatgtagtagctgctcaataatattggtgaataaattagtgggtgagctcccacgagtagagtacagacccattctccaaaggtgagggctctctttaaggggccattctcagctggactgctggaaagaggattcagctagtgactgagaaattgtaccagctgaccatttctgaggttctgtgattttttttttttttttttttgagacagtcttgctctttcacccaggctggagtgcagtggcacgatctcggctccctgcaacctgtgcctcccgggttcaagtgattctcatgcctcagcctcccaagtagctgggactacaggcatgcaccaccatgtacagtaatttctgcatttttttagtagagacggggtttcaccatattttccagactggtctcaaactcctgacctcaggtgatctgcctgcctcggcctcccaaagtgctgggattacaggcgtgagccaccgcatgcagcctctgtgattcttttttcccgtaatttatgaggaaataaagagttggagttgcagccatggcatgagtagaatgaagctgagtgtgactcattgagccatagaaatgttattgggatgtccctttgttcaagagagagacaggccaaagtgatgagctttctattctgcaaactacctcttcacagtgagcttctccacaaagaattgggtcttcacctggctaaacacctgccagtctctcatcaactatgtcctaaaaacagaaactaaaaagatgtttaagtgaaagaagccattatcttcttaagtggttcaatcagaataaaaatacctggcacaggtggtaccacattcggcacagatttctcttaaaaaatatagctgtttgatttttctagttatgctacaattgttctgatggataaagagaggtaaaacgagaaaagacgaaaaaagtttcgttagcaagatgttctgggttaagaattcagacagtaaaatatttaaaacatatacaacttgctgacgaaggtggtagtctttgagaagggaaagtggagttaggaaattagaaaagagaagtctcttttcatggttacctcaggtccagatttgtggccatgttgttatctaaaacaaatattcataacacattgaagcctttgttttcttttgtgtatattttacccagtccttaagagtgagatgtaaatttcattggccctccaatatgagcctcaccaatgataatggtaactaacatttacccttactgggttaaagaaggagtcttctcataatgataatagctaatttgagtacctactaagtgccagactccctgctagccattttttttagtacatgaatttattccttcaattttgtgaaaagggattattagccccactttacagatgagaaaatggaggctcagagggagtagagagtagggaacttgcttgaagtcccccaccaagaaagggagggagccactattagaaccccaagctggctcttccctaaacaccatgttctgagccccacacagtgcgcagacagcaggagcagtctaaatacatgttcaattctgaacccatactaagaagctgttgtataagtggtcgctaaacctcttctcaaggtgacgagaaacagtcacatttgttttcacatggtgggaaaataaattctgcactaaccctaaggcctattgctgctgaccttattctgtttgattccagacacatacacttgaatttgagatcattccctaactgaaccttgaatgctgatttttctctgctactgtgggcatttctccatttctattatgagctttcccaagggtggggagcttgtggcttttctttcccaccttttgtaaggttgtaacctccctccacaatagcagccccccaactccaacccctccaacaatcttggaagtttctctcttgctgctcacccatccctggctttcctgtgaatccctctatggaagtggtcatacttatccttgtgacatctgtgagacactgggaaatgctgcctagacagaaggctgtgctttgtaaccatgtgtgtacaccatgcacagcctgctcacatgaggagcctgagggctggacacagacgatagacacgccctccaagccttgttcagaagctcagctgagtgtctttgtgtctgggaaacctgcagcatcaagtgctattttctcacttggacttttgctgattgtgcaaaatactgcttctacaatagaagaaatatacccaggactgagaggcccctcctttggtgaggacctggtgttggtgcttccgtgatggtgcactttatgctgctaggatccttcaccagcttcatcaagaagccttctcatcagtatggttctccttccctgaatctgtgcattaaagccacctgggtggtagtgtttggctggggagaaggaggaaattatcaggaggctattatggtatcaggatataattttcaaacatttgttattatttttagagacagggtctccctctgtcacccaggctggggggcagtaatatgatcatagctcgttgcaacctcaaacttctgggcttaagcaatcttcctacctcagcctcccaagtggttgggactacaggcaggcaccacaatgcccagctaatttgtttttatttttagcggagatggtgtttccctatgttgcccaggctggtcttgaactcttgccttcaagcgatcctcccaccttggcctcccaaaatgctgggattacaggcatgagtcttgtgcctggcctagaattgttaagagggactgtagctaatgtgaatgaccggaagcctgaatggtggtgggatgagaggaaggtgggagctaacaattagggacagcccttctctcggtaggtctcctggcagcttctccagctgacagggacacttaagttgcccaacagtatcccgaatggacagatttgctctgatgctttttctttggctatgaggcctgatggtgggaagccctgctaagctgctgccctcccacaaggaacccccaggcagctttctttcaggggtatgctttgccctgtttggggggacttctcttcatgtgagagggactgcatcctctggatctggagtcagacacatctgggtttgaatcccaaattggccaccaaatagctgtgtgacttctggcatgtggtttaacctctctgagcctcagtttatctcatctataaaatgcagtagtgacaatgttcccactatatcatattacataatgttatataaaattatgatgtaagattatttatttaaatgtatgtaatgccattataatatattgtgtataaaatgttatataacactgttataatgctgtctgtatgtcatgtatttacattataacataataagctaccttataagattattgtgagacttagagtacctaaagtgcttagtcctgggcacatctgtaattgaatctgtgttaattattgtgataattgacattatgtgtgatcttctgtggattgcaacatgtaagataaagacacatttactcagaatgttctggtatatattgttactttagaagcaatgaattccatcaaatagttaggaaagcaaagcccagttatgactgagagggaagggagtggtatccagggagaagtattgttgaaatccaaaaattttgttttaaaacagacatttattttcagaaggacttaggccaacatgtaacttaatggagaagggtatgaaacataaataaccacccacatgttctctgtcttgcgatcttattagcctgggtttttattgcttacgtgtgggtgaagaggaggttgaggcaggagggggcctggtttaaaggcacatcaggtgggagttcccatagttttggtgagttgccctggctcttctgtgtcagccctgcatcctgggttgaatgctgttcttggagctaggtgttgagagagaaagggggacaggggcaccacgctgacagctggtaaaaacagcaatgacagaaccagagttagagtcctcatctcatcttgactcaacacagagggtattatttcccctgttttgcatgtaagaaaaccaaagctcaagaaattaagcctcgtgttcagagtcacagcgctaataaacaccatggtatttgaggtcagacaactaagaacagaatcccaatttcatctgtgtgatcagaatcaaagcacttaatatccctaggcgtcagtgctcttatctataaaatgggtacaataatgcatcctaactcacagggtgagagtcatgggattaactatgtaaaatattagcatatgctttttaaagtgctcagtattggttagttgctgctattattgtaattaccttgtattttatctcttttgtatggtagagcaatcaagatttttactcagctctaacataccacaaagcctgtacactggtcactacatgctttctgccttgcattattgctgattacagcagaaaggtcaaggtaaaagtgactattgtgtaaccaaccttttggggtttgtttgtttctgagatggagtctcgctctgtcacccaggctgagtgcagtggtgcaatctcggctcaccgcaacctctgcctcccgggttcaagcgattctcctgcctcagcctcccgagtagctgtgatcacaggtgcccaccagcatgcctggctaatttctgtatttttagtagagatggggtttcaccatgtttgccaagctggtcttgaactcctgacctcaagtgatctgcctgtttcggcctcccaaagtgctgggattacagacgtgagccaccgcacctggccagccttttggtacatcagtgactaaagccccaggaaaagtccaaggtggatgcttttcagagatgcttttcagcaaacatgaaatctgaatatccatattgacagacatcacatgttttaggggagtaatttatccataaaaatattgaaaaaggtattcctgtagttatattggcagctacaaaatttgattaggagacagaaataaggtgcttctggtgtgcctggagtctctttgtgctggtctgtcttgaagctgcctccactgcctctaaggaaattgattcatgttgagaggttaacaggtgaggaaaccagtttcagcttgttacgcgggggctaaatgtcccgttgatggttgctttaaaaacctggagctcaaatgtaccccttgttggaactccccagcatgtctgtgtgacaagggagagttccaggctgagctgaagctatacatctcctgatagtgtccatgtgggaattgagtctatgtgaaaattcaagacaaagattgggagtctggtctgacttttttattgcatccaggttgcgtgttagattttattttactttatacagatgaagggctattttaagggactctgggactttcctgctggggaactgagaaggagtttggggtgaatttggctgctgaagattgcagagctgttgaaaactccatccaccttgtttgggccatttcttgaggcatctctctttttgataaacctgcatttgaaagcagtgacttcctctgaatatccaaccactgaataatgaatacattgtcttttctcttctaggcctaaacggcagcggcaaaacaactttcccatgtttccctctcctaaagcctggaatttcagaggggtaagtgttgccctgggtagcccctgctgttaaatgtcctattatggatacatgctctggcctccagaacggacgctgttagggttggttttactaatcaaagtctccatcaggagcgcatctgtgctttaccacttggggaagtcacacttgaatcagtggttgtgggttaagtaaaaactccaagtggtggccaggcgtgatagctcatgtctgtaatcccagcactttgggaggccaatgtgggaggatcgcttgagcctaggagtttgagaccagcctaggcaacatggcgaagctgctactctacaaaaaaaaatatgaaaattagctgggcacggtggcatgtgcctgtagtcctagctactcaggaggctgaggtgggaggatcacttgagcccaggagacggaggttgtggtgagctgagatcatgccactgcactccagcctgtgcaacagaacgagactctgtctaaaattaaaaaaaaaaaaaaaaaaaaaattcaagtggcccagtaagcttctgctgacattcacctgccctgagggtcttgggctgcaggaagcatcttgtgaagaagctaagaagtgtcaaggttgctgaggcaggcattggggctgttttctttggaacctggagggaaccagtgtacaatgaaggaaaaaagaaatcagaaatgtagagtttattaatctgtagatttatgccttcacagggagctttgttttccagaaggagaagtctgtaagctttaaacagattttaggaatcataaaatttgaccaagcacaaagcaatcaaccttgcttgggagatatagaggtataggaagggtcagattgaacttcttgatgcaaggttgtcttcctcagcataatagtgatgataataataataatagccacagtgtatggaggtcctgctgtgtgctaaagtgaattctagcgctaatctcaggagcaaaacttgcatctgtagagaatgctctgagctctttttcacttccaggcctttgcacatgttccttctgcctagagcactctctttgcctagcaccacactcctacacacactgctccgggcccacacactttacccactgggtctcagccttgacatcacctcctcttggaagaagccctcatgaccaccccctgaatctgagttcctgaatctcctatgtacccctgcagtttcttactattgtgcttagtccttactgaaatttaagattggaagactcaggcatgaagagtgtagcaaccttgtctttctctcttgttcactactgtatctctgggcctagtacagtgcctagcacatgtatgcttaattaatttgtcagatgaatgaatggaatgaatgaatacctttctcacatccatctgataccaaatacttttcttgcatccatccacatgttacctttagattgcgtttcaagttcaggtctttagtctttttaatactgttctgactggttctattcacactttaaaatcttgtatagatctcagtcattttctccaagtgtcttattaaaaataaatatagatcatggaactattttagctcaggttacaatatgctttttattgagtacaaagagaaatgtgttgacttctgaaatagatgtgcatgtcttactgaatgcaagtcatgcacttcctaagtcatttatggttttgtgggtaggatctccatttctcaaagtgtatccagttgtgtgatcataaccattaagtacaaaaggcttgtgtggtcagatctatttgggacatactgagtgtattaaactaaatatgctcgctactgcagggcttctcagagcctttgaagtgttgatgtacgtggagactccataaggagaactggtggagtttgtagcatttcccgaagtcattgatcatgaaatcccttgttgaccaagtagattgtatgcactttggaatagctgacattaacagtcaattttgaactatagagaaattagatctcttgtgagcaagttagcctttttgaaggcctttgttttcagtgcttgccctatccatcctcccttcagtattgctccccttctgctccaacaatggtcattagccaaggcttgtgggtacacgtggagtgaccaaccatccaagtttgcccagggactgtcctgggttgagcactgaaagtcctgcacatcatgaaattccctggaaccaggctaactgggacaattgattaccccacctatggccacgagacctcttcaactgttttcccttgaaaaatgttctgtgaatttttaagcacgactctggtttatagaacttgttactcaaaggaacctgttagatacatacttggtttaagtgaccctctgtttgccccatccttgccaaatctctctaacacaacagtcacattaatttgctgggcactgtggcacacacctgtaatcttagggactcaggaagattaggcaggaggattgcttgagcccaggagtctgagtctaatctgagcaacacagcaagactctgtctcaataaataaataaaatttaaaaaaaagtaataattcactgcaggaaaacaaacaaacaaacaaaaaaaaacaccaaccctgcccctggctaattgcaaccaagtgggtttcagagttcaatgcaatgttgacttcaggttcagccctcaagttcttagctagctcacaagattttcccaaacagcaaaagttgtcagttaggtgattaggccatttgtgatgtttatcttgatctcctgtccttgccttgatttcttctgggccctgaggcttattggtaaaattagacaaactgacatcaagatataccagagggagacagttcagggcctggccaaaggccagattcctccttggccaaaactgatctctctttgcctcagagtgtaatccacagtgacatggtcggggattggggaagggaacccaaccaagtggaaacaccctcactcccagccaggacacactttgtaattgtcattatggtaattaaaattgaagaacgagaaggatgcagaatgtcaggatgaagacatgtgaggcatcatctagctgacacatcttctgtaatgaaatctgactcccaggtctgttaggccaggatgtgcatgctgttctagggcagggtgtgctttttgtgaacactctgctttcttctttatttagaaagggaggtttcagaatctctatgctagcaaattttccacatttatgtatgtgtcggagaaagccattgtattatcagcatttgcaatttcattcctcttgcaaagaaaagggatccaggccgggcgcagtggctcatgcctgtaatcccagcactttgggaggctgaggcaggagaatcacttgagcccaggagttcaagaccagcctgggcaacaaagcaggaccctgtctctgaaaacagaaacaaaccccaaaattagctgggcgtgatgacctattcctgtagtccaagctaccagggaagctgaggtgggaggatcacttgagcccaggagtttaagcctgcagggagcgatggttgcacctctgcactctagcttgggcaacaaagagagaccttgtctcaagaaaaaaaaagaaaagaaaaaaaaaaaaaagaaaaaggatcagtgtttgttcaccaatgtcctaggcacttgtgaatttaaggggatggggtgggggacgaggtgatggtgagaaatggtttggaaaaggcaagagaagaaggaaccatattgctctcgaggagaggtacagtgggagaagctggtaggcaagatctgggtggctgaggagcagactttttgggagaagagagatttcaaaataactttaaagaaagtcttgctgagtgagttgtattgcacccccgtctttgttttccctggaaacattccctgcagacctccattagtcctcagacattaggagttgcatttgtgtttttccttttttatgctggagtgtttggctgtagagaggctcagaaaaggctattgacactcatattacatatcccctctccttaccaagtggtttagccctttcccggattgtcatcttcattaattgcagggtgcattctgcccttcagttcccatgcttgtctaaggagacagaggccctgggtgttaccaaccctccaggactttcccaccctcctgagcaaggtgtggcactgtgcccaccacttaccagacccataggtgctgcagatgcattcaccaagagaagcagagaggatggtttagggtggagtggacatggaaggaacagtaggagaaaacctcacagaatgggaggaatgagaaggctgagagaggaggaaccctggggggtgtctcgctgtgaggcagcttctccatcaggtactcactgcacatctgctcccatctggttggggcagtgctgagctcagagtccagaatttccacccttccttgtgaaaatatttgctgcagctcctcctgttggggtggggtggaggcactgaggctcaaggaagacacacaccctagagctgtgaaagtctctggaacacagctcctgccattgcctgtaagttaactaggaaatgcttaaccaggacctgctgtgaaaggcattgttttaggtgccagaactgaggttttaattaaatacagaccaaatttcagagccctttttgtcttgtctccttctccagtgcctggtctttacttttgtctagtccatttgagaagattttctagactctggggcttagaagtaactttggacattgtagccctgaccttttaatatttagacaaagaaaatgagaccttgtatattagtcaggactctgggttataagtgatagaaactcagttaaaactagctcaagtataaagggaattggttgcttatgtgactgagggaaactgaggtgggtaagcttcaggcacagctgtttccaggtgtattccttttctcagctttgccactctcttggtttgtcttctcctactgcagatggatgtttttgaaggaacagggtgaccataaatggccacacatttccagaggcaagagagatttgcttccaggatccacatatgaaatcccagtgtaggactctgattgtctgggcttgggtcacatagctatgcctcggccaatcgctatggtcaagaagatggggtactttgattagacaggccttggtcacatgcctccctccatagtcagggagccaggtggacagggctctgtaactggtagctccactggagccacttgaggtggggaaggggcagctgctcaaagaaagagtttggtgttgttaccaaaagggactctgtttcctggacagccagaaaataatggagcccactcctaagggtcactcacagtggagagatcaggactagaaccttgtcttttgacaagaggtcctcaaccttctccacactgccttgacccattccattctccgtgtatagaaggaagttgccaaaacctcattgtagccaaatgtttcttgaaggtcagatggagagttgctctgaaattcacaactcagtaaagtgacagagtctctaatgctcacaacacaccaggccaggtcagtatgtattgtggctttaccatctctacactgcaaaagaagccagcaagcctttcacttctcttgcaggctcagtttgtgcatttacttttgttgactgaacgtcagtcccaggccaggctgtggcagtcccgcctggtagatagtatgtattcccagtccaaagatggggaaacagagccccacccctgctatttgcctaaagtacaggtgtagtaattggcagagtcagcatttgaatgcaggactttctgttcccaggccgttagagtatattacctctttaaaacaaggctgatgacacctacttgtcctcaaaggaggttagacgtgaagaactttttaaaagatcttttttaaacttttcatcaccttgatttccttctactctcttcgactttattttaaaccttttaatcttccctactagatgtatgaaaaaatgatttgttaccccaactttgtaatggtaattactaaaacaatagcaataacttcatttatcccaggtatctaacccctggcattcacttacattttacctggcactgtgttgagcattttacgcatatattacttctcagaaaaatcttaagaggtgggtatagtttcagcctcatcttcattttataaatgagaaaatacagtaccttaatattctactgctgagtaacaaattattataaatttagcagcttaaacagcagttgttcactagcttggagttctgtggattagaagttagggcatggtgtaagtgagttctctgcccaagatctcctgagactgaaatcaagctgtcagtcagggctagagtttcatctgaggcctggggtcttcttccaagttcatttgggctgttggaagaattcagttccttgtggttgtcaggaggttctcatttccttgctggctgtcagcttggggtcgctgtcagagagcttgccatgtcatcttcaaagtcagcaatggagaatctccctcacaccacatccattcatgcttcagatgtctctgacttgaggaagagccaaattccttttaagggctcatcagactaaattaggcccactcagatgatctctctcttgatgatctaaaagccaatgattagttacccaatcatgggggtgatatcccatgacattactaggttctgattgcacccaaggggagaggattatacaaggtgtatacactagaggatgggaatcttggggaccatcttagaattttgcctaccacacagaggtttagagaagggaataacttgcctagagtcacacaacaggtaagtggtgaagctaggattcgaacctgacctcacctcattccaaagcacatgttcttggccagcatctgtttggaacttttcttttgtatgaaattatttgcaagtggggagaatatttgcaatattcacctcatactaacctctaacatacagaggactcttggaaaacagtaacacaaatttgaaaatctaataggaaaacagttaatggatcagaataggcagcatagaagagaaaatacataggaccagtaatccgagtcaaattgtgcattctaactaataatatacaaatatttttaaattatgaaagtgcaggcacaccccagagacattgctggttcagttccagaccaccacaatgaagtcaatagggcaataaagtgagttacatggatgttttggtttcccagtgcatataaaagttatgtttacactatactgtagtctattaagtgtgtaatagcattatgtctaaaatatatatatcttaatttaaaaatacttcaatgcaaaaaatgctaatgatcatcttgcctcaatgatgatggctgctgatggatcagggtggtggttactgaaggctggggtggctgtggcaatttctttcttttttttctttcctttctttttttttttatactttaagttttagggtacatgtgcacaacgtgcaggttagttacatatgtatacatgtgccatgttggtgtgctgcacccattaacttgtcatttaacataggtatatctcctaatgctatccatcccccctccccccaccgcacaacaggccccggtgtgtgatgttccccttcctgtgtccatgtgttctcattgttcaattcccacctatgagtgagaacatgccgtgtttggttttttgtccttgcgatagtttgctgagaatgatggtttccagcttcatccatgtccctacaaaggacatgaactcataactttttatggctgcatagtattccgtggtgtgtatgtgccacattttcttaatccagtctattgttgttggacatttgggttggttccaggtctttgctattgtgaatagtgctgcaataaacatacgtgtgcatgtgtctttatagcagcatgatttataatcttttgggtatatacccagtaatgggatggctgggtcaaatggtatttctagttctagatccctgaggaatcgccacactgacttccacaatggttggactagtttacagtcccaccaacagtgtaaaagtgttcctatttctccacatcctctccagcacctgttgtttctgactttttaatgatcgccattctaactggtgtgagatggtatctcattgtgcttttgatttgcatttctctgatggccagtgatgatgagcattttttcatgtgtcttttggctgcataaatgtcttcttttgagaagtgtctgttcatatcttttcccactttttgatggggttgtttctttttttcttgtaaatttgtttgagttcattgtagattctggatattagccttttgtcagatgagtagattgcaaaaattttctgccattctgtaggttgcctattcactctgatggtagtttcttttgctgtgcagaagctctttagtttaattagatcccatttgtcagttttggcttttgttgcccttgcttttggtgttttagacatgaagtccttgcccatgcctatgtcctgaatggtattgctaggttttcttctagggtttttatagttttaggtctaacatttaagtctttaatccatcttgaattaatttttgtataaggtgtaaggaagggatccagtttcagctttctacatatggctagccagttttcccagcaccatttattaaataggaaatcgttcccccttttcttgtttttgtcaggtttgtcaaagatcagatggttgtagatatgcggcattatttctgagggctctgttctgttccattggtctatatctctgttttggtaccagtaccatgctgttttggttactgtagccttgtagtatagtttgaagtgaggtagcatgatgcctccagctttgttcttttggcttaggattgacttggcaatgcaggctcctttttggttccatatgaactttaaagtagttttttccaattctgtgaagaaaatcattggtagcttgatggggatggcattgaatctataaattaccttgggcagtatggccattttcacgatattgattcttcctactcatgagcatggaatgttcttccatttgtttgtgtcctcttttatttcattgagcagtggtttgtggttctccttgaagaggtccttcacgtcccttgtaagttggattcctaggtattttattctctttgaagcaattgtgaatgggagttcactcatgatttggctctctgtttgtctattattggtgtataagaatgcttgtgatttttgcacattgattttgtatcctgagactttgctgaagttgcctatcagcttaaggagattttgggctgagacgatggggttttctagatatacaatcatgtcatctgcaaacagggacaatttgacttcctcttttcctaattgaatagcctttatttccttctcctgcctgattgccctggccagaacttcccaacactatgttgaataggagtggtgagagagggcatccctgtcttgtgccagttttcaaagggaatgcttccagtttttgcccattcagtatgatattggctgtgggtttgtcatagatagctcttattattttgagatacatcccatcaatacctaatttattgagagtttttagcatgaagggctgttgaattttgtcaaaggccttttctgcatctattgagataatcatatggtttttgtcgttggttctgtttttatgctggattacgtttattgatttgcgtatgttgaaccagccttgcatcccagggatgaagcccacttgatcatggtggataagctttttgatgtgctgctggattcagtttgccagtattttattgaggatatttgcatcgatgttcatcagggatattggtctaaattctctttttttgttgtgtctctgccaggctttggtatcaggatgatgctggcctcataaaatgagttagggaggagtccctctttttctgttgattggaatagtttcagaaggaatggtaccagctcctccttgtacctctggtagaattcggctgtgaatccatctggtcctggactttttttggttggtaagctattaattattgcctcaatttcagagcctgttattggtctattcagagattcaactgcttcctggtttagtcttgggagggaatatgtgtcgaggaatttatccatttcttctagattttctagtttatttgcgtagaggtgtttatagtattctgtgatggtagtttgtatttctgtgggatcggtggtgatatcccctttatcattttttattgcacctatttgattcttctctcttttcttctttattagtcttgctagtggtctatcaattttgttgatcttttcaaaaaaccagctcctggattcactgattttttgaagggttttttatgtctgtatctccttcagttctgctctgatcttagttatttcttgctttctgctagcttttaaatgtgtttgctcttgcttctctagttcttttaattgtgatgttagggtgtcaattttagatctttcctgctttctcttgtgggcatttagtgctataaatttccctctacacactgctttaaatgtgtcccagagattctggtatgttgtgtctttgttctcgttggtttcaaagaacatgttaatttctgccttcatttcgttatgtacccagtagtcattcaggagcaggttgttcagtttccatgtagttgagcggttttgagtgagtttctgaatcctgagttctagtttgattgcactgtggtctgagagacagtttgttataacttctgttcttttacatttgctgaggagtgctttacttccaactatgtggtcaattttggaataagtgcggtgtggtgctgagaagaatgtatattctgttgatttggggtggagagttctgtagatgtctgttaggtctgcttggtgcagagctgagttcaattcctcaatatccttgttaactttctgtctcgttgatctgtctgatgttgacagtggggtgttaaagtctcccattattattgtgtggcagtctaagtctctttctaggtctctaaggacttgctttatgaatctggatgctcctgtattgggtgcatatatatttaggatagttagctcttcttgttgaattgatctctttaccattatgtaatggccttctttgtctcttttgatctttgttggtttaaagtgtgttttatcagagactaggattgcaacccctgcatttttttgttttccatttgcttggtagatcttcctccatccctttattttgagcctatatgtgtctctgcaggtgagatgggtttcctgaatacagcacactgatgggtcttgagtctttatccaatttgccagtctgtgtcttttaattggagcatttagcccatttacatttaaggttaatattgttatgtgtgaatttgatcctctcatcatgatgttagctgattattttgcttgttagttgatgcagtttcttcctagcctcgatggtctttacaatttggcatgtttttgcagtggctggtactggttgttcctttccatatttagtgcttccttcaggagctgttttagggcaggcctggtggtgacaaaatctctcagcatttgcttgtctgttaaggattttatttctccttcacttctgaagcttagtttggctggatatgaaattctgggttggaaattcttttctttaagaatgtcgaatattggcccccactctcttctggcttgtagagtttctgaggagagatcagctgttagtctgatgggcttccctttgtgggtaacctgacctttctctctggctgcccttaacattttttccttcatttcaactttggtgaatcttacaattatgtgtcttggagttgctcttctcgaggagtatctttgtgacattgtctgtgtttcctgaatttgaatgttggcctgccttgctagattggggaagttctcctggataatatcctgcagagtgtttttcaacttggttccattctccccatcactttcaggtacaccaaccagacgtagaattggtcttttcacatactcccatatttcttggaggctttgttcgtttctttttattcttttttctctaaacttttcttctcgcttcatttcattcatttgatgttccatcactgataccctttcttccagttgatcgaatcggctgctgaggctagtgcattcatcacgtagttctcatgcctttgttttcagctccatcagtcctttaaggacttctctgcattggttattctagttagccatttgtctaattttttttcaaggtttttaacttctttgccatgggtttgaacttcctcctttagtttggagtagtttgatcttctgaagccttcttctctcaactcgtcaaagtcattctccatccagctttgttccattgctggtgaggagctgtattcctttggaggaggagaggcactctgatttttagagtttctagattttctgctctgttttttccccatctttgtggttttatctacctttggtctttgatgatggtgacgtacagatggggttttggtgtggatgtcctttctgtttgttagttttgcttctaacagtcaggaccctcagctgcgggtctgttggagtttgctggaggtccactccagaccctgtttgcctgggtatcagcaatggaggctgcagaacagcagatattggtgaacagcaaatgctgctgcctgatcgttcctctggaagttttgtctgagaggagtacccggccgtgtgaggtgtcagtctgcccgtactggggggtgcctcccagttaggttactcgggggtcagggacccacttgaggaggcagtctgtccattctcagatctccagctgcatgctgggagaaccactactctcttcaaagctgtcagacagggacatttaagtctgcagaggattctgctgccttttatttggctatgccctgcccctagaggtggagtctacagaggcaggcaggtgtccttgagctgtggtgggctccacccagttcgagcttcctggctgctttgtttacctactcaagcatcagcaatggcaggcgcccctcctccagccttgctgctgccttgcagctgccttgcagtttgatctcagactgctgtgctagcaatgagcgagtctctgtgggcgtaggaccctccaagccaggcacaggatataatctcctggtgtgccatttgctaagaccgttggaaaagctcagtattagggtgggagtgacccaattttccaggtgccatctgtcacccctttcttttactaggaaagggaattccctgaccccttgcacttcccgggtgaggcaatgcctcaccctgcttcggctcacgctcggtgaactgcatccactgtcctgcacccactttccaacactccccagtgagatgaacccagtacctcagttggaaacgcagaaatcacccgtcttctgcatcactcatgctgggagctgtagactggagctgttcctattcagccatcttggctccacccctggcaatttcttaaaataagataacaatgacatttgctgcattgattgactctttcctttcatgaaagatttcctgtagaatatgatgcatttaacccataggagaacttccaaaattgcagtcattcctctcagatcctgcagcttgctttatcaattcagtttatggaatatcctaaatcctttgttatcatttcaagaatgttcacagcatctttgccacaagtagattctatctcaagaaactactttttggctgagtgcggtggctcacatctgtaattccagcactttgggaggctgaggtgggtggatcacttgaggtcaggagttcaaggccaacctggccagcatggtgaaaccccgtctctattaaaaatacaaaaattagctggacatggttgcgcaggtgcctgtcgtcccagctacttgggaggctgaggcaggagaattgcttgtacccgggaggcagaggttgcagtgccctgagatagcaccactgcattccagcctgagcaaaaaagtaagactttgtctcacaaaaaaaaaaaaaaaaaaaaaaaagaaaccactttctttgctcatccataagaagcaactccccatccgttcaagctttatcatgagactgcagcaattcagtcacattttcaggctctacttctaattctagttctcttgctattttcaccacatctgcagtgacttccaacacggaagtcttaaacccctcaatgtcatccatgagggttggaatcagcttcttccaaagtcctgttaatgttggaattttgacctctgtccatgaattgtgaatgttcttaatggcatctagaatggtgaatcctttacagaagattttcaatttactttgcccacagccaccagaggaaacactgtctatggcacctatggccttaagagatgtttttgttttgttttgtttttgttttttgttttgagactgaatctcgctctgtcatccatgctggagtgcagtggagtgatttcggctccctgcaacctccacctttcgggttcaagcaattctgcctcagccgcccgagtagctgggattataggcgcccgccatcatgcctggctaattttagtatttttagtagagatggggtttcaccatgtggccaggctggtctcgaacgtctgacctcaagtgatccacctgcctcagccttccaaagaggttttttttttttttgagtcggagtctctctctgtcgcccaggctggagtgcagtagcgcgatcctggctcactgcacctctgcctccccggttcaagtgattctcctgcctcagcctcccgagtagctgggattacaggcacccaccaccacacctggctaatgtttgtatttttagtagagatggggttttatcgtgttggtcaggctagtcttgaactcctgacctcaagtgattcgcctgccttgtactcccaaagtgctgggattacagttgtgaaccactgtgcctgacctaaagagatgtattttttaaataacaaacttgaaagtcaaaatgactcctctgtccatgggctgcagaattgatgttgagttagcaggcatgaaaacagcattaatctccttgtagagctctatcgaagctctcgggtgaccagatgcattgtcagtgagcagtaatattttaaaagtaatctttttttctgagcggtaagtctcaagagtgggcttaaaatattcagtaagtcatcctgcaaacagatgtgctgccatccaggctttgttgttccctttatagagcacaggcaaagtagatttagcatcattcttaagagccctgggattttcagaatggtcaatgagcattggcttcaacttaaagtcaccaactgccttagctcctaataagaaagtcattctgtcctttgaagctttgaagccaagcattgacttctctctagctaggaaagctctagctggcatcttcttccaagataaggctttttcatctacattgaaaatctgttgtttagtgtcaccacctttgtcgattatcatagccagatcttctggatagcttgctgcagcttctacatcaggacttgctgcttcatcttgcacttttatgttatgaagacagcttctttccttaaacctcatgaactaaccaacctctgttagcttcaaacttttcttctgcatcttcctctcaccttcatagaattgaagagagttagggccttgctctggattaggctttggcttagaggaatgttgtggctggtttgatcttttatccacaccactcaaactttccccctattagcgataaggctgttttgctttcttatctttttatgtgttcactggagtagcactttcaatttccttcaagaacttttcctttgcacttacaactcggctgttgggtacaataggcctaactttcagcctgcctcaactttggacatgccttcctcactaagcttaatcatttctagcttttgacttaaagtgagagataggcaactcttcctttcactttaacacttagagaccattctagggttattgaatggcctaatttcaatattagtgtgtctcagggaatagggaagcctgaggagagggagagagatgggatggttggttgatagagcagtcagaacacacacatttattgattaagctcaccatcttatatgaggatggttcgtggcaccccaaaacaattacaatagtaacatcaaagatgactggtcagacatcaccgtaacagatatgtaataatgaaaaagtttgaactattgaattttgagtgaacaaaatgtgatgcagagatgcaaattgagcacatactgttggaaaaaatggcactgatagatttgctcaatgcagttttaccacaaaccttcagtttgtggcacctgcaaagtgcaataaagccaagtgcagtaaaatgagagatccttgtaataaaaacaatagcaataataatgtatttcatttgttagcctttggaatgtgctagctactgctcctagtactttgcaagtaatcacattcccctacagcactatttagtcaatattattattatccccagttttcaaatgggaaaacttctaccagaatcatccccaaagacccacagcaattaagtagtggatgtagcttttgaacccagtcagtctggtttcagagcctgtgttctcaacaatgtgatgattgtaacaagtgcaattgatgcagaggcatataatgtaaagcatatatttataggatttaaaccataactaaagaaaagcacattaaaaccataaaaactaaagtgatcccttcttacggggaaaaaatatattaatatatacatagaaagaagtctcgtcactgatgaacaacaatatggagtagatgaagtcccagagaactgttgttgtgttagttacatattttttataaagtctgaattttttaaagagagtgtgtattgcctttataattagcaaaataatacacgtagaataattaaaaaagaactccttccacaatcacaatcttccacaagcaacaggaggcttatattaaaagtttcaggtcttagaacacatcggggtgtttcattgaacatgttctgtgggccgggcatcatggctcatgcctgtaatcccagcactttgggaggccaaggcaggtggatcacttgagatcaggagtttgagaccagtctggccaacatggcaaaaccctgtctctactaaaaatacaaaaattagccagatgtgttggcacactcctgggaccccagctgcttgggagcctgaggcaggagaattgcttgaacccaggaggcggaggttgcagtgagccaagatcatgccagtgcactccagcctatgcgacagagcgagactctgcctcaaaaacagaacatgtgctgtggctaagcctctggggactgatgaaatctgggtacacagaaggggctggcacatgctgtggtgtgctctgcagtgcttcaagatgtttgcccccacctcctctcccagttctccccacctctctgagagtcagtctagaggctacttccatgcgcccttggggttagcagttttattggtcagcccagagtctgagtttggtggacagtgcttggcagccataacaaatgcttagatggtgaaaaggtatatgctttggggtcagaatgccagattgggggcttcagacacatttcagagcatcgggtctcttatctgcaaaataggtatggaaaataatgccattttctgaaaaccagagacttagtaattatgtgtgtaaagtgacccgaagaatgtctctcatgtaggtaagcgcagaaaatattagctccatataactagggttcctttattcctgagatgactgttttctaaagataagtatttaacagatgcttttttttttaaatgtgagctgccccctcataaaggcaaaaccgaccatacctgggtttccacttagtcctgcttgtctcatttcccttcaggcagtagagaagccaggctgtatagatcctgacacctgtgagggaaagctcacgtcatcttcaacctgctgacaccaaaaatatgccaggaacattggagctcattcttagattcaaagccgtttctttttctggccatatgtgaggtctgtgggagttaacagtaggcttgtgtgccagttgagcagatttgcatttttgagtttctagatgcctgtttattttatatagttatcgttttgattagtccttgcttagtccctttttggttccagagttatgcagggtaaaatatgcttttactttggccttctgggttaattacaaaatcctagttgcaagtgacaggaattcaactcaaattagcttaaggagagtttttaaaggtacaggggtatgggaagtatttcgtggaatgcagtggaggctcagaagtaccttgaaccaggcactggaagcccatgaggattcttgactcctctctgctcttagcacttttgcttggccaactgactttttccatttctcagtacagttgaaacacagccatctacagagagacagccttctctctctctcagagccagaattactagggagggattctgattggtccaacttggatcaagtggatactcttggaccaatcagcagtggccagggagtgggattatgctgtaccaccatggtgactcctatggtaaccatagtaacaatgggggagaaggggcagtttctagaaggagaaggaggcactggagcagatacaaataattcctgcctacaaaattcttccctatctgtcctcctatcataaaaggtaatcatcctgattccattttttcctgtctgactccatgtgggcaaaactcctaactcctcttctttcatctttggttagaagcagtccatttagttattgattttttttcaacctggacaatctcttctgggagcaagaacagcctgtttggcaagctattcagcaagacataaaacataatagtcctcgggatgaatcaaaataatagcaggtcctagaaaattgtgttcttaagccatttctagactgttgggaagtattggggttcagtcaggggttttaaacagaaggtggtccaagaatcagtctcagtattgttttgtggttagtcgtattgatgactgttcattgaaatttttatttttaattttaatcaaatgtagcctttattacacacacaaaaatgtcatggtagtgatcttgctacctccaaaagagccttatgtatttgaaagcatgagaggagatggtgatgtcgagaactgagggaacatacctatttagaaaatcctccttttctgaagccgaaacttccctttctttcctccgtgttaggtttatttctctttctgcctgtgtctgaatctgggaatgggaattgaagcctcttgcgtggaggttggtaaaagtcctgttattggattttcttctctgtcatcaacttcttcctcttcacagtgagtgtggcccactgaatagactggacgagattggattgtggctcgaataccacccccctttaaatgcccaaatcatactgcccgttaaatcaattgaaagacacagctagaagcaaggggaaaaagatgggatccattaacacacttcacagagagtgcaggcaggatggaaggaccacactacctgagtcctgggcttcgcaatgtccaaatgtcctatctctctgtacagtgtcagctttcatgactgacgatgcatctacaaggactggagttgaacttcaagcaagagactcacagacaaaggcgccctgggccagtggcacacactagctttatcaaagagactcagggacaagtacgcctggtctgtactgcggtttgccaattagctggatgaacagctggctaatttctgttttatctcttgggcagaagacacatgaggctagaataggttatcttcaacggggagccgagctaaggcctcatgtatgttacgtgctcatgtgttcttagtgcctctgtatatttagtgccttgtaagtctcatgcatatttagtgtaaccagatgcctcatgaatattaggtatcttttgctccttccatcccttcttgtctgtgttaggtgcacacatttgacttactaaccacttaattataagtaacatcacttaaaatatattctattatcgaagatgaataagtcttacaaacttattcttcctccgtaattgaaattagtagtctctaaaaactaataatcattaatcttgattgcatggggcccattttaaaatgggctgccctatataagtgtgaagattaaaattcttttcttccttgatttttgggcctcctgcatttgtcagtctccactcaggctctctctgccatccaaccctggaaatctcaatgaacacaactccaggaccagcttttttgtgcatgactgttactgccaactcccacgtggtgctggaaataaaaccagcggtattagatgctgtagcagcagcaaggaccaccagcacctgaccccttggttaatacacattcagggaagaggagacattcttatacagcagaatactgctacatgatgtgtttttgtacctcagggctgattcgacctaacatttcatttagagaaaagggggaatgagactgattacttttttatggacagatgaaaatttgtgttaagtgtaaagctctgacttcagggaagtccatttaatttatgcaggttgaactaaaccacttcattaaaaagaggatggggagaaaacttatgactcagcacaagttagatgagtgactctgtcatttcctctgtctatcctattggagtgatggtgattctagatgttaacatgggctttttgtgcagcctaccccctaaaaacaaacaacagcttcctctggggctcaactgaagatgtatatacaatacttgttctagcagggaggaggcattattgagtgtggtctattgggagaagggatgtctgccttcatgtgttgtcttctacatggtttccatgattcttatttattgtgcgctatttttcaactttttattatgaaaaatttcaaacatatggaaaagttaaaagataagtgcatcaaacactcaccatctagaattaacagttcctaacatttgctttatgtatttgtctctagttgttgatacagtttggctttattttactaaaccattccaaagtaacacaattacagatactatgattcttcacatctaaatatttcagtatatatgtcctaattataaggacattttcctacattatcatagtatcatcatcaaacctaagttatcaataattctccaacattctaatattccatctatattcatattttctcagttgtcttttataactggtttcccccaaatcattcaaggatcatgcactgcatctagctggatttattttttgtttgtttttatccaatcaaggaccatgatttcattttgttatgtttcttaagcctttttgattctcagatactcccctcgtccctccagtttttgaaaagaccaatttgtcttttgaaactttggaggctgggcacagtggctcatgcctgtaatcccagcactttgggaggtcaaggcgggtggattgcttgagcttaggagttcaagaccagcctgggcaacatggcgaaacctatctgtacaaaaaatacaaaaattagccaggcttggtggtgcatgcctgtagtctcagctacttgggcagctgaggtgggaggatcacttgagctctggagttggaggctgcagtgagctgtgattgtgcgactgcagtccagcctgggcaatggagtgagaccctgtctcaaaaaaacccatggaactttggaatgtgtctcacagttgggtttatctgactgcttccctatgatgtcatttaacttgttcttcagctctatatatttcttgtaatctggtaatttggatctaaagacttaatttgttttaggttaaacacttttgggcaggaaaacatcctaagggatgccggttacttgcatcttattaagaggcacacagttgggttgttactagtgatgctaatttgctatgcagggtagacgctgatgagagctcagaccctgagtggggagtgtctctgctgtcatattttggtgaatattttagacagagtttttggcaaagaataggcacttgctccattacctcaagaaaatggctttttaataagagaatatatagttgcaggaacctaggacttctctttgtgggtcagtttcattccccttctctctctgccttcacttgttactgacctataggttctgctcccggtgtctcctccttgtatgtggcactgttgggcttgtcatgatgccagctctggaccaactcagtgtgatctttcagcagctcgctctcctacagcttatggcatagtctcaggttccccatccccaaatccctaagaaaacttcaattggatcagtttttctttcttgcactgggcttcacaagtggtgggcagtcagctggctagctcttaaaagggcttctctacctcttggttcagtcatctgtggccagagagtcaaggtcaaatggatctgtcactcaccagcttgggcaagtaatcagcctcactgagattcagattccccatctgaaatcatatgtagctcatagggttattatgaagattgacttaaataatcatatcaagtatttagcactgggtctgtgacatagtaatgtgtctggaattggtgggttcttggtctcactgacttcaagaatgaagccacggaccctcgtggtgagtgttacagctcttaaggtggcgcgtgtggagtttgttccttctgatgttcagatgtgttcggagtttcttccttctggtgggttcgtggtctcgctggctcaggagtgaagctgcagaccttcgtggtgagtgttacagctcttaaggcagagcgtctggagttgttcgttcctcccggtgggcttgtagtctcgctgggctcaggagtgaagctgcagatcttcacggtgagtgttacagctcataaaagcagtgtgaacccaaagagtgagcagtagcaagatttattgcaaagagcgaaagaacaaagcttccacactgtggaaggggaccccagcgggttgccgctgctggctagggcagcctgcttttattctcttatctggccccacccacatcctgctgattggtagagccgagtggtctgttttgacagggcgctgattggtgcgtttacaatccctgagctagacacaaaggttctccacgtccccatcagattagttagatacagagtgtggacacaaaggttctccaaggccccaccagagtagctagatacagagtgtcgattggtgcattcacaaaccctgagctagacacagggtgctgactggtgtgtttacaaaccttgagctagatacagactgccaattggtgtatttacaatccctgagctagacataaaggttctccaaggctccaccagagcagctagatacagagtgtcgattggtgcattcacaaaccctgagctagacacagggtgctgattggtgtgtttacaacccctgagctagacataaagactctccacctccccaccagactcaggagcccagctggcttcacctagtggatcccgcagcggggctgcaggtggagctggctgccagtccagcgccgtgtgctcgcgctcctcagcccttgggtggtcgatgggactgggtgcagtggagcagggggtggcgctcgtcggggaggctggggccgcacaggagcccatggagtgggtgggaggctcaggcacggcgggctgcaggtcccaagccctgccccgtgggagggcaactaaggcctggtgagaaatcgagcgcagcgctggtgggctggcactgctgggggacccagtacaccctccgcagccgctggcccgggtgctaagtccctcattgccctgggctggcagagccggcagctgctccgagtgcgggggccgccaagcccacacccacccggaactccagctggcccgccagcaccgcacgcagccccagttcccactcgcgactctccttccacacctccctgcaagctgagggaatgggcttcagccttggccagcccagaaaggggctcccacagtgcagtggtgggctgaagggctcctcaaatgctgccaaagtgggagcccaggcagaggaggtgccaagagcaagcgagggctctgaggactgccagcacgctgtcacgtctcagtaactgctcagtaaatattctctccatccctgctactactactattatgctatattcactcagcaggagctgtggacaacgttggtgaagtggggcaaatatcctgggaagggaatgtgaggactatatccatgtattagtccattttcacactgctgtaaagaaatacccgaaactgggtagtttataaagaaaagaggtttaactgactcacagttttgcattgctggggaggcctcaggaaacatacaatcatagtggaagggaaagcaggcacatcttacatggtggcaggcaagagagcaagtgtgtgaaggaagaactgttaaacactaataaaaccatcagatcttgtgagaactcactcactgtcatgagaatagcattggggaaactgcccccatgatccaatcacctcccaccagaccctttctgtacatgtggggattatggggattacaatttgagaggagatttgggtggggacacagagtcagaccatatcaatccccaaacatttctagcatactagaaaaactttcctttttacaaataatttttccattgggacatggaggctcaagcctgtaatctagcaatttaggaggccaaggcgggtgaacccttttgagcccaggagttcaagaccagcctgggtaacatcgtgaaatcctgtctctacaaaaaatacaaaaattaggcaggtgtgatggcacgcgcctgtggtcccagctactcagcaggctgaaatgggaagatcacctgagcccaggaggtcaaggctgcagtgatctgtgatcgtgtcactgcactctagcctagctgacaaagtgagacactgtctcaaaaaaagttaaaaactaaaaaaaagtaaaaaaaaaaaaaaaagaaaagaaacatttttccattttatagagtgatcaattcagactctaggttatggaagactgagtctggaccatttgctctttgtgtaaatgtgcccttaaataaaaaagacattcctgctgcatatggagagatgtaccaatttagagggaagaaagaaaatttgttgtgcaaaaagctattgaatgaattttaaatgtagtctgaatatattcttgaacattctatgtattccttctgataggtgttgactgatggtaattcagatcttgtgtatcttgtgacgcttggcagtagattcggttctgactttattttgcatgcatctctgtgtactgccgcagactggtactgaactaactgttcttggcttcttaatcatggcaccttagttgcccaatgagaatatgcaacaaatgactacattcctctcatgtttgcagttttgatgtggtacaaattaacatcttgtttggaaggataaaagaagattattttgataatgaggtaacagttgaaatcattgacctcagcaggtcagtctgaggattggaaattttttaaagcttcagaattagcattttaagtgataactcaaaatgctggtgagggtactgtaggatggactctgtcacaggtgttcagtggtagtgttacttggtcatctttctggaaagcagtttgtttatttatgtcacgaaccataaacatatgtaagtttattggcccaataattccacgactaggaatctatcccacagaagtcaccagagatgtgacttatgcacgaaaatgtttagtgctgcagcagttacaatgacagaaaaaagtggaaaaagtgtgaatgcccactaatgtgaggcagttggtgtaaagtgtggttttgttcatatgagttgtaagtgacaaggggaggttgaggaagagttttaattcagggaaaatgtttattggtatgttttaagaagcaggaaacaaaattgtatatacagtacaatttgggctatgaaaaaaagcacttgagaggattaaaagaaaatacgctgaaatattaataatggtttccttttgggaagtgaggttatacatgacttttttttgttttgttttgactttcgtacgtttctatggggtgcatgtattaattttatatttgagggaacaaaaagctgaagtcataagacaaatatttgaatggcaattttgagtggagtcttaggttttaaggtttaagaataaaaatcctccccaacaggcaacagaaatgaatctaagtcagaaatgcaatgaattggactaaatcccatgcttacttaagatggaattttaaaatatggcatcacatatgtttgtggaggagtttcaaatgtgagaacttggtaaaagtgaacttggaggaattttgtcttctttttctaacagcaacaacaacaacaaaaaaaccccataaatcttacttggatatttgagaggggaggaaagcaccttgataagaatggatactgtgtactcagccaagaaaaaaatcatggctctaaagcaatcatcctggaccaaaagattcatattccaaggaattaataggtagctgaatggtggtgcctctctgtgttgggcacattatttttatgagttctgagtgcttgcttgggacagtactttggaatatcactttggaaaaatcagagaaaaatacctaatatggcagcctgtgtattccccttaatttaattatgaaactcagataactacagattgcaaatttggtttttttaggaaaaagatatgtggctttttttttttttttttttttttttttgagacaggatctcactctgtcacccaggctggagtgcagtagcacgatcatggctcactgcagccttgacctcctgggctcaggtgatcctcccacctcagcctccctagtagctgggactgcaggcacatgccaccatgcctggctaatctttgtattttctgtagagacagggttttgccatgttgcccaagacagtcttgaactcttgggcttaagtgatctgcctgtctcggcctcccaaagtgctaggattacaagcgtgagccactgcacctggccaaaaagatatgtggcttttaaaaaataacttccacccaacagtatgtttcccatcacggaacttgtgtaattatagtctaatgtgttttttcttaagaagaacctctgccaggcattaggaagttcatcagcaatttctcaaacttctcaaggagggaaaagccttgaggtttagactggaataggtttttcaggtctacagaattggtacaaatggatcggatttgctgttcttgaaacataataaagcctcctgctgccttattcttccagtcttgatgtcatgtcatttttttcttcttttaaaaatatactcatctcattatccagagtgactaagaggcgcagcatatgtgccactaaaatacttgtcctcgattcgctctttcttttctcctgatacctgttgctcaggaaatgacttacccatctggtttcattagtcattctgatgtgctttgtcaaatgccctccatggagcgtggtattgaacatcatctccctacctcaataaatgcccatttcccttcacttactacatgcatttaaaaaatatattttagggttttggtttaaagactaaagttccttttgctttatgttatttagtggcactgaacttctttaatatattaagaaatatttccactaccaaactcaaagagcaaaagtcaaaaaaatgcagtgaacaagattaggaaagaatccttactttgaggcaaagacaatgcaagtatctcaattaattcaacatcggtagttctcgtcaaaaatctatcccaaaatctgtgcctctgtgtgtgttgctggaagaaacacgaagtttgctttctgggtggtttcccttcagctgcctttcattccttatgcttgacgctggttttatttctagaagaaaccaaccttaaaagtctctggtttagcaataggaggagttcaaaacattttcacctgttgttagttgtgtttgtttaaacaaactcatgcaactattgttgcttacagccaccgggttcgtttctgctggcctggcagggtttgtgttggcaatggtagagagatgctatcggcatctcattgtgtactgtttgcataacgggacaggacagccaactccagccattaaaaaaaatgctttggattagatgaatggttttattaaggtacctgtcagattgggaaggtgcaactgtgactgatgaggacctcctgaagaggatcccagccacagctggtgggaggggggggctggtagttgacccagactcaggaatgtggctgcactgcaatgggctggccacccaagagtgggagagggtcatcggtgagggagagcactggcaaaagcattgtcagttgcattgtcctttggggcttcaggttttttatacctcagaggatctagggctattccggaaacatcagccaagggaagctctactggattttcctcagttaatagcatctacacaaggctttccttcaagaacagtcatcctgttagctactaataaaataacatagaagtgctgaagttttgagcctggaaacaataattttaaagatacatagtgtttgagtttacttatttgctcttagaatgaagtcaccacttgtcaccgtgactatggaaacataggaaatacattttggggagttctgcttaagtcattccatgtcccctagtaaggttctcaaagtgtggtccatgggacattagtggcaacagaacccggaagcatattagatatgcagaatttcaggctccacccaagacctgaagcagtagctgcatttcattgagatccccaggtgatgtgtgggcacattaaagtttgagaaacattccgatttttagggtggtctagattcaggttgcagatactgtcgactcagtagagatttcatgtgaagctctttagtcaggatttggggtgatggaaattggcatgtaaaccgtcccttctttctgtagcagaagaaagttgggctgtgataaatttcagttaaccaggagccatgactctagccacttgggactgaaataattagtgcaaatccttctgtagttcagaatgagtagaagaggccacagtcagggttaaaaactctggtatcccccactctcactctcctttctagacccttcttccccaatccagaggacccaaattgcagcctttttgtcctagataggccctcctggaggtctctctttaatgcagaggatgccccttttctcacagtgtgcacatagtaggccttttgctgaccttgtgggtgtcctttattgtcctgtgcagcaaggtcgctatatcctgacatgtgactcataggcaagacagcaatttctgataaggagggaagggtggccattccacctcctcactgaggcccgtgtgttatgtaatgcatttcctgcctttgattctttacccatgtggccctgcctgtctactgtcctggctgctgttttctttgttctgcagcagaggaattcaacctctctggggcttaaatcccactcaaccctggctgtttcttggcacagtttttccttaggtggcagttcactggggggcagaggcacattttccaaaccctgctgtgtctcagttcatctaatatgtcttcatttcaagagagatttgggcaaaggctaagctgattacagggctcaagtggagccctgagcacatttcagatctggaatgcaaattgttgtctgcagtaattgtagtttgcaccatggccctactcagcccccatggtcattttcctgctgcaaaataagcagctttgtgctttcaaagtgggaggtaatgagggggagaggagcacctaagggacattaaggagtgttttcagagcctgtctgcaagcctgagtgggagcagaacggacccagatgtgtgtagggatgctgccactgaaaagctctgtgaccatgggccaggaacccaacctcgctgagcctcaatgtcttctagtccttgcttcagagggttgctgtggtgataaggtggcaatgatgtggcaggacactcaacatggtgcctggtatatagtagatgctcaacaagggggagtttcttttcactgcctacaggtgccataagctttggggtctgcagtggggaaacacgtgcccttcttaaagggtgattccagcacacatgttggttaatactctcctgctctgaagagctttggtgcatccttctcatgctgcatgtgtctgcagaattgagggctggcttagagtgctggcttggggtagatttcctgcatgtcaatctagctgtgtgctgtctggcaattgcttaacgtctctgaacctcaggttttctcattcataaaatagacatcataatcatttttgattcacaggttgttagaaatatttatgtaaaaacaaatgtaaaattgagcaccagtgcttgacacaaactgtgaaggcagtactattgttatcccctttgcagagatgaggaaatcaaggtttttgtttgtttgtttgtttgttttttatgggtcaaatgactttcccaactctgcagctcatatgcggtaccacctggactctggcctagcagattggctctgtggtccatggtaggtatccctgacattgaacctccaggtggttggaaatactgcacaaacacactttaggtgcctgatcctggggctcccctcctcagacccctcatttttgttgaaaaattctttgttaaattgggttaaagcagatcataataaaatcactattaccatattatataatgttacatatcgtatatttaaaatataagtttatgttatatattatacttttatataagattattatatgtagtatcagcaacagctatttacacagatttgcattgctattggaaatgccctagccattgtcagcacttataattgctttttgttgtgccacatgggggcttattatccgtcatgttgctgcaaaattacttgtttatcttatagtctctaggaaactgcaattgttacttactatgtgccaggcactatgctcaatgatacatatttgacttatttgattctcacaagaactttttgcagtgggtcctcttactgttcccatttaccagaggaggaaacagaggcacagggaagttaagtaaatgatcaggggtcacgcattaagtgacagcactgggatttgaacccaggttatctggcttagaactcctattcctcacttctgtgctaaactgccttcctttatttctggtctgtgttctggttgctatgccctcaccaccccggctggcttggcatttccagacctctggggctgcacacttaacacagcattccctggggcctgttactaagtatgagtccctctcagcctcaaagggtcattctggggactcctcccacccctcccggggtattcatccaacccaggaggctctttgtggctcaaccacacacattcttttaaaaaataaaaatcagcttttcattttaatgatgacacaacccagaggtgaggttcttgttatcacactgggggaatctgggtgattggagttgtaaaatcaagtagctggggaattccttgttttctccataaattatccatgtgagagctctgtgtaatttcacattacaggagggaatggctgtgtttaactccttctgttggaagggcagacttatttcacttcttactcagccaggagagggagttggaaagcatagaaatggaacttcttgttattacaattcctggctttcagcaaatatatttatgtttgtgtactttaaaaatacataggaaaagcatctgactagtactgtattctatggccatggccactgttcttgacaaaaagaatttctatctggtcatgcagctgttctggctgagaaacttgccctggttccccatttcctgcagggtggagttggaactccttccttggctccaagcatctcatccctggccttcgcatcctgtcccttccatagaccccttgactgtctcctcgcctcctgaatgaactttgctgttcccacttctcacctttgcgctgacccccctctcctcagcctggcaactcctatacatcactgacaaccagctggaatggcactgtcattggggagaccctgagaatggtccctggcttcttcctctgcagcctagtgcttcgaggctgtgggaaccagcaggttgagcagtgagcattgtgtacaggtctgcgtctcctctggcctgtgagcttctgaggtatttttgcatgcctgatgctttgaacacagagctgggcacatttctgttgaacaaaggaagctggtctcatctttacacatgtcagtctgcatttcttccccaagaagggtttttgggtgatgggtagaataccaggtgggagattggaccaccagcctccaggctccatgagagccaggctgtcctgtggctttggtgcctgcactgtggccagtgtgtattcagtcactgcctgaatgagtattgtggtaagaacctgtgctgcaggcctagactccagtccttattccattactgccaagcttggcacattggacaactttttttaacccttctgagcctctttcctcatctataaactagggataataaaagtacttatctcatagggtggtcatagaattaaattagcttagcctaccatctgacacatagcaagcccccagtcaatggtggttcgtattgttgttaataatgaagtggattggttacaggatgtgataagtagtgggaaggaaatcagtagggtatcatgatagagaataacgatggtggggtataaggcatggtcctatagacagcctggtcagggaagcctcctgtgagctgaacttgagtgatgacacagctgagttaagcagaaaatgaatttattacagtgtctagggtagctcagagaatttcggaaggaccagggaaacagggacaactccaaattataccaccaaacagttattgtaaagacactattgctaccactgctgggtaggtgtagacgccatggcttgcaccaccaatgctggttgtaggctgtggctacccagtctacccttactctgcctctgcaagctgccaccaccctcgcagaatggggtctgcagcggccctgccgctttgcatcccagcacatgattggctgagcctgctcatgttctcatgctgtggctgcaagggaggctgggaagcaagtgtatggcactctcatctcctctggtagaatgtgggctctggttcctgagttggggaattccccaaagctagccaggtagggggttcagctgcaggagactcaaagggtgacccttatgtcagaggcatgtgaacaagagcaactccatcttgaataggagctgggtagcatgaggctgagacctactgggctgcattcccagacagttaaggcattctaagtcacaagatgagataggaggtcagcacaagatacaggtcataaagaccttgctgataaaacaggttgcagtaaagaatctggctaaatcccaccaaaaccaagatggcaacgagagtgacctctggtcattctcactgctacactcccaccagtgccatgacagtttacaaacgccttggcaacgtcaggaagttaccctatatgttctataaaggggaggcatgaatcatccacctcttgtttaacatataatcaagaaataactgtaaaaatgggcaaccgtctatggagtagccattcttttattcctttactttcctaataaacttgctttcactttactctctggacttgccctgaattctttcttgcatgagatcccagaaccctatcttggggtctggatcaggacccctttcctgtaacacagagactcatggagtaaggaacacgtagtgtcgctgggcctcagcagctttcatctaataggcagtggtgctttaagaaaggcctgactgctttcctcttagacaatgatttttttaaaaagagtgctgaatttggaagcaactagttctcaatgtgatgagaggctaggaactattttttacacatcatttagtttgtgcaggtgtggggtagcatgtttctcccctgtttatcacagacttgcattcctgttggaaatgccctagccattgtcaatgcttataattgcttcttgttacagccacgtggggcttattgtccatgattttgttgcaaagtttattgtttatcttatacggtctccaggaagctgcatgcggaaatctctcagccttaccaggaagtctgacttaaagggacagcctccagggcagagccctaactgggaggaggtgctgagcttccaaccaggaccagttaccttgggtgagagttggaagccctttccacctgtctcatttggtttgctattttccagtgttttggtgattcctttctgattctgaattaagggagaaaaagtggcaataccaattcttcatgtacacatgaacacacccaaaacataacaaaacaaaaaaccactttcactggtgtttaggcagaatgaacactctgagtcatgggacacacatgcttttaaatctcttggtttcttgggggtattttcataaaagtcttgaactttctagatggatacagggatttcagggaagtcagcattgtaagattaaaaaaataaatatgacttaagttttaactatgctctcattttttttctctattggaaggaagaagggaaatgggaaactgctagtttctattacctttttcttagatgcccagttgacagtcaaatcaggatagaaaaatcaaactctggatttcagatttggtactgcttttcaatttgctaggaggaaaatttgaaccagtttccatcgttacaccaaaaaatttcctcttctgtttgaaaaaaaataaattattactgtgcctttgtcttttaaaaaatattttattatggaaaaattaaaacctatacaaaaatagaaacaatagtatgatggcccaaagttcccatcatccattgttctgcttctttttttgagacggagtcttgctctgttgcccaggctggagtggcacgatcttggctcactgcaacctctgcctcctgggttcaagtgattctcctgtcccagcttcccgagtagctggtattataggcacacgccaccatgcccaactaatttatatatatatatatatatatatatatatatatatatatatatatatatatttagtagagatggggttttgccattttggccaagctggtcttgaactcctgacctcagctgatccttccgcctacgcttcccaaagtgttgggattacaggcgtgagccactgcacccaggctgttctgcttttaaatacatatgtcagttagtatcctaccatcctccctgcaacctgctagggataaaggagtcattcctgttttacagataaggaaactaaagatcaaggaaattaagagtgacttaccaggtcattcaactagtaaatggcagagccaaaaatcacagagcccaaatattaatttattgttaactattccagccagatggtttttcccagaaattatccctaaagagttatctgaagtcaaaataatggtgagaaactttttaataagaatgattcttgcttttgttatatatttttaacttggaaattcggtgtgtcaagcattgttttttgatctaggcagattacttttaaaaatcctcctgagtattcatgtaagtgtcagaaatacccctccctcccacccccatattcagattttccacttccaaccaactttgacagtgcaatgccaaatagtaagtctcatttccaagtaaggaagccctttggctgatagatatcagctaatcagtttttaaacttttttttcttcctaaaaattgtgcagaggtcagtaacccacagacaggagtttcacttttaactgacagtgtaaggaaggagacttgacagtttcttgaaaaagctgcacccagggtgtttatgtttctaagaaataaactggatgagcttatttgcaagcggcccctgtgtgcttcatgcagaaattcttcaggtggcccttgcttcttgtgttagtcaaggaggcagaaccgcagcggccaggccggtggctgcttcacagcatacatcagctttccttttttttttttgcattcacttttaaaaatagctgcccatgtatcagttgccaaaataatgtgaggaatctggttataaaagttcagatttgtttagagagaataaagacagagctcaggcgattgctcgtaacaaaaccagtaagataagcactcaagattagccatgactagcaatcgttgagacttccatgttccagcatcatttatttttagttcctgtgttgaaaccatagatgaagacttttctatttattcattcttgaccttgagcagccaggtctgctcccacattcttctcatcattttataatcttgttgagctgggatactaagcagggctctccaagagcatcaacattttcaaatgttcacagtctcttgagttgaaccaccttgagtccaataggccttggcctgggaaagtgtctggacaccgctgctccatttgtctagagttcatggtgaagcaggcagaggaattgttcaggttttacttggattaaccacccttccagctttgaggagtagataaagacattcaataaaagtgcatgactgtgagcaactctcaggctctaatttgatattctttttatttctcactggcttgctgtgctttatgcctccctgataacctagtaacacccaaattttgtttttccttagtgttacctgaatttgtttttgaatttttgtttttccttagtcttacctaaatttgacaacagtcttagaaacctaagatctgagaactaataatcttatgatgttggaaccttgggtaagccagtgtgcaatatattattttaatttggtcacggctaccatcccatttgagattttttccaacctttttttttttggtctttttttttttctttttatggagaatagggtctcaccatgttgtccaggcaggtcttgaactcccgggctcaagccatcctcatgtctctgcctccctaaccactgggattacaggtgtgagccactgcactggcccatgagtttttttttttttttttttttttgagatggagtctcgctctgtcacccaggctggagtgcagtggtgcaatctcggctcactgcaagctccgcctcccaggttcacatcattctcctgcctcagcctcctgagtagctgggactacaggtgcccgccaccacgcctggctaatttttttttgtatttttagtagagacagggtttcaccacgttagccaggatgatcttgatctcctgacctcgtgatctgcccgcctcggcctcccaaagtgctgggattacaggcatgagccatcgtgcccggccttggccatgagatttttttactacctatttttaaattcagtttgtggaattttaaaatttgaagtatcaaatggggtatgtttaaagaccttgaaattccctttccaactgtaagattttgtgacatttctggcttgttaagtacaaataagaaagacattaaggaaccaggataaagttcaaatggaaagaatcatcgttgcttgccaacttttaatgaagaagtaattctgctaaaatctaaatattttattttatgtaaatgaaattctcacaaccctgacgagtatgttccttataatatctttggtaaggaaattgcttggaacttctcaacagaaaataccctcagatatatcgaacaagaacacaggaaacatggttctggttctagtgataccatgacacttttggtgacaccttagttaggtcccagttttggtgctaatctctttagagcccaacaagaggggttgttaccagtttggttatttaaccagctgtgggaaaacagggttcatctttgcatcgtaggcaccctataggtagtttcctgtgtataaatatatgattcaactctatatacggaaagaaaaataccataccctgaaaacctatgcccccagaattttgtaggtttttttcccccttttaacatttctctccaatctatgtagaatttatgttggatgagtatgaagaagggctttaaaatgaggcttttcattccaagaggcaagtgaattgtcccattgttagcgatccttctctagtggtttgtgctctaatatgtcagattcttgaatatcccagagcaggtttctcgctgtgtcttctgagggctgtatgcttgtagcaggagctctgaagtaagcttgctaggccccactcctgaccaacctcaccacctctaggccacgtgccatgggtaggcgtacaccacctttttgagtctcagtttttttaaatctgcaaaaagaaagataataataaggcctactttgggactgttgtgaggatcacgtgggaaaatacatggtaagtgctcatattaaaacataaaaaatccttagtcgctgtggtttcagtaattgtggctgtatgatatgttaatatccacacacaggtgcactttcatcatgagttatcaacattggcagaggtaagaggaatggacaatgagaagtgacatttcaagtgtatctttcgtatttgctaaatgtccacagggcaggtggctaaatgagttaatttccttccataccatagcatgctctgcagtaagaggtcaaaaatgtgcgtgacagggaaagatgccctggatgttaaatgaaaaaagaagcaagtggtagaacaatgttatcattctatttttgaaaaaaataagatgttacacccagcaactcgtgtttttagacagaaggaaatgtctggaaggattaccaccagagggtgcaaactggtggcccctgggccaaatgtagccagcaactgtgttatgtggcccatacagtacttcttatggtgatgaatagttgccagcatttacaaattgagagattttacataaaaccctgaatttcaggcttctattgaaaaaattagaatgtctgctcaccctggatgattaaccccttaggaacccgaaaagctggaactgacctaagacaaaaactctcagtggtgccccagtgcccacctggccttttctttcaggtacctgacccctgctcctaaatccttttgggtttatgaacctctgtctacgtctggctttttaacaccagtgcatccagcaaatgggatcgggatagaaaaaaaagtagggcctttgggaagactcactttttactttatatacttctttgtggtttgaatgtgtatacttctgtgtggttcgaatgtgtgacagtgatgctatgttactattaaaatgtaaaaaccaatacataaacatgtttgaatacttagtagtatcctagatgccatagagaagactcctgttccttttgatatcccattataaagctcaaaatgaacgtggaccttgcggatcagagcctcttactattgaaattctcctcttgaagtgccttcttcatggacccatttcaatccgggagttcttgcttctggtcagagcaagggcatcagaggagacggccgtgccctgtttttgcttcctttttgcaggcttgcatccctttcccctgccagggcatctgttggccctctctctgcccctccctgctccactgctacctgccctggagcccctcaagtttcacctcttgcacgaagtgctgcagcccacgggtttcagttcttctttcccattcagtcagcagccggaagttaggttgaatcattctaggatttgttcatgtgaatgtttccttcctcctctccaaagaaataaaacgtacaatgccctggtcgtctcacatttccagtgaatccttactggggtgaggctggccttggctgctgggactccttgaagtggcttgtcagaaaatactccaagagaggaatggctgggtgatggagcctcccgcatttcccagggcactgtctttcttcatcggctgaattgtccccaaagctagctaatctcaagttgtttacaggcttgttcaaatttaggacccttcctgtgtaggaggctggaacaagacgccttaggaatacctgcccttacccctccaccagccaccacttaaccagcttgctttgtggggagtcaggctttaggaaatagggaatcccaaggacaatctgaaacccacctctcagtggacactgtcatttgatctgacactcattaccgagtgcttccaggtgctagctccatggtgacccagatgcttgcctgaaaggcgtaaggctttttacagtgatttcacttcctcctttctctaagcaggtgtgattccctcacactttttgaagcaagacccaagcctgtcagttcagcttccagacctattaaagtacttggtgtcttccaaaataccctgtagttctgcactgccttgctgttgagtttgccagttcttttgcctagaacacccatcagaacgctgcccatgtgtctctggctctgagaacccttctcagactttgtccccatgaaaatgcatttgccaagctcacttatttcctggacccctcagcactttttgcaaatttctggcaacgtgaatggaaagagcctgctttctcataaaagtcttggatttaatctccttctgttagaccggaagcttgttgttcaaatgaacctgctgtctttgctgggtccccagactttactcaggcttgagacagaggaaggctcttaaaaatccgtgcatttgtaagaaggccccaggaaaccctgggctaaatcttaacagctaaaatttgtaattaggaagatttttgcaagtcaaatactaccccattagataactaaaataaataaataaataattgagaactacactggagttatgtctccttgagtttgagaccttctgccaatgtgcaaggagggtgagagtgctggtttgtttgtggggaaggagtgagccaggcatagttttcaatctgaaaccttgtagtttcctatgagacaagtctacctcacccaagaggtctgggttttttataaggcaaggaactggagcaagatgttcattctggtgagatccccacttcataaaacaagaaatgtcagccatgaattatttccataatagctctgagcaggaagacctcttgttatccatgacaaaagttgaaagggaggtttccagaagcagctattttgaaagggctctgaagagaagatgccaggtttgcataagacaaaaagaaacggatgggtgtgtagttgcttttgaaccgcgactcagtgtgggctctgtatcccggacatggctactgattcttgggtaaagttcaagtagatcattgattcctctttgaagacccaaagctctcctcccagtgtcccttctcctagtgatgctttattttctatttcaccccagtgtttgggtctgcaaagctccaggcagcacagccgctgcagccgatgggatgcttcacattgcttttggtggggacccagtgagcactgtttgtctcttacaggctggggattgtcagtcagaaactgaacttctggtgtacctttgaatgcccaaagagtgctctgcaaaagcagcagtagcaggagaggtggggagctcttgactggtgcggctctcagcctctgacacttgtaactgatggcccctgtcacttcctgtcatgcagcccaagtggcggggaggagttccttcagggaaactatgctcagccctgttcagagaatcctgtgcacagggctccactgcagttaggagccggtgagtccgggtggatgaggtcagagcgccccatggtgtggtgctgcctctttgtccgttcgcaggtaagccccctgctgctgagcctgggatgggccggctctcaactcccacccgagccgggtggggtggtgccaggatctgaggtgtgggaggatgcagtgttctctttaccttccaagaaactgatcagggagctgctgttaaaagcacctgggatgatggagccagattcccgcctcactttcgtatgaatcagaagagcactgtgtggctgtgtttaagaccgcagatggctttgcttggttgcgagggtgagctgagtggcgtgcgtagctgtcagggcctcctttagcataagtgattggaggggaacaaagggaagggcttttcacgctctgctgtgcaatgctactgttttaatttttgtaagagaatggttttaattaatgggaaggaaaagagggaaaagaaggatgcatccgccttctgttttgttgttgctatttaatcacaaagtggatttccaagatcttctctttttctttggattggaagatggctaaactcagttttagaagttcatgctggttggagcaactgttttgtagatttccctaaagtgatcctggtgttttgagtctgtttattattgggagagtgaagtcagatattatcagtggagactcagacttgataccattctcattaagaacatcgttttttggtttgggttattttggaaagagtgtctggaaatgttatatttccatgggttgaagaatggttaggagctctgaaggttacattccctatcccttttatttatttgttttttgtagaggtagttgttaaagttttggatgagccaaaactgttctttatttgtttgtttgtttttgttttttgagacagaatcttgctctgtcatccacgctggaatatagtggcacaatcacggctcactgcaaccttgaccgcccgggctcaagcagtcctcttgcctcagcctcccgagtagctgggactacaggcatacaccaccatgccctgctaattatttcattttttttgtggagacgtgggtcttactatgttgctcaggctcatcttaaactctgagctcaagcaatcctccttgagctcaagcttcagcctcccaaagtgctggggttagaggcatgagccactgcacctggcctgccaaaactgttttttaaaggcaatgcccattgctttttctattcttctcatcagaactatgttcctgggactgatttctgtaaccctaattccagctcttgtgtatgaccattctagacatactaattttttttcaattttttttattgtggtaaaatacatataacacataatttaccatcttgactattttaagtatatagttttgtgatattaaatacattcataatgttgtgcaaccatcaccaccatccatctccagaactcttttcaccttgcaaactgaaactctatactcgttaaacaataactctccattcttccctcccccatcccctggcaaccaccattctactttctgtctctgtgattttgattactctaagtatctcatataagtagagtcaaacagtatttgtctttttttgactggcttatttcactttgcataatgtcctctgggttcattcaagttgtaacgtgtgtcagaattcccttcctttaagaatattccgttattgtacatggtggtaatattgcatggagctctgaaggttaacagagaaacaaatactcaatttctctgtgaatatacgacactattgcatgattatatgtagtacatattttgcatttcattattacctctaatagtgattgaaaactaccctctgtattacaaggctgaaagatttgagagctgtttactgcatgccccacattaaacagtttttcttgtcaattaatattgttaaacggtgacataccacattttgcttatccattcatccttggatgggccttgggttgctttcatgttttagctgttgtgaataatgctgctatgaacatgaatgtacaaatatctcttaagaccctgctttcaatttttttcccataagtcattagagtacagctagtatttggttacatgagtaagttctttggtagtgatttgtgaaattttgttgcacccatcatccaagcagcatacactgcaacctatttgtagtcttttatccctcactcctctctcacccttcccctcaagtccccaaagtccattatatcattcttatgcctttgcgtcctcatagcttaactcccacatatcagtgagatcatacgttgtttggttttccattcctgagttacttcacttagaataatagtctccagtctcatccaggttgctgcaatgccgttaattcattcctttttatggctgagtagtattccattgtataaatataccacggtttatttatccactcctcgattgatgggtgttccatgattttgcagttgcgaattgtgttgctataaacatgcatgtgcaagtatctttttcgtataatgacttcttttcctctgggtagatagccagtagtgggattgctgaatcaaatggtagatctacttttaattctttaaggagtctccacactgttttccatagcagttgtactagtttacattcctgccacctgctttcagtttttttgagtatatacccagaagtagaattgctagaacatacagtaattctattttgaatgttttgagtaaccgccatactgttttccacaatggctattccattttatattcccacctacagtgcacaagggttccagtttctccacatcctcaccaacacttctaattttgattttttttcaatagtagccattctaataggtgtgaagtggtatcaccttgtagttttgatttgaatttctctgattattagtgatgttgagcatctcttcgtgtgcattattggccatttgtatgtcttctttgcagaaatgtctgttcaagtcctttgctcactttcgaattgggttgcttattttttttgctattgagttttaggagttctctacatattctgaatattaatctcttttcagatatattatatgcaaatatattatcccattctttgtgttgtctctttgttttgttgacattgtttagacatagttttttttgttgttgttgttgtttttttttttaggagacaaggtcttgctctgccttgctcgagcccaggctcgagtgcagtggcacaatcatagctcactgcagccttgaactcctgggctcaagcagtcttcccacctcagcctcctgagtagctgggactacaggtatgcaccaccatacccagctaattttttaacttttttgtcaagaccaggtattgcaatgttgcccaggctcgtcttgaactcctggccttaagtgatcatcccaccttggccttccaaagtgctaggattatagacgcaggccactgcatgccccccagatgtatatttttaatactttgatgtgactggggtaatttcagcctttccccatctcactcacctcactatttgttctcttgacaaagaataatttttgagtctttcaagtatgaaagttgacaatattcaaatgattgattacatgtcagtgatagttaatacaatgttaataacaatataatacgataataacttacatttattagatgcttatctaaacactttactcagatttgctcatgaaagtcttacaacactgtagggattggctactatcattattcttgttttgcagatggcaaaactgagatttacagaagataaataatttgtctaggtcacctacatggttaagtagtggatcaggtttcaaacccaggaagaatggattcagaaatgatgtttttagccattaggtgctatgtgataactttaatgtggggtccttcccagatctcctattatgtgcaacatctgcagtaacactttgctttccagtgatttggtaagttatcccattttggtgaatgtttgctgtggtccagttagtgcctaagtaagaggcacctatgacaagtcactactttctctggactcagtttccccacttgtcaaatcagagatgtctctaaactcattttagctcagatatgaatctaaagtatgcaaatatcttgcacaaaaagtcaaaaatagttttcatatctgccctacttcaaagtcaaatgatttaatgaatgatttaatgaatgatttaatgaatgtgtttaagtacacatttcccaaggatatcaactagaactcaaaatgtaattggctgactagctactttattctgcttatgaacatatatatgtatatatatatgtgtatatatatatatgtgtgtgtatatatatatgtaattttttttttcttttagagacagtcttgctctgtcgcccaggctggagtgcagtggcatgatcatagctcactgcagccttcactttttgggctcaagtgatcctcccccatcggcctctggagtagctcagaccttagtgtgtaagggcttagcaacaacaggactctgaagcacctatgtcctgaggtaaacatggacgtagtttgattttgtggagggaaggaagcagcatattcgatgcaaggtggagactgcattttaaagccactattctagccatgtttttacagcttgcccaggacgccaagtaggagccatggaaggggaagttgattcaaactagatcctaaaaaggcctctcttgatggaacactcagacgtgtgactcggagcgggcaaggtcagagtggtgaccccagctgttcaccgggacagaaacaatgggtggctttaggacctaaatatagacaaagtggatgtcacttagggaaactcattcctgatactggccggggtgggcagttctcttgggaagcagctcctgtgtgccaacccttgctctgccagccctctttttctgaatatctctgtccatattctagcttccctgcattctttgggcacctgcctcagcttggcagctttgaaataacccatgacagatccttatttccccatctctcccttccaagtcttccttgcagtgcttaccacctctctcctttacctctcacagaccccacccagcccctgccataaaccccaggtgtcctctccaccatattccttgtggagggacgagagcactgggctaggagtcaggaatctgaggatcaagttctggattttgcagttaaccctgggcaaggctaaacttccccagtacgaggttctccaagcagaaccagtggagacgtagccatcaaggactgagatcctggaggttgcagcctgaagtcaaatcctcactgtcacttactctgtgaccttgttcaagttccttacctctctgggcctcagtttcttcacctgcaggatgaagatgctgatagtacctgcctcatagggtatcaggaatttataagataatatctgtgaagcgcttcaaacagcttatcttgttagtgctcaaaaatgctcactatgattatgattgtgatttttaggaaaaagagacttgaaatagatcagtgtttcccaaatttcactcacatttttcatatccacataccaccggtactattatttttcagttactgtatttctttaaattatctctttttcgtttctgtttttggctttttaggtttgggttttttggtttgtttttgtttattttttagacttagacacatcctaagcagtaatagccctgaaatcacaggttggaaatgtgtttcctaaaacatattataataaatatatacaggtctattgcatatggtctgagatgatattatatcaccagtggggtccactttacatgctttggggactgcagaaccagtggctctgagcatctgaggtccagtttgctgcctctagtgattttgactgtactcatcccatctttccatcaatcaggcactgcctgagaaccatctttgtgctggattctgcgccaggtgccaaggtggccaaaatatgggtctttggagtccccactatcttcttcgaatggaacattaccagcccagagaaaatgggggagagagggacacacacaaagtgacctaatttctgaaactccatcttaaaagtaagaaaagccagggccactctccctgcctcaaacctctggagttgggtaaaggagatcgtctcagtcagcttttgctgagtaacagctaccccgaaactcagtggcaaacaataacaaacatttactcttatgcttataagtgcgcaagttggctggggtggtctgtcctacatgggttcattctggacagtactactcacgtatatattcttctcttgtggagcaagcagaaacacatgatgtctcgtaagatgtaggctcagagttggtacactgtctctttcacctcacaggatcaagccatggatgtcagggaaaggcataaatatttgctgaagaataaattgatctaccaccaagatcatcaccatttacttactgaacccacatttactgagtgtgtattgtgtgaagcactctgcatgttgctgggagtggagggtgttaaacgtagtaacagtaagtgatgaaggtgatgagaacgcctatcccaaggcccggcatgtattaggtcctaaatgaatatgtgatgaatggtgatgtactggtacctcttgagtgctgactagtgatcagtatttcacagggattgtttcatcttatcttcccagccctcttgggcagatacagcaagctcgggtcagacaagtgcaaggctgttaaatgcttgtgatcttctgatatgagaaagggagagttgatggaggcatggcagcagggagaggccacatgccgtgaaaccatccctgatgctggggagagaggcaggctctgcaccagccaagcacaggttcaaatcccttatgtgtatatttccatgcgcactttgtggactgttttgggcacaaactcttcaagcacccacacatactaagaatttaacatggtacttggcctctcatagtttcactacatcactagccctctgccttcctgagttcatgtgtatctttgagtattctctttagaaaactgcacatagttatgaaaatgtctgtgtggtcccctggctcctggtgaagaactctgctctaatttttcactccatccattctcccttctccttctttctctctcttaagaaattactccagaagcgaagcggtgtttttctgtatttgtatgccagtgtcaggtccagggtctgactcgtattagctgcccaatgagtgttttctaactgagtgagagaataaagatgatagtgttgatgataccttgtttgcatgtgcatagcgtcagggaatttttgaactgaatgagatagaacatacatgtgcatgtgtcattatgatagaataatttctcttcctttgggtatatacccagtaatgggattgctgggtcaaatgatatttctgttttaaggtctttcagaaatcaccacacatagcatccaacccctttattttctggattataaaactaagactggattataaaccttacccaaaggcatacagctaataataataatattatgattataattaacatttccccccaagcagatacaattagatctcattccctcagtaccttttcagaatacagggtccattctgatgtatcagttttatggatcatgttgcaaaactgagttgtcttgtccctcgtatctgaagccaaagacatggatgagagaaacatattccacatctcaactgcagaaccattatggtgtgagccccttagggcaaagtgcttgtcacctcacctctttctctggatctcccctttccactctgtccttcagttcttgcccagagctgtgtatacggacgcggagatggggacatttgtgctgaggctggtcaagctgtgggtggaaggtggattacagacagagcaagggaggaatttgttcctgcagagtcctggaaatcttatttggagctgttcttctattcttagtttcgaaggcactttgttctctggtgcattgttttaacagccatcaggaaatcagtccccgctcggggtcactggtgtctgcctgtggctgcccaggtgggaagtgtactggtttgttgcagggttgatcctttgtcatcaggatcattgtagccctttctccttttgttgcccagcctgtctgcctggggcagggaagggtaaggaggctctttttctttgtagcaatgataactgtacttcttttgttcttttaagttcaggggtacatgtgcaggtttgttttataggtaaccttctgtcatgggggtttgttgtatcgattatttcatcactaaggattaagcccagtacccattagttatttttcccaatcctccctgtcctcccaccctccaccctctgataggccccagtgtgtgttgttcccctctgtgtgtccatgtgttctcatcatttagctcccacttataggtgagaacatacagtatttggttttctgttcctgcattagtttgctaaggataatggcctccagcttcatccatgttcctgcaaaacacatgatctcattctttttatggctgcatagtattccatggtgtatatgtacaactttttctttatttagtctaccgttgatgggcatctaggttgattccatgtctttgctattgtgaatagtgctacaacgaacatacatgtgcatgtgtcattatgatagaatgatttatatccctttgggtatatacccagtaatgggattgctgggttgaatgatatttctgtttttaggtctttattattatttaggtctttcaggaatggccacactgatttccataatggttgaactagtttacactcccaccaacagtgtataagcaaataactgcatttatttctatgtaaaaagaaagatgctaaaatcgggcctccatagcgttgtgccctctggagcagtgttgtccaatagaagtagaatgttggccaggcgccgtggctcatgcctgtaatctcagcactttaagagactgaggcgggtggatcacctgaggtcaggagattgagaccagcctagctaacatggtgaaaccctgtctctactgaaaatacaaaattagctgggcgtggtgatgcaggcctgtaatcccagctatttgggaggctgaggcaggagaatcacttgaacccaggaggcagaggttgcagtgagctgggattgtgccattgcactccagcctgggcaacaaaaatgaaactccatctcaaaaaaaaaaaaaaaaaaaaaaatagaatgtgagccacaatcgcgattttaagtttcttagtaaccacattaaaataagtaaaaagaagcagacaacattaattttaacagtacattttaactcagtatatttctttctttctttctttcttttttttttttgagacagagtctcgctctgtcgcccaggctggagtacagtagtgtgattttggctcactgcaacctcttgcctcgcaggttcaagtgattctcctacctcagcctcccgagtagctgggattacaggggcctgccaccacgcccagctaatttttgtatttttagtagaaacgaagtttcaccatgtttgccaggctggtctcgaactcctgacctcaggtgatccacttgcctcggcctcccgaagtgctaggattataggcgtgaaccaccacacctggcccaaatactagcatttcaacctgcaatagctataaaaattgttaagaagatgttttacattctctttttcgtaccaagtctttagtatccagtgagtattgtatacttagagcacatctcaattcagactagccacatttcaatgtcagtgaccacatgtggcttacggtagccatcggacactgcggatccacagagcaccagtaagtgcttcttgtgacgacagaaatgttttctatctgctccgtctcatatggaggccactagcctcagttagctattgagcacttgaaatgtgactagtacagctgaggaggtgcattttaaattttatttaattttgataaaatgtgaatttaaacagtcacatgtacctcgtggctcccatattggactgggcgcggttgctcacacctgtaatcccagcactttgggaggccaaggtgggcagagcacgagatcaggagtttgagaccagcctgcccaacatgatgaaacccgatctctactaaaaatgcaaaaattagccaggcgtggtggcaggcgcctgtaatcccagctactcgggaggctgaggcagaagaaatgcttgaaccctggaggctgaggttgcagtgagctgagatcgtgccacttcactctagcctggcaacagagtgagactccgtctccaaaaaaaagaagtgaatttaaacagtcacatgtacctagtggctcccgtattggacagcacaactctagagatttgatgttattagaaaaatatcagtttaaacttgaccagggtatcatttctcacctaccatgttggcagaaattagaaagttggataatgctgttcgaggaggggaacaaccttttatacatggccagtaggagtataaattacagcaggctttatggaggccaattggcaatgtttagcaaacttacaaatacacattcccttgaccccaacagttctgtttctggatattaatgctacagagtctcttatgcgtgtaggctggtttatgtagaaggatatttgctgcagcagaagattggaaactacatacatactcagtcaatggggacttaaataaatacattattgcacattttaaaaatgtaatttgcaactactgaaaaaaattgattatttcatagcatggaaggctttcccaaatatagtgttaagcaagtgtagagcagtacctatagtgtgttagcattgggtaaaatagatgatttgcttatttatgtctagggctggtctggaagaatgcagaaggaagcgatggctgggatgtgagagaggttgacatcatcatatggtgcctatacccttttggaatttaatcctgtgcatgtgtatattacctattcaaaaaatgaatacctaaaaaataaaaagagaaaactctaagggaaaggtgaatcagagaaggcttcctagagaaaatgacctttggactggattgtaaaagatgcataggagtccttcaggcaggaggaaggctgaggctcaaaggcgtgaatgagtgggatgggttcagtcatccatatgtacccagcagtggcagagtattcggtgtattaaagagcagagtaatggagtttcgacatgcatgactagctagatgggagaggttttgtgagtagagtttggacttaactctgaaccagaggagccagaaatggttcgaaggaaatgggaagtaacatgcttgtattggtatgaatgacagctttggtggagtggtgagtggcctgaaagagtggttctcaaagtgtgatctgaggagccctaggagtccccaaggcctagagggtactgacgacataaatacaaaacagatgttctttgtatgtgtctctgtatgtgtcgaccaaataacaaatcatagcagcttgattgcaggagcagatgtatgaatccagctgtcttctgtgcagccaaacattagagtagtcaaaacagagaacaatgttactcctctcatgtttttttgaaaatatagttaatttttattaaaatatggtaattagattaacaagtaatatgtttatttttaaaagaataaatatttttgaaatgtctcagttttggctgggcctggtggctcacgcctgtaatctcagcactttgggaggccaacgtgggaagatcgcttgagcccagaagtttgagaccatcctgtcaacatagcgagactccatctctacaaataattttttaaaaggctgggtgcagtggcttatgcctgtaatcccaacactttgggggccaaagtgggaggattgcctgagcccaggagtttgagaccaacctgggccacctggcaaatctcatctctaccaaagaaaatacaaaagttagctgggcatggtggcacgtgcctgtagtcccagctacttgggaggctgaggtgggaggatagcttaagctggggaagcagaggttgcagtgagctgagattgcaacactgcacccaggcctgggtaacagagctagaccctgtctcaaaaaatacatatatatatatatttaggcatggtagcatgtacctgcttccagctacttgggaggctgaggcaggaggattgcctgagccaaggaggttgaggctgcagtgagccgtgatcatgcctctgcactccagcctgggtgagtgagaccttgtctcaaaaaaattctcagttttattttctaatactgtgtatattgatagatacaaccaacataaacaaaagctcattgggaccctcactaatttttgaaagtataaaagcatcttgagattaaaaaaaaaattcaggaaccactggcctagaagcaggcaggccctgtgtgtttttaattctggttggattgaaataaactaccgggaaacaaatgcagctatccaaacaagggtcaggcaggaggtgagctagcagggctgcagctgatgtacactttgcatatccaagtgcatagtagggtatgggtggtgtctgttaaagaaggagcttagttgatggattggttttgactgatgagaatgttggtgcatgtcctatatttcattttcccactagtggatgcttctgttatttccagtcctttgctgttataaacatcctggacatgtctgcaagtgcccttgggcaagacattctctagagtatctctctaaaagtggaacactgagcagtaagacattcacattttcagcatgcctggaagctgtcaagttgctatccaatctgtgactctccctctagccttgtatgagagccctgatgtctccaaaccttcatattatcagacttttcaattttgccaatcccagagtgtgaaatggcatcttgctttaatccctctcccacgatgacccctacctccattctgtaccttggagcataactctgaattgtaggcaattcagcagaagtctttgtcaccaggaaacttggggttcgttctctctctctctctctgtgtgtgtgtgtgtgtgtgtatgtttagagaggggacacacagaagcaaattctgtattctgcttccctggatgaggaaggaggaaaaaactgggacactgttctttattttagacagaaattgcccagtcagctgttactgttcttgtggcatttgctgtcatttggggctacttgggtcctcagtgaaggaagagaaaacaggcctctctgttgcctgacttgggttggtgtttggggtaaggcccagtctgaggcattaagctgagacctaaggctttgggcacacaagtgtagtgtgagagtataagtctccttctctggtctgctcacatgtcctcacctgggtcaggccttcttgcaggcctgaaaccagggccagcttcactggcctgcaacctgggcaggcacacagggtcctcattcagaagggccatgtgcccgcttcagtgctctactatagtcatctcgaaactcagtactttttggacaaagggccccacatttttattttgtgtcaggtcctgcaaattatatagctagtcctgcctgaagtatctttgtgtctctcagactaaaaaggatgtagggagaggggtacagttctgtgggtggccctgttctctctgctctgtgcagggcctgcctcccactgtgagctgcaaagctcttttgaatgaaacactcattttctcatttcatgcatttcttttcttttttaaaaatctgtctatctccatccatctatccacacacgcgcgcacacacatgagatcctcattacttatgatttcatatttgtaagtttgcttactctctaaaatctgtttctaacgccagaattaatactcatggcacttgtgcagtcattcacagacacatgcagagcagcaaaatatttgagtccccttagcacgttgccagcagaagatgaacaaggtgatacactgccttcttgttctagctcccatactgtaaacaagtatcctttttgtggtctgtttagtgccatgttgttcacattgtattttttgttggcgatttcagtgtgtaagaaggttctcaagtataatgctgaaatgctgtctagtatttctaagcacaagagggctatgatgtgccttttggagaaaatacacgttagataagcttctttcaggcttgagttatggtgtcattggccatgagttcaatgctactgaatcaacaatatgtattaaataaggtgtcgttaagcagaaatacacataaaacaaggttatgtattgacaaaaatattgcagccatgcctgggcaacatagccagacctcatctctactagaaataaaaataaaaaaattagtggggtatggtggtgtgtgcctatagtcccagctactcgagaggctgaggaggaaggatcacatgagcccaggagattaaggctacagtgagcagtgactgtgccactgcactccagcctggacaacagagtaagaccctgtctcaaaaaaaaaaaaaaaaattacaaccagaggctcacagaaacttagccctgtattccccccaggagcaatggtttagtattcattaactcagtgttcacaatgacttaatagaacatactactatgaataatgagagtcaactgtatatatatatatacagtatgtatatatatgtacatatacgtatacatactcatatacatatacatatacatatacatatacatactttgccactctcttgtttactctccattttgccctttcttctaatctcttgcatttttgattcactctcatttgtcagtggtccttctgacattagccttggaccctcaagggcaccaatgaaagggcctttattcatttatccatgtatttaatacacatttgtggatcaccttcttttgccatgcactggtctatgctggaatctgaacacagaccttatgtttcaaaaacattgcttatgcatagggttgttataattggtgattttgagacaaagtgagagtctcatacttatttctggaaagtgtttcccaatctctgccattctcattacccactttccacccctacccaaaaacttctttggccacataatgtcataaatgcataaaatgttagaaggaaactttagaggtcacctgggccaactccctcagtttacagataatgaaactgagatccagactgggaaagtgaaatgcctggagtcacaaagctagttcaatggccttaaaaaagcaggtgacaacccaggtaataatagttcccagttgctctattttattacttatgtatcaggtaagaaaaagataacatcaattgtgatctggtaacttccgattaaaagcataaaacagatttctataaattgtctacattgtaacaaagctggagaaaatgtataaatggaagtagaaaaatatctaggtttaaccgttggtggtggtgttgttttgagacaggatcttgctctgtggcccaggctggagtgcagtggtgtgatcatggctcactgcagctttgacttccgtggctcagtcaatcctcctgcctcagcctccagagtagctgggactacagtgcgtgccaccatgcctggctaatttatatatagagattgggttctgccatgttgcccaggctggtcttaaactctggctggtttcaaggaatcctcccgccttggcctcccaaagtgctgggattacgggtgtgagccaccacacccagccaactgtattgttttgttttgttttgtttttacaaaaatatttcttatctgcaatcaaggtatctagatggttccagtatagagggtgtttagatttctcacttgggtgattttcgtgatccaaatacctgttgttataacacatccaaaagtgggcatcacttggtcctaacaatatgtaatatacatttgcaagccaggactgtgacaacaaagggagttgggaggtggggcctctgctacaaagccagccaggaaacagatccatcagccttcacttcccgttcactccccaaacctagcctccactctctcccctcccaaaaaggggaaggaagaaggttaggtaaagataacgtgcccatcttcaaacaaaggatggcgaacgcttttgggtcgcccaagcactcccatttcctgtggctaaagttagacctattagatatgaatttcatttttaatccatgactgggcagacagagggttacagtgccaggagtggttcacatcttctccaaaaaggatgggaaaaaggaggcgtcccttttcagtcatctcagggcataggggaacagagagttgctttctctgtacttgtcacagcagcaaaatgcatgggacagttactttgtgtgacaattaagagagggagcttccacaaagtgtttcctaagtcccactcatttgtgaatcacctttgacctgaaaaaggcttcataattttctgtaaaacaatgtattttttctttcatatttatatttaatggaaagtttatattactatggtaaacaaaaaaccagtatgcttgccataaatagataagtatcaaaataaaatatgcacaaactaatgtaaataaattctaactaggtgctattgtctgagcctctttgtacgtagaagagaaagattgggcatggtaaacgttaggggagtattcaaggtgaagtatcctcaatttgagcatttctctttgagggatttacgatggacaatgaattgacaaagtaataactttcttgttatgtgatctgttgctgggtaaagaacataagctgactctcccggtgccccacccatatggccgaggccacttcagatgccatctgcagggcctcctgtccacatctttgactttctatgtccttctacctggcagggtttctagccagggaagctaacatcctgaggagcccctttccatcaatgaggggaggagttggtggattgaaactcccacctcctcacccctcagtggagaattatgcggtgtgtttttttgttgttgttttttgtttttgggacggagtctctttctgtcgccaggctggagtacagtggtgcaatctcggatcactgcaacctccacctcctgggttcatgccattctcctgcctcagcctcccgagtagctgggactacaggcgtgtgccaccacacccagctatttttgtatttttagtagagacggggtttcaccatgttagccaggatggtcttgatctcttgacctcgtgatctgcccgccttggcctcccaaagtgctgggattacaggcgtaagccaccacgcctggccatgaagtgtgttttatatgctctcagggggtccccagtgggttgaatgccggctgcccacggctgtaacctgatggctccatactctttattggcttccctccttttctttgtctcattttcccactccccaccagttcttccagggatcaccccagaagaaaacagctgatacttacatctttgctccaggatctgctttaggggaactccaaactaacagcaggtaaacataaaagaaagaagacttactaaagaaagaagactggccaggcgctgtggctcatgcctgtaatctcagcactttaggaggccaaggcgagtggatcacctgaggtcaggagttcgagaccagcctggccaacatggtgaaaccccctctccactaaaaatacaaaaatcagccagtgtggtggcacatgcctgtaatcccagctactcaggaggccgaggcaggctaattgcttgaacctgggcagtggaggtttcagtgagctgagattatgccgctgcactccagcctgggcaacacagcgggactccatctcataaataaataaataagacatacctaaaaatgttttttaaaatagatacaggccaggtgcagtggctcatgcctataatcccaagactttgaggctgaggcaggaggattgcttgagcccaggagttcgagacgagcctgggcaacaaaatgagaccccgtctctacaaaaaatacaaaaattagcagggcgtggtggtgtgcacctgtagtcccagctacttgggaggccaaggtgggagaatcagttggacccagaggtcaaggcttcagtgagctatgatgccaccactgcactccagcatgagcaacagaactgcgaccctgtctcaaaaataaaaaatacataaataaataaaaatagggccgggcatggtggctcacgcctgtaatcccaacactttgggaggtcgaggtgggcagatcacgaggtcaagagatcgagaccatcctggctaacacggtgaaaacccatctctactaaaaatacaaaaattagctgggcatggtggtgcatgcctgtagtcccagctactcgggaggctgaggctgaggcaggagaattgcttgaacccaggaggtgaaggttgcagtgagccgagatcacaccactgcactccagcctggtgacagagggagactccatctcaaaaaaaaaaaaaagatacatatagatagattggaaatgaaagcatcagaatgagttcatggttatacatatatacatgcatgttttttccctgtatctactgagagggcctagaagcagtggcacccccgtagcaaaaacataactagtgcccagatcttggcttctaaatactcctccactaaagggaaccagagttccttggagaaaaggctgattccaggactggggcagggagaatataggaagatcttggaacatctttttgtatcaaaaagtaatgaagtgccctaagaatgatgggcatgtgaacaagctggacacaggcaccaggttgtagggctctccctagccaagtctgggacaatctgagcatcaaaatgaaaaatgatagtaacggatcataacccactaaataaaattggaatccataagccaacatggatgtaaataataaataaatggtggagaatggaaagctcttccctccagtagaagaataacttataaacattgaagggatgatagagttgaaaaatcgtcagtggacactaaaactagtgtgttaacatttcatgaggaagaagacacttccatattttcaatttgctggttacttaaaaacagaaaaatagtaactttccagtagagaaatttagaagatgccacctcaactaaatagtctaagccaatgtcaccaatattgggccaaaccaatgccacatgtcttctgaggtgatgtgctaagaaagactctacattgtcacttctgtcatattcctgtgaaaaatacaccacatgaaaaaaatattctcttattactctagacatttttagaatgtgcaacctgaatctaatcatgaaaaaacatctagtaaaccctcaggtagggaaattatacaacgtaactggcctgtcctcttcaaaatcattaaaatcaagaaacacaaagaaagcctggggaactgttccagattcaaggagactcaagaacacgtgacagtaaatgcaatcaatgcagggccttcagttggattctggaccaggaaaaccaatagctatgaaacattttattggaatagttggcacctttttaaaaaaagtggtgaacgagttgatacattttgtcaatgttaagtttcctgcttttgataataattatcctgtgtaagaggatgcccttgttcttaggacatacacactgaagtatttagggtctaaagggacataatgtctgcaactcattctcaaataattaggaagaaaaatattttatattcatacgtatagaaagagagagagagggagcaaatgaggtcagctgtaggcagccatgacactgagtaaaggattttcaggagtatcttattctggacttgcaaaccttctataagtttgaaactatattaaaataaacttgccaaaaataaaataaattctcaaataaactgcacactctgccctccccaagaaaaaggcctgtgttcctttgttcctcttcagggaatctaatatactctcaccacacaactccagagggcatcaggccattcgtgctgccgccagctctgcaggatctgccagccccctgtgcctgcaggccctcatgctgaggcacaattcctaaggcctaagaagataatttcagaattatttaatcaaaaatagctctcttccaaacaaaactggaaactcttccaagaggctgggtgtttatccttaaagatgcccctgtctctcagtaggaaagaaacaactgtaaggaaaataactgcataataatgaatactctttccctcagaacgatggacctgaatggccgggtgcggtggctcatgcctgtaatcccagcactttgggaggccgaggcaggtggatcacaaggtcaggagatcaagaccatcctggctaacacagtgaaactccatctctactaaaaatacaaaaaattagcccggtgtgatggcaggctcctgtagtcccacctgctcgggaggctgagccaggagaatggcgtgaacccaggaggcggagcttgcagtgagccaagatagcgccactgcactccaacctgggtggcagaacaagactccatctcaaaaaaaaataaataaataaataaataagaacaatggacctgaatatgccaacacagcctctttctgtatgtccgcactggaggcaactggagcctcgggagcagccatggaccatttctatgacaaaggcccctctctctgcccagctagagctcattcagcacaggggaggccaccagtctttcagagtagtcatgactaactcgggaataatgctcttggcgatagtccgtagagaatctgtcagaacaataacgtgaaagccagttcccatttctgatgcagcgcctggaaagaagtcagctgcgattagagggacattttcttcctgcagctgtctttgaaagtggaggaggggttcaccacaaccccaaattacagggagggagggagggaggtagagggcccctaaacaccagggacatgcaggtattcagggtacgccttctttagtgacactgtcatgttctgtcaagttctgagtaaaaagcaaaagttgtggtgagccacaaatgggctgcagggatgggggaaagtactttgggctaaattttctaatccggagtctttgcttcaaagttcatcccaatcacttttatcctgaagtctgaaacggagacctggcgtttgcagaatcaaagcatgtttatccagcatttaatccatttcccaggaaatcagtgttttaccaagagtggaattcttttttaggactttcgtggacatttctaaggcctaacccagcatacagagaatgttcaactactgctatatgtgaacaaatgaacccatttgcccataaaatggcaaatccatagaatttttttaaaattttttataattaaaaaaaagagaaagagatagggtcttgccacgtcacccaggctggtctcaaactcctgggttcaagcagtcctccctgcttggcctcccaaagtgctgagattacaggcttgagccacaaaacctggcctaaactttcttttcaggagaactaaaatgccaagaaatacagtacataaaatatcattttttattctggggcccacaatatttctgaattttgacaatagaaacacaggaacagtaggatactcagataaattaatttcactatttagtttcattcattcaacaatattttattaagcatctaccatgtgtcagacactgtgcaaatgccgtagatacattggttaacaaaagagatgcagtgtctgttctcagaaagaacacagttgagcggacccaggtgattccagtgtacaagactgagctcatacctcagagttgtcccaccaaactgtcagaagctggattatttatctgccagccccagtccctcatagattgaaagctgatcccagtggcattaattctccggcatttctggcctgtggaaagctgatttgtgtgctttccacacggtgtgcagggaaatggtgattgcccaggggttgtcagccggctgtatctgctacacgagtgaccggttctgatactcctagagcagccttagtcaagtcatttaaactctttaagtctcagtttccttatatgtaataacttctttgtacagctgtaaggattggttataatacatgtaaagcacccagcaaggcagtggatttttttttttttttttttttttgagacagagtcttgttcttgctctgtcacccaggctggagtgcagtggtgcgatctcggctcactgcaacccctgcttcccaggctcaagtgattctcctgcctcagcctccagagtagctgggtctacaggggcacaccaccatgccgggctaatttttgtatttttagtagagacggggtttcaccatgttggtcaggctggtcttgaactcctgacctcaggtgatccgcccgtctcagactcccaaagtgctgagattacaggcatgagccactgtgccatgctggcagtggattcttaatagacagttgttataaagcccagcaaaggggttgggcgtggtggctcatgcctgtaatcccagcacttgggcaggccaaggcaggaggatcacttgagcccaagagttcaagactagcctaggcaacaaaaacagatcctatctctacataacagtaaaataattagctggacacagtggcacatgcctgtaatcctagctacttgggaggctaaggtgggaggatcccttgagctcaggagttcgaggctgcagtgagctgtgatcatgtcattgcacttcagcctgggtggcagagtgagaccctatctctaaaaaaataaaataaaataaaaaatcccagcaaagggaagggactaccttaagcagccagaatatacaataaagaaatggaattttggcaactgaagttgtgagtttttatatggtagacaacaccaaatggttgtacaagggaaccttttgtttatttaaaggaatgtcctttagaggacagcttgacaagagcagcccgtttctctaccatttttcatctctgctttgtgcggcaaattgccccaaggagtaggtgttccagacaccagtgattgaaagggagctttgcactgtgctctccctagggttaaaggcctgcccgttggcatttggggaactgttcatgaacccatggggtgttgtggctgataagacattaccagaaccaggagcatttctaggtaggagaaagcgggaacacgagccaagtgaacgaaaaactgacaactgtctttgtaaattcaggttcccagtattattgtggatgatgagcactttgaatttgaattatgcagttggacaatctaagctgattgtttacatggagtagttttctagaaattaaacaatgatttggacattccctaaactgcatatatatagataatattttttgttgataatggcttcaaatcattgcatcagtgaagaattttaataagtaggattttgttatagtgtttaaaaaataagtgaataaacatataaaggagggccaaggaagcaccatagcatattatgaaccaaggattgcagtgaatccaatctggtgtacctgagaaccagtagaaaataataattacagtaatttagaaggcctagtaaaagtgctctggttaatgcaattttgtgctttgcgtcacatccactgttgaaaatccttgtgaatatggactccttctcccaccttagatcgatgcccgtattttttttttctgggacaatttttctggaaaatatatttggcagccctctatcctggatagatgagttttctgtcttttctcctgctcccctggccttgagtgttttggagggaaaagcagtttgtaaatgtttgttgaatgacagagtgaatcctgctgcttgttagccatcagggttggtggtggcactgtcaggctggctaggtctcctccctcctcccacttgtttggttggacatgtcttccctcccgtgggagaagaggatctttccttggctaagactgtctcatctgtacctccaaacaagttaagggccaggtgttccatggctaagatcatataataggggcttttcctagtttgccaacgtcaaattaatgagtagacttttagacattttaagtattttccccatgattttccccccggtgcctgtacttacttgctgttactgctgctgttgctactattaccattaatagttaatatttgagtagttgctgagggccacgcattgtgctaagctctttacccacactgatctatttaactttcacagtaaccttaggagggaggtactattcgtgtccccattttataggtgaggaaactaaggtgcagagaggtaaaatgatgcgcttaaggttccacaacaaataaatggcttaactaagatgtaaactcacaaacactgactttagagtctacctaacatcttcaacctatagttagtggtatctgagcacataattgcatattatatttgttaaaatttagttccccgtagctctgaaaacatcatgatttcccatttctccaccctgtcagcacactgaagacagcctagaaaaaaggactggggttcctggatcctagaaaaaggaggatgttttaaaaataaggaaaaggaaaaaaaaaaaaaaagcagtgtactaaaaatggagtaggggccaggcacggtgggtcacacctgtaatcccagcacattgggaggtggaggcgagaggattgcttgagctcagaagtttgagaccagcctgcaagacatagggagatctcgtctctattttttttttttttttttactttttaaaaatggagttggtgctccttctttcaattctctcattcacttctggagcttcagactggagaagaacaaaatgtggatcctctccctgctaaaacgtgaatttagcaagtcaagttccagctaagggcaagtacaagaacacaaaatccttttgctaatctttccgcaaagaaagagcagatgaaaggcaaggcatcaaagcctctgaaaccaccaaagttgtttgccagcaaagagataaatcaaaaaggttcgagatctggtttgaatttaataattacaaatgactaatcagggactatttgctgccaagtcaggagctgcactctctcaatcagtacgtttttgctgctctggtcacctggttattaaatagaaaagcccagtgattaaataacagggttgttctgacactaatcagttcaatcttggccatttaaaattaagtcaggcttgcagtagcccttgtctctgtgaaagaagtgggaacgacacagtgcaaatgtgactgaaggtatcctgagagtgtttgtggatagtcctctgggacctgggtagttagaaagagtcaggcagcgtaccaggtctcctgcccatcattctgcaggatcctgccatctctaataccctccctgcctgactctcaacatcaaataacaacaaaataattatgccagcagtgacagcagtagtaatagtaattacggtaataaccgcagtagcaataataattacatttttcaaatctcttgccatatgtctggctctgttcgaaatattttatttcttttaatacttgaaataaccccatgatggagaaaaccaaagcttatagaactgctttatagacactgacgtatcccatacacttagaacctgcctggcacatagtaaatgctcagtaaatatttgttgagtgaatgaaggaatagagaagtaatttgcccaaggtcacaccaagtagcaaaggtggagctgcattttgaactgtctcatttatgctcttagtttctttgaggtatgtaggtaaatgccttgtgggtctttttatattgttttaaaacacatatgattttaaacaattatttatgtatttatttatttatttagagaaggagtcttgctctgtcacccaggctggagtgcagtggtgcgaccttggctcactgcagcctctgcctcctgggttccagcgattctcctgcctcagccttctggatagctatgattacaggcgcacgctaccacgctcagctaatttttgtatttttagtagagatgaggtttcaccatgttggccaggctggtctcaaactcctgacctcaggtgatccgcccatctcggcctcccaaagtgctgggattacaagcatgagccactgcgcccagccatgaaacaaatatttaaatgtattttaccttatttgtatgtattaatttaaaggaaacgcagattgtttttaaacaatgtacaaagagaaatagcatcatatgcagagaggtcagtggtttggcagtcagggtggcctccagaaaatcctctctccagcactcactcactttgtgaccttgagcaagttactaaaaccttcctgagcttcagcgttcctctctgttaaaatgaacaccacaaggcttacttaaaccgggctgaggagaagcttaaatggcacaatccattaaactgagagcatagtccttggctcatagtaggtgcccaattccagcgtctgtttccctccacttttgtattggaaggcacctggtgattttctcaaaacctcaaaggaggtctggagaggatggaagttaagccaggtaaggacacgctattcaggcttggaccacggccagctcttctgagaatctgttgtcgggtaaggataggatcagtgcttttcacagagaatcttccccaggacaaccgaaaaggcagtttgttcatgggttatttaccgatgagattcagatgtctgccttgtgatatcagaaggtagccaaccctaaaaagagatagccacagagtgtcctggaaacaataatgtttgtgaaagtgggtcgaaaggttcaggtgaaggtcaagctagcaggatctctcaagcagaggcagtaacgagtctctggcaatgttcacttgatccttccaggaatacccatatctccatgagacctcccattggaatatgcacaggactttgctctattgcaaattagcaaagggaccccctggtcatttttgttttttgtttttgtttttgtttttttttgagatggagtttcgttcttattgcccaggctggagtgcaatggtgcgatctcggctcaccgcaacctccgtctcccaggttcaagcgattctcctgcctcagcctcccaagtagctgagattacaggtgcacacaatcatgcccagctaatttttacatttttagtagagacggggtttcaccatattggccaggctggtctggaactcctgaccgcaggtgatccaactgcctcggcctcccaatgtgctggaattacaggcgtgagccaccatgcctggcccctggttgcttttttaagaagcagtggtagggttttttcagcacttgagcacttctagaaagtggtctatagcaaatatataacctgcagggctaaggacttagagactacatgcaggtctattgtgcccacaaattctcctctgtaactgcctttctccccacccccatataggcacgtggcattgagacaaaggggtcaggtgcccattaagttcatttagggtttggttcagctggatgttccctttccatctgaggtgttatcaatcttggattacttgctcttaaagcacagagactgagtccccagactgtcgcccagggcagtacatggatagattcgttggtcagggatgtgcctcacccttgaacagatctgacattccttttcgtaggagtggaaatggccaatgtcccacttggaccaatgtctaaacaactgtaatttcttttaacatgtctgtgcattttaaggaaaataaatgcccctgctggtaagaaaaaaaaaaaaaaagctcttatttgaaaaacaagaatcttagcttgaatgggcaggttttttctccaaggagatttgaggttgaagaatttaagccttcaatgaccttcacttttgaggtttttgatttaattttggctgcccttttgccaccaggtggttaatgaaagggaaaggtgtcacctcaaaaacactggcctcctttattcattctttcttttagtcacccatttagaaattattcactgacctactgctcagcacagggcactgaggggttaaagttatgtgctgaaatcagagtgcagagactacagcacaattattgggctcaccgaaggtgctttgttttcatggttgaaagggaagtggactgtgcctttgcttcagtaaatttgacaagaataacagggtgggtccttggctcctcaaattggctgggaacctgtcagaccaagtgtgcaaatgcacagttcacacacagtgcccttcctgcctgggaacgcccccaggtaactgatcagtggttttttatgcagaggaagtaaaatggcattttttacttcctgtgggcaattcataacaggagctgccacttactgtgcacttactatgtgccaggtcttgtcacccaacatctatgatcctcacaacaccctaacctggaaggcattatttctactctacagataacatcccagagtctcagcctcctcctgatacctcccaagatcccaggtataatactgtagcctcccaaggcaggagaagcagaactcaagaaggaaatggggttattctaggcagcgggacgcccttgctgctgtgccccaattcgttccccagcacatgttgctaattgtgatcacagcattctctggcttgctatgctgtgcagtccttctcaatacagtgctccaaacaaacactaccagacattctggatggcaagtgagacgtaacctatttgccaccagtgcttgccaccaatgcctgctacctgatagcagacactgatagctcttaaaactagaaaggaccacaaaattgatttggtctagacagtgtgtgctgtggtcttgaagaccagtctctctagtagaataaaggttattttcttgccatattcctcatgctcaacaccttcctagaccttctgtgcaggtctgatgtgccatcccagactctgggacgggacagcatggtggggaagcacatagtttgaagtaggaaagacctggatttgaatccaggctctgccacttgctaatcatgaaaccctggacaaattcctgcccctttttgagccttcatctcctactctgtagaatggagatgataaccattatccacctacctcatggggtagttatgaggatcaaatgagatcatgcatataaggatttagctctgtgcctgacatgtagtgagcgttcaataggctaaagctttcattattatcagtgtgaattattagtagtagtagctccagtgaagttcaaagtgagtgccgtgtcctgttgcactctctgctttctgagatgctcatttgtttatgtttccgtggcttatttccaactggtgatttcttccatgagctactctgtagatcactggcatgaggtcaacaccccaatattctagaaatcccagttcctgggtagagcgtgaaatgtctttatgtggtgtttccatctgtacgcccttcttcaccaggtcctttctgttctctcttcctgtggccctctcgagttgggcaattagtgaagaagacaagcaaagggaggaggaccaagaggatcaacaaaatccagaaatcctattttaagggaagctggctgtgtaccagggattgtcccaggctctgggactgtgagcatgactgaccaagtcctgccttcatgggcttatgtctcatgaaaaggtcaaccaaaacccagaaaacaattaaataaaattatctttctaaaatgggtctgccctgctagcctctgtcttagcaccttatctgactcattcatgacagagatcacaatctgtaattactttgttttatttttactccaaactagtgggcagggaacatgcctggctcattcactgctatatccaaggacccagaatggggttttgcgtgtcaaaagtgctcagtgaacacagagcaaatgaacaagtgacttagtgatggtttgtgaaattttcgttctgagcccagagtttaaacttcaggctacttttttgttgctggcagtggtcagtcacctccctatgtaagaaaattgaaaagaaaattcattttcataattcatgcagtttttattttataaaacatgtgggttccttaaggagatcattctatcccagattgactgtctatggctgaattaaaaagaccattggaggccatttgtcttctggatttgacacttggagcaggtggcagtatctggcaggaactgggttgggggaactcatgaggcttggctccaaagctgggtagtgtgttgaattggtctggagagggctgcatgcctgtgaggagaggagcttctcttattattcactttcctgcatcaatgtgcatctaggctactgtcaacatgtcaggttgacaaaatcattgagctcaaggaatggaactgtagcaccataaaactcaataatctggtaataccaggttgcagcatgtatcggtgtagcctatggtctgggcaattcataacaggagctgccacttactgtgcacctactatgtgccaggtcttgtcgcccaacatctatgatcctcacaacaccctaacctggaaggcattatttctactctacagataacatcccagagtctcaacctcctcctgatacctcccaagatctcaggtataatactgtagcctcccaaggcaggagaagcagaactcaagaagggcatggggttactctaggcagcaggacgcccatgctgccatgccccaattcattgcccagcacgtgttgctgattgtgatcacagcattctctggcttgctatgctgtgcagtccttctcagtacagtgctccaagcagacactaccagacattctggatggcaagtgagatgtaacctatttgccaccaacctttgaacagtgtatgtaaaaggctttgccctaggaattagaatcctggattcagagtgttacgttgtaaccatgtaactttgagcaaattgcttctctctcctgacctcagtttattaacctgtaggatggaaattatcccataccatatctggctcaaaaagtcaccatataaatataagctggtgaattggtttcactggcactgaagtgctgtttttaattgtacctggatggtgaatcagtaaggatcagggccctgtacaaacatgaagcatcctcaaaaacggcagctgtgcccggagttgtgatcagcatcttctcgaggcttccctcaaggacgctgagtggagtatttgacttcctaaaagtcactgggtgagcttgttaatccagattcctgggcaccctcccaaatggctgattaagcattcctggggatggctcctggcatcagcatctctgaatcattcctcaggtgattctgctgcacgctgcaccactgtttcagtggaaaaatgtatatatgtagaacgccactgctctgtataggaccatattgacctttggaattttaaatatctaggtagctgcttaacaaaaagagccccaatatcttccccatctttgtctgacaaactcttattcatcttttaggcctattcaaatgcctcctcctctgggaagacctccctcacagtcctcccagagccctccaacccatgttttgagcacctactgtgtactaggcactctactaagctctaaaatgcattactatatttactcctcttcctttgagaatagaagctaatgccatcatcaccacctctgctcacaccttagagttgagaaaaggtggctcagagaagcaaagtgactttctctaggatgtttggctcttattgcattatagttcatcataataggcctgtctctcctacatgagtgtgaggtccttaaccatgagaattgctgacctttgcatttctgggagtgaacacagggcccagcacatagtaaatgctcaacaaacctttgttaaattgaagtgaaaaaaataatagaacaattatagtaatataaaaaagagtagttctgtttgctttccagtctctgcctttgttcaagctcagggttccactagaggaggaggctgacttcttttgggactgaagactacagatgtcttcagactctcctgtaaccccatgctggtgattctggtcttctggtagctttcttctaagtaacatcagaagacctagcaagtcacaggttagggactgaagaaacacttgactgattggttgagctgggggtgcagaagagaggtgaatgtatctttgatgagctttattgtggcttatagattacatttattttcttctaatgaaaagaaaaaggccaggctcaatggttcactcctgtaatcccagcattttgggaggccaaggcaggaggatcacttgagcccaggagtttgagaccagcctgggcaacatggcaagaccccctctctacaaaaactaaaattagcccagtgtggtggtgtgctcctgtggtcccagctacttgggaggctgaggcaagagaattccttgagtctaagaggtcaaggctgcagtgagctgtgttcacaccactgcactccagcctaggcaacagagggagaccctgtctcaaaaaaaaaaaaaaagaaaaacatactttttcacatctaacttggcagactgccctggtcataaatgtacaaatttatttcaaatacagttatcttcagtccaactaataactttttaaaaatcatatggctataaagcaggaaagttggagaagatgtttaagtttctttccaacattagggttctgtgattacattaggaccctggataaggtttagagcaagtttaaattacttaagtacaaagcacctctaaaaatggaatatcttcaagtgaattagattttctttccaatctaatctcctcttccaagttagtcagaatctgaactttgtatctaaatttctaagccttgatatatggagacatttagaaaaaaatgaaactcaaagagaaacaaactgtgacagcaagcataagaatagtaacacaaaccaattatcctagagcttaatagtttctcataacttcttaggctttcttagaagtgttcatttataggctgggcgcagtggctcatgcctgtaatcccagcactttgggaggctgaggagggcggatcacgaggtcaggagttcgagaccagcctgaccaacatggtgaaaccctgtctctattaaaaatacaaaaattagccaggcgtggtggcgtgtgcctataatcccagctactcaggaggctgaggcaggagaatcgcttgaaccgaggaggcagaggttgcagtgagccaagatcagaccaccgcaccgcaccccagcctgggcgacagagtgagactctgtctcaaaaaaaaaaaaaaaaaaaaaaagaagtgttcatttacatagcttggttaaaggttttgggtaccatggtagaaatgataaggattgcatgtgctatttgattgctttttttcttgccttaatcaaagccataacccctacttacctttgaactttgttttttcgtttgttttgcagcgaaaacggaaacagagcacccaagatgaagatgctgttagcctttgcagtctcgacataagtgtaagtatagtcctttcttcccccactggcaccgagagcatctctcttctccgaaggttatttgttaataatatgctgtgtgcttgaagtgggcttccaggatctgactatggaagttgtgacctgggggaaattttttttaactgaaaaacattttatttcactggagaaaactgtgtggccaacttaaacttccaagctaagttgtttattgcctgtgtcttttctctcataaaatgaattatgaactcagtgcatctgggtagaatctagataaataccagtgtactcttttagaggctggttccagaagatggaacagatgtttgtccccctttgggggaaagttagtggcttggcccagctcaggcagccggatggcccaaaggccagaataagactccagaagcatagtggagtgagtggctttggatcagcagatcttagtttgaatcaagattctgtacttaccatctgtgtgacacctttccttaccagtttcctcatctggaaaataggaatgaaaagacttaacctgacaaaatttgggagggggtcaaataaaacaataaaagtgagaatattaaacacattgcctgtacatactgggcacccaccaaatatttgcctcattttttttttctttttaaatcagaagtttgtagaagatgctcaagtgtcttggtagttgactattggtgatgatcaaggtggaaaagcttccttggctttgtttcagaacatgtccttggatacttaatttcatagctttctttgtgtggccaccgtgtctccccactgatgcaattgggaagcctaccttggcctctgatgccctcattatcctggggcttgggggtggagtaggaattcaggccctccctgggctccccttgtcagttcatcatctgcacatccctggggtttaaccactgtgttctgtggatccgtctaacattaggccgtgctcgctctcctctgtggagaccatgaaagctactcttatgagatgagaagccttccatgctaggaataaagaactgagtcatggttctggctctacctataattaacagtgtaccttggacgagtcacttcctttctctgaacttctgtttcttcttttgttaaaaaagaaaaagaaaaaatgtttgggatcagcccttctaaaaccattgtgaaaaggaaactcattagatatggattgttaggtactcaactgataacattatttaccaatgtgaacaatttttttttagctatttttaattactgcagagttttctgtgatgcaaccagccatgatggagcgagcttgaactggctctaattaatgtacttgagcgtctgttttaccatgtggtgtttgtttgttccaatctttagaccctcagattgatggagttgggccagtttactaagttgccgtggtgaacaggacaaaaagatgatgttcctttgggttttactttactcattgaatattttgttattgacaagtgaagtctatggaatttctcttagcagcaagatttttttgtgtgtttgaatctttttaattttatggaagtttacttttagaatttaaagattttcagaatttaaagactgtcagaatttacagagcccttagccaccatgtatgtattccagtcccctcactttgcaaataaagaagtggaagccctggaggtgtaatgactcaggcaagacttcaatccaggtcacttctaagattatgccttgtcttacattttcccccaagtatatattgatatccatttttcaggaaagcatgtctctagatgctttctaatcgaagaaccactaacattgtattaaaggactatttacaattatgaattgtgatttgatttttgtcttgtttgtcatcaatggccttgacttcccatcaaggtcacaagactgtggataatttggcttcttttctccttgtgcagctacggatgatatttccttttttcttaaccatctcatatgttatgttttatcacattaaagagacttgtatagaagataaatctaccccattaccaccaacatggccgatccctatgcttagggactcagctttggacagactcatttctgatttacctggcatttttcctgaatcttggcaaacagggctgagtttccaccatttattgccacatagtattataataattgcagaagttggaagaattctagaagctgttggaggaacatgaaaactgctgttctgcagattccgctgaccattacagtcatatggagatgacagagggtgtgacagatctagatgtggccatggagggaatgtgactaaatttaagtaactttctcccagtaggcactcaggagagatgagttgaatggaactaaatggtagatagagccacacaggagaagatgttttgccataaaggcaacaatggtgaaatgaatatctgaatccaataaattaattgctctaataagtaaatggcctctgtgggctactcaaaggaactttatctttgtgcatttaaatgatgatatctaatagagtcactgtccctgagctaactggcagtattactgaagagttgtttttggactgtttctatgtgtagtggaaagtatctttaaaaaaaaaaaaaggtgggtcccaatggatgactcataccagaggatgcgagggtttgggaaagtaatatgagtaactctcaatttttattccatttaataagttgtaagacattcgccagatgtgtgctttgaacaagaaattgcagatgaggggacaggtctttggagaccatattcaagttttcattgagtcccagcccaatgctagatacacagtagattcttgataaatattgttgatgggttaaaaaacaaaacagtgaactcgcctaatgtatacctcttttaaagaaatgtatctgggacttaaagttgagaaatattaacacagactatgtccccctttgattaaaaagtaagtgccctatagcagtggtccccaacctttttgacaccaggggccggtttcgtggaagacagttttccactgaccgggtggggtaggggatggtttcaggatgattcaagcactttacatttattgtgtactttatttctattattattacattgtaatacataatgaaataattacacaactcatgataatgtagaatcagtgggagtcctgagcttgccttcctgcaactacacagtcccatctgggggtaacgatagtgacagatcatcaggcattagaatctcacaaggagccaaaacctagatcccttgcatgtgcagttcacaatagggtgtgtgctcctatgagaatctaaagtctccaccgctgatctgacaggaggtggaactcaggcggtaatgagaaagatggagagtggctataaatacagatgaaactttgcttgcctgccggccactcacctgttactgtgcagcctgattccgtggccctatagaatgtttatttgttatcatcactcagacacccttcaggatgactgacgttattcttacagaacagggatcctcgattgtttggggggatgcatcacttaactctttccggaatctgttgatagcacaggaaattttacaaaattgatgtgtgatttcaggggatttatggatcccagccaagacccctgttaagagtttctcttacagaggaaactggaagggtcttaaagctcggtgatgggtgacgtatctccaaataattgttttctgaccctcaactcccagcacttggtggaaaatgaattctgactggagagtcaatgctagttgatgatataatcggtcactattttttcccaccgcctcacccaatcccctgactgggcccccaacttcctggtgggttagaacacaaactatttctgagggaaaataaaaagcaacgtacacttttgagagcaatctgccgagtggagaaggctcccagcagccacctacgaatctcccctcacgtcagaggatatgagtaggatggtttcagggagcttgcctcccccacagcacttttctagtttaaattctaatgggcgagagacgctgtagctcatgtcaccacaggaaaggcccttggtgccagagctcctgctgcagagcacagctcagcaccagacattctttcttataaaacaaatgagctctgggtggaaataaaaatagcctccaatgataaagtaatgtaaaaataaaaaggaatatacgttctctagaaaaactggaaaatgtgaacaatagtttgacaatcccacctcaaagccatagctacattttgatgtatttccttcctgtcattatatacaaacctttaattttttttcattatgaaatatttcagacatacaaatggtataaagataatagaaaaccccatgtagctaccaatgcaactgaagaaatacgccctaaacagtgatgccaaagacccttgcaaaaacctttgctttgcggagtttgatgtttatttctgctttgcatgtccataaatttgctatggacatgtatccctaaagagcatatatatttttaaccagcttttaacatttatataagcatacacagtttttaaaaattgagatcgggcaggcatagtgggcctataatcccagcactttgggaggccgaggcgagaggatcacttgagcccagaagttcgagaccagtctgggcaacacagggagatcctgtttctacaaaaaaaataaaaaattagccaggtatggtgatgcatggctgtagtcgccgctacttgggaagctgaagtgggaggatcgattgagcctgggaggttgctgcagtgagctgtgattgtgctgctgcactccaggctgggtgacagagtaagaccctatctcaaaaaaaaaaaaaaaaggattatagtacaaattaatttattcatgaatttttcacttactatattatgaacgtgtcatattatgaaatattctgtaagaatattatttttaataacgatagagtactttatcaaatgtgttcatttaaatctattccaccaaccctttactgggtatttagataagttccaacttttcgctattataactaatgctgatgggcatccaggaacatgtttgtgtaatctcttttatcagttggataaagtttgagatatgaaattcctggctaaaagagtatgaatatttttacaatctctgaataggtttatcctctgcttctggcagtgaagtggaaatgaactttagagctgttgagtatcttgtgtggaatctcacaggcatgggagattgttttcagctttccctggcccttctctcttcccactgcatgaccagtcccttgctaagactatgacttgagatgggacatttacttcccccctccacccatcctgccaccctttaggaaagcccctgacagggcccacacgcctctcttgactggtggggatggagctggtggcgatggagctggtggtggggcatcttttctatgctggtggggctttcccatgggagcacatggctggaccatcacttggagtgggataggattgggattcacattcttcctgcatttttttttttgttttgctgatttgcaaccatcaagatgagccctgtttaatctcctggcaaggaatacttgggaagaatgtgctcacagctctcagtgcttttgagatccatgtattgttgttgttacaaccactcttctgtcccctttgagaaatctacacagaaatccacatggcagatgtttgaatctcaccccttccctctcttcctaagttgaggaagagctgagctatggtctgccaacagtggaggaggctcttctggagctcactaacatgactgcaagaccctcattgaggccgagcagtattcagcgtctctgtggcctcctcactggcctccctacctctttgtagtctgccctccatgtatcagccagggacatctttccaagtgtaaattttatcttgtcatgcctgcctctaggttcccagactgtgcttccaaagccttgcaccgtctggcccctgcccacctcctgaaccactcccttccaccttttacacatgcaggccaaccatgctggttttctttcaatttctccaactcctcatgctccatcttgtccctgggcctctgcacatactattctcccatttgtggaatgcatgctgtttcttctccccgcatttcacctggctcatgcccccttacccttcatatctagctctcctctaagaagctcccagacttcccaggattcctttatacctctccctccagccattccctaccaccaccaccaccccactctcacaagcttatgttgccatcctagcctttatcacccagcattgtgatgcctgcttccatttcaccttcagaggcaggctgtgacccttcacagggagggctgtgttccactctttttacatccctagcacctggcacaaggccttgcccgtagcaggtgctgaataaacattgaatgaaggtatgcttgaagtttcttctattgtatgaataattgaaagaaagggacagataaatgtttaaaaagtcagtagcatttcaaaaaaaagggggcttgggatagaatttttaaaatttaaggcagaagatgagatgaacatatttatctcagatgtgtgatgccaggaagtcttttggacttcaatcactcgggtacagaaggctgttcctgatttttgttatagtatatggtatagttgtgatctgtttgcaagctcaccaatagcctgtgaattccctcaaagcaaatacatagtgtccatcatagttgctccataaatatgtctaggatgggtgaatgaatgaatgaatgagtctcagattgagttacttacatgggtgtttctgagatgctcagtattattcttactagcatggttttcctgggattaatattaatcagaatttcagggaggaagggaccaaattgctatagagtccttccttatgcagcatggctgtgagagactcattagatacatagcaacaagagcagctactgttgatttagtgctactatgtgatgggcactgtgctactatacattttattatttaatcctcatattacccctttagagatgaggcaaacggagtggatagaagttataaacttgcctgaggccttacagctagcaaataccatagcttttggatctgagtcgcaggcctgtcctcccaatcacagtgctaattatagttattatattagtaaatagcatactatagcaggctaatatgaattaagcattcatatgctctgtgctttccaaatacctcattaaattctcacagtggtacggtcctgtgacaatggaatgtatcataccctttttgcagatgaggtaactgagagccagagagataaacaattagttcaaagtcacagtatgtaaatttaagcccaggatggttcgattccacagcctccccacaccacctccaggacaggagaggagaagaaagcttttggctccctggctttcagtgctgaatgatgtttagtgcttttagctggtcttattggcaaagttgctttgaggtttatgacaggcatccccaaatttccattaactgtgcactccagttatttatcctgtcatgtgcatgcccaaagcacaagcattgatatagaagagggggaaaaaagctttcctgtctcagttaagctaaatggtgtttcattgccaggatatgttaaaccaggcacggaatagcagcgagatttattttatctctgctcagcagagtccagataattaaaaaagataccatttctgtggttttgtttctcttggtctgttctggaacttgctaactggggagattagcctcgccctggccagcatggggccttgatgaattatgtgggagaggttaataatgctcttatcaccgaggagaccaggcctctagctgagattgggtcttcattaacacatgcttatatttaacctgttggcattttttgtttgtttgttttgggtttatggtctatttttgctgtctgtgaaattgtttgggcctaaggtagcagataccctatgtttggtccaatggttgttctgacgctgccgcctctgatggcaaatttacttgtgctttgagcgttcacatagacatattgcatcttgcctttggcctaatagattaggtggtagataatagttgctgtgatcttttatctttgacacacttcttgaaaagcacagtgacaaagaaattccaaggagtttcaggacacactctcggatatgaatgatataacaaagtgtaagtcagcatattcaccttttcccattccccttcaaagtgaccttgatggggcccttgttaaatgaaggtgcttgtgccccagaacacctgtttgttgggatttatcaccagaattacaaacttcaggaggttagagagtgaacatcattctgtacctcagtttcctcacctgtaaaacagaaatcgtaacaatgccctgccttaaagttgtaaggctaaaaatgagttaattcatgccaggtgaggtggctcacacctataatcccaaaactttgggagactcaggctggaggattgcttgagcccaggagttccagaacagcctgggcaatatagtgagacctcgtctctacaaaataatttatgtagccattaaaaaagaatgagatcatgtcctttgcagggacatggatggggccattatctttagcaaactaacgcacgaacagacaaccaaatacatatgttctcccttataagtgggagctaaatgatgagaacacatggacacatagaggggaacaacacacacttgggccctatcagagagtggagcgggggagaagggaggagggagaagatcaggaaaaacaactaatgggtactaggcttaatatttgggtgatgaaataatctctacaacaaacccccatgacacatgtttacctatgcaacaaacctgacatataagcctgaacttaaaagttaaaaaaaaaaaaaacaaacatagcacaaaagtaaaacttgtttgaggttttaaaaaataataaatttaaaacttagctgagtgtggtggcatgcacctgtagtcctagctacttgggaggctgaggtgggaggatcacctgagcccaggaggcagagactgcagtgagctgagatcatgccactgcactccagcctaggtgtcagagcaacatcctgtcttcatttaaaaacaaacaaataataaaataaaaagttaatttatgtaaagtacttagtacctggcctatcgtgagcacaaaaaaataactactgttgctattgattttattatacaaaatcaactttattgttaagttcaagggtctttgttattaatacaagtattccataaatagaattgatcatgtaattttaaaaagcagtatatgaggccaggcacagtggcttacgcctataatcccaacacgttaggaggctgaggcgggtgaactacaagatcaggagttcgagaccagcctggccaacatggtgaaactctgtctttactaaaaatacaaaaattagctgggcttgggggtgcatgcctgcaatcccagatactcgggaggctgaggcaggagagtcgcttgaaccagggagtgggaggtcacagtgagccaagatcgtgccactgcactccagcctggcaacacagcaagactccatctcaaaaaaaaaaaaaaaagtatatgaaaagaggtatataaggatttttattacagcattgtttatgatagctaaaactggaaacagcatgaatatccgaattatatagacttgtaaatgcattcagaatataagtgtaaaatgcagttacagaacacatgctatatacgttatgctcctatatgtttatatacatttatctatataaaggaagaagtatggaagagcatacactgtattgtggatagtccttagattgggagaatggaattgtggggatgaggagattaagttgtaaggattcctgagctttggtattttgcaaaacctatgaacacccctttccccacaaagactgtttatatgtgcccaaagcaaaattcacaaggttatagcaaaccagttatgttgaaatatagttataaaaatatttaaaaacaaatttgtggttagagcatgtgcttcttaatgcattaagtaacatctggcaacaagtctaataactaatacaccttcagtgatatgataagaataagaataaatgatattttgaaatacctacaccaactacactgtcatttgaaaatatagtgatttctgtgttgacagtcacaggtctgagaacgcttctgtgatttgtagcctccattcatactggaaagaaatactaaatttcaatcattggtgaaaataaagatgtatctcatttttccatctaagcttgaagatgccctgaattttattcagtgaactcttgagggtctgagaattctagattatgaatccctgcttaagacactcagtctgttatgataagcttttctattatattacatttgtaatacaaatgactgcaaaaaatataagaataatagattttgacctgttggtatgtgagattattagtgttagtaaaggtaagaatgtaaaacattatataaaagttgtttttaggaagaccatgtaatagtcatgaagtcagttctcagcacttggtgtttagatttttccttgagaacagcttagcttactggtccttcacattgctttttttaacctttgttttttgtttttgtttttagtttttagttttttaatgcttcatatgcccatctacacattgctttttgaaacagataacttgagccacctcagtattttagtagaaaatcttttctgcttctactgttgaaaaaataatttggggatagaaaaatattttattttttagagatgaatatggaagtgtttaggggtaaaatgtcatatctttcatttactgtcaaattctttagcataaaatataaagtgaatattttaaagagaaaaacaattttatttttaattatacaagtaacattgtatacattctcatcatttaaaaatcaaacagcagagatagagctaacagtgactctaccatgccccagtcccacttacctccttaggtgtaataatcagtttactgtctccttccagatatttagatagagttagatagatagataaatagatatgtaaaaattagtttgtgatggctttttaaagacatgttgtcattgtttttattttaattttcaacttgcttttttcccttttaaatagattttatttatttattgattgctgtgagaagagatagtatattgaaagctattcagttacagaatagggcatcctccgaaagcaaaaggaggaatgccttgtctttttcttctatatagggtagactttactttttttttttagagcagttttagattcacagcaaaattaggcagaaagtacagagcattcccatatgcccccaagtcgatgtatacatagtctcccccattatcaacagtttccatcagagtggcacatttttcacaagtgatgaacctccattgacacatcatctttcaaccaaagtttatagtttacattagagttcacttgtggttttgtacattccatgggtttgtacaaaagtgtaatcacacatatccaccattatggtttcatacagaatgctttcactgccctgaaaatcctctgttccacctattcatctccccttcttcactaacctctggcaatcactgatctctttactctctccatacttttgcctttttcagaatgccatatagttggaaggatacagtatatagccttttcagattgacttctttcacttagtaatatgcatttatggtttttccatgtcttttcatgacttggtaattcgctacttttttatcactgaaaaatattttattgtatagatgtaccacagtttgtttatccattaatttagtgtaagctgtatcttattcttttaaactgctgcttattattgcataaaacagatgggtatagtttatttttaatgcagttctccactgagaaacatttttgttgtgtccaatacttcccaataacaaacaatgactatctctacaccccagagcaagtagtaaggtacacttcatttaaataacagtgtttgtaactcttaaacttatatatccagaagtatattccttctatgtcatgcataatttaaaatatatatatatataaattgtagttgtgaatttaaagaatgttatattgacaagttttacctttcaactgccttaaaatgtattcagtttatcattaatactattttgactgagatttttgctgtaagaagtcactagaaagtaatacttttgtttctgattttttttccaggctggagcctgggtctgtccacctgaaaattatgtaaataatactggttaggaagtttcatctgggcttccatgcccagctaattgagtttacccctaaatgatttatgtaattatatcaagcctcatctttgatctggttatatattcctggtttcaattgcagaagctgtttgtctgtttttcttacttttctcaattgtgtctgatacctgttctctgtgaagagaaggagatatgttgacttttgcccttgatcttaccatgcatagaattttacattacttgacggacactgaaattcttgggtaacttcagagaaatgttaaaagaatgaagtgaccaggagaattctcgtggtttgtgtgtcttcctctaccctgctgtttaacttaccctgcgatgtgctgatcattttacggagagagctgactcagtatgagcaggtggtttctctataagcataacattcatgactgatattgaaggtgaaacatttgaaacgaaatcacgggcttatcttcagtggtcacaatgccaggtttggattaactccttagcaatcctgcagggaaacctgaatgggtttattcccaacagactgaccttttccccttataatactgtaaatggaacttttttttttttaactcctcacgtacctcaaaatatcaatttccaaaacaggaatcctctactcagcactaaaatcaataaatctaaagagcttctttgtctttatttggcagaggaaagggacgattttgctggtcagctctatataaattccattgaagaaaatattgttttagaattaatgagttaatttgttcattctttagtgcattcactcagcgcgtccactaattcaatcaactggcatttactgagctctgccatacatcatacacgggccactgaaagaagctaaacttaagactcattcatctgcagacaagtgggggttgcactcttgcttctgaaacaagttaaccaagcacagagaaggcgcatctaagctgtacccatggttgtttttctcctttttccaaaggatcaattctgactcttggttggttttgaaagaaattttactatggattcttttctggtaatatttttctctcttagaatatccttgaaactggctgggcgcagtggctcatgcctgtaatcccagcacttttggaggctgaggcaggcagatcacctgaggccaggagttcgagaccagcctggccaacatggtgaaaccccgtctgtactaaaaatataaaaattagccggatgtggtggcacacgcctgtactcccagctacttgggaggatgaggcaggagacttgcttgaacccagggtgggtggaggctgcagtgagccaagatcgcaccacactgcactccagcctgggtgacagagcgagactctgtctcgaaaaaaaaaaaaacaaacaaaaaaagaatatccttgaaattaacttatttgcttttagctggttaactcaaaggttcagtcgggaaggtgcttcactttattttatgtaaaagccaaccttgagaaattatactttgtggtgggctttgcatctgtgctctccttacagttaggcattaggctctagaagcattgagtttcaaagaaacatcactagggttttttacatctagagaggacctttcattttgttcatgtagagtggttgtggggtactgttccattttagggagaacgaggttgtttgaaatgagccacttctgtacattgttattagtagaagtatttaacaaaatgcctttgctattgattttattctgtaaagtttgattcatatccaagcagatgtgatcaagagtgtgatggtttgataaatagagccagaatcacaccattatcacttcctccagatggtcatgccctcttcatttccacagtggctggatgtctagggcctccaacctggtcttcctcattttccttcagttctctgctcaaatattcttagacttcctctgtcccactatgtgaaatagcatttccaggccaggcgcggtagcttacacttgtaattccagcactttgggaggctgaggcgggaggattgcttgagctcaggagctcgagaccaacctgggcaacacgacgaaaccctgtctctatgaaaaatataaaaattatccaggcatggtggtgtgcctgtggtcctggctacttgggaggctgaagcaggaggactgcttgagcccaggaggttaaggctgcagtgagccatgatttctccactgtactccagcttgggtgacagagcaagaccttgtctcaaaaaaataaataaataaataaataaatagcattttaactcctcggcactcccctctcttcttatctgactttattttttcttcatagcctttatcatcacctgccacattatgtattttttaaatttattatatttgtctcttcacagtagaatataatttttattttgttgtttttgccatattatcaacatctggggcagtgtctggcattgtgtgtccgataaacatttgttggataaatgattgagtggctacttggttgttcatatgttacatgctgtctttggaaggttactgtaaacatgaactggatttatcttggcaacattttaagaacatgtcttcctctacatacatatttgccttccctcatttttaaagaaaaccagtacaacaaaaggaaaatcaaggtctacctgaagagaccttgtgatatacaaagcaagataggtaaaaataatgccaggcttttatgagctaataaataagtcaggctaaagacaagaggatagaaggaatgtgaaatatacacatgatttcatatggatgtggaattgttaacaccagtgctacacttaactcagttggtatggaaagatctctcaggatagtggtaggaatggaaattttctattaaaatgaaaaacatcccactgttgcagtctcaattcctttccacttaacgggtgtttattgagtgcacaacactatgcctggtgcccaccatgtggttacagaatgaaagatgcttgtaaggagttatcaatcaacatacattgcttgtttatccaaacttgtggaaaggagtatattctagatgatatagaaatgacagagtaccagtacatcttttatatctcactcagaatatgttctagctgttacattgaaatatgagtaagccttgccgcttgagcattctcaatattgtgaaaaaaatacaggagccactttgaggagacccagcattgttggaggtaggaatgtgccaggttctccctgctggacaaggtggaatgcttccctgctttctgtccagggtgagtggagcagcctcccctaggaacatgacgcagggcaccggtcatactaacccaccatctttagtctcccttttaccctgtgtgtttagcttgttttactcggaaaaggtaaataaggttttggttgaaaataccttttattgattataagcttccaagacagggaaaaactaaacaggaggtgctgaatggacctgaaaatggacctgatgatctactcagcttaatcatgctaataaagaaaggtggggtttgttttgttttgttttgtgttttgagacaggatctcactctgccacacaggctggagtacaatggcatgatcacagctcacctcagccttgaccttctgggctcaagcaatcctcctgcctcagccttctgagtagctgggaccacaggtgcaggccaccacacttggctaatttatttcatttttttttttcatttgcagataacccaaaaggcaaatgattcacctacggctaacagaggtgattgcattttgaataggatgtctgtcttactttgggctgctataacaaaataccatagcctgggtgggttataaacaacagaaattgatttctcacagttttgaaggctaggagtgtgagattaggattccagttctggtgagggtcctcttctgggttgtagagtgtgctgctctcattacctacacacttcccaagagccccacctcccaataccattacattaagggtagaatttcaacatatgaatttcagagggacacaaatattctgttcataacaatgtccaagctcacagatcacacctcactagccacatgcctaaatgtcattaaaggcacagtaatttactaacttccatagaggagagaaaaaccttttaaaaacatattttttaacatggtttggatacagtgagttttcacaaatttgaatattatgtgtaactgaaaaacattggctttaaaaaattataaattatcttcctttacatttgatatttcatgtggttttgccttcacatagaaaagaaggtttcatcataagcacgtttctgatgtgcatttctcatagctgttgacaacttgctgtgttttgctctgctctgtttgccgtagcggaatcattctcctttctaaccaatctgtgcgctgtggtagcatgttctcttctaggttgctgtttaagttttgttatgtgccttgatgatgttccctctctgtaatacaaccagaaattgaggctgcgacttcatttaaattattgtcaggttgtggaaataggcctgccatgtgctcgccatccccacagggaagtggaggagtgtctgaaatgagaaatgaaccagcttctggcaactcatgaagaatgtgtctggaaatagggatggtatgaagggagggttattgctgtgttttatataataaagggaatgattaatgggctcccagtataccacagtaaagaacaaaattgcctttgggaccttggaggctttgtttagtttgggggcttatgtttgactgaaggtctcatgttcttgacaaaagggtgacatttgctgagtaaactttgaaattttattatatgtaatataataactgaagagggggctatcaagacactctctgaggaaggtctatgttaagtggcattgatcattgcatagcttcctgatttacaggtgacttggaagatcattctaaactgtaaggtccttgaggaccttacatgtattcttttattctttcctcattctttcattgatattcacattgactgagcatctcctatagtcacgctgtgttggttggtggtaagagaataacatggtgagcaaaccaggcaaggtgctggtgacttacagtccaattatggaggcagatgttaataatcaccgtaacaagaatataataacaaatgaaaacaaaagctttgaagaaaagagagacatgttgctgttagggcatttaaccagggagcttgacctagtcatgaaaggccaaggaagccttttctggggaagtgaaagctgaaagaaggtaaggtgttaaccaggttaaagaggagagtgaaagagctgtgaccttgggaacagcatgtgcaagggccctgtggcaggatggaacatgctgctttgaaggcaaatgcagctggtaggtggtagatggtgagactggagtagttgacaggaaccagaccacacatagcttcaaaggctatgcccaagatttgcatctttatactaagaacagtatggagtcactaggaaggggatgtgttaggcaggggtgtcatttgtgctttcattcctctggttgattatgaaaccaagggtagatgtggatgatgagtagaaagctgccttagttttctgatgagagatggtggtgtcctggcttagctgtctgtagggcagacaagtttgagagacatatatggctatgtatctttactgcctggtcttgagtgggcacttagtaaatgtttcccttcttggcatgcgttagaagatgtgggttttattttaccttctgtcattgtatagctatcagaccttgtatgtattgcttcacctctctgggtctcagtttccacaaatataaaataatatagatgaattgtgtcctttccagtgccaaattccctaggttcatgatgttttgagtgctatcggtttttcaggcagaggattaaaaggtaaatgtgggccgggtgtggtggctcacacctgtaatcccagcactttgggaggctgaggcaggtgggtcacttgaggccaggagttcaagaccagcctggccaacatggtgaaaccctgtctctactaaaaaatacaaaaatggccaggtgtggtggctcacacctataatcccagtgctttgggaggccaaggcgggtggattgcttgaggtcatgagttcaagaccagcctggccaacatggcaaaaccccatctctagtaaaaatatgaaaattagccgggcatggtggcacacacctgtaatcccagctcctccggaggctgaggtgagaggatcgcttgaacctgggatttagaggttgcagtgagccaagattgcaccactgcactccagcctgggcgacgcagtgagacaatgtctcaaaaaaaaaaaaaattagctgggtgtggtggcacacacctgaatcccagctactcggaaggctgaggcatgagaactgcttcaacatgggaggcggaggttatagtgtgccgagatcgcgccactgcactccagcctgggcaacagagtgagactctgtctcaaaaaaaaaaaagaaaaaggtaaatgtgttggtttaataataggagatcagtatctgagtttgcttacacaaccatctttcttcaagtccttctttctaactccttggatgttagaagacatggttagggggcaccactgtatacacttaacatttcatttatggcaaacaagaccggtctttaattaggttgcctttttaaagcacaccagatgtgagtcactagaaaaacaaaaccaaactcttcaaatgagtaggagtgaatgtaagaattctaatgaatcagcccagggtacacagcctaaatgaagtggaaaaagctaggggaggtttgctaagggggtgcatttgactcttgcgtcctataagttgggaatcctttgtcagcagttgtaacaggcatgctcagctgcaaccacaaacattttccaatggaggagtgttgatagcattttcattgaccttaaaaaaataaaaaatctaatggcagggtcaaggggaaggcaagaggtgtaatttgctggtcagtctcagtcagccgcctgcagcagcctcgtcctgtgtgagactttaagggaatgcacattggcatgggggttcccaggcggaggggggcccagattcagccttggcctcatagaggagcaacaaattgaaacaagagcagccctgttgaccttcagactgcaaatggactgctttctttgtgccatgtcgcccagtgaaataatcctgataaaagctttttgtttagccattggaacaagagcagggattcagggaaagagtatttccccacccttttaaaaaatgttttggtgttggctgttcgacagacctgggttctgctgaaccagtaggcattggagtagggggatttgtggagtagggaggttcttggttggttctgaggtcatctgcaaggtttttgttgcatctctcacacttacagaagggcagtctgaccctgctccccctcccactcccctcaccctgcctttacctccataccattccttttaaagtcccaaaaggtgggtgggtggggagggtcaggggcttactctttcatttgctccttcattttaagctgtggattagcatctatgtttttgcctttgtagcagattggccagagataaccccattattttagtgcatcctgttgctgtgtataggttttagggatcatttgggaactattataggttatagaccagtggaagcagagctgctgcttattagattgaagacatttggtagagagagagttaaaaaaaaaaaaaaaaaccaacaggttagaaggcttcattcacttttagaagagagaaaggaggaagagtctgaggtacattctatagctttgtgggaagaggggatgcttccggcaggatctttgggatttggcagtggcagactctactctttgctccctgcaaggccctgaacagcctcctgagggcccagcagatccaggcctttccgaccccagccctcagtccccaggcccttgtacattttatactcaggttccatttaagaagtgggagatccatagccccttctgtaaatgtatcaagagagaaaatcccgggctcagggaactttgaagcctctgctttagccactgcccccaagcctccattgggctcaaatttccttgcttttcctgctaggaagactgtttcttttgcatgctttcacctgggcaatctaggttttaaattttgagcatttgaggagcttgtgttggttttctaccaaacctagatgatagattaggttccagttccttccagccccaagctttctagacaatctaaggccatcctttgacttcttcaaagttagatggcccctaagactcctccatgtcccaccccagtctgaagttgatggccaaagtcccaggcagaaggcaccaaaagggaagataccaccctggcactgaccaccactcactggtgacaggcgcttcatactgcagcagcccctctgcctacataacaagcctgagaggtgcttatcatcacacttgtcttacaggaagctaaagccgacatggtttcttttctccaagactttgcagatttgcacaggggcctctcctagccatgaatctcctctcctttccctgcagcagggggctggaggtgctttatttctgccgcattgccttttcattgtgggcctagagaccactcataaaggcagatcttctttgttctttagtagccatgattcaagagaagccctggtattgctcttccttacagctgaccattgccagcttctgagcacgaaatgaacttggcacgtattaatcacgtcatcccccaccaaccattaggcagatctttttagaaacataaatcagattacactccttagtcaaactctccagtaacttccaggggcttccatggggtctctaaacttggattggaaaaaaaattacatctgtattttcactaacctccaactgaaatttacatttcctttctataaatgaggacaaaaaaccacagcaatatcagcagttacttgtgactttgtcaccaaaagaacccactgtgattttctcttcacattatactggttacatatatctcagaatattttgtatgcccatttgattgtaaaatgacagtagtggttagatctgccaccatatctgttatttaaacaggctagacacagtggctcacactttgggaggctgaggtggaaggactgcttgaggccaggagctagagaccagcctgggcaacatagtaagaccccatctctacaaaaaaattgtaaaatcagctggccatggttgcacacacctgtagtctcagcacactactcaggaagctaaggcaggaggatcacgtgagcccaggaatttgaggctgcagtgagccatgatcgtaccactacactccatcctgggtgacagagtgagactctgtctctaaaaaataaaaataaaaaataaatatgaacaaagaagttatttaataaattagatttttatgttgcaaattatattttatttttaattaaattgtttgtttatattaatttttatctatctatcgatctatctatctatctatctatctatctctcttgagaccaggttatgagactggctaatttttgtatttttaatagagacagggtttcgccatgttacccaggctggtctggaactcctgagctcaggcaatccacccacctcagcctcccaaaatgctgggattacaggtgtgtgaaccatcatgcccagctcaatgtaatgagttttcttaatcagaagtgtaccaacggggctgggtgtagtggctcatgcctgtaaccccagcactttgggagaccgaggtgggcagatcccttgaggtcaggagttcgagaccagcctggccaacatggcaaaacctgtctctaacttaaaaaaaaaaaaaaaattagcctggtgtggtggtttgtgcctgtagtcccagctactcgggaggctgagatgggagaatcgctttagcctgggaggtgaaagttgcagggagccgagatctctgctccactgcactccagcctgggtgacagagtgagaccctgtctcaaaaaaaaaaaaggtgtaccaagggggtggcaagagggatgtgggctcagtctgccctggatttaggcaacaaggtggtgtgcttttattatttaaaaacaataatacaggctgagcacggtggctcctgcctgtgatcccagcactttgggaggccgaggtaggcggatcacgaggtcaggagatcgagaccatcctggctaacacggtgaaaccctgtctctactaaaaaaatacaaaaaattagccgagcctggtggtgggcgcctgtagtcccagctactcgggaggctgaggcaggagattggcgtgaacccgggaggcagagcttgcagtgagccgagatcacaccgctacactccatccgtctcaaaaacaaaacaaaacaataatacagtcaacttaaagtctattcttctatgatcactataagctggtaactctaaacaatgtccatgataaaaatactcttccctggcgggataaatcactcccataatctccctgcccccacagtcccatccttggtctttcataatcctacatttttttgtttttgtcttcgccatttaaaaacattttgcaagcagaggtccatagggttcagcaggctgcctaggaagtatataacacagaaacaagtaagaatccctgacttaaaataaaatgtagatccactttccttggcctatagggcccaaatgtctaggctcctgcccacctgccaacctcatttccctccaccctctccatctcttggcaccttctaataaaccagaatttattgatgctactgaaacattcaaggtttattctttcctttcttattcccccagatatgactcccaccttgttctgatctcagctttcaatgtcacctccttgcaaaggccattcctggtaactcaatttaaagcaggccttgccctccccgcaagtgctttctgtgctgttgttactatctaaaccatctgttgttcttgttgactgtcttcctcccctcaccagaaggtaaacccacaagcacagacagggactaccattgtcaattgttataatctctagcatcttggcaggcactggcaggggctcagtatcctcagagctgagtttgcttctcttgaactttctgtggtagcagccagttaatatatatttaattactaggcttaaacccattaaaattcctacaaaacctggaaaaatgtactcagctataaaaatgcatgtggatacagtgaatggatagtgcaaccattacagtgaaggaaagaagaagcctttttttttttttttttttttgagacagggtcttgctctgtttcccaggctggagtgcagtggtgcaaacatggctcactgcagcctccacctcccaggctcaagcgatcctcctgcctcagcctcctgagtagccgggactacagacatgcaccaccatgcctggctaatttttgtatttttttatagagatggggttccaccatgttgcctaggctagtcttaaactcctgggctcaagcagtctgccacctcagcctcccaaagtgctacgattacaggcatgagctgctaaaccaagaaactttcaaaatgtaatttgtaggtcagaaaaatggtgccagaactggatgcagtggcttgcatctatagtcccagctatgcaaaggctaaagcataactgggcatagcttgaacccaggagtttgaggctgtagtgtgctacgattgtgcctgtgaatagccactgcactccagcctgggcaacatagtaagaggctgtttcctaaaaaagaaccaaagagcaaagaaactttttagagaaaaggaaaaggaaatggcaccagattcccccatctccccgcttctttggtgttatagccgtttggagaaagcaacaggaatcctgactcacagagccttagatagagatgctttgtatgtcacagaataaaaagtacagagttaggtcaatccctgattgactgactcaattactaaactatcaccaaacacacaagtcctttccatctccttaaactctttgtgctcttcaggctggtgtccctcatggttgcaagatggctgccagtagccactggggtgatatgtttcccttttccagcaaataagttcttccctttagtgtgattgggtacattaggtcacatgcttgtccctgggtcaataatagtcccaggaggaatgccatgaagattgactcagactctgccttggggatgaacggggtgaatagttgcggaaaataggagttccttaaagagggagaaagggaaatcaacgttaggaaggcaacccaccgtggccactgtagatgtggcttgttttaaaatcaaatttatttttgttttaattttgaggaataaccacttagaatagcttctgatgggaatgatcctaatctttttattttttcaaatatgtagggctttttttcttctagaaaaaaattttaaaaaattattgcctttatcttggctttgttatcagtcatgtgatctggcagctgaagaaatatggcccatggctgcagacttggatgcttatataacaggctttggtctccatagttagttttaaatggagagtgtgtgccagggatttggaaaagctctaatgtaaattttcaaagaaataacattgcttagaccttacttagattatgaagagtaagttggttcatcttgggaggcagagcaaagcctctaagcaagctctggaaagcctctagatttttttttttttaattccagttttattacagcagaagtgtcagccactatcttgatggatgctatgaagttaaaaaaaaaaaaaaaaaaacctctcaagatggaaaagaatttggctcactttaggaaaattctaaaacaagaggtataagcaaatgaagggctgtagaagggctgtagcagaggagggagggccccagagacagaggtcagggagaggggttgggacatggtgggtggtggggaagggggagggggacccaaggagaatcaagccatatctgtaaagaggatctgtattcatgaattaccggtgtaataaaacataaatgaaagacagtgtcagtttataagcaataaatagacaagtaaaattgcagtattagacttgatgacataagaatccttccatcccatgtcagcccttgaaagctctggagtaaaaggctagagaaagagcctggatttccaaaaatgttgactcactgtccttatagacagatactagacatagatcattttcttattttctttctctttatcctgttcctcttattatccctccgcttcctttttatccccgagttacgtgtattttatgtggcttggtatcttctgatggcgacaccccccaggactgactggttatggactcagattgtccagacccctaccagacatctcgtccaccactggccaggcccctggccccacatcttcctcctctgcggcagggccccctgctggtctgcaggctctctgctcctttgagagtaaaacaatgaaatgtcacaaccaggaaaagaaaagaagccctttgagccaagtagtggaattgaaaaatgacacttgtcttttctgggatattgttttagaagttaaatttcctttcattttagggttaagcgtaagtatttggaatgccttttctgacggtaactgtgtcatcatcatctgtacatctatgtcacaaatttgggagagctgtggttcagcatgacagtttttccttccactttagtgtcgtagttgtatgtagcagtcatttacagggggtaggagagtggagaaggagggaagacaggcagcccagagtacttttttttttttttttgagacagtctcactcttgcccaggctggagtgcagtggcgtaatctcggctcattgcaacctctgccccccaggttcaagcgattctcctgcctcagcctcccgaatagctgggattacaggcacatgccaccacgcccagctaatttttgtatttttagtagagaggggttttaccatgttggccaggctggtcttgaactcctgacctcaagtgatctgcctgcctcaaccttccaaagtgctaggattacaggcaggaaccaccacgcccagcccagactacttgtttttgcatcagtaaaggccatttattgctgccaaatgagtgttttgaaaagagttagcaaacgtgtatttgaattcctgctcttccactttttagatatgtggtcttgagaaaagacctccagataaaaatgggaacaacaataaatagtgcttgacaaccttcagtctttcctatctcaataaaaaccctttggtgactgcaggcacccctccctcctgcccctcacctctctccctcctctccacccacctcagcctggattcctccttttcccctcctctgaccttgttattgtactccatactattgtgttgaataagtgactcaactgccttggccaccaggtcttgccatggccatatctagtgactttttccactctgacctctgccatgtgctacataagattgactttctctctgtgactgcacactctcctgtttactgctcacatttctgaccactccatcttggattcctttgcagttaccccttcttgtgtccatcccttaattgggggtgtccctcagggtcctgacagaggcctttgggatagctgcttttgaagttctcccctaaacttcttacctttcctacctgccccccaacccccccacccctctaggtatttgcatccccccaaatagtacctatctgttgccaaagccagaagctggggtggcatcatggcctctttcctttaccttgtttcccaccaaatctcaacctgcctgccttctaaatatctccagagtcctccagttttcttcagcccagtgactctacctttcagaggctgcttagtctttggcctgcattcctgctgctaacttggagatctgcctgcctcctttctgtctctcaaatccattccccacactgaacccgaggcatcttcctaaaacacaagttgggttcccgcttcaccactttacatcctttgctgcttctccctgtttccttcagagaaagcctgaggataaatactcctccttaacgtggctttgagacccagcccctgcatgcttgtgtctttctccattgcactgctccttctccatatgccagctaaacagatctgggcttccttgacatagtcctttctaccctctggtctttctgcctggaatctttcttttctttcctttgtcctcaccctttttgtgcctaattgtttttttgttttgtttttttagatggagtctcgctctgtcacccaggctggagtgcagtggcgccatctcggctcactgtaagctctgcctctcgggttcacaccattctcctgcctcagcctccccagtagctgggactgcaggcgcctgccaccacacccggctagatttttctatttttagtagagacggggtttcaccgtgttagccaggacagtctcaatctcctgacctcgtgatccaccctcctcggcctcccaaaatgctgggattacaggcgtgagccactacgcctggccaattgtctttctatgtaacttctactgagagccctcccctgaccctcaaacagaggtgacccctccgaaggcttccataggagcccatgttcttacttggcgtgtaagtgcctgcaaagcctggcataactcttggcatgtagtatgtgcgtcacaaatactcaacaaaggaagggaaggaatgagcatccatggcttgtggaagaggtgttataaattttaaagcattcattaattttggttcttaacattgagcaacatagtctacaataaaaattgagccgggcatggtgactcacacttgtaatcccagcactttgggagactaaggcagtcagatcatcaggtcaggagttcgagaccagcctggccaatacagtgaaaccccgtctctactaaaaatacaaaaattagccaggcgtggtggcacatgcctgtaatcccagctacttgggaggctgaggcaggagaattgcttgaacccaggagacagaggttgcagtgagccgagatggtgccattgcactccaggctgggggacaagagctaaactccatctcaaaataataataaaaataataaataaaaattgagcaataactgttgagcagcaaagtagctcagttatatttttgagtgtggaagatgtgagcttccttctacacaatctctcgaccttttggctggtagacttttggcttgtcaccaccccagatttttctttaacaatgcatgtcctctgttctgttacctctgtaccccatgctcaggtactacaggagggtgctgaattgaaagaaataagaaacacagttcatcatatgtatagatttccatttttggatcaaattcaaagtttaaaaatctgctgttcttgggaggtcttgttttcttgaacacaaatgcccctgaatttcaactagagattcttgactaaagcactttctggctatttttagcccttacttttactgtttctaaaatgcaatgcatggtctatacatccatcgagcagacaaggttcctttttggaaggaataattctagtgagtcaaggaaatggttgagaggatagaggggacatgtcagatcagggtttgatgaatcagccagcccagcccgaaactgaaaagattatcagctgcatatttcacattttcttctccaagttgaccattaagaatggcatattatacaattgggttttttacagcatgtgaatcaacttgtgacaattcggtaggttttttttttctttaatcccatgaaacaaaagagaactagctatgattttggtctgtagagataaggagaaaggatcatagctctgtagctttctgctgacgcattagagaatttgaaaaaacagcagttttggtctttggatgtgtgtgtgcacgtgtacacgcatgtgtgtgtaagtgtgtcaggctgtaccttctggggactggtactgcaatagggtcagtgtggtaggtccagcagtccccttttatctggtctctgacatctctgggctctgattcaattcaaagaaactacaaaagaacacttactcagattctgcctcctgtgagatgaaatcatctaagaaatcaagaaaacgaaggaaaatgaaaatacgttcgaacatgcagggcaccatggggccctggagacttcatcacagagggtgctcaggaggaagattctcacttctacactagggaattttttccggaatgacccatagctctgctgtctagtaggctttccctgcccaagggaaggtccaggtttgggaaatactaaggtggaagcacagtgagtcatgtatgaggaagactcacaggtcctcaggggtgaccaccccttccagggtaagggtcagataacagaggctccaagggccaaatccacaaggctggatgccacctgtaaccactgacattttcttacccagacatgatatgacccattagcataacattaatactgaatctttgttaaaagtaaagttcgtaagaccaggcatggtaactcgtacctgtaattgcagccctttgggaggctgaggtgggtggatcacttgagcctgggagttcaagaccagcctgggcaacattgtgaatgccctgagtaacttaattttttcttctttttgctttgtctgtatcttctaatttttcttcagagattatatattacttacaagtttaaaaacaaattgtttttaaagaaaagagggccaggcatggtggctcatgcctgtaatattagcactttgggaggctgaggtgggtggatcacttgagcccaggagattaagaccaacttgggcgacatggtaaaaccccctctctacataaaatacaaaaattagctgggcatggtggtgtgcacctgtagtcccagctacttgggaggctgaggtgggtgaattgcttgaactctttcagcctacggaactgtaagaaataaatttcttttctttacaaaccacccagcctgtggtattctgttacagcaacacaaaatagactaagacaatagtattgaaggaaagactggagagacaaaagcccattaggaggtgatagagatagtccaggtgaggatgattcgggtattgaaggagggcaggagagaggtgaggttcaagctgaatccacagtgctaggagggaggtgggaaggtgatcatgaggactcaatagccttttgtccttaactagagctgagacggatggaggagaaatggggtagggagaagggagggtgtccctgcaggcacagaggaagtgaggatatgggggacacatgtacccacccttagtacacaaccagggccctcaggtggaatctgagggaattctccaccaaaaaacaaggtggtaaaccggtgaagagataaagctaggagcctgaccgcctgggattcagtcttcactctaccacttactagctacatgacttcatcaagtgacttgacctcttctgtgcctcagtttcctcatccatatattggagataataatagtgcctacctcataatgttgttatgaggataggattagattagttaatatttttaaagtatttagcatggctcctggcatgtagtaagctccataaaatgactgatgataaaaattgaaactagagtgtgagccccttgaaggcctggaatggatgtttaattggcttctctccaagagcctcacatagtgccaggcaggtatataaatagttgtcaaacgaatacacaattcaattttgtaaattattttttgactataccatgagttaaacagaacttagagggctttgtttcctacttatggaaaatgaccccacttcatttcaggttccaaataaccaacttttgttttgttttgttttgtttagacaagagttttactctgtcacccaggctgcagtacagtggtgctatctcagctcactgcaacctctgcaccccaggttcaagtgactctcctgcctcagcctccctagtagctgggactacaggcatgtgccaccacgcccaactaatttttgtatttttagtagagacaaggtttcaccatgttggccaggctggtctcgaaaccctgacctcaagtgatccccctgccttggcctcccaaagtgctgggattacaggtatgagccaccgtgtccagacccaaataaccaagtttataaagaaattctggtatgtaactatttcatcagatggggactgctgatattttcaaaaattccaggaactgcagtgccttgtacctacatgtgatggatgatgtgggaaagcatcaattaagaaacaaatagggcttaggaacagtgttgataaggctcgggctgtgtgttactggtgagggggtggtgggtgcgggggaagggtaatacttaaaacccagaaaatgcataaaacaacttagttttggatcttgaacaaaaattgataagatctaaggcccgaggactccatttggtaaggcgtgttttccaaaaggccctttcagctgtcatatcccggcaggagtataaagtggccctcggagcgggaaaacaagggaagatgaatgcaggcacagtatttttagaatgcattgttctctaaattctagaaacagccaacctagatgaaaatgtgttttcagagacacttttccactctttgtgctactttaagattgatatctagaaatagaaaactgtgttttctttgtctggtgattaaatttcttgttttttttttactcagagatgaggagggaccatctattttgggctactagggttggcataacagcatctttaaggcaacaggacacgggcattgtgggagggaagcagctaacatttagcttttactctgtggacttagcgtgtattttctcctttaatcctttccacaaccctgggaagttgctactatcactgttcccatttttactgatgaaaaatatgaagctggaagaggtgaagaaagtggatcaaagctgtatctttacattgctaaaatgaatccagagactatcactaagctgtgtgtcaatatacgtacagattgtatatatatttacctggaaaaaacctcatcaaacacatgtaatttttattttaaataaatcagaattttagcttctcatgcacacttgtaaagaagaattatgtaagttcctggtaaaagaccttctaattctgtaggtacaggacacttaggtgctattttgtaatccccaggaacatacagaatgaagaagcctcacaaaaggctgctctcacgtcagcaggagctgagtgaggcttgattcactgaaattaagataaaaataaagctcttttagtggttttactaaataaagagcggatacctgctgataataattagtgttcagttcagcctctttaaaaagccgctggtacatcaagtgtattaacatgcctcagtggggccaggtgcggtggctcacgcctataatctcagcagtttgggaggccaagaggggtggctcacctgaggccaggagttggagacgagcctggccaacatggtgatactccgtctctactaaaaatacaaaaaattagccagctgtggtggtgggcacctgtaatcccagctactcgggaagctgaggcaggagaattgcttggaactcaggaagcagaggctgcagtgagccgagatcacaccattgcgctctagcctggacaacaagagcaagactccatctcaaaataaataaacaaataaagtcttagtgggagagagttgcgtggccattgttcaacggtgtatatgtaagactgtgttctctgcagccctaccccctaccaaatgacttttattatgtgataacaacaataaattaccttttgttgagctcctacatttttcaggaatagtaccagatcctttgcttatatttttattattttaccatttacatgtcccaaaaagccctctaagggagagggtattatagccattgtacagttggggagaccgagggtctgaggagttaagtgaattgcccaaagctacagagctagcatgtggcatagcctagagttgattccccaaatattttatttttgtttattatagacattttcaagcaagcacaaaattcgagagatgagtatagtgaagtccctttatcactcacccagtcctaacagttatcatagtttaccattattcttttacctattccctcatccacatacttttttttaaagcaaattccagacaccctatcatttaatccacagataaaaccctaaggtagcttaaatgtcacattaacatttctctctttaaagctatttcctactcagcccaaccctttctttgctccccagtgcacatttcccgagtccatggtgcttattgtagtcgtgatgtctccatctctgtgtgttggcttctcaaaggcaggagctgtgccttccttcccccacatcctaaccacagtgcatagcactgcactctacactgagtaagcagggcctgactactgttcacaaaatcaagggtaggccaggcatggtggctcacacctgtaatcccagcactttgggaggccaaggcgggaggactgcctgaggtcaggagttcaagaacagcctggccaacatggtaaaaccctgtctctactaaaaatacaaaaattagctgggcatggtggtggatgcctgtgttcctagttactcgggaggccgaggcaggagaatctcttgaacctgggagacgaaggttgcagtgagccgagaccacgccactgcactctagcctgggctacaagattgagactctgtctcaaaactaaaataagataacaaataaaatcaaggataaatgctcttaaagacttctcaacttttacaagttgggggttcactattttcgaataatgccagaaaaacaagagaatctttgatgaaagaggtgataaaatgctccctcctcacctccagcttgctgcttccaccttgaaagcatcttactaaacgtacagcacagttggccaaaaacatgcttgggaaaccaaattgaaggtataagatgaggctgaatttggtttgaatttgcaaatttgagtcttagaattatgcctcaatttggttgaattggctccaagacagaagaaactgctttcatggagtgaattatgaggagctgggaagaccacattacccctgagttacaattcttcttgtgaatctttctatctgtagtttatgatttggtgaaaatgtagggagcttgggaggtagagtcagaaaacctatgttctaacccctccaccccctattctgactctaattcactgtgaccttaggcaggtcacttaaacctctctgagcctctgtttcttcatccatccattcagtaaatactactaagtgcctactaagtgctgggcactgggcatcaagtaagattgtttgtgtcaaagtaatttgtaaataaatcctgtaagaactattgatgttttccttgttaaaatgcaattattaatgttttcctggttaaaatgcaacctttggaggagagcactttgaatagcagtctatccttgtgggtgattcttagcattttagagctttgacagggaaaggaagggaaaggaagaggacacaagaccctgggatcactagagacaaatttggtccatggctgggtctgaggaggggtaattatatgggaaaaaagttgtgaagttagtccatacaagtcctgttctaaaatactaccatataattttgggtgtacaggagcccattcaaagcagcaaatacagtgaatcaaacagcttacacatactttgagcccattcccagcaatttatacaaatgtgccccttttgcccagacttcactatgcaatatatccatgtgacaaaacagcacttgtacccactacatctattaaaaaaagtttttttatcacccagtcctggaagttctctagtcattttcaccgtctctaatgattaattcctgttacttgtcgttgcacttgaagcccactttcaggatctacacctctccctgagctataagaccatgatctggagttccaattcaatacctatttcctcctgccccattttctaatttctacatttctggccaaccatgtttgtgttcttgtgctcctttgaggcatgaagtagagtaaaaaatattaaagacatatataaagctcccttaggttggagtgaagaaggaattgttatggacccaaatgggaattttagaactgttaaggagattacatgttaaacattactctataacaaacagattaatgaccttggaaagtctgggttcattttcaatagcatgggttaccagactcagggacacaagggtaacacagagatccttaaagcagcgagagagcgagtgatgctgcatttttgtttcattatcacagtggaagtctagggacagctgctacagagtaaacactatgctgggcactggggaaattaaaatgaatgagatgcagtctttgccacatgcaagcacaacttcggtgtggtctgtttgtgttctaccagacacctttattcatttctttattcattcaacaaacctggctctggggccttcctacagggtttggctttgagtctccaggcagtgaaggttttggaagaaggatatgatctgattggaatggtattttaataaggtcaaggactgaaggaatggcttagtgaagttagggcctgctgactagtaaatcaattaggaagtcagggaaatctcccagggagataatttgctcatgaaggaacatcatatattaaaacgtatactgttctctctcactgtgaaaggaaagggaaaatcaacaaagaaacacaaaatatagcactggtttttagaataatgctgtaggactcatttcaattcaggtatcaccaaatagaccatgtggctcaattctaatatagattttcagtccctcattgctggtgagaccaggctgtatatgatttctcccctgtgttcagatggagacatggaagaaaatgtgatatattagttatctgtaacaatattactacaaacttagtcttaaaacaacacacatttattatggtgcaatttttgtgggtcaggagttcaacattgcttagctaggccttctactacttcagggtctgacaaggctgcaatcaaggcgttggccagggttatggtctcatctgaggtttgactggggaagggtctgtttccaaacttacatgactgttggcagcattcagcttcttgtggttgaaggactgagggcttcagtttcttgttattgttggctggaggccaccttcagctccaggaggccactttcagccctttgccacatgggcctttcaacatggcctcttgcttctttgattccagcaatggaaagagttgcctcaaaatatgagtacataacccaatcttatgtaatgtaatcataatacataatcatgtgcatcctgtcatcttgccatgttctatatggctagaagaaaatcagtatgccagcctattctggccctacagggatgtgaacaccaggaggcagggatcatgggggacatcttaagaggccatctgctatgtgtaatgtttagtgacttggtgaaggctcccagaaaacattggggttgtcacaaaaccaccctgtgtttttgtacacacatgtaatccttgttccatgaaatcctgggaaattgatccagagtcttcccaccctgctaatccttcaggctgattgtttttagccctgctataaggttgaagcaaaacctgtttaattacctgttggctggaatcctggtggcagcagtagttggtattggtgttattttccttttccttttaattttgttttattttattaaatattatcttctttacctgaaagattttctatcttttatttgtttctaaatagtcatttgaggaaaattaacagaggcagacaagattccagacaatatgcttagttttcaggtagcaatttcaagcattctgtttattagtttaacaataagtcataagaaaagaagcttaacagttcttagaaaagctaatcctggcaccatgatggatttaccttgagcatatctttctgtctcaatttccctacctataaatccacagggtgcagtatccatactaacaagatattccaaagggaaataataatttttgagcataaactgaaaatcctacataatagaaacatatttgtattctgcactgtcgagcagaactttgccacgcagctttaaataatttgtcatgcactaaagtgccaggtactctgcttgttcttaatttccttttcttacagaatcttgccagtgacctggaaaggtagatattattctcttcattttgcaattgatgagtctgagattcatggatgtttaatgagtccaaggccatacagttgtgagtcacaattctgcctgattttatgtcctgttaacctgccgttgcactgggaattacagaactaatgccaatccctccctcaaattgccattcatgtattacttttcctgaaattagtggcagttttctagaaatcagaaggggcagaaagtaaagggaatcttcttcttatatatcattgctctctgagaaaaagtattatagaaaagccaaaggtcaaattgcatgatattttcactttacaatataaaaaacatctacactatggaatacatggaatataacgcagcattaagaaaaagaaaaggaaagaaagatggtgaaagatgaaaagattgccaaggcatactgttagatttcttttttcaagttacagaaatttgggctgggcatggtggctcacacctgtgatcctagcactttgggaggccaaggcaggtagatcacttgagtccaggagtttgagaccagcctgggccacatggtgaaaccctttctctataaaaaaaaaaaattacaaaagtcatccaggcatggtggcacatacctgtagtcccagctacctgggagctgaggcagggggatcgtttgagcccaggatgcagaggttgcagtgagccaagatcatgcccttgtactctagcctgggagacagagtgagaccctgtcttagaaaaataaaaaataaaaatggagttacagaaatttaagtatgatatcatttgtgtgctaagctaagccaccacagaacaattctgcttatttttcaaagatacatccatgcatagaaagcagtctgaaaggataacaccctaaattcattaaattgattctgagttaaaaccctaaactggttctctctgaggagggggcctggtggctccagtggcagtctaacatttaatatttaaagtttttacaaggagaaataattcatgtgttacttgtataactagaagtttgagggtttttttaagtaaaatattgaacacaaagtcagccaactggtggcatgactagccacggtcaaaagttggagctatttgtaagtcattttgacaataaagaaaaggatgaactaaaaatactatgtcaccaagatggctttttcctccagagatttctgtgtcagctggggctttgatgtctggccattatctgaatggggcgcctgctcagggatcagctatgaccaccctagggagagttccgtgatgagccatcttggggacagaaggatgagtgagcagctctgcttccttccagacatctctgctcttcaccattttgtcttagcttaggtaatcttccagggctacatgattgtagggggcaggggaaaagatgagggagttaaatgatggagaagagaagggtaccagaagaaactcttctttgaagttaaaagcattggtttctagacatctgctagggatcatttaatatccaggctgattaattcagctgggaagcagtctatagaagctagtatggattccattccttggtgagtcaaatcacttatttcttagaagaaatggcattagagcttaactgtttttctagctcttgcaaagcatgtaattgatgcaaaattagctaggtcccaagcaataagatccaagaaagatctgctagctggacaattttttctaatccacattaaaataaagacatatataactgttaaaataaaaatgtatttatacacatgcatcttacaatcccacatttgactggtgatgcatgggccatgcttggggaaacactgcaagagatgtgattagcctgggcgttggggaggaactgagttcaaattttgcctccataactaacttggtaaccgagaacttaaccttcttagccttcattttctcatctcagggtggacttactagtagttcctacttcatatggcatttttcagaattacttaagctagtgtctataaaggataatgtgtagtacctacaaaatgttagtaaaagaaaaaaagatcttttgcaaataataaaacaaatgccaagaccttgattaaatgtaacttctgcaaaagatgccatcttttgaggatggttcagtgttcaacttcttgttttgggaatttgtatgtgtatgtgggttttggcgctccacacacacactttttggtcctctttttattaatactttgactgtaattcatggaattacctatttcaaatcaatctgatggctgaaaaaggtaaagcatggaatcacagtgattacatagctactctgaaatgcatagaatcacacccaagaatttttctaattaaatgctctttgtgggggtgaggtctctgagtatgaaactatgtaactaaagacttagaaacatcagactgtgggtgcttatgtttaaacttaaatttttaaaatttctggttaactgtgtgcatagaaaagtgaagtttattcagctactcagcttgtaagtgactgccatgatggagaaagtgggagtgtgagctgtgcagagctgatggcaactaactgggtaagttatgtctaaatggaggacatggaagatctcatgtaagactaacaaccaggagcatgctatagctgaaagggggatttggttgaggaagcccacccaataagaagccagcaagttcttctcaccacctctttgaaatttctgcctgactagctggtggttgactcaagcttttcctgccattgctactttagggaaagatcccagccaaggttaatttttcatctcactcttgcattgagatgtcacagtgggcaaatctaggggtctcaataattcgtcattccgttttgacctgaacttgatcagtatagatgaggagccaggagtatttatctactgggggcaaagagaaggggttttccgtgtttttgcatcccaaaatgctaatttaaatattcttaggatcaggtgacatattctggtgcaaacagctttctttggtactgcttaactgtgtgtatgttaataactttgctgttttaatcttacagtttttaaaaaaaccttttctatctcagtaaatctttctaaccatgaaatttaataaagcagcattctagaaattcttaccaaagaaaatgaaaaatgttagtcttcatctcatgaaggaaatgaaattgtttttttaatttttgaacaaatagtattaatgttataatatgttagcaggtgaatttccaaatgcactcctggttgctctttcagccattcaggaataagatttgtcttctcagttttaaaattaggttcagagaagaggtccccagaaacatgagtcagggcagagatgagcttccatcttggtgtctcaaacaaggttttgttgattgtttatggtgcttactcacggcactgcgctgagtccctcagcaaacacccacttctgtgagagacggtctgtaaacaatgaactgtggctcagggaatgcatgttgtaatagagatattttaaaaagcagacattttatgggagcatacttggagcctcaaccttcttacctgtagagtgtggaaactggacacatctctgttccctttccagctttgaaactctgggatcctgcagaaatgcagaccacttcttgtcctagaacatttgttttgcaggatcattgaatagtaaatacaccattggatgctgtaaatatttatggtcccctaaatgggggtgttttttcctgttgttgactgttgttggctggctctcctaggcactgcatgcctttttcactgagtctagcagagaaagcttgtacctctcatttgaagaatgtctgggatggtcttaaaaagcaagttatttgtctcaaagtgctaaaaatatccacctaagaagaaggtgggctgccagagctccgtctgatcctccatttcctcttagtaacttgaaggaaaatgcagaggatgacacacggctaagatgagataatgcctgggatctgggggttgaagtcattcccaggaggattcctgtcagatgaaacgtgtccgggctcgagagcaccaggagccttcgggattgtaccactttctttcccagattttgcagacctagggaccagaccctcccttcctcaggtgggtaaaaggtggtaatgtgatcctgtgttgtgagctgtcaggttctaaaggagggtagctttctagggtcaaagcatccttgcaatgatgatttgatgcaaccagaccaaatcagtgaaagctcagctgccagaccccttgagatttggggatagggcgcagagtgtagacaatttgattagacaaccaagacctcattcttctttgtttcgttgttttatatttttaataagctttcattttggaataattttagatttacagaaaagttgcaaagataacacagagagttcttatgtacctttcccagcttcccctgatgttaacatcttacataacacagtgtatctgtcaaaatcaggaaagtaacattggtttagtactgctaaggaaatgacagactttatttggacttcaccacacagtcttctttaaaaaccaaaatgttgttctgtgagttacctggagtgtaaaataaaataaaatgaaaataaaaaaattcaaaaaaacccaaaacgttaaaaaaactaatgtcacacacacatcacaaatactcatatactaatacacaagaatatatatatataatccagcctttaaaatgtgtgtatgcaaatgcacaaatgtatctggttatgtaaatggatattatgttctcttgccttttgagacaggttatacaaaaaaaaaatttttttttttgagacaaggtctcactccatcaccctggatggaatgcagtggcacaatcacagctcactgctgccttgaactcccaggctcaagtgatcttcccacctcagcctcctgagtagctgggactacaggtgtgtaccaccacgcccagtaaatttttattttttttatttttgtagagataggggtctcactatgttgcctaggctggtctcgaactcctgggctcaaatgatcctcccaccttgttctcccaaagtgctgggattagaggcatgagccactgcaccgggccaggttatacaaattatcgtttgcctttcttaaatgacacacaatgaccatctgtcattgtactttgctatagtgtgttgatctcttggtattttagggctgtttggtcccgggaatttgtgctttttgagttctcaggtcagctcgtcatagtatttctagctcccctctcattactaagctgtcagctgttgcttctctctgctatcagcgtttttgtctgtgcagacctccttcccacatctaaactgcagctgctaactgttaagatgatataactatgtactggggcttcttagaattatggaaagaaaagtacctgtaaatgaggcacatggagaacattactgtgtgtattttatgactttttaaaaagcctttttattatcttatttcccagttttggatcagattttgaggtaaaaccaatgaaaagtgaaataataatttaagtgatagaatcgtattttaacagctaaaaatatgggagtgaatctctgtcttatgtagagattcgtacaaaaaacattcaccccagtattatgttcttccatgcatttaaattatcatttaatttggtaaacattgatctatgtaaaatttttaattattcccccccacagtattttttacatactttacaaaactgtttattgtagaaaagttgggaaatataggtaagttgttttttataccattattgttaaaggctacataatgttacatgttatggctgtatttagcccatggagtatgatatttacattgtttttatttttaaaaaataggtattttcctgtgataaacattcttacttttgcacacagttttcttctgcacacatccaagaggctgtattcccagcagtggaattattgagtcaaaaattatcactttgatggttcttcatggctacttccacatttagcagtgtgttagaaatatgtaagtttctggctgctggaggaagcttgtaatcctgccgttctagcatgttgttcaggtggctgtgtgcacatgatggcacaggaaacagccctgacctgaccagaatcgctggtcatgtattcatggtagagtgaactcaaacagtcagaactaagcattttcaggtaacttattgactcctgggaggaaaccgtttgtcaggacctgccgcagtttattgtgacctcatctgctgaaggcatggccttggagtggagggtttacaaggaggcaagcttccacaggccctgctccatacaacattttttgccctccagcttttagttgcttcatgaaatggtctatttcttgaataatcgtcctcttcaattcccattggtaattattggaccatcttttatcctcatgttttctgcctgatggactgtcaggcagagcttcttggcaagttttctagccaattaaagatggaagactaattccattgagcagtcaactccagttagctcagctggtgggattgtggcgttaatgcaggaccacaagacaagggtttgatcctacatgaactcggtcaaccgtgctcttttcagagtatggtagcagagtagaaaaacgtctggactctttgcttgctccctccccttccttttaagtaaagtctcttttatttagactcttttctgggttataggagtcaccatttttttaatcagcaccaatctttgcaaaagctaaaaatacattttctgaacctcctgactctgatcctgactcttcactttctttaggaaaccatttgattatcaaataaagtgtactttctgcaggttctgcatccttgaaagcatgaattcatgccacatatttggagaatgggtcttctggaagagggtgaaataaagattacgtaatgcagactgattctttcacatcatccttggcctttacacagtgactttttgttttgttttgagacagggtctcactctgttacccaggctggagtgcagtggcacaatcacggctcactgcagcctcgacctctcaggctcaggtgatactcccacctcagcctcctaggtagctgagactacaggcatgcaccaccatacccagctaatttttgtatttttttgtagagatggggttttgccatattgcctaagctagtgtcaaattcctgggctcaaacgatcctcctacctcagcctcccaaagtgctgggactacaggcgtaagctactgcgcctggcccacagtgactttttgtatcttgtctgattgttgtataaaatctttagaactggtttgtatcattcagaataaggcaaaacgagaaaaaaatccaggtaggcagggaatgggttgaaaacgctttggcatcccaaacacgattgtagggactctgtgggtgtgtgagtgaatgagtcactgaaaaaatacattctgaatgagtgaatgaggcaactaattaatctcatggtgagatttgtaatgtttcagaactaatttttaatttaaattgtttccccaactatatcccatttcccaaagaataataatagattgaagttagtagagcatttctgtgcacaaagaaagtatgaagaaatcctgaaacacttatgctaatgctggctttcttccctaaaggaaagagatgaactttattcattaggagtttttcatgaactattgatcgaaaatacacatctgtttttcagtctgttttttccaaaaattggtaactcagcctcatttggagctatctctgaaggataaggaaagaccaggagtgataaggcagcttgcattaatcagatgtgaacgggataccttggcctgctgaattgtgtcacgaaggtcatttttaccacagaaatactcatgctaaacaccaacagtttttctaagagacatgatttttctcccttttgggaaactgaggaaacaaagacttaagtcatttcttgactctctgagaaatcctttttccacgggaagtctgtgtggaggtgcatgattcaatttttgtattcttttttccccagaggtcaggggtgaaccatgggtgactcagccacagggccctttatttatcaggcccattttagctatccggcctggggtgtgttggactttatgggtcatgttctgtgtcgtatgaaaagggggagagaggtggtgcattttaagtctttctgctaaagctaaatagttactctgaggaggccattcagtccttccacgtggcttagacctttggaagtggagatagcaattaattaaacaattaaatcatactctgaattaatgctgttatttagcattaattcagcatattatttagcatgtcttataattatttaattttaatgcgtgaaataggggtgtacacgtgcttttaaaaagcctaatgttaggctgggcatggtggctcacacctgtaatcccagcactttgggaggccgaggcgggtggatcacctgaagtcaggagttcgagaccagcttggccaacatggtgaaaccccatctctactaaaaatacaaaaattagccgggcatggtggtacgtgcctgtaatcccagctactcaggaggctgaggcaggaaaatcgcttgaacccaggagacagaggttgcagtgagccgagatcacaccattgcactccagcctgggggacaagagcaagacttcatctcaaaaaaccaacaaaacaaaacaaaacaaaaaaagcctaatgttaaaattatgaacacacaaaacaagataatttagagaatttatatttagaatacttttaggtaataattcatcacaattcatctttaagtaaaaagtaccagaatgcatttattttgacatgtttcaaacttttacttctttattatactagcagtatgtggatgttgtagaaaattataaaataaaggtaaattaaagaaagactattaaatcatcattttgctactctttatattttggagtatagccctgccaaatgtatgtttacatggacacacaaataggatcacatgatgcacagatactgctttgtgtcttgcttgtcttattttggtacacatcagcattgttcctgttcatatttatacctggatattgttattctttttttttttttttttttgtaagtcagagtctcactctgtcacccaggctggagtgcaatggcacaatctcagctcaccgcttcccgggttcaagcagctctcctgcctcaggagaagctgggattacaggcatgtgccaccacacctggctaattttcatatttttagtagagacagggtttcacaaagtttgatggtctcaaactcccgatctcaggtgatccacccacctcggcctcccaaagtgctgggattataggtgtgagccatcaggcccgaccacgaccttattattctgaatacatacatagtatcagattgtttaactgggatatagcgttattaaattaacccaccgttattagatatatagtatgcttctagtttttcttactatgaacctcatcttttacaataatgatacctgctttctacttcatacctagtgccaatgtgaaacattttccatgtagtagctctctttttatttaattaaggtaaaattcacgtaacattaactattttaatgtgtatagctctggggcatttaatacattcacaggccaggcgtggtggcttacgcttgtaatccgagaattttgggaggctgaggcgggcagaccacaaggtcaggagttcggaaccagcctggccaatatggtgaaaccccgtctctactaaaaaatacaaaaattagccgggtgtggtggcacacacctgtagtctcagctactcaggagactgaggcaggagaatcacttaaacctgggaggtggaggctgcagtgagccgagatcacaccattgcactccaacctgggtgacaagagtaaaaattggggggggggaaacaaagaatattggaatattgaaaatccagaaaaattgaacagttatccagcttggtgaatgtgtgagtgtgatatgcactgggggctgagtctcctgaagtgtgatccaaatttgcatttgcttttccaaacatatgttaaaaaagaaagtgaacatgtggtgagattgtaaatgtgcatattctgtgatcctgccttataaatccaagtttgagccttagagaaccaatctcaggaatgcagaaggaggcgtgtatagggaagtgcgacacattttgtaacagtgaagaaaggaaaatctgtaaatatccataaataagagaacagataaataaaatgtggtgtagggaaggctggatacagttcagctttgaattagacctatatacaacaacatggagggagctcaaaaacaatgctaagtggagaaaatatttatatttacacttagaaaacaatactgcacactatttgtagatgcctggaataaatatagagttaaaaagtgatagtctccaaagaatatatacaaatggccaataaaaacatgaaaagatgctcagttgcagttggctttagggaaatacaaatcaaaaccacaattatccctcatacccactaggatggctatttttaaaaagaggagggaaataaaaaagaagaagtgttggtgaggatgtggagaaattgaaacccttatacattgctggtgggaatttaaatggtgcagctgttgtggagaagagtttggcagtacctcaaaaagttaaatatagtgttaccatatgacacaactattccactcataggtatatacccaaaagaactgaaaacaggtactcaaacaggtatttgcacatggatgttcatagcagcattattccatcaattgaggaatggataaacaaaatagtatatccaaacaagggaatattcttcaaccataaaaaggaatgaatactgatgcatgctacaacatggatgaaccttagacacgctatgccaagcaaaataagtgagaaacaaaaggtcatatgttatttgattccatttgtatgaaatgtccaggcatttcatatgcaaatgcaaaggcaagtgcatagagacagaaagtagattcgtggttgtcaggcactgaggggaggggagatttgggagatacagggtttctttttggataactgagatgttctggaactagatagtagagatggctgtacagcattgtgaatataatgatcaccagtgaattgtgtgctttaaaatagttaaaatggtaaattttatgttatataaattttatctcaatagaaaattttctctaatgataattttctgtaatgaaatggactggtaggatatatatctattccatgataatagttgtcactgggggtggccaaagatggaatgtgggactgaggtggtgggaagaggagatgttagctatgctggtaatgttttatttcttttatccattaaaaaagccctgggagagtgtatattcagggcaacttgaatctgtgtttcctggttacaatcctcacacttggcctaagtaaaccccctacttacatatattttttaaagccctggaagcaaatttaacaaaatgttgagttgttaaatctgaatggtaagaatatcagtatttattatattacccattgcatttgctatgatttttcaccttttttgaaaaataaatcacagcaaatacaaaaggcctgggtacatctgaaatgggcccaaggggcatggggtcaggttgaaaagagctgcctgcttgtccagctcagagccctgctttgcctgctaagatcccactggatcctggaccctctagtttgtgcagtctttctgtatagcctccactggcccctctcgaccaaagtcatcattatactcctgatttaggaagaacgtcaaagttctcaagtccacggtaactcacgatcatacctttgcccttctgactcttccttgagtctagacacaaatcctcttgcctgttgttagagaaccttctgccaccaagttcacccaaagattgctcaaatttaggtccagaaaaaaatggaagagagccatttctgtttctgtcaacatggtaactggttgatgtggaactggacagaagaccttgacctttcttaaaatgttgatcatgttttctgaacgtacacaccagtgtgctgggaagagatcatctctgattaccaggcctcataataactgaatgacagatggaaaccaaagattgcttctccagtggtctagtgtagatgccagcaaactgtagccaagaatggcccactgtctgcttttgtaaataaggttttattgtaacacaaccacactgttatttatttattgtcagtggctgcttttatattgcattggcagaggtgaatagttgcaacagagactgaatagtccacaaaacctaaaacaattagaatttttccctttacaggaaaagttttccaaccctgatggtggttaagaacaagggctcttaactccaaatacccttggaaggtaaataagcatggaagatcttcttattttagagtaaaaatgacactgagaagcagagaaatgaaatggaaagtcaagatgacaaagccagttacagaatggaggttaagggtgtagactctggagttaaatgccatttactcgccatacggccttgggtctgttattaaaacatagctgttgcctcaattctaaaagtgttcttgagaagagtaaatgagataacccagttacttcatcagtaaatatttattggactccattctgggctgggcactgtttgaggtgttggtgatgaaacagcaaacatgagggacaagatctctgtcttcacagagcttgtagcctaggtggggagatggtaaataacagcaaatcaaccaaggacacagtccagtcttgaggtggctgtgactggggctgggaataggaggtggtggcaggggagatgagatcagaagaaagatggaagttgagaatctcctatagctgggaggtcaggaaagactctgaggaggggttatttgagctgatgcctccatgacaaaaaggagccaatcctgcagagatttggtggcagaggaaacagccggcacaaatgtcctggcctggcaacaaggtgccatggtcaggagggaaaggacactgtgctggagcatcatgggtgacgaggagagaagcaggaaaggggggctgagaggcgaacagcaccagatcccgcagggcctcatccagttgtggtgaggaattgggatttgtgcagtggaagccagtggaggtttcaggcaagagagtcagtgctaagatctaggttaaccattcagaatatccttctggctgctgtaatgcagtgagattgcattctgtaggcactggttgcagcagggagaccagttagcaggtttattgtactactccaggtgagagatgatgacagtttaggctgggatagtggcagataggcaaggtgaagagaagtagttggataaggtaacactgttggaagattgcatgaaatgtggtaatatgtgggaaatacttagcacacgggccaaggttgtagtatcatcagcctccctatcatcatcagcactagcaccaaccatccccaccagcaccacctccaccatcactccagccatcatcgtcactgttatcaccaccgtcaccactgtcattaccaccatcccatcattatcatcttgggagagacagtgtagcattatggataagagtatatactcaagctatactacttgtattgaaaccccagctctgctacttacaaattctatgaccctgagcaaattacacctcctctctgtatctcagttacctctgctgtaaaatggggtgatcgtagtattttccttataggacattgtgaagtgccataacacgatcatcggatagtaaatcctaaactgtctgttgctattatttggggactggtataaggtaccatgcttggtagagagttggtgaactttgctaaagtcctgacattctgtggatatcctccttagagactggaaacaaatccctgcttatgtaacccattgactgatgaggctgatggtgagggctctctccctgacccctgaaataccactgtttcagagagacaagacagcctgctgtttgtcagaacattttagcttcaggattttaaatcagcattccaaagatttaaaggcaaagaaatatgtgttggaatttccacagaaaagagtgtcaaggttctgtgcttgcttcagatagctctgtctgtgggggttggcagatgttcttcgggaggcattattacctcttaaagggaggcttgggaagggcattttatttctccactgtaggcagattctcgtttcagctgtagggctgcagggatagctagagcttcctgagtattccaactatgggctttgaacaacctgggccaaatgtgggggcattgctgtctctgtcatgccttctacaggtaggctgctggagccaggggactagcttccaggaggtgagaaaagccctccaattgtacactcaccgggagctcagatagcttgcatgagagcccacgttcactgccaaagacatgtcttccgcaggccctggatggagggcaattgtacaatataaaagtctgtcccaggctgggtgtggtggctcatgcctgtaatcccagcactttgggaggccgaggtgggaagatcacttgaggtcaggagtttgagaccagcctggccaacatgatggaaccccgtctttactaaaaatacaaaacttagccaggcatggtggcatgcacctgtaatcccagctactcaggaggctaagcaggagaatcgcttgaacccgggagacagagatcgcagtgagccaagattgcgccactgccctccagcctaagcaacagagtgagactccgtctcaaaaaaataataataataaaaatgaatacattaataaataaatgtcccagagaaacagtggtgtgtgtaccactccacccacaaccatacaagggatctctttaacttttctatgtaacaaaaaggaagaccagtagcaacacgtggttaaagatgtgccataacccaggatggatcttctccttccactgagaaacaggctcccacagatggcaggttttactgctggaccagagtcagttcttacgcctgagggctgggacttttagaactatggcaactctgggtatcttttcttactacttagctggacaaattgtttcctagcttttaaatgagggagagacaggttgatatagtataatgaacacccaacttggtttttttggtttagtttagttttgtttttttgagatggagtctcactctgtcacccagggtagagtccagtggcgcagtcttggcccgctgcaaactctgcctcccaggttcaaacgattcacctgtctcagcctcctgagtagctgggattacaggctcctgccactgcgcctggctaatttttgtatttttagtagagacggggtttcaccatgttggccaggctggtctcgaattcctgacctcatgagccacccaccttggcctcccaaagtactgggattacaggcatgagccaccgtgcccggccatgaacacccaacttttaaagccagtcatagatggagtaaaatctaaattttaccatttagtagctgccacgataagcaagtcacttaacccttctgagtctcagtttcctcatctgtaaaacaggaatagcaatacttacattcatggttgtaaatataacaatgtatgtaaaatgaaaaatcttactgttatagcaatgttgaattttttttttcctggtgtacttcacgtatatcttggcttgtgagtagtacctgcaagatcttgaggttagggtatgccttttttttttttttttttttttttttgagacagaatctcatgttgtcacccaggctggagtgcagtggcatgatcatggctcagtgcagccttgacctccccaggctcaggtgatattcctatctcagcctcagcctccaaagttgctgggactacgggagtgtgcgaccatgcctggctttttttttttcttttctggtttttttttttttttttttttgtagagacagggttttgccacgttgcccaggctggtctctgaactcttaggctcaagtaatttgctcaccttggcctcccaaagtgctaggattatgggtgtgagtcaccatacctggccagggtacgctcttaattttcaaatgtctgctttactagcaacaacagacatttactgcgcacttggtaagtgaggctgtcactgagtgcattcatgtgcatttaatcctcgcaacagccatgcaaggtgaagattataatcccccattacacatgaggtttaagcaggtgaggcagcttgcccaggtcacaagcaagaaagtggcagagctgagatttaaacctggaccactcagttcatgcccttaactcataaacaccctgctatctcttaaaatgttcatgcccaataattgacattgctccttgtgatgttgtaacatgaatgagtcatacagagacagtggttgtcctttgcttcttgatttctaggaagtctttatatattacagagattggtgctgaaatggatacgagttgtaactatattttcccagtttgtcatttgtctttgcttatattttcattgttgttcttgtttgccatgtaaaagtgtttaaagtgattttatctttttatattttaggatacaaattttatcaatcttttctggcttccggactttgagtcatagttagcaaggtctttcctacactagggaaaggcccatcttcttctcttttatgttttcatatttacatttacatctttgatgtatttggtgcttatcctggtatacaatgtgaaaaaaaattaaaaaataaaaaaacactttttaaagcactcaaataaaattatcctatccaaatgtggtcagagttggcatatgaagaatatttggggtagtgaattttcatttaagcaaaaaagcagatttattggtaccattgggtgacaagcagtgacttcttcacagttctagttagaagacctttagtctgatactttggtaggggttttccatctgctgagctggtaaagtgtaaaatgtgaggttcaggagtgggcaactaaacaaatgaagcttttggaggtagctttggatacttatgagatccctgactccccatgccatcagccttcaaaacctaacctgtgaaacatccttgacattttcctactttcttctctttgatatcgttatgaaataattccttagccctcatgggtttgtttttggccaaagtgtatggctgtatcaataggttattatgcttgtctcctagtctcaaagagcttatgatcttgttgagggaagcaagacttagatatataatataaatcctgaatagtgcaaaaaagtaagaaggcagctactcatttatgtggtagagtctcttttgtatatatttgaatcaaaatgcttctagttgtgacagaaacatagctcaaatttctttaagcaaatagagaatttatgtttaggtaacagaaaagaccaggtgtcatgcttatgtaacagtcaaaccttcaggcatggctggatccaggtgcttatttttgcttaggaatctctttttctcctcacttctcagctttcatttttccttgttgctttcattctcagatatgctctccccttctggtagaaagatgaccacaaacaatgagtgccaagcttacccccttctaacttaagggtactttcttgtctagtttctcttgcaaaaatcccaagcctggttctcatgcctcttcctgaaccagttactagaaggaactgaaccagttactagaaggaagggttgctgattggtcagtcctgagtcacatgtactcccaaagaaactgatagcaggctcagtcccattttaaccataagctctgagaattggggagaggcagtttccctaaagaaagttgtagagccatgatcagaaaagggaggaacccaagctgagtgagccaaagccccagaatgcaccgcagtatgagctgcttgttcttgaagctcttaaataattggctccaggtggccagcatcacaaacaatgaaagtcttgaatagagtagatggactctgttaagcctataaaaatgaagcctcaccgagttgctgtcatgtgataagagcaataactttagtcgattctcaactgcattacaaaataaaactaaacaaacagaaaatgttgctgcctattactgatgatgggtttctgagatcctaaatggaatttgtcagaaaagctatcatcatgtaattggcatttgtcaaataccaaatcccagcagaaaagaacatagagagggattgtttccctcttcccaactgctgactatagtttggaaaaagagtgaggtctcaaattgggctggattcttaaattggtgcttttgtgaacgtcattttagaactcattccacacctgaatattctatagcttgtgaagaatgtggcgtggagtgcaggggtctctgtaaatggagtggcatggctactttgttggctgtgccaggaatattagctgacgtttaccatgcctggcactgtgccctgtgccttcactgcatcatctcatgcagttttcacaatagccctatgagggaggtactcttttcatccccattttataggcgaggaaactgaggctcagaaagattactcactcacccagggtctcagagcaaattactggtggaatcagaatccagactggggctgctacactccagtatatggattcctaacagtgctgcataattaactggcttgtgtcaccctgaccttgtcacctcacagagtttcttcactcttttttacaggtatacatcgtttaacaaaatctttaaacagtgatgccactgaagtgttttactctgagaatcctcttatatcattagctcttaatgatgggctataaatgaactcctagatttttctaatccattccttcccacagtttccagaaaacaccctaaacaattgctaaagtggactggatagtagttcattcctctcattttatctttaggaaagaaggcaagcacgtggaaagctgaccaagctggtcatcagctctgaacttaataattgccaataatcttcaaaaacagtattgagctgtgagacctggtaattatatactagtgtgtaaatggttcaaaggctaggcttttaagcaaatttgggtttgaatcataatcctgtcactctgacctcaaagaagtagtagagcctgaccgaatctcagtttcctcatctataatgggagtcattagaaggattgagctctaaaggttgtcctggggattaaaggagatgatacttacaaagtgctcagcacaatgctgcccctaattgtgatcaaaaaagcctggctgctagtaaagcaaccatttatgattactattactattgttatgtcccattcttactccttccccctccaaaataaataccaccacaacaaaatctccatttttatcactgacattttgtaaacatctttttctttgcagtggtttgcaaagcaccttgcaatttcctctcttcttaattcctggaattctgtttgaacttgaattgcttaaagctctctgttaagcaaactatctcttgtgttttttcctctgatgtccacaggctttgaaacagtagcttttccataatctttgacaaaagtttgcactaactccctgaaggactggttttagtacagccttctcgtccatctggctcgttctgttttttttttttttttttcctttcctcaagatcttttctctttgtttagttttttaaaggggaatctcttgaaagtctcctctaacatattcttactccccttttcaagattaagctgttatcttggtgacaggtactgacaaataccacatagactcacaaatggtcatgtggtttggctcacagattagtgcctttttcaggtgataattatcccctgggcagttacaaaagctttgtcataagaagttgattatttattgcaaccctggttctggcagttaaaataacctggggtctagttatttggggttttctttctctccccaaggaacatctctggaattcatttatggcaaaagaaatacacaagggcacatatcagctttttaatcaagataacctcccatctgtagagcatttcatagattccaaagcacttccaagtccacaatctcccagtgaacttgattctgggagccagtcagatgtgtctttccaagcaaggtgaagggcaggaggagaaaagtgagaacaggaggctgggctgtggggttggattttgaggtgattagcagtctggtagatgcagttaggatatgcctggctggaccatgacaagatggagaattggggctcctgctttctggtgactttttcagtcatgctaataacaaatgacctgtgagaggatttcacaagactcagagagaacttcaatcattaaacaagcctttatagattcatttgagctgttgtctttttttccctcttatatttaagacatacatttatattgtaacattttactctgcatctgctgcaagaggaaactataggataataatgattgcttcctgatcaaaagtaggtgaattcctagcagaggtcattggaaagatacatggggaggaaaagtggaatatttcttcttttagttttggtagtgttccaaagaagaagaaacaaatttgaagagactgatggtttacaatatttacggaaacaccactaccaaaatgccttggttctatcagcagctgtgtgcacctcagttccattacctctcccctttttaataaaaacaacataaccacatggcccatcattgggagaccttccttctgatacaccgtgatttttttttttttttttcagagtcttactctgtcaccctggctggagtgcagtggcatgacctcggctcactgcaaccgccaccttccaggttcaagtgattctcgttgactcagcctctggagtagctgggattacaggtgcctgccaccacacccagctaatttttgtaattctagtacagatggggtttcaccgtgttgcccaggctggtcttgagctcaggcaatcaacctgccttggcctcccaaagtgctaggattataggtatgaatcactgcacccggccacaaccgtgatttttattttgtgtattttccctgccaagcttttccacatgtatatttcacatatatatatacatataggtgccctcataaacagttttcatcctgcttttcattaacttagcatgttcccattttgcttggcttcatcagtatacttgtttatgcagtgttcatgcagtggatgtcctataatctaattaaacattccctattgcctgacatttggatttcagggcaattagtgcaggactggaaagtgtgggccctggagccagcctgacccagatttcctgctgtgccacttcctagctgtgcgatcttaagggcttgctttcttcatctgtgccatgggaatgataatactttcctgaaagggttgttcagaggagaataacgtatataaagcatttaacatagttcctagtacatagtgtattcttcatacttagtagctagtctattattatttctaattatcactatttagatgacactacactgaaaatcttttcttcttttagattcttttcttttcttttcctcgcttctcttctcttctcttctcttctcttctcttctcttctcttctcttctcttctcttctcttctcttctcgagacagagtctttctctgtcgtccaggctggagtgcagtggtgcgacttggcttactgcaacctccacctccccggttccagcgattctcctgcctcagcctcccgagtacctagtactacaggcttgccccaccatgcccggctaatttttgcattttcagtacagacaaggtttcacaatgttggccaggctggtctcaaacttctgacctcaggtgatccacccacctcggcctcccaaagtgctgggattacaggtgtgagcccagccattggattattttattttggtaaagtcacacatgtagagatattgggctaagatatttgcatatttgtattgctcttggtaggtattgacatctctagatatcacagtagtttttactgtcatcaatggttctacacatgccattttcacttataacctcaatggcattgaccaaccaaaaatgataatttttaagttggataatttagtgttaaatatgatatctggagaaactgtaccctcaccagcatataacaagaaattataactttctaagttgaataacttagtttgttaatcatgataccttgtgatctgcttatactggaaaagtagagaggatagtataattagcacctggtcaccatcatccagcttcaacaattactaacttcttcccagtctcactacactgtgtttttaggagtattttaagcaaaccttggccatatatcactttactcatcagtactctgctatacctctctacctgataaggaccctattttttttatttatttatttttttttgagacagggtctctcactctgttgcccaggctggagtgcagtggcccgatcactgctcactgcattcactgcagcctctgtctcctaggctcaggtgcctcccaggtagctgggattacaggcatgcacctactaaacctggctaatgttttgtatttttttttttttgtagaggtggagtttcaccatgctgcccaggctagtctcaaactcctggggctcaagtgattcacccaccttggcctcccaaagtgctgggattacaggcatgaaccaccacttttttttcataagtcaccatcccttatcccatctgacaagattaacaataattcctcaatgttatctaatattcagtccaaagttgcatgtcctcatattcaaattttacttcagactgcacatttggtgatactgaagaattcttgttaatttgtctcaaagacgtccttgtacagttaatttgtttgaatcagtatcccaacatggtccactcattcctttgtttccttcttttttaagagagaaggtctttactatgttgcccaggctggtctcaaactcctatgctcaagtgatctcttgcctcagctttccaagtagctgggactacaggcatataccactgtgcctgactggtccacccatttcttatcattgttattgtgaaaaatctcactgtcccccccttttttttaccctcttgctgaggaaaccaggtcatttttctggcagaatattttctagccaggattcaggtgtgctttctcattatgtgttttaatgttttcctctatccccgttttctgtaaactggtgagtagatctggaggtttgataagcatcttccttaattttagcatgaagttattttgagggcacagcacatccttacagtacctccctgggtagagtcttatacagctgagcagataccagttgctactggcctcccctggcagtagtataacagcacaaaaattcaattgaccattaaactggtaggtcaataaaagttgaatgtaggaataaatgatgacattagcttaggctgagtgcagtggctcacccctgtaatcccaacattttgggaggtcaaggggagaggatcacttgaacccaggagtttgagaccaacctgggcaacatagtgaaaccccatgtctacaaaaactaaaaaaattagctgggtatggtggtgcacgcctgtagtcccagctacttgggaagctgagatggaaggaatgcttgagcccaggaggtccaggctgtagtgagccacaactgtgccactgacctccagcctggatgacaaaatgagaaaaaaaaaaaaagttgcaccagatgcagtggctcatgcctataatcccagcactctgggaggctaaggcaggaggattgtttgagcccaggagttcaagaccagcctaggcaacgtagtaagacccccatttctacaaaaaataaataaataaataaaaattagccaggcatggtggtgcacctgtagtcccagctactcaggaggctgagatgggaggatcacttgagcccaggaggtcaaggctgcagtgagccacgattgcaccactgcactccagcttgggagacagagctagactctgtctttaaaaaaaaaaaaaaaaactgccacctggtagaacatggttaattaagtggtagtaataagaattgttagaactcaaaagaataaactagctccacagggctgggttgacctgggaaagcttctcagaagaaaaacttggtctgagacttgaataatgaatggtattttaaaacatggagaaggatgagggagggactattctggacctgagttcaaagatacacaaagctttttaaatgtcaaccaattggtcctcttatgttgacagcccttgatacataccttctgtgccttttcctttcttttgttctttaattcattcaacaaatatttattgagtgcctattatgagtcaacctttttgtggcccggggaatatgttcatgaggcagcctagttttatggtaaaaacatcagctgggaatcagaagactttagtcttctcttaagtcctgtttttagaatacaagtataaaaaaattctttaagtttattgttgctgtcagtatctctagatggagactttggcagctcagacagaggatgtagcatactgtcacctttcctgggaagaaaggacttctgctgtttgaatgaaatagtttttttcgttaccttctttcctctctctttattctttcttgtgggagcactttatcctttgagctccaaaaacaaagctggaaacccatgaaacaatatttgccacgaccctgggcaaagatacaaatgaaaacaagcagaattctttatcagccagacagttcacctttgttcatattccaagcgcgtaggatggcagcagggggtgcagggggaggtttacctgtggttatcctgctgaaagaggtatgctcattctcacgaaaaagaattgatcttgagactgaaaatggcttatggcagggtgggtggctgagaacaaaagcaattgttagcatttttgagatattcatacatcttgagcagcagctcaacttctatcagtttgatccaggtcttttttcctttgaattcagttctatcagcatctattgagtgcttgctgtatgcaatactagtcatttcaagaggaggaatttagcttcctttcccattatctccaccagccccctcactccagaagcacctcaaataagcttaccagctaagcatgtacactgtagtcgctgtgcaaacatagctttgagatggccaccctgccacctcccacatgactccctgaagtccttttcttctttgtcctctcctgtcacataaaattcagaattttcaggagaatttcagaattttcagtagagtttcagaattttcaagatagaagggaactgagggtcacccagttctgtttggtaacaaatgtgttccacttcttcccctagccagagtcccaggacagagggttagctcattatgtctttggctcctcttttatccctaacctctcgggtataaaatgtaagtgattaatgttccacaagacttggactgaaaaactttaatccagtacattctgtttgatcaaaacagggtccaggaaagttaaatgacttgtccatagctgccacagtctgtgggtaaacagggaccaaaacccaaggccacttgatcccccatgcgtggccttcctataaagccacttgcccatggtgtggacatgattgccctgtgggtacggggcatgctggggccaatgacacgctatctttggggaagggtgtagctttgtggttaagaccatcaacgttctggcagactaagtaagttctggcatggctatttagtagctgtgtgatcttgagcaagttacttatcttctctgagcctccatgccctcatttatacaacagggcagtaccctcttcagcaggttgtgaggattcagtaaggtaatatatgtcacatgcttgtcacaggtctggcataaggcaaatggcacctaacattattttctagcttttcagcactcaggtgtgaacttcccaagtcataatggttctttctgttccagctgaagttaactcaaacctgtctttattactccatttgttgaaagagaatctgatatggaactttttgcttggatgatgtgccacacatgtagtctactgttagaaattgtttaaaaatctgagtttcagagctgtctttccaactggttggttggttcctgggttttgaagagattcgttcctcctccagacttatctcctcgctctgtttgggaccataataaacctagctactgtttatgaaattattactatgtggtagccccttaaccaggtttctctctaatcttcacctccaccctttgaagtaggtgctatttggtcctgattgcagatgaggaaactgaagttctgagagactgagtaacttgcttgatggttgatattttggtggttctccctcgtggaaggtggaagagcacactgtgctctgtagttttctggatgtgagattatgtctagggtgactctagcacttggggttgacacctgacaaggacttgagtgagcatccaaccccctgattgatcagcaggggaagctggtgagcaaaaacgtcacaggactggacccaagtcagcactgcttctcattcagtgttctttcagtcatatcatataggctcaaatccttgacccttgcatcataggctctggcctcaggactccctggtttgtgactggcctgtgaattaacgttccgcttcagaattggaacttgaggttctagaagcaaggtgcttgcatttgaactccagctctgctgcttactagctgtgtgactttgggcaagttgcttgaactctctgtgcctcagtttctcctactatagaagtactcatttcataggattgttgtaaggattacttgagatacttcattaaagtcaaagcacagtgcctggcagagagcaaacacctcttcggctctcagcatcatttactgagctctcatcacttgccaggcatcttttggcaatggggatgtagccttgtacaagcgattcatgattcttttggagcgtacaatctagtaggggaaacagatgctagagaataatgaagattatgatttattaagtaattctagtgctatttgttatttatggggcactatttagaagttgctgcaaggtatctttgtttttagttctaattcttataaatggacaacattaatgtaagtaagtattttgggtaagaagtttggccagggttgcacagaaccctcagctttgagaagcctgtggtttagcatctcatgccagcaaccatctagatgtgtatttttgttttgttttttagagacagagtcttgctctgtcactcaggctggagtgtagtggtacaatcatagctcactgtaacctccaactcctgggctcaagccatcctcttgcctcagcttctaaagtagttaggactataggaatgcaccatcatgccctcctaaatttttacattttgtgtacagacaggatctcactatgttggtcagcctggtcttgagtttctggcctcaagtgatcctcttgcctcagcttcccaaagtactgggattatagacatcagccaccaagcccagtcagtcatctgtgttatatccagaacagaattaggtatggccctaccacttagatgcaagcagcccacccttgaagggcagaagggaagctgtgactgggcagaatccacaaggcagcaagacttggtccactgaaggaacagatagctctcatagtcataacaggcctgtaggaagaagacagtgtaggaaccaaatgctgttgtaaagatgacacaggcactatgtaaccgagtacctatttttaagtgacagtggtatattttaggccagttctatcccatttgtagtctgtctccattttccctcagtaattcttttctcatagttgatctttcctctgtttcaacctcttgtttgctttgccatttgatattaaaagaatctatatgcatatgcatttcttgacaaatgagtacattgagcttaattttctgatgagccttcataaaatattaccatgctgaaccaacccaaaatgtgggctgcctataccaaacatgctaattttagacagggtgctttcatcagtacataagatatgaatttttatttgaaagctttcctgaaattaaatagcataaaatcaagataatactccatatacacttcagtctttgctgtttaatagaatcacagaagcatacacatttatgtttaaatcaccttgttatatggttcaagaatctatgtctcagagagatcacttgacttgcccaagaccacagacttaatggtagggccagattgtataccatgtcttcttttttttttttttttaatttttttagaggtggggtctcgctctgttgcccaagctggaatgcagtggcacgatcatagctcactgcagcctcaaactcttaggctcaagcaatcaccctgcctcagcctcctgagtagctgtcaccataggcatatgccactgtgcctggctaattgttataataataattgttattgttattgtagagatgaggtcttactttgtggcccaggctagtctcaaactcctgggctctagtgatcctcccaccttggcctcccaaagtgttgggattataggtgtaagccactgcacctggcccatgtcttctaatttaggtcagttcactcttcactctgctgcttcttttatatatgtgcaacagtcatatccttttttgaaattataagattaaatcaaagaattaatgtctttggaagcaaggagtgttggaaaagttctccaaattccaccttttttccttaattcatttaaaaaaaaagggagaaggatgatttatttaccggaagggttaataatagcatgacgtgctaactgtatgcttagaaatctgacatacatattatcttattggattattcatgtgtttttaactcattaaaaccttgaaactctcatatccccattttatagatgcttaaactgatgtttgtcatcattaagtaaactgtccaaagtcatatagttggcaagtgaaaacttggtatttgaacccaggcttctcattctaaagcagaggtgtccaatcttttggcttccgtgggccacagtggaagaagaattgtcttgggccacacataaaatacactaacactaacaatagctgatgagcttaaaaaaaatcgcaaaaaaaagtctcataacgttttacgaaagtttacaaatttatgttgggccacattcaaagccatcctgggatgcatgcagcctgtgggccatgggttggaaaagcttgttctagagcttgtattctatgttcttccagaaagaaggacagagtgttgagtattccacaaagaaaattttgctgtaaaggcagagtgggagggaaatatcttattctttttcagtttactagctcttcactttataatttaaccttccatattaaaagcttctctaggaagtgagaattaatttgggggaaggaagcctcaattattcctgcttccagctggtacagatgcttggccacttcaggacaggtaggagggagaatgttggcatctctctactgagctcagaaactggagaagcatctaaattcaggaatgatgccaggtggggtgggggtgtgggagggaggaaaaggatgtggtgtttggggcccataactcaggaaacgtgatggcacctaatttcagagtggcatgaggcaagcatttaggaaaagaatagtgaactattgttacaggttttttttaaatgggtgggttgtttttataaagttttatgaacaggaaactgaagcaaaatgctgatccttttagtttttgagctctgccagcatcatttttatatttatttttgaattttgatgacaggcacttcctttaacacttctgggagtaaagtgtaacaagataccccaaactgcatttcataacagcagaatccaaatgaagagttgtagtttcagatcttttcgataacacggtgagacagaactggatccctccccagccaggggagaaagagaactctttcagtaactgaggcagtctgcagaattttttccctttcaaaacattctagaaaatttgcctaacatgtggaaaacctctaacatgcattaaaatgggatagactgtggcaaagaaaatacagatcaaattctcctcctcccatgaatcataaaaacccagccttcccagctattgtttctcctggaagatgacttcatcttaaagaaagtggttctatctgttgtgtgttttggatgcactaaaccaatgtttcaggcatctggctgccaactttggagatgttaaaagcctgttttgttcctgcagggcactctttcattgcctaccttataaaagttatgtcttattgcattttcctggcaccagagcaatccttgtacctacccattgcatttggtttttctgagcctgcaggcagcactgggttattaaagttcaaggaggaatccacatgatgttggctttacaattttaattctctcttaccttctttcctccctacctcccactcaatgacagatgagctttgttcaccatgtattgtctctaaaccagaatgagctctcaaaattatctcttgtaaggctctaggaggggagaacatgactcccctttggtggagcagctagcagagaagtttccttcttcctttggcttctttgaataaaaagttcttgagtctataatttatcatcagccttgaacttcagataagcaccatgtttaatcttgcagaaacatcaggcaaaatctgccccctcccttaaaagtcagccccttggggcccacctcaagaaaacagagttttgatacaaatggcattaggtgtgagcatggcaagttaagaggaaaaaaacatttttgtagagtttaacctggaatcaaaaacctagagaagggaatgaaagaaataacctttaaagggaaggaaaagggcagatgagcatgttgcacagtgtctttgaaaataagctatttgatgtccctttgtcactagtttcagccttcctggcaagtccaccttgttcaggaattagtgtgtaaacagctggaaggaactgaaagctctatcatatctgagaggcccccacagtctaacactgtaggagccgtttctcaaagtggtttggactcttcaagaagctaaacattaaaattaggggcctatttgaattacctttcaaaatttcaaacagcccactatagtattctgcatattattttttggtcccatctcagaagttttaaatatggtgtattcctccttgcaaaaatcttctctggatttgcttcctccgtgacgtgttctttgattagccccatttcaatttaattttcatttcaacaaatatgagctgagagtctgctatgtgccagcgtaataggaggagctggggctactgtgatgagcaagatagatatggtccctgtccccttgtagcttgcagccaggcagtggagacagacataaaatcagtcaatatgagcaggctgactactggggaagaagaggtacttggcaccttgagggcacaaaacaaggattacccttgcctgggggtcacagacaaccttgaatgagaggaattagctaggcacagctatcagttggttgtacttattaatgctagagttgaagaatcaaatgatagtgcaatgataaaatctggggaactagtgactaagtgcttctgttcagtcctctattgccaaggcttttggtttaatcagaattgtgggcacatgcgaactatgtttgctgagcttggttttggctctgagatggaaaaaaaatcaagtaaagcagaaactgtcttaattcagctcccacttaaccaaagcattcagttaacccacaccaactagcccctttgtgaagcgtgtctaatacccacagcacacagaacactttcagctaatatgctgcttctagcatacgccagccagtttccactcccaccagatgagacacatatttgccaggagtccccgaacctgtttctactagttgaacttgttctgtaattaaagtcttctgcccatgcccccacccccaccatctgccccagccccagccctaggtcttttttcaagtaaacatctcaagccaagtgccctcctcccattctctgctctacagctaattttttaaaaacgtaaatgctgtcatgccctctggctatgaagataagcatgttttaaattggaaccttggataccagattgtaaatcaagtcccaagagccagaacacatctcctagtgggtggcttacttggtagtttactcggagtatagatttgtcaatttttcatcatatccttgaggcacccatctgtatatagcatggtgtggcacacagtagttcctcagtgcacgtttgtttggatgaacaaattaagaggctccttattcccattctgggttttgatgctacagccattgggctaattaccccctgtgcacctcaggactgaagatttgtggtcagagcatttctagcctgtggctgggggatcattattgggcttgctgatcattctgattcataacactatgtatgttactcgaacagtgctttttgagggtattttacagatttctgggtctgctgccaaagattccaattcattggacccaaagtgggccttagggatatatatggatttgataagcttcttagtcaatttcacagcaggtggtctctgggagtgtccctgactcctcagaagtcatttctctataaatgtatgggttttcaaattcaggccagatgatatgaatactgccatattttgttattttacacattttcctccacatgttaacttctcttgaattgccaagggtcttacaattgatcatataatttaattgacaatatttttcttttcttttcttttctttttgtttttgagactcagtctctctctgtcacccaggccggagtgcagtggtatagtctcaagctcactgcaacctctgcttcctgggttcaagcctcccgagtagctgggactacagatgtgtgccaccatgccagttactttgtctattttttgtagcgacagggtttcagcatgttgcccaggctggtctccaactcctgggctcaaatgatctgcccgcctcagcttcccaaagtgctgagatgacaggggtaagccaccacacccagcctattttagagagtacataaaataatagcacatattacagtcttaggttcgacaaaatacggtactttgattactgagtttgtagttgatggaggagaaaacacctctaatatccaaagctggaatgtatacattttaggttctaatttctctgaataatggttactatacgaaacccacataaaggaataccttagttgtagtctgaggggaataaataactaaataaatatatggccaggcacggtggctgacgtctgtaatccctttgggaggtcgaggcaggtggatgacatgaggccaggagttcgagaccagcctgacccacatggtgaaacccagtctttcctaaaaatacaaaaattagccaggcatggtggtgcacatctgtaatcccagctactcaggagtctgaggcaggagaatcgcttgaacctgggaggtggaggttgcactgaaccgagattgcaccactgcactccagcctgggtgacaaagtgagactctgtcacaaaggaaaaaaaaaaagtaaagtaaaaaatattttaaaaattaaatataacatatttattgaatccttaacccccaaatatgaaatactctcaaaggcagactctccagaaaattcaaagacactctagtagtacacagaaaatgttttattacttctgtgggcagaacaagcctgctgatagttataagttcaaattggagaaggtcaggtttcttactgcaaaatcttcagtgagacaggtttttgtttatacaaaccgtgcatccagaaacaccatatatcaagaaaatagtaaattaaaccccttagggttttcatttaatcactgagtttgcatttctgccccccaaaacaaatatagtggcaaaggttgtcctggggaagaataagacttgaaaaaaattccctcttccctggtttcttctttattatatttcattgaaattttaattttcactggtgttttaaagtatatttgtgtacctgaagcagtttaagacagttttctgtcccctcactcccttactcctatattcctctttattcttttgtctgtcttgtgttttatggaatttgttattcagccaacggtcaggtttgggcatcagggaagacttgattcattgccctgttctggggtttcttggcactcaagcatttcttctttgccccaccaagcctaagctgatatttgatactaatcaatgatcaaagtctgaagtgaaaataccttgaggtcaatacccacagattcccttggctccaataccatatttcaggaccactctctctttaccacagcgtttctcaatagtggcactattggcattttggacctgctaattctttgttatgggaagctgttctgtgtatcataagtgttaacagcatccctggcctttacctattagatgccaatggcaccctggccttgtccactgacaatcaatcaaaaatacatccagacagtgccaaatatctgctgggaggtaaaatcaccattggttgagaagtattgctcttatgaaccagaggctagcaaatgtttatgatgtttcagggcaaaacacttcaatattattatttttttgaaaaaacaaaaaaatttgctaatttcatagctaattttttatttttattttaattaattaattattttgagacaggttctcactctgttgcctaggctggagtgcactggcatgattatggctcactgcaacctcgacctcctgagctcaagggatcctcccacctcagcctcctaagtagctgggaccataggcacatgctactacgcccagctacttttcggatatttctttttttgtagagatggggatctcattatgttgttcaggctggtctcgaacgcctgcgctcaagcaatcctcctgcttcgtcatcccaaagtgctgggattacaggcgtgagccactgtgactggctaatttattattactattttttttgctttatagctgataatccacaggattagctcagctgggagagagagatactctcctttaaccagtttttcagaaaatgagaccttaaagaaaatgcaagaattaagccttccagctttagactatccggggatactttttttttttttttttgagacagagtctaactttgtcacccaggctagagtgcagtggcacgatctcggctcactgcaacctctgcctcccaggttcaagtgattctcctgcctcagcctcccgagtatctaggactacaggcacccgccaccatgcctggctaattttcgtatttttagtagagacggggtttcaccatgttggtcaggctggtcttgaactcctgacctcaggcgatccacccgccttggcctcccaaagtgctgggattacaggcatgagccactgcacccagcccagagatacatttttgtaaatctagactggagtcagtggacagctcctcaggcaaagggagaatagtaatactggtatgagtttagagatgatggttgcttcatttgtgccatttttacctatctagcagtaaatcacagtcctgatctgccagaattcactgccagaacttctttaggttccctccccatcaaaactgaaattagagagaggagaggggggcttggtcattaactggaaatgtcacccaaatggaaggggaggggaaaggtgttgcaacactcatgtgcccaccatatacctacacatccatgccactttagcaggtagaagagatgacttcagataccagggaaagcaaacagaggtacacatattggaggcccaggctttcggggatcagctactgttccttgagctccttattcaaatgtaaacacataggttacaattgaaaggccacattttaaaattggccttattctttgagcaagtatgtattaaacatctgcctggcatagaagttcaggaatgggtggagaagaggaggggagaaatgtatctaattgaacacctgactgtaataagcattcattaattatttgataaatgaatgaacggatggatgaacaagcctttaaagaaaaaggaactcaggcctggcgcggtggctcccacctgtaatcccagcactttgggaggccaaggcggggcagatcacttgaggtcaggagttcgagaccagcctggccaacatggtgaaaccccgtctctactaaaaacacaaaaaattagccgggcgtggtggtgtgtacctgtaatcccagctactcaggaggctgaggcgggaaaattgcttgaggccgggaggtggaggttgcagtgagcaagatcacaccactgtactccatcctaggcaacagagcaagactgtgtctcaaaaaaaaaaaaggaactcgctattccttatgttaaaatataacgctaataggacaaagcattgtcctgttggctgagaaggctgtcacagccatgttagcttctggttttatcctcaggctaggcctgctctgctcccagtcatgggactgggatttaaggagttgacagatggtctccaagccatgcctggttgtctgcaagtctaaaaggagctaataaccagtggtgggcttctgtattcaggcctaccattccaccagcagcccaaatgacccccgctcaacacaggcaagaccacaggccctgtgcttggcacagttcctgcaaatgcagaacagccctctttatttcagtctccaggcttctggctggcaaggaacactgcccggctgtgaagcattttataggattataacgggctatgccgaaggcaagttctgaaagacactttgtgccgtttctttgagtgaagctgcctgttagagcagtgttgttcctaagcccgtaaacacacacacaggcagaatggggagctctgggctcctggggccacttagcttggcggcattgcaggactggaccagcttccctcaactgtgacactaaccttagggatatgcttggaggccctcctgcaggggtgcctgttttctgacagtctttgttcacggacacccccagatagtgtctcaggcagattgcctaaaaccccaatctgtcaatggtggagcagtgcattacatatggggaaggtgctgaagtcagggaccaaggtggaaattgcatgaggtcagaaatactcctgaaatagctaatcctgaccttaacctatatactgatggaagttaaaaaaaaatactcctgaaaaatttgttaaatgcctcaaggaccatatacatggcttgtatgcaccccaaattgctggcttgagtttataggctttgttgtaccaaaaatatctgtatttaaacaccagaatcctattctggatggtgagacattcgtgctataagaagcttggaagaatcagaccacccaagagaattccagattcccatctttccttttgtagcttatgcttttttatagcactatttaaattgttacaggccattagtaatctctctgcctctgtctgtctctctttgcctagcatgtatagtggaaaagaggtatgtttgtcatatatatgttgtgtagccctgtgtatttattgatttttatggctccagtatattttaaggaaagcaaagaaatgttttaagagaagatggatacggcagccttctcatcaatcaatatgactgttcattgctctgcaatagttgtgcttcaacctaagttgcactttaacatttcttcggaggccaggcacagtggcttatgcttgtaatcctagcgctttgggaggccgaggtgggtggatcacttgagctcaggaattcaagaccagcctgagcaacatggtgaaacctcatctctacaaaaaatataaaaattagctgggcgtggtgacgtgtgcctgtagtcccagctacttgaggggctgaggcgggaggattgcttgagaccaggaggttgaggctgcagtgagccaagattgtgccactgcactccagcctgggcaacaaagtgagacctgtctcaaaaaaataaaataaacatatttcttagggtttgtttactgttacactggatttatggtatgtcagactccctgcttggccctaaggatactgcaatgagcaacccagtcccagggctatcagacgtcgccagggtgactattttcttcaccaagtgctgtaagtatattttccaacttgagaacacggcccagcaagctcttctgggagtcaaagccagtggctttgatggcaaatgtgttctagttgagatagtggactgtgagggccagaagagcaggcagagaaagaggaataagaagtggctcgggtacttgggcacaggttcttggtggccagacaagccctgagtgacgcatgtcactgcctctggccctgcctttggctgcatagttaatcaggggctacttggagatgaggttactctcacacccccaccaagcttggctaagcttttggagcacttgtgtgagctccccatcagcacagctcaggctaaaaggataaaattgtgttcaggaatacaaataggaaaaatcagtggttctgaggtgctctttcctgccccatacctcttctgagacagttttcttcctattgcttcaggttatctatcgagggaaaaaaactcaggtgctctcttcaatttcagttggaacctccacccattcaggagcttcatttacatgtgtggtaataacaggctggttacacagggcccaattctttctgcctccaaaggcagtttgtctgcactagctgggtaggaaagtaagtggatttagtgtgagggtgtggatttgatacctgggatgaagagctatgtattatgaggtgtcctgcctgagaagtaggaactgctgggttctgacctcagctagaagcaaagagcacgcaaacagggactggatatcaccattcccactatcccctgcatccccaggaagtaaaaacaaaagatagtgtctccatagatcaccacctgatgtagtcatgactttccacatgaggaggaaaaagattcaacagtacagtctacaaaataacttttgagagatgatcattttagggctgggcatggtggcttacacctgtaatcccagcactttgggtggttgaggcaggtggattgcttgagctcaggggttggagaccagcctgggcaaacatggcaaaaccctgtctctacaaaaatacaaaaattagctgggcacactggtccaggcctgtagtcccagctacttgggaggctgaggtggaaagatcacttgagcccaggaggagaaggttgcagtgagccaagatcatgccactacactccagcctgggcaacaaagcaagaccctatctcaaaaaaaaaaaaaagaaagaaaatatgataattataatattttaaaaaactataatttcccaagaagtgccatgaatgaaggtatttttctttttttctcttgagacagggtctcactctgtcaccaggctagagtgcagtggtgcaaccatagctcaccacagccttgaactcttgggctcaggaatcctcccacctcaacctcgggattagctgagactacaggcatgcactaccatacctggctaatttttaaatttttttgtagaggcagggtcttgctatgttgcttaggctggtcttgaactgttggcctcaagccacactgctgccttggccttccaaagtgttgggattacaggtgtgagccactctacctagccatcttttcttttttcttttcttttcttttctttttcctttcttccttcctctatttctttctttttttcttttcttttttattttttctcagggtctctgtcacccaggctggagtgcagtggtatgatcttggctcactgcaacttctgcctcccaggctcaagtgatcctcccacctcagcctctggagtagttgggattacaggtgtgcaccaccatccctggctaattttttgtattttttttgtagacacagggtttcactgctgcccaggctgtatttttcttataaaaaattttaaaacatgagctataagcttaagtcccttttgttcactatctttaattctttaaacccaggtgcctcccttcagccacaggggaactggtaaaagcttgctgtggattcttgtagacagtgttcaatgctatttacccacaaatatgtctttatagaaaatatatgatattctttggtaaacttgtatttttttttaacacaaatggtattgtattatgcttagtctgcaattatttttaaactgagtctaatacattggagatctttccatgccacacccatagacccatctcctttttcactgctgctaagcggtattacacagtgaagaaagtttatttaagcactccctattgatggatatattaccattgtttccagttattttttattttttactgccccagacagggctgctgcaaacaaccttaagatcaatcgccttcttgggcatttataatgtcattgtttctccaaaaaggatccagaaaggtgtggtagtgccaggtcatccatgcacagctttatacttgaaggacactctgtcagattgccctcgagtgtcaggcagcctctgaatatgctagtcaaatttaaaagttggtgcaaagtgggaaaggtctcgagggaattttccgggggtggtggaaatgtttcgtataccgactgtggaggtggttatacgggtgtttacatttgtcagaactcaacaaacggtactcttaaaatgggtgcattttgccatttgtagattatattccactgacattcatttaaaaaaccaaacaaaaacaaaacaaaacaaaaaaaacgtgcagtggcctgggaacagggtaagagagaacaccacccctttctaatgtgggcttttaaaacgctcgcttttccccccaggctccttcctgcctccaggtgtcactacagcctcctttctccccgttgcccggtttcgccccagcctcctttctaccagcagcctttcacccggagagtgccaaagagcccgaaaggagctatcatggggtctgcctgccccgcaatcgcggcccacgctctgcgggggcgcccggagtcgaataccagcggggagagagaggtccctctccacccgcgggaccgccccacgcccctcgcagccccaggaggtgtccgcgctgcggcacgtgggccctcccggcagcgtggggcggtgccgagccggcggcccgccccctccccacccatcaaggcgtggctggcacggtcccgcccactcggctccggagcccagtcgagtcctgcccggctagaagccggctgtcggtctccgtgtcgccgccgccgcccggcatcgtggagctggggcccccttttgcctgggagttttgtagtcgcctagggtcagcggtgacatcccaaagggcaggcccggcagccgccatggtggccaaggattaccccttctacctcacggtcaagagagcgaactgcagcctggagctacccccggccagcggtccggccaaggacgctgaggtagggccgcgccctgcacctggacctctatgggtcatctgcctgtctcgtctgcctccatctcccattctcggcgcccgtccagtgtcactgtctctgtttccatctctcactctccgtgtgtgccactttctctctctacatctctcccacagtcttctttgtgtctccccgtcgccatctctcaccctgtctccttttctctcgctttttctctgtggaccaagcactagctgcctcctctctccctgtccctctacctgccggtctgggagcaactgcctccttgcctttgcagggctctcagactgtccatcttctgtctggactctcagagggactttctcctactgtcagcaagccccagtgtcagggaagtgtcagcaagccccagtgtcgctaccctttaagcgagttttttttgcctgggttgtgagagcagagggacgtaccagccctctcacctgtcagacttggccttgcagccctttggcagcaaaaacaggacacagcgcctctgcctatcacctgtggccagtgagggtcattcagccggggggctggggctaaatgagtaaattggagtgtctcccacatggatcttgaaaatgaattaaagtccttagggtcaatggaaagctgccttggaacattggaaacatttctctttctgggaactttcctgtgccttgcgggcgatgtgaaggagtgctcccaggttatgtttagtctgccttttcctcttgcgtgttatttctctggcacatagctcactggccttaaaggttgggttcagctggaggagaaagcatccctctctttgagggtcttagggaatacagtcgctttcgctagattacagctttgctgtggtcaagctgcggtggaacccacaggacccagctagtcattgccgctcatgcgtgtatctgggagctttccactctcccacacctcactctgcgaacatcaaacatcaccaccaccactggggaaaggctgaaggcaggtgtgcatccggccttgtcacagcattcttgaggttccacccactcgccttccttgggtctgctcagctgtatgcacttggctcactgaatcatgtatattcgggagcacaccatcaaagattcatttcctctagcaagagctgctccaggctgacaggactccaagcagtctctggttgtattcagctttctatacgctgagcacaaactaacttctccctcactcaaacccaaccctacactccagctcagtcgaatattatcacaaagagtttttgttgccagcagctgtgaaagtgtgatggccctagtggcatttgcatagaattcaggttggtcaggcctggaatggatataatattttttcagtgggaacttcctaatttaatcaacataggagcagcgcaattggtgcccactcaaactccacttgtaaggaagaaaggcataaccaataaattaataaattgaagtgggccaaagaaaagaatagtgaggatagctgaggactctaaccagtcccttcctactattacttagtcctgtgtttttgagtagtttagctaaaggcttaggtaaaacttgcctgcttaatttcattttattcttatacatagaatatagatatgtctatatatcacaaatatgaaacttatcacatgtcaaatattaattttcttcattggtagctggatctagactataaaatatgacttattttcctcgtatggggatatcctgatgtgagaaataaggaaggggttggaatagttttggaaatagttggtaaatatttttcagatatcactattggggtttttgttttttagtgtttgatttaaacactaaatcaagtatgctttatacactttgaggcagagatatcttttagcttcatcgatgagcatatcacttcctgataatggaaattggcaaaattggaaaaagaaacctaagtgagtttagtgggtagttttctggtttccttatcagcgcaaaaggcagccaacccttgtaggcctagcttctccataagcagttaactaaaatatattttccaccagtaggtgtcgtcagtattcataaattaaaaaatagcattcgcttgtcagccttttgaaaaacatgattatataattgtttataagctaggcattgactgttaattcctctgaaagtatttttttaagagtgattgttttctttgtggaaagaatgtggttataataaaaagaaaaatagatctatccagaggcctttctaggaaaacaggacttgttgaccttcaaaggccgttgcaacagagcacctgtgccctttaaacatttaatggccgtgtgtaatggctgttccttccgaatttgccttgggtaggacagtgcacacagcatggcactgggaagtgccttctagcattgactcctatccttgcagcaagtgtactggggaaaatcacttaggaaaaggctcctggggaacaggcaagtggcattgatgtgcatttgataccgtacactgagtaaaaaaatatgcaaaaataagcattctcttaaaagcaaataaaatttctactcaagatttaagtgatttgtaattttttatttgtggtagtttccagtgaaagcaaaaaatgatatttttaaaatgtatttttattttctttaaaagatctattttaagcttttgaaaatattctacagggattataatattgcatgtctgttagtataatactgcctcttaatctgctatttcttatgacatgggggtttgaattggttggcaaatgtttaattttaatatccataatcagtgaggtcctgctggctgtaatcattaattgtgaaatctaaggagcttagttcatggctctagaatttcacagaaaaatgtgatatgatacgagcattaagtttatttcttctgatctttgatgcagctttgttcagtttatctgtttttgtatttattggtcatctacttcccatgccaaaagggactggtctacatagctgcgctaaacacctgatcaaatcactaaaagaaaatgtgttacctctaatgaattatcctgattgtaagttaaaaatcaatatttccccgtagtgaggtttgctttttaaaaagaaggcttaaaaaaaaaaaaaaaaaaaacgaagtaaagaaaaggaagcaagctcaggtaaggtgcacacattggctaaggaagctagagccttgtgagaagcttttaagagttttaggtccagttcatttttaatcaaaatacaaagaggtgtttctgttatttttgtaagaatatatctgacaacttggtggacaacttactttcagttttaaaatttaccatcttagatattggtcagattaggcctgatttagttaatggtatttgtagccattgcttttgactctcagcagttttaaaaatttgtagtgccatagaccataggcctatctcatgaatagctgaatactgccctgggtctccaaagtataggttcttattttgacttagccagtagccttgcatgaccctgagaataatgacatgcacctagaaatgacagagctctgctccttttctatgtctaccatgtctagtgtctcacttgagaccccacacttgtaataaggttaacataaagcttgtactgttctctccactttatgaataaggacactgaggggaagcgatttgcagaaagctgcaaagaaaatcagcagctaagccaagatccaatgtcaaatttcctgatggattccgtccagcatttaatatcagcatcccttgtagcacctaagggtgtttacctttgtgggataaaaggtggggtggtagtacaaaacttaacagacatgcaaaatactttaaaatattatcttttaagtataaccttgagcaccttacataactgagaaggtatcctttaaggcccacttctaaagggcaaggtgaaccctatgctcctgccacgatttatgcctctatcagtcaacatgtgcattttaaaattgtatgcacctcgggctgtacttcttgaatgccagctgaaaagccagagggttactggtttctagtaatctatacatttcttggaatctgtatcttattgtattgaacagatagtatacctgaacacacatgaaactagtcataaggagttattgcagttagaatcctgtaatttcttcagatgattaaatagactccaggaatcatatgacctcagagatcttgctggatgggaagccacacggagctacccagaaaaaggccatcacttgctataggatctggttatggtcattgagccatcattccgaggctgttcagttggaaaattattttgggaatcttggtccttaagaatgcacatgaactagcaacagaagaggaaaatatgttgactttacatgtgtacatttaatgctgttcaagggcattgactagaataagactgcctgagtctcaatgctgtctccaccacctgctagttgatgtgaccttggacaagctactgtgcctctccaaacctgtttcctcaatggtaaaatggagatgatgagagctctaactcctaggaccatagtgagggtcaaacgagatgtttcatatacagcgctaaccatagtgcctagcatgtcgtaagtgctcaaaaaatgtcattattattaagacctttacatttcaaaaaaaaagattcttaaaatggttttaagaaacatgatgatcaccagcctaatttcctgaatgttgttttacacacagcagtgcattaggggctttaccgtaagtcctttcatcatcacagtaatcctatgaggttggtattaatgccctgttttgtagaagaagaaacaggctcagaacagggtagtggctttcccaggatggctttaatgctgggtcaaggagatgagactaaaatcccagttgaccctgaagtctgtacttttccaaccacatcacattgcctctaagtgactaaatcattggtcttctcacctcataacacgtgaaggatgaacccacctgcccaaaaaattgcctgatgctcaaaggcccatttttttcctgagtgtctgggtaggaaaccccaccattagtcaatacttctggcagcccacttcatagaacggctgcaacccacgggagtgggatttgcaagcccccatttgggagggttttagtaattttcattttgtgtttctcaagaccaaggagctggtctttggcagaattctgcatgcttagctgtgtggaggtgccaccgtcagttctgttagtcattttgcttatctatattaaccacaagccttctgtgtaaaccaatcactggaaggcccaaataccatctggatatttgcaaattgtgtcattttctcgagacaccctgtgattgcccgtaaaaatcctggacagatgccaccgttttcataactactgaaagaaaataaattactgatcacaacctaattttgcaaagccctgtgtaaatgtaattgttattgatgatgtgtgtatctggaagggctactttgtcatgtatgtgtgcagttgccttccataatttgtcagccttgataatgggtagaggtcacacaaaatgaggaaattgccgtgactgcgttgccatttattcttatgttggctcatggactgtcaggagtgaaagccagtggtttctattgccttcctttttttttttttaattagttgacaccaataactagtttagaagaggctgtgtcatgcccagtgtggtggctcacgcctgtagtcctagcacttggaggctgaggtggtcggatcacgaggtcaggagttcaagaccagcctgaccaacggtgaaaccccatctctactaaaaattcaaaaattagccaggcgtggtggcacacacctgtaatccaagctactcaggagggtgaggcaggagaatcacttgaacctgggaggcagagattgcagtgagccgagcgccactccagtctgagcaacagagcaagagtccatcttcaaaaaaaaaaaagagagagagactgtgtcacaggctaatcaggaaaggtttccaaaccttctactggctgggaaaggagtggctctttttaagtctagaaacacttgtgcccggactttctgtttggaccattgtgtccttttgagagaaggtagccctgattgttagtaaatttcagttaattgaagctgaatgagaaaccttaacggtaagttcactagacttttttcttctttctggctcttaagatgaggaggaaaggagtagcaaaacaggctctttttttctgaggatttatgaagcaaacaaatccagcctccaggaaatgacccagggtcattgcatcagagaacttcagagtgggaaaggcctgttgagaacatgtagcccaattcttatctgctgccagatccattcaatctctgcttaacacctccagggacaacatttcaggttgtatacagttggccctctgtatccactcgttccacatccacggattcaaccaaccattggtcaaaaatatttggatcccaggactttgggaagcagaggcagcaggattgcttgagcccaagagtttgagaccattctgggcaacacagcgagaccccatctctaaaaaaaaaaaaaaatcaaagaattcaccaagcgtggtaacacacacctgtagtcccagttacttgggaggctgaggtgggagaattgctggagccagggagtttgaggctgcaatgagctgagattgtgccactgcaaccctagcctgggtgaaatagggagaccctgtctcagaaaaaaaaagaaaatatcagggaataaaacaataaaaaataacaatacaacaatttaaataatacaaataaaaaacaatacaggataacaacgattatcacttacattgtattggatattctaagtaatctacaaatgatttaaagtgtaagaggatgtgtgtaggatataggcaaacagtatgccattttatatcatggacttgagcatccttagattttggtatctgagagggttctggaaccaatcacccttggatactgaaggatgactgtactccgtctgtgttcagtatagatgatgagaaaatcctttcttagttgtaacattgcttcctgcagcaatgttcagtaatactttcttttttttttttttttgagatagagtctcgctcttattgcccaggctacagtgcagtggtgcgatctcagcttattgcaacctctgcctcccgggttcaagctgttctcctgtctgagcctcccgagtagctgggattacaggcacacgccaccacgccctgctaatttttgtatttttagtagaaacagggtttcaccatgttggccaggctggtctcgaactcctgacctgagataatccacccccctcggcctcccaaagtgataggattacaggcgtgagccaccatgcctggcccagtaatactttcttatgtgttatccctgtaagtatttgaaaaccactctctctctgcacctctcccactccacactcatgtgcattctctcctctccctctctcccctcagatgttttccttctcctggcctggtattcctggttcccttaacttttccaaatgtgacatactgtcctatctctttcctgtccttgcttatttcttctggacatctttagtgtgcctgaaaaacttgagtattaataagtgcaaggatactgtatgatactatgtcaacaaacaggatttcttttaggcttaatatgcttctttagacaagagaagtacactaatatattgaaaaagatttttgaaataaaaatgacagactaaagattaacatctttgtcatataaataatttatacagatatttaaaaaataccctaagatattcattgacaaataagccaaagatactagaaggtagttcatacacaaggaacagtaaagatttaaaatgttcactctagtaggaattatagaaatgaaaaaggcaataataaggtgctattttatacctaactgatgttgcaactatttttaagacataataaaaccaagctgggcatggtgactcacacctgtaatcccagcactttgggaagccgaggcgggcggatcacctgagcttaggagttcaagaccagcctggccaacatggtaaaacccagtctctactaaaaatacaaaaattgctgggcacggtggctcacgcctgtaatcccagcactttgggcagccgaggcgagcggatcatgaggtcaggagatcgagaccatcctggctaacgcggtgaaaccccgtttctactaaaaatacaaaaaattagccgggcgcggtggcgggcacctgtagccccagctactcgggaggctgaggcaggagaatggcgtgaacccgggaggcggagcttgcagtgagccgagattgcgccactgcactccagcctgggcgacagagcaagactccatctcaaaaaaaaaaaaaaaaattatctgggcctggtggcgggagcctgtaatcccagctacttgggagactgaggcaggagaattgcttgaactcgggaggcggaggtagcagtgagctgagatcgcactactgcactgccgcctgggcaacagagtgcaactctgtctcaaaaaaataaaaataaaaaaaaaaaaaaacccaatgccgtgaatgttgcaggaaaataatacacttattggtggggcacagtgtctcatgcctgtaatcatagcactttgggaggctgaggcaggcagattgcttgagcccaggagtttgggaccagcctgcgcaacatagcaagaccttgtctctatttaaaaaaaaaaaataagaaaaagaaaataacacactttctgtgcatactaaaagacaaaaattgttcagatctttgggcgtagtattctagctctagtggagaaaaggctgtgtttccaaagttgttcataatgacattatttgcaataatagccatgctttgtattcgtgcattttacagttttaggcactttcatattctttgacttacttgagtatataattgtcctcattttaaagacgagataccaagggtcagagaggtccaatgatttgcccaagatcacacagctgggaatggcctagctggagcttgaagtctgatggtttggttccagtctagcatcctttcctatttaactggccagaaaagccaacaacctctctgtcctacaatagagcaatagctccatgaccatggcctctggcacaggggtcagtgacatcatttgcagccattactcactagcaaacagaaataccctagtgttcctggaacaaataaagaggaaaaaaagttgagcatgattatatactcattataaccaatttaaacctatatgtgtgcatatgggatgtagagaagaggggacaggcatgttgcaatcaagacaccttcctcctttttcattgtgctcaataaatctagagcaatgccaccctttgttcagatagtagtcagttattttcttttcttttcttttcttttcttttcttttttttttttttgagacagagtctcactcttgtccagtctggagtgcagcagcaagatcttggctcactgcaacctctgcctcctgggttcaagcgattctcctgcctcagcctcccaagtagctgggattacaggcgtgagccaccgcacccagccagcagtcacttattttcacatgcattatctcctttgagccttgcattagctgagggagctggacaaggcaaggactgtccttttttttttttaattttgctattttgtttgtttttaggttttctttttttagtttttcattttttcttcatttttctttttttctgaagctgtcctttttgtttgtcaactgaggaaaaagagattcagagaaattaggaggcagggcccaaatgttggtccctccttgcccagccttgacctcttggcgtgccacaatgttggcttaagccagtcatggttctgggtaggtgataagcagcactgtctctctgggggtgttctaagtgaaccccgttaaagttagccagaacactgtgcagagtaatctccaactgcaaggccctactttaaatttgatgtgagatcactgttaaaacgaaaagcccacaaggaatggatagataaaaacttctgtatacataggtgatgtatttcgtttgttggtttgtgttagaaatagggtcttgttctgttgcctaggctggagtgcagtggcacaatcatggctcactgcagccttaacctctcaggttcaagcgatcctcccacccacctcagcctccagagtagctacagctgtagtcctaggactacagctaggactacaggcgtgtgccaccatgcctggctaattttctttcaattgttttatttttctagagtcagggtctcattatgttgcccagactggtctcgaactccggggttcaagtaatcctcccacctcggcctcccaaggtgctgggattacaggcataagccaccacttctggccacgacatatcttaaaatgatgtctttctgaactctgcagacctaatgtttgcagcagaggtgataaatagtaagaagaaatacagcatttcctgagggcactctttctgtagataccattagcattagaagttggcaacctgattgaattaaataaagctgacagcctatgtcagaaccttgaaaaaaaaatgtgaaaaggaaaaaagaaaggtgaatgttttggacttgccatgggctgtcagatttggaaatgtggagtcttcctagaggaagacgctacagaaagaaaaagggaacaagctagtggcagaaagagatggagttgggccagatggccgaggggggcaaaatggtaagtcttccctgtgggtgctttctgaacccaaggccagggcaagctcccatttcaagtgtgctatcttatgttggcatactaacatttcataatcgcaagtcacgcaggcatttcaagaacgaccccaggcaaatacagagaagataactaaaggtcactggggaagactatttttaatttttgacttcacacaggttggggaggggtggaagtggctcatcaatatcatgttaggttttggcagtcttggttcattttctcagccatcctggtgattgtgttggggatgtctgggtgtgatcttgcagaaggagtcagaaaccactgtaaagaaggaaataagctgttagaagagggaaaactgatggtttcttgtgtgtaagccacagatgcatgatgaactgtcacctccacctccttcctcctcagatgtttggtggtgacttatctgagagctttgaaggagagagcatcagaaaagacatgttgcattctcttattagtctctgaatgctttatgcccaggttccaaaggcctagaagagtgagcttgattctggcaccaacatcgaggaacaggagcttgcttcggaagtctcttaaatgcagcatttatttctaagctggttcttataagagcttcccaagtagctggggacagggcaaaggtaggcttagcttcttggaatttcagagtctgtttctggaatgagaggactggattagttcattgtttcccagaaggtgggtttcataccacttgggcagctcaaatcttataaagacaaatcacaaaataatttaatcactttcccttttaaattatctgatccttctgattatttcaagtttccacttggaattagtgtgtctttaacacctccccatcacttgataatttccctgtgtaactaagtgtaggcctcagggttcattttttaaagttagtttctgtttatggcaggtgatagtgattttccatttaaggcagtgatagagtttatttttacaataagtttttaagtaaaaaatgactaattaaggaaatagtacataatagctcaggtgatatgtacatatggcaaaaaattatcatggcaatacagagagtttggaaacagtgaacaaggcatgttctgaggggctttctaggattagaattctacaataagttcccaagtttgacacagtcacttgcaaactaaacttgaaatttggacatttagcataggacccaaatttcagatactaagtagataaaaattggctttaatgtgttataggaaatgaatctgtgctacgttagccaacttaaaaaataaaagtagatttctgttctcagaacataaatctttttcttttcaaagcgtcaaagaacatgccaaagtgccagctaaaatgattcaaaccatcctgttccttttttccttcactctggtgggaaggattgggtgagattacactttaattggagtcagccctagaatgtactggttaagaatttggatttggaagtcagcctgaactgagtttgaatccgcacttggccacctgtgagctgagagatcttggacttgtgtctcatcctctaagccctagtttcctcatctgaaaattgggaatttgcaagggaattgtgaagatgaaataggcatataaagggcttccaccaaacaagtacttaataggtcattagcagcagcagcagcagcagcagcagcagcagcagcagcagcagcagcatctatcttgaacgtagatcagttgagtagaagctataggtggttatacttagcaaggcatctgctaggaggtagctccttcctttgtaggaaataaagagatcagagttagcattgggcattattatttttaaaacaaaagatgttccaagcatactggcaagcttcacattcatttctgccaggtagaataacaaaaaaatctagtgtggctttctggttgttcccagaatgactttcagacaggggttggtgtgtgagctctgggtagagaggcaccctggccagaggagtagggagcaagttgtcctgaggccggctcccacctgacatgcatcatctgagaatcctagccaagtgccaaccacggacacagacccaaggcaagcagatgagggtggattaggttgctttgagctcttcatgccctattcatttgcagggtgctttaactataaatagatcctttgttggaaatgtagggaaactccatagtgtgatggatatgagctggtaaagagctagacaactaaaaaatgacccctaatgctctttaattgtccataaatatttattgagacctggctctgtgtatcatgttccccctggtttagaaaagccatgctttctgtcctcaaggaacttctacttcagtttgaccaagtcattaacaacacgacaatacgggtagtgactgtcaaccacgaggagggggagaagcaggcaatttcattggggagcttggcagactatggagggggaatactgagaagtggtcatccaataggctccctgatgctggatgcccgccaccccccagtcctcaagtgtgcccttagcagagggcagcatcttctgggggcacataagcgggacacctttgaacctgggctcactaagattctgagggaggagtcaagaggagctgctgattccagagtgatagggcttgaatgccaaatgaacattctgtcctcctccacaccctgcgtcagtgtctacttcctttctgcctctacagcctattcgtttcagggttcctccctggtttaggaaactaacaatgctgtggttaattaagaacccaggccttgctgagttaatagccttgggctcaatttggactgtgtgacttcaggcgaggcccttaacgcctctgagtctcagttgcctacactgtgaaatgggtatattaatagcactaacttaagagaagtcaaggaaataatgcacagaaagcactttggcacagcctagcacaaagtcctcctgtatattgctattatattattattattattattacagaggaagttgtatatcctgggaagccagtgtcggggtggcggggaaagttttcaaggcaggtagatttgaattcagatttcaccactgccagttaattactgggtatgacttggaggaagtcatctcacttctctgaacacctgcttcctcctctatgaaacaggataacggggttgctgtatggcatagatgagagcgtttgtgactccatggctctcagtgcctcctttcctttcctaggcttccctcattgtttatatagtgcttcagagtcacaagagtcacacctgcgtcaggtgtagtaggatgactgctctgtttctagaaaattgctagagtctatgagtaggcaagtgccttggcagggtataatttatttaatcgcaattgatcgaagctttgcagggtcaagtggccctctgcacagtcctgctttgcaaactcaggggcgcccctcgcttgactctcaaatgttggggcagagggaaggagggcctggcatgtaaaagaagaaccttccacttcatccttgtgcccttcccaacctggcagtgcttgggaaacctttaccaaggaaattattttgccaatttagactcccagcagtcttcaaaggaatcctcccctctgtagatggcccatattggaaaacacttgagaaccttgctgctctctgctgcaggcatcctttgcctcaggaataaataccatttttattttaccaccagaatgtccttgtcttttctggaaacttttattgacatcccttaccactgactctacaatggctagccaactttttttttttttttaacaaaacccaacaaccaaatcacaggtttgtatttattctttcattttaagtcagttgccactgtctacccattttccccattatctctttggaattgaaactagctgagagtgatgctgggagcagagctgagtctctgagctccttgccttctttgttgtgtgctgcatcatttttttatattcacaggcttctgcattttaataaactgtagataatgatacatctggttgcatattaattgctgagagttcaaaataacacgtaatcactatgtttcaaggttgcagatgtacagcactgagagccagtgtttgttatgaacctttggaaaaatccgttgttactgggtatttttaaattcttgtcattaaaaatgcactacaggatggaaagtgtctcaacaaatgaaatcagttttgtgttgtgcacacatgcacatacacccctcccaaagaataacattttgaagctattcatctgctcatttggggggtgtgggggcaacagaaatgccagatgaatccattatagattacttacctcacagtttcctgaacagcatgctttgtatcttatttatctgcatacccttgctcagtgagtggtaagatgtcagctgaaagccaaaaacaggaaagtttaagatttttaaaaatttatttccaatttaatcaatcccatgtggttgtttgactagtagctttttccattctgaataatcagatttcaatgtattctgttttcggctgggagcagagtgctctaaaacacccgggtgctgtgtcccctggttctaagtgtggacatgtgctcctgaggacacacatggaccaaacatttgaagggataatttgtgctagaagggacagctgggagttaaccagggagcatcttgaacatattttgtgtttctttctggaggtcacatctctgcaaggcctgtctgctcaaaaccgttgttcttgtcaaaaacggaaaccaactagacatcaagagaaggggatccattttcttctgcagacccagtgcccttggtcagacgtccctgtagtttttacccagcaaccagttaggatccctggtccctgtctagttttcagtcggatgacagacctgactgtcagctttgcttgcctgagatgtgtttgatcatcccagattcagctggaacagtctgtccttcctttgggacactgagattaagatctgagcaccctttttcatctccctacttctttttcctcttctgggaagcaagataatgctgagcttcaaagaacgacagatggatgagaaagagagaggacttttctgtggttctgtgtggtcctttcttggttacacattatttttgtgaagtttcaccttgcacatccgacatgggttgaatgaccagagttcctctcattgcctaattccagacagtattgggatctggcaagactggagaccagctcttctagcccataattcagcagtgttggtggcagtgggcgggtgggaggataatgcaaacctcaagacccatctataaggacccaagattaggacttgggtccttatcttgagattttactgctttcctttcttccaatatagccttgaatcctgccagaccaccgctagttttgccgtatccagccagagcttgactaaacagatgataaaaccacaggaagaaaaggaaggcaggaatatggcatcaaaatacatggtctcgtagcagcctcagtggccagagcagttattggtatgattctggcaggtgacgtggaactctagctttgtccctggaaggatcaaggcaaaatccagtgctgcagggaatagaagagggcaggggcgcaggctggcagagagaccatgcctctcccaggacaacagaaataaggacaatactctgatatttactgaggactaacaggcgggtgtctgccaagcatattatacacctagtctcctgtgatcctcccaacaactctgtgagaaggtaggagagtcatcttcacttcacagtagaggaaactagcttatagaggttatattttgggcccaaggtcgtagggtattgcactctgaccagacaggttggctcatattttatccttagatcctttgcaaagaatcaatgcactctttgggccagagtgataagaactttgtcacttgctgcagaggcattcagattattcctaagctctgagagagcccagaaaatgtccttaaagaagcaggaatggaactccagtggcatccttttcctccttctccaaccccacccaaggggaagcgagggaatcccttttacagtgataaacaaatgcagaacatatattccacccaaaggtttccaagaagtcagtaggaaatgactgactccggaaccccaaagtcacagagactgtcctctggaccccgtggctgtgaccaggagatcttttctacctctgggtgcctcgttgtgtgaccaggagaccttttctacctctgggtgccttgttggcatcatccaaccagggatgtccagccccattttccagaccggcggatgggtgtggcattataggcacgttatttctgtggcattcttgccaaaaatgcataacctgatgtgagaaaacatcctccgggcccatggctggccttcccataagggccacagagacttgatgctgctggcaactctcctaatttttaaggaggttgaactctttaaagttctccagctctgagcatctggccctttctgcctcagaaggcagatgtggagccagggaccgcagagagagctaaatatttggcttcctctttctctgaaggtctgtagcatcatgtctgggcatgaccaagatgagtttcaggcagtgggggctggtgtttgctaaaaggaacttaacaggggtgtgggtgtgcagttctccctctgcccaaggttaagtaatagtaacatcctgtgtaaagagaattgaatgtggttttctgctaaacttcaatgttttagggctgtttattagatgtgtttaatcttgggccaatttaaccagtagcagactaataaaataacagatttgggcttgctgccaggacaaatgttgacttacccttataatgttgactaaaacgagtaactttgaaagttattgcagagtgaaaccttagccagaaatacagcgtctgaaacagtggttttgttttattttactggctctgcttagagattatgtttgtaacctaggctgctgcctgcttcacctctcagagtcctgtattttactgaattatttcccaaggctctttttttcagcccataaaccttcactcagcaaaaatgaatttccccatggcaggcaagtaggagaggttacttttccaatgtgggggcaaaaactcagtggtaccaagaagaatgaaggtaatgacttgcttgagtcttctctcagaaacaaaatggtatgccatgaacattcaccctctccaaatttgtagtaaaattaattgcttctcccgggtgtaccggaagaaatccatctcgcttgccgcctacccccacctttccttcattttgccatgcagtttattacaaacactagagagctatagtattttgctaccatgtgttttggacttgaaggaaacaggggaggccaggaggaaatgaagctaggaggactacagaaattgtcataaagtgtgatttctttctacccctgtttttttaatttgtgttttataggaagctggtttgggcagggcctctgagcatggtttcagaggctcctgccagcattgtgtgagctcagccaactgccaactgtcctccttatacctctcccttattcaaggctcccccgaaagcaaccacctcacagggagactttggccaagaagccataggtgctgaatctgcttttggtgctgactggctcaggcagacagagcttgatatacagagaataaacgtcatccctctaacattaatatgttcagttttatgtacctgagagttgatggtttaatttgtgggtttgcccagactctcttgcgacttctctcatcatctgctctttagcacttccatgagacggggcaagagattgttggagtctcaatccagcagcccgaaagcctgtctgcagcttgggtttgagactgaactaactcagggtgttttgtggattttagttatccaggctgtccctgttccctcattaacaaaaacaaaacaaaccccagcttttttttttttttaagaaggaaattgggatcttttcctcatagcaccttatcttaatatggaggaaagagttgagccattttatcaaaaaggaaatcaaatcccccttggatgcctaatgtgaggcaactggcaaccaaactcacggccggagaaaacaaacacaagaatgtggcttccatgtttgagattagccaagacaaagatagcagggatgcctcccggaacagttcctggtggtttgtcaaagtccacaaagcttgcagtccctttgttgaaatcactgataagcatacaagaggaaaattatagttctgagtttgaagaccttttctcaccttgggggttaaaaaccaataattctgaaacacatttggcctaatcaatgaagtcaggtttccgttgggatttgggcctcattatttgtctttcatcttctgggaacagatgacaccaggtcagttagctctgtgccaggggaaaaaaagaacagaaaaaatatttcaatggaaattttagaattaggaacaattatttcattattattatctttttctatttccaaaaaaataagatgaagagtcatttgcaagctccaaggcagctcccctttctgtacccacagtcttactcctcctttgctcaggcagctctatgaaggcctcctcagtgctgcatatgtgccctacgttcctgtgttgtccaccgcaccatgccctgccttccagccaccccacctgctccttccttgccagctccacctgacactgactctcttgactctttgtggctcaaccttctgattctccctattcagctgggagacattccccacaacagtgacacctgtatacttcaattaaggccactttgcacatactgagtaaacactccctaaattgggctaagaagaatgcacaaagtcacaaagtcctccaaactatgtgttagttacaaagagaataatattaactttacagtggagaaatccagcagacaccacctgtgttagtttcttatgactgctataacaaagtaccataagctaggtggcttaaaacaacaaaaaatttttgtcttattctggaggctaagtctgaaatgaaaatgtcagcagaggccgggtgtggtggctcacacctgtaatcccagcactttggcaggccaaggcaggtggatcacctgaggtcaggagttgagaccagcctggccaacatggtgaaaccctgtctttactaaaaatacaaaaattagccgggtatggtggtgtactcctgtagtcccagctactcgggaggctgaggcaggagaatcgcttgaacccagaggtggaggttgcggtgagctgagattgtgccactgcactctagtcccagtgacagaacgagactctgtctcaaaaaaagaaaaaaaaaaaaaagacaaaagaaaatgtcagcagagccatgctccctctgaaacctgcagaggaatcctttcttcttccaagttcctggtgtttgctggcaatccttcatgttctttggcttgtagatacatcactccagtctccacctctctcttgtcacatggccatcttctccatgtgtgtctctaaatttccctcttcttataaggacaccagtgattagatttagggcctactctaaactagtgtgactcttcttaacttgattttatctacaaagatcctatttccaaataaggtcacattcacaggtatctggagtaagaacttacacttatctttcagtgggggcataattcaatccataagaccatcttaactacgtagtcaaagttaacatcaccagtaataagacttagcaacatggtgtaccacctatatgatataccaggaaggatacatctttgtgttttttcttgccaaaaatgcataacctgaacttaatcgtgagagaacgtaagattaatctaaagtgagagacattctataaaataaccaaccagtactcttcacaagtgtcaattagagagctctagtattttgctataagatcatgaaagacaacaagacagaggaactatatcacagatgggacagaaatataactttggattctagattagatcctggaacagaaaaaggacactagtgggaaaacagaaactggtggaatcccaataactctgttaatagtttagttaatagtattgccccaatgttaatttcttagttttgataaatgtactgtggttatgtaaaatgttaacatagaggtagtggtgtaaaggatgtatgggaacactctactaattttgcaactcttctgtaaatctaagattatttcaaaatcaatgttttgaaaaagagtatgctcatattaagggaatagataagctcacctgttcttagaggcaaagatggcagggggaataatctttagcaaaaacataccaatttgtgagccctattctaggctctgataattatcttgctattcacaaagtactgtgctatgtgctcatcgtcattatctgtctgtttttgggcagaataatgaagcagaggtgtatagtccagtacatggtccacattttgcctctacctgaaatacgtgatcttgtgtatttgtgctccttaaaccttggcttgctcacttataaaatggggataatgatactagctttctcataagatgttctgaagatgccaagagcaaatccttataaagctcttcgcccagcacctgcacagattgtaagttccctgtaaagcatagctcctacccacagaattctcactgctgtattacgaggttatttccccatttttcagttgaagaaactgagtaagtaacttgcttaagacaagattagtgaatatgagagccagactaaaatagataaatctataaaaatatggctcattctcaaccattttgttagaaaaacattaacacaagagggaaaatctgtaggaattcgttgaaagaaaaggtacaaagcaagctgtcaagtgcccccatgctgggtggagtggggccatttgaagtaaagcttatagctgggaagaggcagaagcaggaattaaagaattgtccatggcgtgaacccgggaggcggagcttgcagtgagccaagatggcgccactgcactccagcctgcgcgacagagcgagactccgtctcaaaaaaacaaacaaaaaaaaaaaataaaaaaaaactttttattttgacatgcaccataggcaggcatgtaccaaatacatgtaccatttgacatgtattttgtcacgtacctgtgccctgcacctagctttgacaactaccaacctgtgaccagtcctgttttcctctttttccatccactttctccactgtcattattttgaagtagatcccaggcattatatcactttttatgtcctttgttcatatatatatattaaaatggtcaaggaaagttggcattgtgtttagaaagttaagagaataaaatgcaataaaatagggtttactcacataaaaagtaagtcaaatgtttcccctgtttatcaggggaggaccctgcatgtccagctgcagggagaatatgcaaatcaagcttatgccatctactggagcctgacgatgactaggtgtgcctgtgggagagtgcagtgcctgggagtgttgtccttgggtatgttacagtaaaaaagctgaggctgaggaccactgaccaggacatgactggtcagcaaacaacagtcagcaaactatggcctgaagaccgaatacagctgacttcctatgggcctcaagctaagaataatgtctacatgttataatgattgaaaaatttcaaaagaataatattttgtaagcggggcatagtggctcaaccctgtaatccccagcactttgggaagccgaggcgggagaattgcttgaccccaggaatttgagaccagtctgggaaacatggcaagaccccttctctaaaaaaatttttaaaatttagccaggcatggtggtgagcacctgtagtcccagtttcttgagaggctgaggtgggaagatctgcttgagcccaggaggttgaggctgccgtgagtcgtgatcgtgccactgcacagcagcctgagtgacagagcaagaccctgtctcaaagaatattttgtgacatgaaaactatgaaatttgaattttagtgttcataaataaatgtttaatatgatatagccacacttatttatttacagattgtttgtgtccgaaagcagagatgagtagtcatgacagaggctgggtagccccttacagaaaaagttagccaggccctggggtagggcatgggctctggagtcagcctgactgggtttacatcctggtcaccttgttttagctgaatggctttaagcaaattgctcactacgtgccttagtttctccatctttaaaatagggattgtagtagtagttaccttgtgaggttgttagtaggaataaatatgcaactatatgtaaagcactgagctgagttcctgctaccagtattagctcattattattatttgtttatgctagagtttctcagtcactgtaagattgtaacttcctatttaacatgaggacaatgaaagccacctagaaggttcctgggtggattaaacatgacccttgggagtacagtttccacacaccacctggcacacagatagaaccctgaaaaggctttcctggaatttccaaacatttgaaagactttttttatttggctccatcaactcatgggtaagagtatctgctagcacaatcaattctcacctcttccttgctcctggccagatgtaaagcagctgagagccacactgccctgcaatgcagcagcctgagtccttatgccagtggctacatttccagcctctcctgggtggtgtttgaggctcaataggggtagagtctcagggcagctgcagacatgacatagatgatattcctactattcctcaccccactctggctgcaaaaaggaagtgcagggaaaatgagtggggagttcctgtatgccagtctgtttcaatggaactatttttggaggaataaaaaagtatgctagattatattggtacgataggcattttcttacattgcatatagtctgctttggcttttacctgttgaggggaagaatgaggagaggataaaaatcattgtatcccctagagaaggaatatcaaaatccatttaataaaaaaactcatactaagaataaaattgcatagtgttttattctcctttgttcataattaaacacaagatattttaaattgtcaaatcagtttctttatgaaaaaatatgacctgtatgcctttattctctcctttccttcttcccacccgtcgcttcttttcttctcttcctttttttctttccttgtcctctgactaaatgaagaacaaacatttgataaaagccactgccaattcatgataaaaattcacagcaaagttggtacagaaaagaactttctctgcgtgttaaagggtgcctctcccatgctctcagcaaatatttaatgatgaaatcttattaataatcactgtagaaccaagaattaaactagtatacccactgtcttggcttgtaatcaacaatatacaggtggttctagccagtgcaataagacaagagaaacaaaaatgttataaggcctggaaaagatgaaacaaactgttattcacaaaatactgtctatacagaatgctcagtgtctttttttcttttcttttttttaaactttagtgagatacccttctgccctatcttaaaatcacgtggtggggggtggtgtctgcacttgaaacaggacacttggttcctgggtttagcattgaccttgcccagcttggtctggcagctgagttgttggactaggaagcgtccctgcaggttgtgttctgttacctctctgtaaagcctgaaagcatccctacgattgcatttgctagttctcagtagagctatttaacaagaatctggaaacattttccctgagggctctctttagacagcagtaaaatgtagctggagacatattgagtaaatggaaaagaaaaatctaatgaggccaggaatttttttaatcttctattctcacagaaggcctcaaggagaacaccataattcatattttactcatgtgggttaggcataaagcctcccccatagatccaataacctgtaagtgttctggttttgaaattgcacctgcttacattgctggatcatagcactaaatcacacagcaacggcttctggttcaattgttcattacttgggaatgtcagattgccagagagcagcctgatgtttacatccaaatcggcaatgccttaggaaatcagttttaattacaatctcacgtagcagcactgcactcaaccttcagagaggctgggatttgtgttgaacctacatcttatagctgtgcagaaaatgcctgtccgactgggtcatgcaaaatggacagcaaagtcagcagaaccttagaaaagatgacacagcaagtggaacacagctggatcatcccccgtcctgtcaagcgtgcagtgctctctggcccctttttaaaacaagggaacccagttggcgtttgcctttcagcttccccattctgatataaaaatctgtgacccagcagctttaaccataaaaaagagagagagaaagagaaagactcagagtcagcgggcaggattctctgagaccaggtcctgctccctcagggaatctttgtcacctcacttgctgtaatgcagtttgtgccaccaacctggcattttcagcccaaagcaggagccatttagacaaattcaggggatgcttaagaggcagtgtgtgtgtgtgtgtgtgtgcttgcgcgtgtgtgtgtgtgtgtattcagtacgctagtggtgcagctctgacgtaaaaaaatgttttaaaccctcctctgagcacaaatgctcaagagcctggcactggacagggagcatcctgaagggcattgtcacctgaagcagaagagctgtcagatctttcccttcagcacttaaatcattgtcacgcaatggctttcatcttgggagattcatcctctgcattttggaactgagccttcctagtgttctgagagttttctgctgtctgttcagcttagcacgctaagaagctggagaggtacccagcagcctggttgcattctccgtcttggaaaagtatttaactgctttgagaaatcatggaatcgtttctggccacattgtgagattgtattgaattttctttttaagtttttaaatttttatatgcaaatgctggaaagcttggagacagtctatttcaaagaaggctgttgatttctgagactggcaggggcataaaatgacatgagagtgtctcagcaggattccaaattcacgaaagatttttccaggcacctactatgttcagaacggggatgcagaaatatcctggagaatctgaagttctgccttaaccctcgaaactttgaaagcaatggctgaaaaggaaagatgaatacctagaggctccctctggaaatgattgaggtttgccaccacaattggctactttggctttgcccatcaaaatttggtatcttcatgtgctgtctagcatctactacaggtcagatggagcttaggaggacaagggtaactcttctctttgtctttgtaaaatgttttgtctatcatcattctcttccccatagcctgttttttttttgttgttgttgttgtttgtttgtttgttttttgtttttttgacacagagtctctgtcaaccaggctggagtgcagtggcgcaatctcggctcactggaacctccacctcccaggttcaagcaatcccacgcctcccgagtagctgggattacaggcacctgccaccacgcccagctaatttttgtattttagtagagatgtagtttcaccatcttggccaggctggtcttgaactcctgacctcgtgatccacccacttcgccctcccaaagtgctttgattacaggcatgagccactgcgcctggccaggctgttatttttatttatgtaattcttgtctgcaaagtccttggaatgggtaggcgccctcccacctatcagcctggtttgaagtaacttgcagatttgcaactaatgttttatgtggaggtgattttcaaaacttgtggctatatatagtatagaaaccgatgtccgtggtagggctttttctctatacattttcttttgccgtctggttataatttataaatattaatatgtgcatttcaaatatgctgtagatacaaagatgctttcttaagagcccagtaatagaacttcttttttaaattttttttttttaatttaatgaagtaagaaaacaatcttggtgctttaggaaagccattgcataagagtggctttaggcaagatggggaaaaggtttttaaagagatgaaaccagaagcaacaaaagacaaggtcattgggtgagaaatcagacactgcttttctctacagaaggggtggggagactggttctactaagtggaagcttctgaattaaaagctggcagatgctgggggtgagggataaggagcagatccctgccccttttctgtcttcccagatactgcctctgttgacatcccctgcctgccatttctccttccctgcctcctaagccaggtcatctccatacagccagagtgagacgtgacactttatattccatagatcagtgtacaaccagtaccttgtggagtggaacacagttgtatgatggagttatgttgtctttgcaattgaccttgacattttacttttttttttttttaactctataggagcctagtaataaacgggtcaaacccctttcccgagtcacgtcgctagcaaacctcatcccgcccgtgaaggccacgccattaaagcgcttcagtcaaaccctgcaggtaagaagggcacacagggcctgtggttgcagaaaatcatggtgtacgggaaggaacatccccatcctacctagaatttcccctggtttcaaagtgacctgaatcaatgcttatttcaatagaagagtgcaagtgaggggacttggaggaagaaagatgtttttcaagttgcagtcaagggtcatgcagagccagagctgttgtggttgggcctttccccacaattgtatttcagagttatgtgccccatccagacatactctcacgcgatttttttcctaaaatatctatgggcctcctgaggaaaccagcacatgatgttagctggagggcaacagagcctagtagcttcaaccagggtcggcaaactgcattgggtggagaaaatccagttcaccacctgtttttttatggctcacaagctaagcctgatttttactttttaaaattcttgggggaaagtcaaaagaatggtgctgtttcgtgacacatgaaaacgacatgaaattcaaatttcagtatccataaataaagttttgttggaacatagccatgcccatctgtttattgtccatggctgctttgtactatggcataattgagtagttgtgacagagaccatattgcccacaaagccaaaaatatttaccatctggccctttacataaaatgtttgctgacccttggcttagaatgaggacctaaggacctcggagtggaagtaccttgggttctaacctcggctcaccttgggcaggtgacttaacatctctaggtcttgcttttattttttattaaaaaaatgttttttccatacttcatcctacagataggtcttgcttctattccatatcagtaaatttgccatgatgccaccaaacgttcatggaatcattgtaaagatttacaagacagtgcatttaaagggcatagcataacaccttggcccttagttagcaatcattaatcttcaaattcgttaactaagtagtaaatattagctactatgatagttttttagttaacaagtagttatagttgttcttaaactgttgatgaagtgtatcttttaaagtgaacgttgagatttatccaagcccttggaccaatttgataattatacaaattttcttttagattgaagcccacaaaaaatatgccatgaaaaggctcacctggtttagctgagcagcagtcttgagtctgccatgtatttgtcctgaatgcttttgcttggcaatattttgtatctctgctttctgagtctttaagaaaactggggaccagaacccaaggcatgcctcatgctgtgaaaatccatgacttgagaactgtttgaggttctccctcagccctttctgtccttgcctgcctaccatacagccaatatgtcatgactccacatagcccaagtggttcttgctactttcccatagatgcccttcctctccattgcttttcccctgccctgcccgttcctctgttaactctgttgcagtttctcctgaatgaatacctcacgtaattagctataggtttgggtctgtttctctcagcacttgggccgctggatccctggttaataccctgatcccttttgtgggagaatggaggaaagagaaaataaggtcatctgggagagcaagatgaagggctttgaaactagtgaagaagaatgtgtttaccttttctcccttgtgaccagttcttcagccctctcgacaagttcatcgcaggcatcccctggaagattcatcactgccctagtcccgcacatctggtctctcactgagttactgctttttgaaaattcttcagaatgtctactgcatttcaccctttcctctccatcccagtggctgtggctcaagttcactctgcaattatttccttccttgattgtcagacctccaaattaccagccatctcttcccattattgctcccaggacagtccaccctctgcccaggaaggccctcattcattcagtcagtgttgagtgaatcctcatcaggcattaggctcttcttgccctcatattgctatgttccagatataacagaattgccttttggtaggtttgctgcagtgctgtgttcccacatggcagtaatgagctagacctaggcagccagccaaccatcacctacaaatgtccccacctctcccaattgcccttctaacacctggccctttactctctgtcattgccttgcctagttggtaggctttttgtgtttgtgctcctgggcctaggaagagcacaatctgtgcctcccactacagcccagccctggctgctttaagatctgttaccataccttcaaaatctttcttttggcttctcaggcaaaatttctttcttctgtttctggggttccttcacaggtaacagtgcaggaaacatttgctcacctcagaaatttacattgacctagagaactagaacagaaagaaatcaagccatgtctgaaatccagcagactgaggccaagcaaggatgagaaagccagacccaaaggaggatctgacatgtggaaattggtttttaaaacctcaaagatttttttggcaaaataatttttttttttttttgagatggagtttcacccttgttgcctgggctggagtgcagtggcgcgatctcagctcaccgcaacctccacctctcgggttcaagcgattctcctgcctcagcctctcaaatagctgggattacagtcacccaccaccacgcctggctaattttttgtatttttagtagagatggtgtttctccatgttggccagactggtctcaaactcctgacctaaagtgatccacctgcctcggcctcccaaagtgcaaaataagtttttaagttaattttttcaaatattgtgataaatagcttactctaagctttatatattggccagaaacaacccagcagaaacagaagagttattcacaatggtaatgtacatagatatggagagaattgagcgatgtgcttatgtttgagagtgtccttggggggacagtgaatggaaatacacccctcaagttgtatgcagagttagcagccatgtttgcagaatgatctgcaaagcatggagaatgccagcttgtccccacatgtcttcttgtaactcaccttggtgcacacggtgcaacttctatggcattatttccagccctagcatctcaataatagtttccctcaccagctagactgagagaaggtgccaatttatattttattttatttcattttattttaatttaatttaatttaatttaatttaatttaattttcgagacagagtcttgctctgtcacccaggctggagtgcagtggcgtgatcgtggctcacctccacctgcgcctcctgggttcaagtgattctcctgcctcagcctcccgagtagctgggattacaggtgcccaccatcacacctggctaatttttgtgtttttagtagagacggtttcgccatgttggccaggctggtctcagactcctgaccttaggtaatccgccagctcagcctcccaaagtgctgggattacagacatgagccactgcacctggctggatgctaatttaatgtggcctgggagcagtaaggatgagggggaagagctggccccaaaggggtgctcagtgggctcacttcacatcctctccgattttgtctaagtcttggttccctttccaataagggagaaacagagaacaaagagtgtatcagctgccccaaacctctcagcagccatccattacccatatgtgtgtattatttatgccttttctattccaaaaatgactcaaggctgtaattgagcagcttggttctctgttgcagtattccttttccctggcttctgacaccttagagacatatatattcctttggatattcaattatgtctctcaggttggattcttttaattatagaagagatgacttaagcccaaataaggtgctctaatcagtgctggaacacttagcagaccttcctctggttcctcaggagaccacaagttagcccaggaggatatcaggagagctctgggctggcagccacttccaaaaatgttaaaagcccagtcacacatgtgagtggtccttgcagccacagttcagcaagacactgcaggatttgttctctcttgcttcctgtgcccatatgggctgggggcttgcaccccaacacaaaggcagcatttgtggacgctggggagggacagcctgactgcatggctctctatctgcttctcaccaggaaggttagcactgccggtagactcaagcacagatgtctggatccctctgagcctataaattccctccctggcctgcctgagaggaaaatctggcccagctctgaaaggggacctcatgcgctcctctggtgtggagtgaggaaggcgagctcgcctttggccagtcgctccctgagccctgcctctccctgtccacagctgttcacggctactggactcatttgagctgagttcagcacatgctatggaatgttgtgttcatgatgttgtgatgtagcccctcattctctttggacttgcactttttccttttccattataaaagtgaatgttcattatggaaaaatgcagaaaaggagaaagagaaaaagaacatgtatagtcttccaactccaaaacaatccattaatagtttaccagtttccctctagcactattctaggcataggtgcagagctcacgtactctgagcctagttttgggttcctcacagtctattcagccttatctctgtctgggtgatctgctcacttttaggttaaagcctcccacagtgactgtggatgatcagtttctcttgcatctctgtcagtctcagcctcacacatttccaagctatgcagttaggtgcacaaatgttcatatttgtcaccattacagcctcctgggggagttgcaccttttattaggattaaatattcctgtttatttcctttaacgctttttgccttggattttgtcgtcatcttcttcttttttttttttttttgcattttgcttaatgtgttttattccatctctattttcctcctccctttgttatttggctgggcaaggagtttttatctagcttaggggggagtattatgtcacagttattcttggaaaatattatctttatgggctgagtatatattattctacataaccagtctcctattaacacatatttaggctgtgaatatttttatattaaataactctatgttgaatctttttaatgcatttgtccttttttttttaaattaccttctattgtgctttgttttctgataatataacatcatttaaatattgaggccgggtgtagtggctcacacctgtaatctcagcactttgagaggctgaagcgggtggatcaccagaggtcaggagttcgagaccaacctggccaacatggcgaaaccctgtctctactaaaaatacaaaaaattagccgggcgtggtggcacacgcctgtaatcctagctactctggaggctgaggcaggcagaattgcttgaacccagaaggcagaggtcacagcgagcagagattgcgccactgtactccagcctgggtgacagactgagactatgtctcaaaaatatatatatatattgaggctggggctgggcatggtggctcacgcatgtaatcccagcactttgggaagccggggcaggtggatcgcttgaggtcaggagtttgagaccagcctggccaacatggtgaaaccccgtctctaccaaaaaacacgaaaattagctgggcgtagtggtgcatacctgttgtcccagctacttgggaggctgaggtgggaggatcacttgaannnnnnnnnnnnnnnnnnnnnnnnnnnnnnnnnnnnnnnnnnnnnnnnnnnnnnnnnnnnnnnnnnnnnnnnnnnnnnnnnnnnnnnnnnnnnnnnnnnnnnnnnnnnnnnnnnnnnnnnnnnnnnnnnnnnnnnnnnnnnnnnnnnnnnnnnnnnnnnnnnnnnnnnnnnnnnnnnnnnnnnnnnnnnnnnnnngcattttttttttttttttttttttttgagacggagtctcgctttgttgcccaggctggagtgcagtggcgcaatctcagctcactgcaagctctgcctcccgggttcaagccattctcctgtctcggcctccccagtagctgggactataggcgcccgccaccacgcccggctaattttttaatattttttagtagagacggggtttcaccatgttagccaggatggcctcaatctcctgacctcatgatctgcccgcctcagcctcccaaagtgctgggattacaggcgtgagccaccgcgcccggccgcatgtgcattttttaaaacaaaatgactatcacactgtatatgctatttttttactccctttggtcttaacggtataaaataactctacaatagaagagtatttttcatgtcgttaagtagttttcaaagacttgatttttttttttttttaatagagacaaaaatctccctatgttgcccagactggtctcaaactcctggcctcaagcagtcctaccaccctggcctcccaaagtgctgggattataggcatgagctaccacacctcgccacagacctgattcttaatggactcataaagcatttcatcaaaagaatgtacagttgagttaatcactctcctgttgttgaacatttgtttctgttttttcatcattatagataacagtgctttcaacatcctgatcatgtgtatgtctgtatttctttctttcctttgattatactcctagaaatggaattctggtcaaagggtgtgaatactaaaggccgttgatacggcaaggcttctgttcttgatgtgtgtcagttttggatagaattgcttctctgttttcacatctaaatctagacttcttacatttctccttctcttttgctacagtttttctctttgctgtgatatccctcaagatagctcttcccaggggtcccttgggttttccatgcaagccaaggtggtgtcttacttatctctgtatccacagtgcctaatactacacattacttaggatgtgctcaaaaattagtacttgctattattatcaccgttatgactagaaaaggcagccattgctgctcctaagctctctgcagagcctggcagtggctgccagtgatggggccctgcccatcttcttcaactgggctgaaggagaatatgtgtcccctcccccagttgtagcccctccaggaagtattgctatggcaaagaagggtttctagcaaccactgcctctcattgctccatcctctggcccttagatcagggagttattttattcaacccagatgcagcatgaacatatgataaattagtggtctccattaatgttatttggatctactgtgttatttattctgcctagacttaatggggagagagtcaatacagaaaggtaggtagtcctgctctagagattgtaaaagttctacttgataaaagttgtctaaggtatattagcaagtagaggaagaaaattgggggaaagttcaaaaccactgtcccagttgataatatacacccatattagtatatggatagggaaaaaaaaccaggaacgtcaaattcttttttttttctgttgtctcttgggaatacaattatacttttgcagttcttttgtttattttgtgttctcctccttttttccccagtatgtaagaattacaaatgaatagaaaataaatgagttggaactattgattttttcattatatatttctgttatacttgaattttttaatatgtattacctttgcaaccaaataaaaatgaataagattagaaaatcttctatgataaaatatactacagagagagtttagcaatggcctgaggggtcgtcaaggaaggctgcttagcaagggtggagggatttgggttgggcctggaatggctcacagatgataaggatgaaagggaggaagcgtttcaggcttcagaagggaatatgggatggctgatgccatctagatataagaaataataagtaagaaattacccaagcatatgtgctgatttccatgtctggcaaccatgattaccttctccaaggacctcaaactttgtcccttggtccaaggtcataaattttctataactaacttatttggctgacatggagatgagcttgggggtggaaggcacatgtgtgttagggaaagcaaccagaaaccagactgtcttgtaatgggtatccaagggagaggatataatcatgggttcttagtttctctttctggttgggccagtaaagccccttccttatccctcttttccgcttatcactggaaacagaaactaaaaaccatggcttcaggctgctaaaagcctaaaacaaaacaaacagaacaacaacaaaataaggcaagttggacaagcttggagagtatagctgacaagttatctgtagtccatctcaagaggaactcctgattctctgctgttctttactattcctggagtggtagaatattactgtttattgttcctggaagccactgtaaatagttgatattgggccgggtgcggtggctcatgcctgtaatcctagcactttgggaggccgagacaggcggattgcctgagctcaggagttcaagaccagtctgggcaagatggtgaaaccccgtctctactaaaatacaaaatatcagctaggcttggtggcaggcgcctgtaatcccagctactcaggaggctgaggcacgagaattgctcgaacccgggaggcggaggctgcagtgagctgagatcgtgccacttcattccagcctgggcaacaaagcgaaactctgtctcaaaaaaaaaaaaaaaaaatttgttgactattgtaatttaaagcttgtcattttttatttagtaataacactcattagtgtagtatctatgatgaaccaggttctgcacaaagtaccttatgttcatggcctcatatcgtcttctccaaaactctgcaagataggattcatcaccacttatagggagagatctgaaagtttaaaattgtacccaaggtcacacagctggtaagtgccagagctgggattccgtagggtgttcagagtgcctctcctgccgtaggcttatcacaaaaagtcaaagtttggtcataataaagcctgaagtttggcaggatttaaaaatagtcaccagacttttgagttggagcatcccacctcactgctgttcaccttctgtggcagggagagtcatcatttccatttcagcttgtggaatatcttgtcattaacattctcatgcaaaagccattttatggtgcccaatgaagatggttgagctactgccccaagcctctggaagccttcctaattttggacttgcactatgcaaattgtataatattttctctacacctaagccaaatattttcttcagcttttcattcattctactcagaatatctccaagctacagaagggtttcttgttgtactgggtctttgaggtttgacatttattgattatgaattaattgggtgcccttttaccatggttttaatgtgcatcaatctgaatcagattgtaaatatgtggttttatgtttattgcaccatttctaactcagtgttcattgtctttcatgttcgtcaactgaccgtgtttcttcttagttaatatttcttcattaaagaaagtctggaaaataaatgtagagaattaaaagatgaaaataaaaatcagccaggtgcagtggctcacacctgtaattccatcactttgtgaggctgaaacaagaggattgcttgaggccaggagttcaagactagcctgggcaatatagtaaggccctgtccctacaaaaaaaaataaaataaaatcaaaaaattaaaaataaataaaattttaaaaagaaaacaaaaattatccgtagtcccaccatccaggggtgtaaaccttgttaacattttgttgtatttcaaattgggatctttcttctctcacttaactctgcatgtgaggctctctccttatcattaagcttttctcaaaaagaatgtttcttaacaactgtttaaggttcccttttattgttgcagagtaatttgtttaatccctattgtagaacattttaggctgtttccagatcttttataaacaacagtgtcctgctgagggcttttctttccctaggagttatcctaatggaagtccctctaggagccatttggcccaggtagttcagaaagatgtgtctgctgtttgctaatgaatgaaagcacgtataaacaagcactaatagtggcagtgtggtctgtggtatgacaatgataggtaactaccattcctgctgaccgagtgccagggacttggccaagcctcttgtgtactttatcttatccaatcctcactacaactttgtgaggtacttattattatgcaccttttagagatgaggaaactgagacccagagagatgaaaggtctctcagccattgaatcaacttgaagccatgcctgttttactccaaagcctatgttcttcacccaaatccatgttttggagtcaaacaattgcactcagttcctattccaacacttaacttgtgccactcacttaccactctgctactcaaattactcatcctctcctaggattagcatgagggtcaaatgtgacagagaccacacagctgggaagtgttacttctcacttaacattaatttctgtaatggagcctcataggagactcctccaggatgctgttggttaacattttcctgtcctggccattattgctgtacattttggtttaacccaccgcagtggcaacataggagagttttttcctcttacagtcccaccccaacctccaatccctgataataaaccatctgctacaaaatagcaatatggttagcatggtaagtgtggagaatttccttggcttgaatactttattggagcatgttatctgtggctgtggaaaatggtttttggaaaagggcaagggaggactccgctgaacaggcggcattaacaaatcagatctgtcccatcatgtctacctgctgggtttacatttcctctgacacgtgtaaagcgcacatgccacccccgtcccccaacccccggcagacagtctgttttgcatctgcagcatcttttccacatatccagcttgggcataaacttgagcaccatttcctcaatctgcattatctctgttttatggtcattgttgttttagctgccagcaattatgagattgcagtttttgactcatttgctaggccagattccctcatggaaactcttgcttgtcctggaatatttttcactccggtcccagcatccccacacccagggagatctatgtatgtgcttctgtttttatgtggtcctgcccaaggccaggtccctcactttgaggtgggcctcttctagttaccgtggactggcgtttctcaccccaggaacatttggcaatgtctggaggtgttttggttgtcataactgggctggctgtgctgctggcatctggtggttagagggcaaagatgatgcgaaatatcctacaatgcacaggagagcctcccacaataaagaatctctagtccaaaatgttgtggtggccaggttgagaaactttctacaggccaagaagtaaactacagttcatttatttgggcacatgtaccccgctacactatgaatcttatcctagggcaattagggtaggatattggttaaatattggggcagggaggttggcctgaaatagaccagacttggattgtcattctgacagtcaccttaccaccgggttttaaataataaagcaccattcattagctgtgtgaccttcagcaaagtgtcaccttctctgagcctcaagtttccttgtctgtaaaggggacagaatccttacctctcagataagcagggctctaaagctcccctcacagtgcccagcacatagcaagcataacatttaatcattaagcaaaagttgttgaggtcttactatatcagttgctgatgaatccatcagtgaatagaggaggtagatatgcctgccttcaaggagtttaccttctattggaaggaaatagacatgaaagaaacaaacaaacctataaatacagcacatgttgaatataaaaaaaaaagagaagggcagagggtgtgtagatggacagtggcagggatgctgatagggatgtggctgttcttctctctaaagaggcatcctcttggagtttttttcttctagtagtagttgcctgttcctccctcaactctagttctctcatgtagtttttcccagtggtactgatgatgggttcaggggtagctcatggtatgtggtcagtgctgttatgaacacctgcccatcacccatgtgctgtccccagaccagaccagctgctgccccttttccccggggccagacggctgctgaccactcactggtttggtattcttttattattattcttttttatagagacagggtcttgctacattgcccaggctggtttcaaactcctggcctcaggtaatcctcccatctcagcctgtcaaattgctagacttacaggtgtcagtaacctcacctggacaaatggttggcattctttattcctcccttgggattcttctttcaacatccagtcccttctgagtggagtaagaaaaaatgtttcttttaatccagcctaattaaaggtgtaaatttgaaatttgattggtcagatatcagccattattcctaaaactgagcaaatgtattctctctctttccttaagtagatttatattcctagaaggcaggagctggatcccatctcattgaaacttccccaaaatgcatgtcttgcatgtaaacagtagatgcagtccccaaagtagaaagagctcaggctctgttggaaccagatctggttttgaatcttagcctccctcaacctcagtttcctcctcagtagaatgggaataaacccccaacttgcagggtggttgtgagaatcagagagaatatatcagaagtgctacgtgtaggcaaagcgcataaaagaccctctgtgatatcccccatagtaccctgagcccagcaatcactagggaaacgcaaagcaagaaattcatagtggtagagctcacctagtacagcttactgctctcttttttcccatgccgcagcagaagacaatctccaactctctgggaaatttttaaataaattaattaaaatatgctcaatcttaccttcaaaacacaaaactgaaattaaggtatagttgtttaacctatcagattgataataataccttgttgatgagagtgtgagcaaagtgtactattatgtacctatctgaggaatataaagttgaatagcctatttggaggtcaacttagtggtacatctcaaacattaaaatgttcatacttcttagaccaaggaattccacttaaggaattcctgccttttagaagtatcagcacaaatacacaaagcatgttcactgaggcactttttgtaatagccagacactggaaacaattttaatgtccatcagttgtggattgattaaatcaataggtctgtccagactatgggagggatactaattctgcagccattaaaaagaatacgtgaatttgaggtaatggaaatgttttggaactaaatagagatggtagttgtacaaccttgtgaatatactaaatagcactgaattgttcactaaaaaatggttaattgtaggctgggcacagtggctcatgcctgtaatcccagcagtttgggaggctgaggcgggaggatctcttgagaccagaagttcaagaccaacctgggcaacacagcaagaccccatgtctactaaatcaaaaatacaaaagttagccaggcacttgcttagcggtggcactcatctataatctcagctactcaagagattgaggtggaagcatcacttgagcccatgagtttgaggttacagtgagatatggttgcaccactgcactccagtatgggcaacagagcaagacccatctccaaaaaaacaacaacgaaaaagtaattgagttatgtaaatttcacctcaagatactgtcaagtagaaagagaaaacattctcggccaggcgcggaggctcacgcctgtaatcccagcacttcgggaggccaaggcaggcggatcacgaggtcaggagatcgagaccaacatggtgaaaccccatctctactaaaaatacaaaaaaattagctgggcctggtggcgggctcctgtagtcccagctacttgggaggctgaggcaggagaatggtgtgaacccaataggcagagcttgcagtgagccgagatcgtgccactgcactccagcctgggcgacagagcgagactccatctcaaaaaaaaaaaaaaaaaaaaattcagttttctatgaatgttaacaaatgcatggaaaaagtttggaaagagctagaacaaacttaacagttgttacttctaggagatagacttggggaaatgagggcatttgtacttaattttatatacttttgtaatgtatgagaatttaaagttagcatacattattttcaaactggtagggggagtttaaagttagccaaggactgaaaatataacaggataggaggttgattctctcaagtgaaagtggaaactttcattttgaagtttttgtgtgtgtttcctttctttctgctctttaattcttaactcagctgccatcagaactgcaaactgggttgagcaagttacttaatgactcactgcacttgttttgaccttttaatgcttgtggctaattgattccgagtgctggcgatctgtgtgcatttagttcctggttactgtttacaagggactgtttttaagagatcacaaggatttgtaagataccattagtgaactgtgtatttggtgcaagtactttcttgacctgcatagggctggtccagccatcatgagctcattagtgagcccaggagcacccccactacttgtgccagcctaaggggcttgtgttgctacttgcagagtgagcgtcctgcttccagaaggttgtggtaataccctgaagctctttggaagtttctttttacatttttcatttattcttacatatatatctatatatatttttttaatttagaactgaaatgaggtcttgctacgttgcccagagtggtctcgaactcctcagctcaagccatccgcctgccttggcttcccgaagaactgggattacagacatgagccaccaagccccgcctcattttctatttttttttttttcctttagagggagtcttgctctgtcgcccaggctggagtacagtggcgcaatctcagcttactacaatctccacttcacgggttcaagcaattcttctgcctcagcttcccaagtagctgggattacaggcacctaccatcacgtccagctaattttttttgtatttttaataaagacagggtttcaccatgttggccaggctggtcttgaactcctgacctcaggtgacccacccacctcggcttcccaaagtgctgggattacaggcgtgagccaccacgcccagccattttagacactttgggaggccgaggcggggcggatcacgaggtcacgagatggagaccaccctggctaacacagtgagaccccgtctctactaaaaatacaaaaaattagccgggcgtggtggcaggtgcctgtagtcccagctacttgggaggctgaggcaggagaatggtgtgaacccgggaggcggagcttgcagtgagctgagattgcgccactgcacaccagcctgggcgacagagcaagactccatctcaaaacaaaaaaaaaaggctaaaaatatataaaggaggacagaaatcactcataatgtcaacatgaaacaacaatagaattttgtgatgttccctttatatctttgctcatgtgcattttttgcataactataaaatgttcacatatagatttttaatcctgattttattttaggctacatagaaggggtgtttacattttaaattatctctgaattgtctagataatattccatccagcaggtaattataacttttttttttttctgagacggagtctcactcttgtcgcccagactggagtgcagtggcacgatcttggctcactgcaatctccgcctcctgggttcaagcgattctcctgcctcagcctcctgagtagctgggattacaggcacatgccaccacgccccggctaatttttgtacttttagtagagacggggtttcaccatgttggccaggctggtgtcaaactgctgacctcaggtgacccacccacctcggcttcccaaagtgctgggattacaggcgtgagccactgtgcccagccacttacaacttatttaacaatgcccttatgttgaatagttccttttaaaatttttctttactttctggaattttattgttgaatctcaaaataactgggaactaccttagaatgcctttgtgatgaaggctcatatgtcataagcaaattcaattcctgacctcaggaagtttctagttaagagcaggtgaccaataattataatcaagtatgatcattgctatatcagaagtatgtctgaattgctctgggggaggaggatgggagaatgttggtgaagacttcttagaggaggtgctgtttgagttacatcccgagggcagttaagagttagccagctatggccggacacagtggctcatgcctgtaattccagcacttcgggaggccgaggcgggcggatcacgaggtcaggaaatcgagagcatcctggctaacatggtgaaaccctgtctctactgaaaatacaaaaaattagccgggcgtggtggcgggcgcctgtaggcccagctactcaggaggctgaagcaagagagtggcgtgaacccaggaggcggggcttgcagtgagccgagatcgcaccactgtactccagcctgggcgacagagcaagactctgtctcaaaaaaaaaaaaaaaaaaaaaagccagctatgaagtgatggaaacacattccaggaagagaagattgtttgaagggagtacagagggatggcaaagcatgacatatttagggaatgacagatagcctagtatggttggagaaatggaggctcatggatgagtggcaggatgggatcctaaatatggagactgtggtcagattacaagagacttcctgtgccaagatgaggagttgaaacttcctgctgaaggccacagagagccatggcagggaacacttcctaaataacaatgtggttttggagcacagcaacctcattgctttggcaaagtctccaataagtgtgatgaaatcttctaggatgaagactgaaaatgatgcactcagctttcttctggatcatttgtatttgtcatgaaaagcattttggtagcatgtttaagtcacacaggtggacttctgcggcctctttgggaaataggaaaatacctcagggacaggaatcatgtgctgcaaagatggtatttagtatgtgtattagtcaggacttttcaagttgacagaaccccaactgagataatagaaagggaaatgtctttctatatgtaatgaaaatgtctaagggtggttctttctggtttcaggcacagtgggatccagaggctcaagcagtattggtaaagcttgctcccttcctgcctccattggtcactccatccttcattctgggtctctttattctctcctgtagcagacagatgcttctgtgtaactagggagagttgctgctggaaggccctgcttgtgttctctcttgaactcacaatcccaaaggaatactctttcctcctttctcccgtaactcatgtgacaaatttcagggaatcacatgcccatccctgaactaggatggtggaatactctattggtcaggtctgggggtgcccaccaaaactatatgtaataggatacccaaagttagtgggattctatttatagaaggaggagagtaggagtactggccaaatgtttgaataaataaaggccatccactattgttatctctggttcttttaaagaggggagatgtccactggaaaaaagtagagctcatcacgtatccaagaactgccttcatgcgtgagtttggcctgatatgtgcttgcactatagtccacttggtatccaggtcacacagaacagatactcccagcacatgttccaaagcagccccctgtccaattttccttagcacgtaggctcaagacaatgccccacttcccaaaggccttgtggcaatgtcctctttttctttcacatatatgatttatgttccgtcaacgacaggaaactgctcaaagatccacccagtcctgccgctgcccccgtgatggtttgtttttctcattgtttagcgctccattagcttccgcagtgagagccgccctgacatcctcgccccccgaccctggtccagaaatgccgccccctcgagcacgaaacggagagatagcaagctgtggagtgagaccttcgatgtgtgcgtcaatcagatgcttacatccaaggaaatcaaacgtcaggaggtaggctcggggcccatggagctggctgtgtgtctggaacaaaggtgcattgcagcgtcagccatgctggaatttgcgccttagtctccaaatcaattcttcattgcgtttgcagaaggataaacaagagtgtctgaccttggggaaggaactgagaaaccagaaaccagctgggagggtgtggcccccactttaaaaagaaactgatgtgaaaatatgaatttacaagaagatgaaaccaagtgtctatttaggattctgaagttcacaaaaataatcattttagttatattttgttagcaacttatagactattttaaaatatttagtttacatagctttgattcagcttcatggaaaacttcctttctatagaatccagttaatttcattcccggtaagttttctgtatcagttgccctaaatgactctgataatattaccctgtatagaagagcttgtttaagtgcttgtgccaggctgtgctgagcacttcatgtgtgcatcatctgatgagatccttggagtatccagctcagggttgtgcctccacctgctttgtcctcagtttaccaagcagccccaggtggagggagctttcaaagcctgaccgctgtttccctatatcctgaaacacagtagaccctgaaatatcgttacaaacttgtactcctttaataatgtaatgtttgctgacagtttgacttcccagatggaagtgaaagagtgttctgtgcatcatagctctttagcatgatggcttaatagagccaaattagaaacggtccatttacctactcttccacacagccagcgcctataattttatttgttgtacctgtggggctgagaagtggtttagaatgaattaacttcaccaggttgtatttggagtgataaaatgttggattcttcctacaatctcagcctcaaggcagtggataatacaaataaaactttctgctgagattcgccttctgtcgagtagaagaaaaagtggggatggcccagttaataatactgccacatccattatctagaagagcctctgaatcacttcttatgatggcctctcacaacaagggtaccaaatccatggctcacactgtaattattttacctaaaatagttccctcttgttcagctgcatcaaagttctgtaacatgaaagatgactttttggactagaaatgtgtagaaactttctcccacaaacagagaagcacaatatgcagcagttttgcaatatcttttcattgcaggtttaagcatagatgcatttgcttcaggttaacgtaacttaaaatacttaaatatgtaaatttggggttttgagtggtggagccagcactatttgaatatggtcttgtaaatgaagggagaattcagtgaatatgtttatctttccttgcaggcgatctttgagctttcccaaggagaagaagacttgatagaagacttgaaattagcaaaaaaggtaaatttaaatccagcagtcacttgagtcaagtcacattttttttcttgagtaatttcacaaccctaaagtggtgcttcatgagaactgtctttatgactaagactggtctgctaccacacaccaagcagtggggaaagtgtttcaaaacaagagggcagaatagctctccagacctggcacctttaggggtttacctctgtatgtctctaatgcatgtcaaagaatacttcagcctaaatcagaaagtgtccatggaggcctcgccttatgtatatttcattgtcctagaagtctcatatgtaggactctttgcccataggagagaatgtgtgcatgtctgaaacttgaactgagtcttagaaataaagccatttgaatctcaaaagtgaataaagtgaaatgaggcaattgcatactatcatataagttggggtcttttatataggaatttgttttctaatcaacattttgtgtggggaggaggaggacaacaaaccttcctcaaaaacattttcgttccagtggcacagccccccaactccatggcttggaggctaaaatccagactccttcatctgatattcacagcctcctcgaagaatcacagggttggaaggctacatcccttcttttaagggtttttagtctttctgctaagatgaaattccacctctagcattcctgagagatggccacccaagctttgcttggacacagccaagaaactgagttttaggcagagctggaggaggaggagatcagagaggacaaagaagttatttcactctgagagttatcatgctggtgtctaactcccctttcctgcatcaagatttgccaaactcaagcaccttcaggtgtttcccagccatccttttgcttatggtggccctaccttcctagaaacttttctctttcgtttcaaccattcatatccacccatccttcaggaaccagctcaaatctcagtttattcttacataacatttattgcctccttctctgtaccaagcagcttatcttcaaaacttcccttggccactccagctttaattctctgaccttctagagcagttttgatttgatggctttttgctgtcttgtgacatcagtctggtttttaatctttaatttttaaacataagccgggtccggtggctcacacctataatcccgacactttgggaagctgaggcagaaggatcacttgaggtcaggagttcaagaccagcctggccaacatggtgaaaccctgtctctactaaaaaatacaaaaattaggctgggtgctgtggctcacgcctgtaatcccagcactttgggaggccgaggcgggcagatcacgaggtcaagagatcaagaccatcctggccaacatggtgaaaccctgtctctactaaaaagtacaaaaaaaaaaagaaaaaaatattttttaaacatagatttagttttccatgagatcagaaactaaaatataaactagaaaatattttagtttttcttatcttccccattagctttataaaattccttgaaggtaggagacttttaagtctttgtgttctattttagtgccctgggtataactgtgtattcttgttgtttaattttctctagtaagaggtgataggattatcacctttgctctctttgttcaaatcagtagtaaaggataccaatcactgtttctttcctctttttctttattttaaatatgtactaattgaaaaaagaatctgctagtagctagttttgaataaagtgggatttttttaagaggcaggatcttgattttgaaaacattttaacagtcaaatctgttctatacctaggatttgtgctctttcctagatatatgacatactagaataaaaaagcttttgaaaaatctgctttggtttatcaaccacaaaggcttaaggcagtgctggtttctcctctcctccagccacacctctctgctgtttctgcagctttatgggagaagttgttagagagccagaagttttgttattggataggacctctcaggagccacttacatgaacaatgtacttcctctgattttaaacatgtgcttccatctcttgccgtttttgtgcaggcctatcatgaccccatgctgaaactctccataatgacagaacaagagttgaatcaaatttttggaacactggactctctaattcctctacatgaaggtataattttgttcccaggatgagtcgtgacttgtagccttaactgagttgtcttataatgagtgagtgattattaattgcctgcaatgtgaataacccagaacctacttccagccctgttcatatttgaatgcctaacaaataagcatctgtttgttttttgccagagctccttagtcagcttcgagatgttaggaagcctgatggctcgactgaacatgttggtcccatcctcgtgggctgggtaagaaagttctctggtctttattgaagataaatttcaataatatagatgggagtttcattttagctagactttttttatttttatttttatttttttacaaatgttggtttcacatcagaaaaaaaaatcctagtaaaattttaattaaatttaagttttgtatctttaaagcatgaaaatagtttttttcttattacaaatttattgcatttaaaagtaacagggccttttggaacaaaataagtaaaggtacacatgaaactattactagtttcgtatcaaaataaaactagttaatattccgtcaggccaatcgctaacataatatactccaataaaaatttattgacatatatccactaccaaaaaaaaaaaaaaaaaacttgtcatgctattaaaaaaaaattctcatggtcaaaatgcagttttataaacaagatcataagtaaaggttgctaatgtttagcatattaaaaaaaactttttaggccataaaaaaaatctcatggtcaaaatgtagttttataaacaagataataagtaaaggttgctaatgtttagcatatataccatgctaagtaatttataggagagctgggtatatggtgaccttcatcctaatataatccattccttttcctaattaaataaaaagaagtaagctgtgatcttagattaggagtcataaatttatgatcctggggctggatttgtgttttattgtgtacttaaagttgtttgtttcacttacgctagacaaggcgtgtgctcttattttgcctcagtccccaccgctccctattctacacatttatgtttccttctgtgagtgcttgaatggtccaccccagttccaggtgtttttcatttgttataaagcagataatgagaggagattactttgctgacttattccaggcaagattaggtctctcatcactctgttgctcacagtattccagaaaaataggcaggaagtaccacaacagctaatattagagattatttcactgtttggagagtgttgtgaaggttataaatcctactgttgctatgtgagttctctttattccgttacatctgcattttaatcttcctaaaacctttcagttaacatgccttgataacacatagatgtgcagaaagttttaacattgatcttttaacttacgtttctcaatgactgccttgatcaagatacttgatgagagtttcatgacttaaatagctttagttcaggagtcaattttagcaccaaggctgaaatatcccaagggtatccgaaaggcaagtaatgttctaagatgaataatttagaaaatatgccttaatatttcaagagagatcattcatcttatatttttgactttcattttattatgagccatcgtagatgttttaacttctttagcccacaaagaaatttctccaaagagagccagccaaccggagacagacagagacaaagaaggtataatgagtagagagtgcctcagtgtctcttaaacttcctgagtctgtggactgctttgatatgggggtaaatggagcagttaggccacactccagaatttgtaggataactcctctgcttttgatgagacagcagtacaggactacatggtttccttaagcatcatatgcaaattgtcagtttatgccagaagcaaaattgtaggaatttgccttgttagtaactttttgctgaaataaacatttgtcacgtttattagaaaattggtttgatctgggagcagctttgcagtcattttctgtacatacccaaaggaagtgtgaccatgctggcccattgctatctggatgcttcagacatcaaatgaggacttggatcttgaagagcagcctaaaattaaacaactggcccgttgttgccagacttcgtgagaaatggcccttatttatcaggcctgacaagctgttaaatgtttttcctcttttaactgcagatgtgtccgtctgagtgggaacagtaaacctaggggtacatatgtttgagttcttgtatttttaacagaacaaaataaacatcttagtggactttggatgagaagagtcccattcgacccatgaaaaattgatttattttctccgcaaaggaaaaaaggggggtgggggggaacccttttaaacaagtgagccttccaagtgggacagccctggccagtccttttgaccttagaatgaatcaattacttttactttgaagaccttaaacagagtggttgctttttttcagggaactaccccggttactgagaatcagtgtccccgctccctaatgggtcagcctgtttgagtaagccttccctagcataaagaaacaacttcccaagtgacttatctctatgccaacgttttttcaatgatgaaatactttataagctctccaaggcagaaagttctcatgttaatttgttgtctcactaaattttaattcccaggaaagagccagagtacatggaagcaaaaaaaaaaaaaaatagattttttcacaatattagggggataaaagaacttctttaaaaagtgagtttcccttataaattcttgatagtctatttaataaagagatggtgaatagttcagaactctgagggtaaaggggaagcaagaacaagcttcagactctcgttttgtctccagctgagcaagtagctttggttctctaaacgacagtttcttcaataaaaatattctagggcccaagcacagtggctcacgtctgtaatcccagcactttgggagcctgaggcgggtggatctcttgagcccaggagttggagaccagcctgggcaacatggcgaaaccctgtctctacaaaaaaaatattagctggcatggtggtgcatgcctgtagccctagctatttgagaggctgaggagggagaattgtttgagcctgggaagaagaggctgcagtaagccatgatcatgccactgctctccacctgagcaacaaagggagaccctatctcgaaaacaaagaacttcttgggacaagtaataatagctagtacttactgattctatatcagaagccaagctccatgctacacattttgtatgctttacctcattaagggagagggggacattagtatatacattttgtaggtggagacactgaggcttggaagagtcactgacagctgtgtgagttaggctttgaacctgattctccctattactgagtctgtccttttttccgagacagtctctctctgtcgccaaggctggagtgcagtgatgtgatctcagttcattgcaacctttggcttctgggttcaagcgattcttgtgactcagcctcccaagaagctgggattacaggcatgcaccactatgcccggctaatttttatatattttagtaaagacgggattttgccacgttgcccaggctgggctcaaactcctgacctcaagtgcctcccaaagtaatatgattacaggcgtgaaccaccgcacccggcctagtctctttaactgcattttcacctctcattctgaataagggagtgtctgtatttgagaaccagatcttgtacattattcaccctgtgtagttaaagatcacttggggcctctcctagccggtgactgaaccagatagcctttcaggtcatgcccaggaaatgagcaccctgtcaggtgagagcacaggaccagagccccatttggttgccatggtagcagggcagcaggatcacagggagcagtggcccattggacagtgagcagcagtgtggtcgaggttcctcactagtttacatccaatggttactgctgatttgtttcttcctaatgaaaacattgggcatttccagatctttttaaaaggtgaggaagtggaaattaaatgaagagggcctgaggccctttttaattaactctgaaagtctaaattacaagccacagtaccacgtttgggttctctctctctctctctctctctctctctctgtgtgtgtgtgcgcgcatgtataagtaccaattatcattactttcaaataataatagctagtacttacacaaatataaggttgagggaaaaaatgtctgcaactctttaacacaagtagagatttttaataacatgtaaggaaggtagacatttcaaaggaatgttaagctcaatagtaagcttgtaaaatattactttcctggtatcctttttatggtttcagtcactgaggaaataatttcaataagaggtgtaaaagctgcagcagagtatttaaagtttcagatgctgccatactttatttatttttatgtatttatttatttttttttttgagacagagtctcactctgttgccaaggctggagagcagtggcatgatctcggctcactgcaacctctgcctcccgggttcaagagagtctcctgcctcagcctcctgagtagctgggattacaggtgtgtgccaccatgcctggctaatttttgtatttttagtagagatggggtttcaccatgctggccaggctggtcttaaactcctgacctcgtgatccgcctgccccggcttcccaatgtgctgggattacaggcacgagccactgcgcctggccgccatactttatttttaagcaaggttcacaaaccatcaaatattacctaatcttgtaatccattaaacatgcatttatttgttcattcagaacacagagtgtctgccatatagtaggcccaatgcaaagtagtgaggatacagaaatgaaagacactcctttgccagtgtcttgcactgaatccctctgaagagcaggtgttacaagggactagggcttcctagtacaagagaaagaaacaaaagcagttaggccattggctgcatttgattgcttctggtaactttctggaggctgatagctcttagattagaacaccaaggcagaaaaagtggatgagaagccttttccgttgaatctctgacatggtatttgcacagtgtgactgatgggatgtgtcagagaaattagcattttgctagaatgaaggcagtgaaggttaaatgttccaaagtctttaagcttaaattgttcattacatagtattgtacaggctcacgcctgtaatctcagcactttgggaggccgaggcgggcggatcacgaggtcaggagatggagactatgctggctaacacgttgaaaccccatctctactaaaaatacaaaaaattatccgggcatggtggcgggcgcctgtagtcccagctactcaggaggctgaggcaggagaatggcgtgaacccgggaggtggagcttgcagtgagccgagatagtgccattgcacaccagcctgggtgacagagcgagactccgtctcaaaaaaaaaaaaattgctttgtgaaagcaagccagagcctaagaaaattgtccactgcctgccatgttgaagattccactagtttcctccagccatgcagataaaggaatgtcagccagacccagagaccagttaggtgtttgttcagtcccaataaatgatgccaccgtagcctcagagctcaattattttgacattccaaccttctctttctgtttccttcttagctcccttgcctcagctcctatgatagctactgcagcaatcaagtagccgccaaagctctgctggaccacaaaaagcaagatcaccgagtccaggatttcctacagcgatgtttagaatccccctttagccgcaaactagatctctggaatttcctcgatattccaagaagccgcctggtaaaataccctctgcttctccgagaaatcttgaggcacacaccaaatgataatccagatcagcagcacttggaagaagctgtaagtttgtctgtttccttctctctcttcttgttatttccaccataatggctggtggattgggtcagtgggtgaatggaagagtccctgggtacttagtactcaggaatcttgggttccaggcctggcactgccatcaaccatgttttgattttgcaagtcacttctcatctttctgcctcagtttcctaaactgtaaaatgcagtgcttacatgaaacacgctgtaaggtcccttagtaaaattcttaattttatacaggtgactctaatctggtgttacagttgctgtctgtgagggacaagatctttgtgtatattttaaattttgtttagttagaaaatagtaagttgccttttagcctagccccaaaactcatttgtgaagtggacatccatttaaaatctagctccatttagcccccgattacagtggcttgccttgtcaaacctcctgctcactagtgggatcctcactcagcaaatgtttgttgagtgtgggccaggcacgatggctcatgcctgtaatcccagcactttgggaggccgaggtgggcagatcacttgaagccaggagttcaagaccagcctggccaaaaaagcaaaaccctgtctctactaaaaatacaaaaaaaaaaaattagctgggcgaggtggcatatgcctataatcccagctactcaggaaggtgaggcacaagaatcgcttgagcctgggaggtggaggttgcagtgagctgagatcacgccactgcaactccagcctgggcaacagagtgagactcttgtctcaaaaaaaaaaaaaaaaaggtttattgagtgtgggctgggtaatctgggaaatatatatttttccctagcagcaatagaagacgaggaaaaatggggtgcacatcatgagaatattgtaaactgtgagcattccacccagagagcaccgttctggttgaggtactctgcatggtagagatggcagatggcaggccacggggagcgggtggcctgagcaaaggtataaggaaatgacaggacaggtcgtgcctggggaatatcatggatcagttggcctggggttaggggtcctctgagaaagcagcaggagagaagacagaggatgtgggttcagatctggttatagaggtttttaaatatcaatttaagagattttttcctttgtcatgcaattaattgaagttttttttttgtttgttggttggtttctaagtagctgggattcaggattcaaatcccagctccatcatttacaagctctgtaaccttggacacatactcttggtagaacaagggactgaggaggaagagactggtgatagggatgcaagttgggaggatgctgtccaggtgtgaaaacctgatcaaggaggtggcagtggggatagaggctagcagaccattcaaagggctcattttctgatttaatctgggacaataatagaaggaggatatgcataggtaatttgaaaatcagaaaccttgaacctgctgagcaaactgcctatttcctcccagataggggtttaataataagtagtagtaacaacaatcatggtaataattgctggcattgagtatctagtaaatcaactttatgtaatttgcctcataggttatgtatctcatttaaccgtcacaacagcctaggagatagctgttcttattaggaccattttccagatgaggcttagaggggttaaatagcttgcccaggtccacagccagcaagtgatgcagttgatgttcaaaccctgtcagtgtagactccaaatcctgtgcccttcaacttctttatgattctataccttgatgcagaaagcctgcccactactttgagtttctgttgcctttgtaattgtggagagctgtctggtcaccagcctcactggtgcagaactgggctgggtgcctccaagtaggatagaaaagaagaataaaggaccctcttctgattcatgaggtattcaatgtatctggcaggcccaacacagagatcaggcccccagtccagcacagatgggggacgcagtcgctggggttgaggcccatctcacttcatcatgtctgtttttattactgggaagagtgcgatagagttgcctcctttccatatttcatcccagcaagtgtgtggtctgcaggaataaaaacaacagggagcatgagctactcaaagtcatgacttttttgaagcatgggagcctgttctgagttactgtaaagatttctttttaatatggagcatgaaagaatactgttctgtttttttaaaaaatacccagtgagctaaagtttgaatttaaaaacagataagaatatgattgtgtgtaattcaaaatgatgtgccagtaaccagttttcctagtgcataaagtatgaagctgttttcaaaagttcactctgcatctagttattcaggcagatctgtgcatgaaacatggtatacctgcatttgaaaatgtctgcaaagcaagtcttccaaatgcctacttacacagtatacgcacaggattttttttttccctttacagaatcctcatagcattcattaccccacatgaacagaattatttagccctgtactcttgggtgcattatgaatgtttgataaacataaaacataaaacaagcaccaatatagcttgacaaatatcccatgaataaatttcccatcaatgaaaagggaaaaatcagagagcgctaagtaaattgcttccgttccaagagagttgattgcattcatacctatgattagatctaaaaagaggtcttgcctttaatgcagtgcctaaattaccacatctttattagaatttcataataatgctttgagggttgataaaaatttttctcaaaagagaacttcttaaaataggagtttggatattcagatattccagagaacttggttgtttagtgttttaaattctaagaatttttcggccagaaaatgatcctgcagagcatcccttccccccacctcaccactatttctcaactcctaaaaaaaaaaaaaatcactgaaatcagtgggaaaaacagtcctgcttttgatgcaacagccgtgaagactgctattcttggttcatggcaggagccagtgagtatcatggcacaagggaccagacagtcagggctttcagagtccactttgaggatgatgagtccagcacatgtgagcttaatctctgtactgttaccaggtatctctcatcatctccctttaccagtcccttccttcagtttgaacccagtgagagatgcaacaataaatttaatttaaatgggcaactactgtgactgttgactggctattggcagcctactgtatgtaactttatgcctccctgaaattctgcaaaataaatctctctcaagaaccaatgcaaagctgggcgcggtggctcacgcctgtaatcccagcaccttgggaggccaaggcgggcagatcaagaggtcaggagatcgagaccatcttggctaacacagtgaaaccccgtctctactaaaaatacaaaaaattagctgggcgtggtggcaggcgcctgtagtcccagctacttgggaggctgaggcaggagaatggtgtgaacctgggaggcggagcttgcagtgagccgagattgccactgctctccagcctgggcgacagggcaagactccatctcaaaaaaaaaaaaaaaaaaaaaaaaaaagaaccaatgtagaggccaggagcagtggctcatgcctgtaatcccagcactttgggaggccaaggcaggcggatcacctgaggtcaggagttcgagaccagcctgaccaacatggaaaatcccatctctactaaaaatacaaaattagccgggcatggtggtgcatgcctgtaatcccagctacacgggaggctgaggcaagcgaatcacttgaacccgggaggcggaggttgcagtgagccgagattgcgccattgcactctagcctgggcaacaagagcgaaactcagtctccaaaaaaaaaaaaaaaaaaagaaccaaagcagagagataagattctcatgatattcaggtagatagaaagacaaaacattatttttaataaatgaaagcagacccagagttactattataaatgtatatacatagaacatggaatgagaacactgattgtttccattgttttgtctctgtttttcaaacaccagcaaaagaagcagtatttgaaactaatcttagctgcataaggaactgccatggcatttgagttcattaatcttcatgtgatatgccagttgttcagttcctgagttaaattaggaaatgaacacatatttatgactatagcgcatcttctttctggtttcctggatatttgcaggcaactcagaaaattgactcaagcgctgattaattccggctgtccaggtacacctggtaacagttaactgagaagtcacagccactaatgctgaggtctttaagagtaaggaaaaagcatggatttcactatatattaaaaatatggaaaggtaaaaggataaagtagacataacacagttgctcagatacctcccatttgttttaagcttcttgaaggcaggaatcctctcatttctttgaatgctaccacttcgtctaacatggaacaggttctcaataaacagttaaagtaatttgaaggatgagtcatggctttagtatattttgtgaaattattttgtcttgaaagtaacagtgaataatcattcatttttgaaaaccaagaaaggaaaaaagaaactaagaaagtataccaaagtgttctgctatttattgttttatgttaataaaactcaaattacttttacaggatttacatttaatattaggttgacatcaaaggccaaaaagcttcttctataacactaaagagcctatattttttaaaataagggtttttttttttaaatcaaagtagtgagtgctaccaccaccatttgagaaatagagaaaagaataaagaaatatctgaaacttttggccaggcatggtggctcatgcctgtaatcccagcacttagggaggccaaggcaggcagatcatgcggtcaggagtttgagaccagcctggccaacatggagaaagcctgtctctactaaaaatacaaaaattagctgggcgtggtggcaggtgcccgtaatcccagctactcaggaggctgaggcaggagaatcgcttgaatccaggaggcggaggttgcagtgagccaagatcgtgccattgcactccagcctgggtgacaagaacaagactccgtctcaaaaaaaaaaaaaaatctttgaaactcttaatagctacaaaaatatacagattgtgcatctctccataagatacattcaccaaacttcagctcaaagctgtaagatcttctgtcaaacttgtgtggaagtacaaaagttataactgagtaacagtttttacccagttgcttttggcagacaatatcattttagtggcatatgaaaaaataatcacttggccagacacagtggctcacacctgtaatcctagcattttgggaggccgaggcaggcagatcgcttgagtctaggagtcagagaccagcctaggcaacagagcaaaaacccatctccatgaaaaatacaaaaattagccaggtgtggtggcgcacgcctgtggtcccagctatcaggaggctgaggtgggaggatcacttgagcccaagaggcaggggttgcagtgagccaagatggcgccactgcactccagcctgggcaacagaatgagaccctgtctcaactgaaaaaaaaaaaaaaaagaaaaataattacttaacaatcctagatacaatttattattattattattattttaagacatgataacttctgactgcgcaaaggctcttttggaaccttgcttttcagagattggcttttcttttaagtaaatgtgacgaagaagaggccttatcaacatttgccatctgttaagtacttttcagttaccaccacaagaacaatgggactgttggtcttttcacttttaggggacagagaatcctgctaaggaaatcattattttgcctctgattggtgtcatggagttttttaattttttgagacggagtcttgctctgtcacccaggctgaagtgcggtggcgtgatctcggctcactgcaacctctgcctcccaggttcaagcgattttcccacctcagcctcccaagcagctggaatgataggtgggcaccacctcgcctggctaatttttttttaatatttttagtagagacagcgttcaccatgttggccaggctggtctggaactcctgacctcaagtgatatgccttccttggcttcccaaagtgctgggatcacaggcatgagccaccgtgcctggcctggtgtcattgagttttcctcaactaatttctcatccctttgtttgctagcattttgtaacatttaaatatattcatatgacagaatgaccaacacatcagaataaatatccactgactacatctcaggcagtactcttgtttttatattgacaacactgcatccaccaccacttcggaatcttctgcccaaacttagtcactcacatgtgctctagatcctgggtgtgagtgtatttatacagaccatccccagcattatactggtgtcttttttcccattattttttctctgttctttataaacatttatattatatcactgaaaaagatatccaggccaggcgtggtggctcacgcttgtaatcccagcactttggaaggcagaggtgggtggatcacttgagctgaggagttcaagaccagcctgggcaacatggtgaaacccgtctctaccaaaagtacaaaaattggccaggcgcagtggctcacacttgtaatcccagcactttgggaggctgaggcagggggatcacaaggtcaagagatcgagaccaccctggccaacatggtgaaaccctgttctactaaaaatacaaaaaattagctgggcgtggtggtgcctgtagtcccagctactcaggaggctgaggcagtagaatcacttgaacccaggaggtggaggttgcagtgagctgagatcacgccactgcactccagcctagtgacagagtgagactccgtctcaaaacaaacaaacaaaaaatacaaaaattagctgggcattatggcagacacctgtaatcccagctacttgggaggctgaggcagaagaatcgcttgaacctgggaggcagaggttgcagtgagctgagattgtgccatctcactccagcctgggcaacaagagggaaactccatatcaaaaaaaaaaagatattcaaaccatttgttcaaacccaatctgcaaatattgttcatacattagattgagtacatatagagagacgttgaagctattaattgtgtcacatcctcaaagacagtccctcttttggactcttacattctgctttgttttctgtccttagctaatttttttatatggctacattttcaacattgtgagcacgttttaagaaatatgcagcctggagttcaataggtattcttcctcccggataaaattattcatcaatattagttttatatataatacaaatatctttataagtatacaaataaatgtgtgtgtatgtgtacagatggatagatagatgcagtatgctaaaagtatttatgtttttttttttttctcttttcccaaagtagcaacttagataacagagttagatccaggtgtgtcctggtgtccttctaggctgagcccctaagacttggtgtgaatggtttgctgctttcctccatacttaattttcctctttgttttcatagataaatatcattcagggaattgtggcagaaatcaacaccaagactggtgaatctgaatgccgctattataaagagcggcttctttacttggaagaaggccagaaagactccctgatcgacagctctcgagtcgtgtgttgtcatggtgaactgaagaacaatcggggcgtggtaagtagttactccctttaagcagtcttatccgcctcccgtatccctaattcatttggtgtggagcctcctcttagaatttcttccctatctagggtcatgttcttttttgagatggagtctcgctttgtcacccaggctggctcactgcaacctctgccttcccggttcaagcaattcttgtgcctcggcctcccaagtagctggaactgcaggcacgcaccaccatgcccagctaatttttgtatttttttagtagagacagggtttcaccacgttggccagggtggtctcaaactcctgagctcaagtgatccgcctgccttatcctctgaaagtgctggaattacaggcttgagccaccgtgcctgtccttcgttctttcaaacaaaaattgcttttccagtgtcatttatatcacaggatcatatgtgtatatgtatatatatattcattcatattttgtaatgttaaggatcagtacctattcagaaagaattttggaaaccaacatagggttgccagctatttattttgtctgatcttggctttgagaaacaaatgcagaacagttaacatctgtcactttgatttcagaaaataaaggatgatcttaataagatattagaaggatttaatctcagagaaacagctcttcagttgaatgcatttaacttctttcttgtgcattgggacccatccacagactggcattttgaaaccaattttttaaaaataacaacctatcttctattggttgcatatttagctttgacctatagatacccatttcctggcttttattcccatgtagatactgaaatggttcctcttctgctatcatagcaactgtgtatatctcccttggagcacttaatatagtgatttgcaattctccatttgtctgtcagtatattccattataccatgttgttttggtggtttgtcaaccttagaacctattatggggacctggcacatactgggtactcaatgaatgaatgcttgtttaaaaggaaagatgaatttgaattatatgagagttcaaaattcattcagctcaccaagctatttgtatgtatagccagtagaaatttgtgtgtgtgtgtgtgtgtgtgtgtgtgtgtgtgtgtgtttaaatttctgtgttgagatagccattgggagagagactctgcattttgattgtatttcatcttcagtatctagccaacccttagaatgaaagctagaactagattgaagggttcttaataaagttttgataattcaagggacatccgtttagtctagactgagcagccatggaaatattacttgaaattagtgagtacatgttataacccattatcagggatgctgtggatccatccagtggatggtacagtgggagtaatgagacctgtcaagtctgttgcttgaagacgtgtgtctgtgggactagagagttactgattgctagaaagctgcattctgtttcttgcttattttcagaaagcacctgtggacttctagtatcttacaccaagctccttgaacgttctttctaggaagcccaatgagaaataggaaaatgcagtgctccacagggtgtaagcctattatctttctgtacatcagtgaaggactgagaactttttggttagatgtgcctaaggcataaagataaactctagtttttattgcaggcagatagatttttgagaacaaagatagttggggtgggaggcttgtgggtttttttttcacccggtagagttgtaaacgtcattgtgaataaagtcttgggtcagaaaaaaagcacagtagttgaaggcaggaaggagctgagaccaataagagaaattatcagtgaacattcataaatgagttttttgtttgtttgtttgtttgtttgttttttgagacagtctcactctgttgcccaggctggagtgcagtggcacgatcttggctcactgcaacctccacctccagggttcaagcaattctcctgcctcagcttcccgagtagctgggattacaggcacccaacaccacgcttggctaatttttgcatttttagtagagatggggtttcaccatgttggccaggctgttcttgaattcctgacctcaagtgatccgtccacctcggcctcccaaagtgctgggattacaggagtgagccaccgtgcctggctgagttgtatttttaaaaggttgcccagacaatctcagcccaccttggctagaagattgattgaagtagaaacagtgtaaaaatctgattattccaaatactgtacattaaaacagcccccaaaagaaaattcttaacacgttatttccacaactaccacaccaaaaagcctttaacttggttattttgtgctttatcctgtttttcagtcttcttaaatatacattttattccctctagccaagatttggttgggttttgtttctgtttgtgtgtgtttgggaggtagtagggataggggtgggagacctatgggtttcttttctcctaaatttaaaatgatctaataatattgaatgtgctcccactatcccaagtcaaaattctaatctgaagtttttaattcagttcccatttttgttttagatgcagggggtatatgtgcaggtttgttacaaggatatactgcatggtgctgagaataggcttctattgatctcatcacccagatagtgaacatagtaacatagtactcgataggaagtttttcagcccttgcccctctcactccctcttgccttttagagtccccagtgtctgttgttcctatctttatgcccatgtgaacccaagatttagctcccacttacaagtgacaacctctcctcttctggtctctcccctttaagactgctggattgacattcccaaatatttccaccagaaagctagaacctagttgcaaagttgtggatattttcacttcagttcgtaagcatttccaaagtgtgagaagagtctggcacttagcattgaatggagcaaatataccccagctccaccaagcacacctgctttcataatgggacctgaaacaagccttcatttttgcaattttctttttgccaacatcacacacatcagtcgtcaactttttaaccctcttcagagaaccaaggttctgattaacttagaaggaaaatattgatcatctttttttttttttttttttttttttgagacagaattttgcttttgtcgcccagactggagtgcaatggcccgatctcagctcactgcaacctccacctcctgggttcaagcagttcttctgcctcagcctcctgagtagctgggattataggcgcctgccaccgcgcctcgctaatttttgtatttttagtagagatggggtttcaccatgttggccaggctggtcttgaactcctgacctcaggtgatccgcccacctcggcctcccaaagtgctgggattccaggcgtgagccactgtgcccagcctgatcatctttctttgtggctgtggcagcatactctggtcccctcaggaatgagcactgttctgacttagagttcctgaataaagctgataatgactttgtggttgaaggaacaagtgtttttcatgggtttgggaagcaaagattaatattagctttgatataccagtctcattttttatagactattgttaattttgatcttttagaatttttttctttttttttttaaacagtcttgctctgtcacccaggctgaagtgcagtggtatgatcttggctcactgcaacctctgcctcctgggttcgaatgattctcctgcctcagcctcctgagtagctgggattacaggcgccccccccccccccccgccccgcccacctcgcctggctagtttttgtattttttttttttttttttagatggagtctcacactgtcgcccagactggagtgcagtggcacgacctcagctcactgcaagctccacttcctgggttcatgtcattctcctgcctcaggctcccaagtagctgggactacaggtgcccgccaccacacccggctaattttttgtatttttagtagagacagggtttcactgtgttagccaggatggtctgtatctcctgacctggtgatccgcccgcctcagcctcccaaagtgctgggattacaggcgtgagtcactgcatccggcctagtttttgtatttttaatagagacggggtttcaccatgttggccagcctagtcttgaactcctaacctcaagtgatccgcccacttcagcctcccaaagtgctagaattacaggtgtgagccaccacatccggcctgattacttagaattatattgagtaatataaactaaagtcaagagagtgctaacttttttttcccttcatcaccttcttgattctatttccctttctcgtttttttcttataggagctggggcaggtatgtctgtacaagttgtgaattgcaatgtgaatagggcccccaaagttggcaaccctggctgtaggtgtctgtaggcagaagggctttctccattgagtccctagggaggtgcttctacaggaagggcagtggacatatctggaagtgcctccaacatgcccaactttggttctcctggaggtagatttgaacctaggagttcataatccagtgtgaacctggtacctggggacctctttatccacagaggtccacatatcaaccactcattacattattgcttaatgaaagcttgtggatttttttcttctagaaactgcatgttttcctgttccaagaagtgcttgtgatcactcgagccgtcacccacaatgagcagctttgctaccagctgtaccgtcagccaatccccgtgaaagacctcctgctggaagacctccaggatggagaagtgaggctgggtggctccctgcgaggggcattcagcaacaatgagagaagtatggatagcagtcggggttgacctgttgaatgtttttggccgtggtagtttggagggagtgggcagctggtggaaagagaaaagccacggtcttgaagtcaaactgcatttgtatgctatttcatcacttcctgattatgtactttgtttagtccctgtgattctcagtttctcatctccaaaatggaaatgcataggtacctccttcataagattgttataaggatttagtaagataatctaagtgaaactgtctgcacatagttagtgctccttaagttccctttctctgtctttttccattggataaaaacatgcttaataccagatagtccctacatggatgccagttgcgttatggtgggttttgcagctgaactggtaaacttgtccctaaagagacataagaatggtcaactggaatgtggattcatctgtaacattactcagtgggcctaatttaagacttaataaacaaattaactaaaagaagccaagatagcaatatctatcgagtatctaacatgatactcggtgaaacaagcaggtaacttccttcccctatggagcttgcattgtgatggaggagaaagatgataaacaaatgaatactccaggtgttgttaagaaaacttaaaacccggtaagggaataggaagggatagcaataggaggtctgttttatttttatttatttatttttttgagacagagtcttcctctgttacccaggctggtgtgtggtggcgtgatctcggctcactgcactctctgcctcctgggttcaagcaattctcgtgtctcaaccttccaagtaactgggagtacaggggctggccaccacacctggctaatttttgtattttcagtagagacaaggttttgccatgttggccaggctggtctggaactcctgaccccaagtaatccacccacctcagcctcccaaagtgctgggattacaggcccccgggcccagcctggaggtctgttttaaatgagatagggaacacttctctgagaaagtaacgtttgagcttcctgggttaacataggcatcatactgtcaaagtaattaacatgtactgccttctccctactgatcaatccctctaccctaggagtaggagtagtagaaataagagcttatgtttcttgagtactgactatgtgccaggcattgtataagcatttacatgtattacatttattcctcataacaaccatataaagtaggttcttgttttctccattttacaagttagaaactaagatacagaggatttaaggtacttgcccaagatcaaagggtggagcctaaatttgaaggacggagaatagcttctagccaaagatggctagcagtaaaacattttggcctcctttccctctgttgcttagcctctaagccattggaagtggtggtggttcccagtctactggctgcagggttagtgcaaagggactgactgcagatgcttctgtgaaccaagcattgcatgtggcacgcagggccctttaaatgtccattatattgttgttattagattaaataggccaggcacggtggctcacgcctatagtcccatctttttgggaggctgaggtgggtggatcacctgaggtcaggagttcgagaccagcctagccaacatggcaaaaccctgtctctactaaaaaaaatacaaaaatcagccaggcatggtggtgcatgcctgtaatcccagctactcaggaggctgagacaggagaattgcttgaacccaggaggcagaggttgcagtgagcggagattgtgtcactgcactccagagcaagactctgtctcaaaaaaaaaaaaaaaaaaagattaaataaaatgtcttccatattgtggactaccatttttttttaaatgcagatggctcctgttgaggtaattaaaatgtaatttcgtttgacaatgaaaccaaatttgtctacatatatcttctccatcattggatactaagtgtatagatactctcatatggagaaacatgggcatgttttaatgttaaaaagagcctcttaaactgaaaaaagctccagcttggtgtacttgttgaaattacagattatgaaacgacttttagatcttctgaatcagaatctctaaaaaagggcctggggatttatttttattgatttatttttattttttgagaaaaggcgtcactatattgctcaggctgatctcaaaatcctagactcaagcagtgctcccacttcagcctctgagcgcatctgtctttttaacaagctctcaccccaagggattttgttatgcagccagattgggtcaccagtactctgggctcccctaaatcacttgactttgtggttccaagatgatctccggtttctgcgggtttctgagagcgacgagggcagctgaacgctagacctgtgtcaatcccatctccctgatggtggctgcagggtggagctgagccatgccccagatcagtgggaaacgttttgttatcagcaatacctgccatggattctggggtttagtgtcactacgtgtgttctctttggcctgaggaaggatctgtccattgactttgtttttcatgtgtttttcctttctagttaaaaacttcttcagagtcagtttcaaaaatggatcccaaagtcagacccactcgctacaagccaatgacactttcaacaaacagcagtggcttaactgtattcgtcaagccaaagaaacagttctgtgtgctgccgggcaagctggggtgcttgactccgagggatcgttcctaaatcccaccaccgggagcagagagctacagggagaaacaaaacttgagcagatggaccaatcggacagtgagtcagactgtagtatggacacgagtgaggtcagcctcgactgtgagcgcatggaacagacagactcttcctgtgggaacagcaggcatggtgaaagtaacgtctgacagaagcatgtgcacttcgggaagcaggcctgcatcttacctgtacagtatttgcattccacagatggaacggtttggagaagcactttttcatacttttgtgaaagtatacatgttggcccagtctctcgtatctgtacctttgtccctagtactgtaactgccaatctgtctgtgtaagctggaatctgtggcaactattaccctgtgttgtatttcccaagtgtctggatggatggagaggtactcaaacaagttactttcagttgtcctgctggattttaaaaaaatagaaaaagaatctcaaaactactgttttacatagattgcctgaagagtccttcctcttgtgcttctgtaccactttcccagctcttagatgtggtagctaaaggcacggaatttagacggccttgtaaatagggcatgaggaactcatctgtgtattgggatggtattagagagagaatcaggaaagaccaactcatgaagtgaacttggtttgatcttactcaactagaaagcttgaaaacatccctggggattctgaaggcttaattttgcaaaggaggatgcattgtctgaactttgcaacttcatccagtgcaagtttgatgcaagaatgtattaggacataaaatagaggctgaccttaaaagggccaggacagaagcggctgccagctctgaatctttaactgaaatgcacatggcaccaggaggtgtctctcatagttggttgctagcctaaaacatcagaatagaacccaaagggcttaggaaggcctgccaggataacaagaaggccctgtattcattgtgtttcatctgcctaggcctactcattattttagagaatgaatgaagcaacaaggaagagagaccatgactctatcgatgacactgtttatagaaacacaggagaggaagaatttggaatgaaaagcacttcgtcagaaccttctgtgggagccattgagagaaaagcatggtccagtgccttctgagaaaggccagagctttgggctttcctgctctgcttttgggtcgtcagtttgccatctctggttctgtgctataatcagaattgtaattatgttctccagaggccaatttcattaactctgattaattagaatcagctagccagattagtaacctctttgtccagccttgatttacagtgcagggtaaagtgcagaccttaaaaacagctaagtacctagaagagctccctgcaagtgtaaatattaaggatgacctgtgcaaaattatacccacaccagcactagtggtaattattctaaattattgccaaaaagttttttttaatctgtctttcaagtttacagaaaagaaagcagtaaatgcattgatgtcattttattatgtacatatatcatgtgcattcaagctgtgtgacaagatatatcaatataaaaacaaggtatatactttattattttttgaaaacaaggatattgtgatcaattttaccctgtaaaacatatttctgtatttataggtcttaaacatgatgaattttttctattacaagtttatttaaaactgctttctcaagtcgttattgatacagcaagtgaacctgctgcagacagaagcagaggaaagccaagaacagcctttattggtgaagaaaagaatgaatgattctttgtaggcgccatcagccacttttagaagccatcagccagtgtgttgggaaaagaggtttgtcaagtgttggcctatgggaaggtggtcaatgaatgttttgatgaaatgaatgtttttgtataatggccttaaacttttctggaagtatttcaaataaattacattattaagtcatc

SEQ ID NO: 27 - DNA, 1387 bp, Homo sapiens
ttcccaggagcccatctggtgagctgagagttagtgaggggcccaagagaatggggcttgctctgccctgtgctttagatggaccatgtttgatagaaatatttggcctaaacggcagcggcaaaacaactttcccatgtttccctctcctaaagcctggaatttcagagggcgaaaacggaaacagagcacccaagatgaagatgctgttagcctttgcagtctcgacataagtgagcctagtaataaacgggtcaaacccctttcccgagtcacgtcgctagcaaacctcatcccgcccgtgaaggccacgccattaaagcgcttcagtcaaaccctgcagcgctccattagcttccgcagtgagagccgccctgacatcctcgccccccgaccctggtccagaaatgccgccccctcgagcacgaaacggagagatagcaagctgtggagtgagaccttcgatgtgtgcgtcaatcagatgcttacatccaaggaaatcaaacgtcaggaggcgatctttgagctttcccaaggagaagaagacttgatagaagacttgaaattagcaaaaaaggcctatcatgaccccatgctgaaactctccataatgacagaacaagagttgaatcaaatttttggaacactggactctctaattcctctacatgaagagctccttagtcagcttcgagatgttaggaagcctgatggctcgactgaacatgttggtcccatcctcgtgggctggctcccttgcctcagctcctatgatagctactgcagcaatcaagtagccgccaaagctctgctggaccacaaaaagcaagatcaccgagtccaggatttcctacagcgatgtttagaatccccctttagccgcaaactagatctctggaatttcctcgatattccaagaagccgcctggtaaaataccctctgcttctccgagaaatcttgaggcacacaccaaatgataatccagatcagcagcacttggaagaagctataaatatcattcagggaattgtggcagaaatcaacaccaagactggtgaatctgaatgccgctattataaagagcggcttctttacttggaagaaggccagaaagactccctgatcgacagctctcgagtcgtgtgttgtcatggtgaactgaagaacaatcggggcgtgaaactgcatgttttcctgttccaagaagtgcttgtgatcactcgagccgtcacccacaatgagcagctttgctaccagctgtaccgtcagccaatccccgtgaaagacctcctgctggaagacctccaggatggagaagtgaggctgggtggctccctgcgaggggcattcagcaacaatgagagaagtatggatagcagtcggggt

SEQ ID NO: 28 - protein, 434 aa, Homo sapiens
MFDRNIWPKRQRQNNFPMFPSPKAWNFRGRKRKQSTQDEDAVSLCSLDISEPSNKRVKPLSRVTSLANLIPPVKATPLKRFSQTLQRSISFRSESRPDILAPRPWSRNAAPSSTKRRDSKLWSETFDVCVNQMLTSKEIKRQEAIFELSQGEEDLIEDLKLAKKAYHDPMLKLSIMTEQELNQIFGTLDSLIPLHEELLSQLRDVRKPDGSTEHVGPILVGWLPCLSSYDSYCSNQVAAKALLDHKKQDHRVQDFLQRCLESPFSRKLDLWNFLDIPRSRLVKYPLLLREILRHTPNDNPDQQHLEEAINIIQGIVAEINTKTGESECRYYKERLLYLEEGQKDSLIDSSRVVCCHGELKNNRGVKLHVFLFQEVLVITRAVTHNEQLCYQLYRQPIPVKDLLLEDLQDGEVRLGGSLRGAFSNNERSMDSSRG

SEQ ID NO: 29 - DNA, 3560 bp, Homo sapiens
ccggctgtcggtctccgtgtcgccgccgccgcccggcatcgtggagctggggcccccttttgcctgggagttttgtagtcgcctagggtcagcggtgacatcccaaagggcaggcccggcagccgccatggtggccaaggattaccccttctacctcacggtcaagagagcgaactgcagcctggagctacccccggccagcggtccggccaaggacgctgaggagcctagtaataaacgggtcaaacccctttcccgagtcacgtcgctagcaaacctcatcccgcccgtgaaggccacgccattaaagcgcttcagtcaaaccctgcagcgctccattagcttccgcagtgagagccgccctgacatcctcgccccccgaccctggtccagaaatgccgccccctcgagcacgaaacggagagatagcaagctgtggagtgagaccttcgatgtgtgcgtcaatcagatgcttacatccaaggaaatcaaacgtcaggaggcgatctttgagctttcccaaggagaagaagacttgatagaagacttgaaattagcaaaaaaggcctatcatgaccccatgctgaaactctccataatgacagaacaagagttgaatcaaatttttggaacactggactctctaattcctctacatgaagagctccttagtcagcttcgagatgttaggaagcctgatggctcgactgaacatgttggtcccatcctcgtgggctggctcccttgcctcagctcctatgatagctactgcagcaatcaagtagccgccaaagctctgctggaccacaaaaagcaagatcaccgagtccaggatttcctacagcgatgtttagaatccccctttagccgcaaactagatctctggaatttcctcgatattccaagaagccgcctggtaaaataccctctgcttctccgagaaatcttgaggcacacaccaaatgataatccagatcagcagcacttggaagaagctataaatatcattcagggaattgtggcagaaatcaacaccaagactggtgaatctgaatgccgctattataaagagcggcttctttacttggaagaaggccagaaagactccctgatcgacagctctcgagtcgtgtgttgtcatggtgaactgaagaacaatcggggcgtgaaactgcatgttttcctgttccaagaagtgcttgtgatcactcgagccgtcacccacaatgagcagctttgctaccagctgtaccgtcagccaatccccgtgaaagacctcctgctggaagacctccaggatggagaagtgaggctgggtggctccctgcgaggggcattcagcaacaatgagagaattaaaaacttcttcagagtcagtttcaaaaatggatcccaaagtcagacccactcgctacaagccaatgacactttcaacaaacagcagtggcttaactgtattcgtcaagccaaagaaacagttctgtgtgctgccgggcaagctggggtgcttgactccgagggatcgttcctaaatcccaccaccgggagcagagagctacagggagaaacaaaacttgagcagatggaccaatcggacagtgagtcagactgtagtatggacacgagtgaggtcagcctcgactgtgagcgcatggaacagacagactcttcctgtgggaacagcaggcatggtgaaagtaacgtctgacagaagcatgtgcacttcgggaagcaggcctgcatcttacctgtacagtatttgcattccacagatggaacggtttggagaagcactttttcatacttttgtgaaagtatacatgttggcccagtctctcgtatctgtacctttgtccctagtactgtaactgccaatctgtctgtgtaagctggaatctgtggcaactattaccctgtgttgtatttcccaagtgtctggatggatggagaggtactcaaacaagttactttcagttgtcctgctggattttaaaaaaatagaaaaagaatctcaaaactactgttttacatagattgcctgaagagtccttcctcttgtgcttctgtaccactttcccagctcttagatgtggtagctaaaggcacggaatttagacggccttgtaaatagggcatgaggaactcatctgtgtattgggatggtattagagagagaatcaggaaagaccaactcatgaagtgaacttggtttgatcttactcaactagaaagcttgaaaacatccctggggattctgaaggcttaattttgcaaaggaggatgcattgtctgaactttgcaacttcatccagtgcaagtttgatgcaagaatgtattaggacataaaatagaggctgaccttaaaagggccaggacagaagcggctgccagctctgaatctttaactgaaatgcacatggcaccaggaggtgtctctcatagttggttgctagcctaaaacatcagaatagaacccaaagggcttaggaaggcctgccaggataacaagaaggccctgtattcattgtgtttcatctgcctaggcctactcattattttagagaatgaatgaagcaacaaggaagagagaccatgactctatcgatgacactgtttatagaaacacaggagaggaagaatttggaatgaaaagcacttcgtcagaaccttctgtgggagccattgagagaaaagcatggtccagtgccttctgagaaaggccagagctttgggctttcctgctctgcttttgggtcgtcagtttgccatctctggttctgtgctataatcagaattgtaattatgttctccagaggccaatttcattaactctgattaattagaatcagctagccagattagtaacctctttgtccagccttgatttacagtgcagggtaaagtgcagaccttaaaaacagctaagtacctagaagagctccctgcaagtgtaaatattaaggatgacctgtgcaaaattatacccacaccagcactagtggtaattattctaaattattgccaaaaagttttttttaatctgtctttcaagtttacagaaaagaaagcagtaaatgcattgatgtcattttattatgtacatatatcatgtgcattcaagctgtgtgacaagatatatcaatataaaaacaaggtatatactttattattttttgaaaacaaggatattgtgatcaattttaccctgtaaaacatatttctgtatttataggtcttaaacatgatgaattttttctattacaagtttatttaaaactgctttctcaagtcgttattgatacagcaagtgaacctgctgcagacagaagcagaggaaagccaagaacagcctttattggtgaagaaaagaatgaatgattctttgtaggcgccatcagccacttttagaagccatcagccagtgtgttgggaaaagaggtttgtcaagtgttggcctatgggaaggtggtcaatgaatgttttgatgaaatgaatgtttttgtataatggccttaaacttttctggaagtatttcaaataaattacattattaagtcatc

SEQ ID NO: 30 - protein, 526 aa, Homo sapiens [sequence omitted]

SEQ ID NO: 31 - DNA, 41501 bp, Mus musculus
  misc_feature (1)...(41501): n = A,T,C or G
ggccccggttggcgggcccctcggcgccacttccggcagggcgcgaccatggccggaggtcgggaccgcggggacttggcggccaggcagctagtgttcctacttccaggtaaacgcgggaggcgcgtgggcctaggtcgctggtggcggcagcggcagcgcgggttttttttttttcccaggccagcaccggtccgcaaggtcctagcgagcgcggacccggattcggtgccccgcgctttgctaagcatcctggtcacgtgtcacaacacgcgggaaaactccaaacccggaagcgacggcagcgtttgcgcggattccctggggcgggtccagccactcggcctgcggcgggcagcgggggtcccgggactctgctgtcccctgggagttactggatctctgtagctcagcgtctagaatcttaccagctccaaaccagaggtcgcagtagtcccatgctgagccgctctgctgctctggaaaggcaagggtggccaggcataagggagcctggatggggtttatgtgagcgtggtttgaaacaattccaggacatggtgacagtcaaaaatcccagaaccaggccactcagtgtccctgtagatgatgaccagctatcagggcatgtggtggcatgcgacagccattgccatatgaggagggcaagtgaaataaatttgggttagggaatgcaagccagaaacactctgtcattttacaatgatacatttgatgttagaatacgcgtgaagaaggaaacttcccagtcactttaattttgagttttagtttagcaaatgcagagcatttttacagcaaatatatttcaccagggtatagatatccagtgatgataatttttataatctttatgtaacgacctgacacttactttggatacacagcttctctcctgtgtaaaaagttaaacacattcaagtgtatggattttgggtttgcagctcactcaactgaaccctgtatgctgctgaccaagaagagtagctttccagctagcagctcatacacccgtcttctagagaaccccaggctttctgtcatcaaattagttttgcctgcttggacccctgtgacttttgtatctgtcttccttccctccgtaccacgtctgccagatccatccatggctgttccatgggttttgttggctggttcttaaaaattgcttctggtttgctgtatgcatatcaatgctactactctccggaggatggatggcattaggtgttcctcctggtttgcacctagtaggagttacacctctggcagcattcttttgaggctgttggtggacattggcattcatttcttcggagtgtctgtatcctggagtggaagctgcttttgggtgcttgttgggttagctttagttctgcagaatggttttctgaagtggttgatacggcttcgtcctgactccagctgcctatgatgagtccagttaagccgtaacctcactgatagtgcttggtaaagcagctagtgagaattcctggtgttggtgagccatcagaaggctagctgaacaccttagtttagctgggagaggggagagcctcctttcacccttctgttacatcagtatatttgatttttgtagtaggatccctaatcattctttttgcaatcaaacatgttaatactatatagtagtttgcaataatttgaggggttttgttttgttttgttggctgtttcactgacattaatttccttcttaaagtgtgtcataatcgtaccaagcacaaaactgaaaagactcgatgttgaatgcatccctcaaagagaaaggtgtagtagatctactgggagggaggggtgagacgcattgccacctggtttctgttcaaagctgaggtgtctgtcctctcacctttttttacccttcaggcaaggtgctctctcacctactcattaggctgatagtggttgagggttctaaaacttaaaacttgggcttcctgacttctgctcttccaggtggcctttagtgccacctgcaggctctaagggtccaaacacgtttgatagcagctatggggtctgccctccaatgtaagggcaccggcctcctgggagtgagacttcatttgtgaaggttctgagctagtctgtcctgggctaagacccaaaaatatgcttgctcttctagtaaagactcaagcaccgttactggctggtctaataccccccggaactgctgtatcgaggaccagcctggggagctggggtcctgggtaaccgcacctgaggcttgactgcttgagggttcactgttctgaaagtgagcagagcttgtatacattcagggcacaggcagctaaccttggcttgacatttaatttacattcaagttgcctctggtatgtcccgaaggttacatcttaaagttgattacagggtacttctcagttttgttttgttaagttgaagcctcctagacaaaggaaagctggaactcagagagtggactgtgctagcttccttttcacagacaagctggggtgttgcagcaaggtggaatgggtctttgcatctggaatgagcatactgcacctccgatgtaattgggaatgctacactgctgtttaattactctaagaccagttactttgggaacatgttataaggttccagaaggtcatattcttaatactggttttcttttgtcaatctgttgtacacttgtctggtctactgagctgggccagttgtgagagttagtcaggagcacatcagctcactagagtaggcaggagactgcctgcggctgttggggaagactgttaacaggattcacctcccaggaaatgtgtacattgaaaaccctagagttctgggggcgggggggggaggggggagagatgaaaatcacgtaggactcttgtatataggcccacatagcttgagtaaaaacgtccttaatcagcaccacccactcctacctccaccccaccctcccacccgtgagtgaagaagtttccagatcgaactgggctttagagccagtcctcagttctgttgagttccctctgggtactgcagagctccaaaggaagcttccttgtttgtcatttccacaggcaacccagatgtaatggccagtttgtttggaggataaaggacaggtagcctttggggagtccctgcctgccatcctagccattcgcgggcagtagcttttcagcctggggcatcgtgatgaccacaaatgacatctaaatacaaaacaaagcaagaattaaaactattctaagaattcccattttagaattatgttttcattaaaaagatttaaaaaaaaagaatcagttatggaagggaaagctagttttcctgtttcatgatggaggacctttgcgttagcattatttctgactaatggctttgtaaaaccgaagaaaccgatctttgttgggggttggaggcaagaaagaaagaaaagtgtgaaatacagggcaaaggaggggctcctctaggctttgtcagggaccctaggaaacaaatgactttttcctcttccccaagggttggcacatgaactcagggtagaaatagaagtgggcctttctccctttgtgtgcacacatgtttgcgtttagaaacaagcctgtaggttgaaagctgcccttgccttggcaggtagtagagaacctggccactccatgtgtggccttgagaatacgtctgctcagcttcttggaagattgctcatcatttcctgcaggccatttctgggttgtccagcatggctcacatttaacattttccacacgagtgaacctggctttgtctttatacagcgtttcttggtggggccccgctgacctttctcagatggctgtaggatctgcttctgactgtggagcacgttcaggagtgatggatggaatccgtcagttggcagtgggtaatctgttggtgtaatcttgtcctcttagtaatcattccaagagatgtggaacaataagcaacaacttatggctcccacagatttatcccctagggcagagtaaaaaactcataaaggaaagtaagccatggtcttagaatttgaatagcatcctggggacagcaaaggtggtcacaccatggagctttaccagggatgttaagcaactgctcagtgagtgttgtctgaggcctggctgtaatgaaggacacctggaaggtgtgttgtgtggtttgtgtgctttatcagctgtgtccttggacaaattgctgccttcgtgcagagtctgtcttcctcatttctacagtgggagagcgagccagtctggtgggctcgtgttaacttccacgctctgtccaccttaagcagggccaaagaacaccccagttccatttcttcttgcgctgttttccctaacactgtttttgctcttgtgcccaattctactctggattcaaggttccactttatttcccacaaggccaagttatgtgcactcgcccacctttactttctctgaatgctggtggctttttatctatctgcaatcctgtctccgctttctctgcgtgtggaactcctgaaacccatcttcaaagtaacctctccacggaagccttctcgttgggcctttcctattagtgggaccttttctactgctgtgggtgtgattaccagttttgtataaataattaggtgttgagcaatccaggagctgcagggaatccaggtttaaggtttttagaacttcctttgtgctgaagttgaaagggatgggcatgtgaataagtctaagctgcatggtgtccagtccccccatgaagaagctggctggtgcctgagctctctcacactagagcaaactctcatgagggtctatgtttgctaagacattaagtgggggtctcccacttaattgttttattttattttcctactagagcaaactctcatgagggcctatgtttgctaagacattaagtgggggtctcccacttaattgttttattttattttactttattttattgtgggggagtcagtagacaaggcctcacactatagcccaggctggcccagaactcatggcggttcttgtgttgccctttctctgttgctccaccatgcctggctacgtcatttattttagatttgactttgttgttttagctccttagtctcagtttttatccttaacttccagttacaaattttctatctaaaaaaaaaacaaaaaacttaaaaaaatgataatatatatctagtacagacattttagcattacaaaggaaagtaagacaaaaatgtattattgttcatgattctgtcaccccagaagccatttggagatctctttccagtgctttttttgtgttatagatcacaaaatgaaaaacattgttttcttcctttcctctttttcttttcttcattctttacaccttctccgtagtaacactaaaactcagagccactggggttgtgtgagaacagaaagccctgttggttcacccaagagctagaagccggcttggcattctcattgtggtggtacaatgagatgattctgagaagctttgacttttacaagttacacattggtgatgaggaggcacgattgtgttataacaaaccagggatgtttcatccagaagacagtatgtattttaggcggattatctctaaaatggatagattgaaaaacagatctctgcaagaatggtgaaagtccacagaatagtgatgggtgcgatgcacagacatctcagacatggtatttgagagccatcaaaacatgttgaatgtttgaggccagcaccctgcacactaacttccctctgtgctcttggcatgagcagggagatagtctgaatggtccaagcctgccttgtatggaaacttgtgttttccactgtggctgccgcatttgacatgaacttctctagggcctcctggcagcttcacagtttcctaggtggggttggccacatgctgtggcagggcagctgaatggagcacgagaggatgaatggcacttgggtgttgtatcgacagacagtctaggttttctgcctttctgagcattaataacttcttaaaccaactccactcctttctgcttcctgaactggagcaacagggaaccaccctcttgtcaattgttaagacagtcttctgctccaccccccaagggtcctggagcaacctcccaccacccatagcagcagccaggagacagccactgtggttcaagatgggagaggtgggcttaagtgtgtgggctctcctataaggaagagcttgtagagatagctccagaagcatccactggcaccactggcaccagaagcctcaacaccctgtgtggcctgtcctttaggtgtagacctcttgtaaggaagtcgagttgcccttcaggatgagtaggacagtgttggttccagaagccctatagacaccaaactcaaatctatgagtttgcataacctacatacacctacacctatatgctttaaatcatctctttatttctcaaggattacagtggttatagaaaaccttttgatctcctagctaaccttgcacaacacacctttacatgatattgtatttgaccttcacagtgaccttaggcagcagtttaaataaggctttattatcactgccttacatattgggaaaccaagactcaaaagtcaaatcagccggttaactagtagtaggatttcagtggcacagactgtcacccccccccccaagctcttacccagggcctttgcttttcattcttctgcctgcatggtggcattgcagcttcacaagagaggagggagttggggggaggatcccctctgttctgtttaatgaccagctctatttggtatcaggtaccttagtcagatctgctccatcttctcttccagaattgtcctgtatcccagatacctcaagctccaactgtacatgttgctggtcttgatggctctgagccaactgtgaccctgaattctttaccagcgtccttttccctggctggccaatcctagaaacattgctgttggtagggatagccctgaaaaaattgcagcctttgtttgctatggtcttggtggagactagttttccttttgcctccgaagcttcacaggaaatttatattcagagaaacccatcaatgggaagcatggtggcatgcaggcatgctggaagacatggtgctgaggaaggagctgagagttctacatcttgatctgcaggcagcagaaggagactgcttgccacacaagtgtagcatgagcattggggacctcaaagcccgcctacacagtgacacacttcctccaataaagccacacccattccaacaaggcctaatagtgccactccctatgggccaagcattccaacacagaagtctataggggcctttcctactcagaccaccacatgcagtggcagccagcctcctggaagccttgaaggagcacagatgggacagccaaagccttttcaggctctcccagctgagtctcactagaaagctggaaactgttctcatctctccagtctacagtgaaaaccagcagccttataataaaggaacagaccagatgtggtttgaagcttaaaaacaaacaaacaaacaaacaaacaaaaaaacccaaaccttgctctgaaagcattgttcttatttgtgttgtggcttcctgaaaaaactcaccttcaggacactgttattatctgacctgacttggtgctcagagcttgctactccctaggtcatttatttgtcaaaaacatcatagcttctgcaaggactgtacaagtctggcaaacagtaatctggacaaaaccttatagggaatgtgtagggaactaggtgtccacatggggccctgaggaagtctgatttacttaaaggctatacacacatttaagaccgtgcaagcccaggaagagcctgagagggcccctgtctctcatctctgatggactgatgctctgggaaaacaaagtgaaagcttgtcccaatacacacagagccccttagcaaagactgcagaagctcagtgttagtcactgaggtggctgaacggagcaatcataactagcagtagagtatacagacttgacagagttagtccaggaaagtcaccgaagtgacttaaaaccagcagcagttcctaggagttaggggaggacaggctaatttccagaattgccacattcattatattttatctaacataatgttgagctattttaaaaacacaagatatgcttttaacaggaaatatgtcctgagagtgagccaagcagctgatgggtctgccctagagacacttacttggtctaccaaggttttaatcagaacttaggaatttattctgagaactaaagcaaaccgactgaatcgtgaaggcataattgtgagacctcatagagtagaaatagacttataagaaagcacacagacgacgactgtttataaaggaccagacaagatgatctcccagcttccccccaaacaagacctaaccagcactgtaagtcagtcctacctaacaggttataacacaaacatgtcaaatgatcaaaactataccaaatacattctgcaagaacactgaagtgaaaatgcaagacaattacagaaggaaatttgggtggttcacaaatatacagaaattaaacaacacagccccattacaagtgaagccaaaggaaaatatgagggaaactaaaaaatactttgaggcaagaaaataaaacatgggcttatgaaatgcaggtgacagtgcttacccagtaagatacagagctgcacattatgaaattattaaagtagaaagaccttgggtccaggaacctcacctaccacagggaagctcactggctccacagcgaagcagaggggaggaagaaaagaaatacagagtcagacaccagaaacaccagcaaagcagaagtcgggtcctttcgaaagcagataacaaatcgttcgccaaactgaccaaggtggaaaaggcggacctttcattgctgctgaccttacagaagtggggaggggttatgggaatgacataggtattgcagatgagactggcagactcctgaatagaacaattacaaaatcagatctcaagaaagagatctgaatagaccacagaaaagagactaaattagtagcctgttttccacaggagaagcccagttcctgatggcttcattagagaatcctcttagacactgaaaaataaaattgatcctgcaaaaactaggaaaagaaggcatacttggtccgtggggcctgcaaagcaggcaagagcatcacagaggaagtcagtttatagtctatgcacataaatgcgagactcctaaacacctagaaacaaatccattgtggaaaagtatgtgtgagcaagtaggatttattcagaaagaaaagactgagtcacgttgtgaaatatgccctgcagatagaataaaaatcagacaatcatgtcagccacaggaagagcatctttcatgaccaaagtcctcagcagtttaagaaaagggagctgtctccatctgatacaaagccacagacaatgttgtggcaggcatatatctcatatgtgtgtgtggtgcagtgaaagtattttgagtaaataatgtatgtgattaaattttattttacctatgcttaagtgactaataggaaaatttaagttgcatatggaacttgaatttacagactgctcttcatttcctttggataatgcagtgctataccaggttgcactagctgggtccttccccggccaacagggactagatgatcatgaggtgagggaccagagggattgatgggcagggctaaagacaagggataagaggtgtgttggggaaaagctttgtttgtgtgatattcccagcctgagccagctcaggaaagagcagcataaagtgagtggaactacaacagctgaggacaaagtggctcaggactggagggctggtgctcatcttgctgtgcctgcatgcaatctgtcaacgagaaggcatttatggaaggccaactaggcgttggatactgtcccgttaggatgctaaagggagccaaaaagaggccggatcctggtggcatttgtcattgtggatttgttgttaggatttttggtccggcaaaaaacattgcctgattttttttttttcaaatttagaggaaatatatttatttctgaaacttctgcagtatctaaaagaacttcgtttttatataagcatctgagttctttagggagcacagcaattaacatctgcttgtctcttctcttttgattgctctctgattgctgtggaaaagcttttgtgtgatgtaatgccacctgttatcttggcctttgttgtctgtacttttggaattagatcccagaaagtctttgatcagaccaaaacacaggtattttcttctggtaattttatatttgaacattttagcccatttggagttgatttcatgttgattcagtccagcagcgagttgttgcgtgaggaaatatcattttccccacaaactagacatcttcatgcagcctgcctttgttcccagagcatgtcagcgttgtgggagtggcctactgactctctggttgtgctctgtagctgcagatgtcctgaagatcttctcactgctcgctgtggcaaagataaaaacactgttgcttccggagagcttctagaaatggttctgttctttagttgacttggccctgtaatgtttaattatttggggctctggaggaatggggaagctggaagagaaacactcaatacagttttctcatgataaaatatacagtagtcaaaatgcttcaagtcccgatgaagcgtctgccatgaggcacgaggaagtcatgtggggaaggctgttggctcctgtgcctcagacacagggagctgagtggagctcgctaggcaagaaacatgggcgtggggggcaactttgatattttagaaagttctatcaggaccaaactttctaacttacatttcagtctagacggtcattccagaaagagtctcacccagttctgacagttgaacccgcacccctctctttatgtaacattcttaaaacagactcggggagcacagattagtgcctgtcagggtgaggtgttcaggcgttcccaactgtgtgcttcgcgtgttctgtagcttgtgtttggtgaggaagcatttaggagtgacacaccttcttagttaagtgacccttcaatctttatagagtgactttttaaagttccctggtaaggtctgttagcatctgcctctcttcattcttcttcggtctttatgtctacgtgtggttcctgtgggcaacatacagtttcccccttgcttttgaattcggtctgagttcctgcttatccttgggatgttcagaccgtcgccatgtggatgtgtttactgatgtaactggggttgcatctgctgtcctgctgtttctcgtttatcatacatgttctttgtgtctgtttgccctctttcttttgagttaaatgagtattattttacaattcagtttcatcgccttactgtcttatttgtgacagtttggggattttatcattttagtgactgccatagggtttcttgtacacatttaattggttgtatctaccttatcacttcacagatggcacaagaaactcacaaggtattattcttacagctctctggacttaagctgatgtcatatatttttgtgaacatatgatgtaaacactactctgaattactttaacttaagcagtcaacagtccttaaagagattgaaataagaagaacaaccctcctttattagtcacacattctcctttttagattcctgcatctagttttgtgatctttctgccagaaggatctcccttggcattccttgtggagtgtgtgtgtgtgtgtgtgtgtgtgtgtgtgttcctgattatgcctttcagctcttgtgtgtctgaagttttgttttccacgctccttgtccaaaggtagtctctttacagtgacggtggtttagtttatggatgtttctggattgtcttctggcttgtgttgttttcacgtgcttagctgtcattcttggccttgcctctctgtgcatactatgatgctgacacacacacacacatacacacttcttctgttttttccttgtgtgttttggggtcaccaagtttcctggatgtgtgagtttatagttttcttcaaataggaaacttttccaaatagatatgtttatcatcttatttctcctcttttgaaagcatccatctcacacgtagtaggaggtctgaagctggctcatagatcaatttgtttatttatttatttatttatgcttttggaacgttttttgttactgaaacttcaagttcatttttcttttgctagtagttctttctgttggatttttcttctccagcattttgatttagatcatttaaaggttttctgttcccttaacattttatgcatgaggtatatttttatgccgttttcatttggttccatataatacaaatctcttttgtaataattgaccttttccccacctttcatcgtgggtcatacttgtccacattttttaatatctagtcatatttgattaagtgccaggcatgaatttaccttttacagtgatgaatgtttttgtattattaattattttggacttcaaaaataagttacttggtaaactgagttggatcctttagctgttgcttttaaattagtgtgacaagatcttagcagctgtcagttaggagtaactgttgcttccttccagggaagtacctgttgagtgttctaccatttcatgccctgggatcatgaagaatgaatgggagttgggatctctgcttttcatggagagtctcatgtgcatgtggaagggaagtgcagtttcccaatgattccccagagaggccctgctgcacacacttgggatgggacttttttatcagccttcttccacatggatgccatcaccctcctgtctttggagctctctgctctatcatgtcagctctaagtcagccaggctttgccttgttcctctgccccagggcctggaaaccctctcaaggaagtatgccagggcagtgagcccactgctgttagctcaagaaaaagttgtgttctttttatggctaagccagtgtttgaacccgcttgcaatatctctgtgtgtatgggatgcacagagcacggagaagaagctcagttcctcaccaagacctctctggctgctcttacctagatgggctgtgtgcagccttggccaccttcctggggtgctcttgtgtagatgaggtgtgctccttggcccatcttcctggggtgctcttgtgtagatgggttgtgttccttggctgcctggtttctttggtgtctgtgttgagttttgactgtggtgctcagtctatggaaggtgtcatccatcttggtttccatgttttaatctatgcagttgaaactttgacagtcccgtcctgtggaggaaacagtgcaggtacttgctttctgcagaataaggttattctattataattaaagtcctgaggtctgactctatgacagatgcagatgagtggatcaaagaagaatgtctgcagacagaccacagtgtatttaagcggttactttgaagattccacccagtgggttttgaagcagatgaccaactcattgaaaattagatttattaacagtatcttaacccagggtatattctgaatcacctaaatataaatttaacatatccatagaaaatataaaaaatacatgtgtttttgaggaagaagactttctaaagtatgacacaaaagatacaaacataatgaaaaatagggttatatgaagattctctatgcttaatatggcaaaagagagttataaaaatagagctaaaatacagttactgtcttttttatataaaggctgttcataagatttttttttaaatgacaaccccactgagaaaatgacaagggttgtgattaattggtgtcagaaatgaaacctagagaggtctagtaactagtgttttttaaatgaccttcataaatatatttaggacttattttgtatttcagtttgattatggcgagtgcctttgactccttagcttaaggttttttggttttttggttttggttttgtttttaaataccgccattagcatcttctaaaaggaggctaagactgaggagatgatcaagccctggccaaggtggcaaagcttaagacatctgactctaaagcctgccccgcatccctgcccctagaagcaaattaaacacacttcaagtctcactgtagcttacattgaaaatagttgcttactgagggtcacatggctcacaaatgataaagcaaagtttttagaaagaaaaatcgaataagtggaacagtggaaaacagggtgaagcgaggcacagcagagaaagtgcctttaatttcccactcaccttttcctttcagaacatttaaaagatgcctcgaagaagaagaagaagagcagcctcctgttcgtaaagctggccaacccgcactcaggtgggtctctctcccctctgtcctctccctcatcagtctttgagtatttgcagcactgtgcagaccatggagtgctcgcctgcctgtgtgaccccttgaattaacttaagacggcatcctgcagtgaaaagccaagctgattaattttccaggataaatcaagcagaagaatatcgttttctttagtttccgtccacagaatgttgctgttagaaatgctggcgacttagaaaagtagcgtgtttgtgctcttcctgggaccggattgatttcctttggctttctcacgccagctttcctaggcttgggcacctgacactagtactgtgttcatgttgtggtgtgcagtaaagaagcagagtgcaagtgcagacggttgcctttgacagccgtggttctgactggttccattttagctcttctttcactctgaccaaaaaggatactccccaccccgaacccatgttggtttttcttttattaagatcattgtatattgaaaagctttatgtcttattggtagataagtttattttaattttatattcagcacattttcagttctgctttctaatttcgaggcaaaagtattacagcgcactccatggtggatttccctcctaaggatctgcgtaaatccctggttcctctaaatcacggctctcctggggactgtgtaactgcacagagaatgagggaaagtccctggggactgtgttgttggaaagatgtgtaaagcagagaaagtgaaacagaacagaacaaaatcaaacgccctgccccttcctctagtatctttcctcaaagtgaagttgaatatgcctgccgagccacaggactggagcagccagagcagggcggagggatctgggagaagttctaggctgccctgttctaaccttctagcaagagaaggtgcgtcctcagcagctcagattccatctagatgcacacagacacaggcatgcctggtttattttcatggttgttaaagggacaacaagggctgggctgaacactgactgtcgtaggcagtgctctaggaaatgtacggctattttcatttttttttcagtcctcacaaagcacctctgtagctcctcacgtcacactcagcatgccacaccagggattccagagagtgctctgtggttagaaagcgatgtcatgaactgaggggtaaaacatctatgcatcccttctacccaccttcccttccccctggcacaggccctgagctaggggtaaaacctcagctatgcacaggcttcacccctcctgttcccatacatctgatttgctgagaattgaatcccagacctggcacatgctgggcaagtgctctaccgctgagctggcacctagctctccccaatttcaaaagaataaaatggaaaatcatatccagtggaccaggcttcaagaacgtccctccctttctcaatagactggctggtagcatctgagggtttgttccgagtctttgctccttcctgtgtatagagtgttacatgctggcatgggggcagacccaggctgtcctagctcacacatctgactgagccgttaggagacttgtgcctttcactctgatggtttaagttcagtgaggattatggagctgaactcaatgtctgtgcctcatatccatcagcttgccttggagtctgctagcatagagcatgactccgcatgtttaggttcctgtctggcgcattcctcggaactattggacagacttttgatgtgtgtgtctatttgtgtgtgtgtgtgtgtctgtgtgtgtgtgtctctgtgtgtgtgtgtgtgagagagagagagagagagagagagagagagagagagagagacaagtgatgaatactaaatcttcctgtgttacaggggaaggagccacatacttaattgatatgtgtcttcaacagctgtttgaaataaaagttttcaaggaaaaacaccattcttggtttataaatcaatcagttcaatcaggtaagtgacaaattatattcccaccattagctaaacaaacacttctcatctcatgtgggtctatgggtccatcctcctgctttggagtgtggaaatgggcagccttcctgggtatcagaaagggtttggatcaggtgaagctgagtcaggttgtcatgtgttaaactgacaattctgatttatctcctgaaacaccaacacatctctgcaggagctagacggcatgtgtgccattgagcacaggctgggctgattggaaacactgcctttagaggaattttcaacatattatttaacatattaacatattatttaaactgatacaatttttaaaacatactagaatataacaactttttaaacagatggtttctcctgatttcctgtcactgttgtttaataaacacatactttagaccgtccattcgtcagaagagaagttgttctgtggttcaatttggaggttttagtctacagttcgttgtgccagttggttttgtgttatgaattcatggtggcaccatgtggcaaaaccacttacttcatgaccaggaaccagagggggtggggaagaccccatggtccctccccctccaagggatctcatgctgccctctgggacctctatgggtgcctggattcaagtgcacatgcatacacacacacatagacacacacatgcataatttaaagagagaataaacctaatttctttttggaaatgcatgtagtgtctctatagctctgggggtgggaagtacactgtcccctctgctgtagctgtgcctactcaggtggtacatgagagctccggcttctgctctggcatgcttagctggccttggctgatagctgcagagcatcagatggagactggaaagtggaggggagcagtgatagagcctggacagtctggctcgcagaccactctttgacttttaaagagcagtttgatttcattctgttagtcccggtgaccaggaggttgttattcaaatcagaaactgggttgctttgttagatattaaagataaatgtgtgtctttcctgaaaccaagaataaaaggttggggagaggcaagagaactgcttagagctgcattgatgaccacaccattcctcaagtgtgtgggaaggggggctctggggctaggagaggaagaggcagagttctcacttggcctggggagcactgcttgctcttcactctgtcttctcaggcagggtgtcatctggagtgtggacagcacagggagccttgcttgtcacccacagtccacaaccaggagccacagtagaagctccagagcgtgctgggttttcccagggctccaccctcctgcacgggaggcagtgggtctgcagttttacaggatgcttgacctggcctcctgagctctctggctcaccattctctgtgctcccccacacttctactctctccagtgagacctataggaaatgattccaatggtgaaatgaaaagtcgttttaactctcttccctcgggatttgaagccatttaaagtaaaagctcatggtgcgtctagactgaggaaggcaatctaactgtaggaaatgagagcatttaaaccaaggtatttcctgagtttgctgatggaaaacacaagctgctacacgtgctgccacgggggcagatgtcacatttctgaatgtgggggttcaccacattcagttcactctgatgggtaaggtgaccaagcggtccttgtaaggcatacaacttctctttgttccttctctcctgcagggggccttctccactttgccacacccatggatccattgttcctgctccttcactatctcctaaaggctggcaaagaggtgagcttcccatggcgggtgtctgaaggggagcacagagacactgcttctctttttcaaggtgcacttcagttgttagaacaggtgccccacatgtagcaatgagggtcggagtgcccttccctccctggagaagcagcaccttgatggtgatcaagtctgatcaagttactgtgacttcagtggcctagcttgccactctgtaccacagtggtagccatgcatagcaatgaaaacctagcactaagtgcttagctgtgaatgttaagaattcagctaggaagggaagatttcccccgtgggtgagtgtctgagaaataggtaaactgggttctgcctaataaatgccgactaatggggagcttaggtgtgtgtggttgggacgtgaggacccagagcaaaagcactcctttctctcagcgctcagtctcaggctttccgtgatggtgtctgtgcccagaggtgtacaacagcagaaactgggtgagtgcacttccctcacagggagccctgaagacactgcattcaggctccagatttgaataaaatccattgcttttagtacctgagcagggatatcaggttttttacttgtttagttggttggttttggttttggttttggttttggctttggttttggttttggttttggttttggttttggttttggttttggttttggtttgtgcatgtttaagaagatatcttttatatgtatgtgtgcctggtacccatggatgccagaagagagcatcactgctctgggaactggagctacgggcaactgttagctcccagatggttctgggagctgaatccagatcctctgcaagatcatcaaatgtccttgacctctgagccgtctttctagctcccaccatcccccaaagccaggatatcttaagtgaaactggcaatttaaaagctgtaagaatatggtaaaagctggggtgctttggtgtccctgcctcaacaccaccagctaaggagccccatcttgctaaacatcatttcggttaccagcatcatgccaacctcatgggaatgcaggtagccttttagaattactatgaatatagatttgagcttggagttctcttaaaggagaactgggagcactcaagttcttaaaaatcagctcagtcagcttaaaatctttgagttcacaactttaatgagtattggttgaactgcttagatagaactatctatttcttggactttcatatttacttatacagtaaacgcttctggttcattgtatttggtctttaaaccgaattcttaaaatttattttataggctaaccgactttgttataaacactgacagtcacaaagctcgccttcttcctgctttgatctgtacactttctgctcctccctttgctcttacctgagagctgccatgacggtcagtacactgggatccacacacggtagtgaggctattaccactcatgcctctgagccacagagactattgccaggaagctgagggaggagtcagcttgtgcacaaggcggatgttctctaggggaaactaacagggagacgcgcacctcagcttagtacagggcactgcctcctcatctcctgttaagagcaagacccggtttcagtgctcctcagtctggccttctaggagctactaaattcaaggtgacagatgcagagtgaagcagaaacgttgccatccagagcccctgtgccttttcttcttaagtcctggatgtgtaacacttgggtgcctaatgtttcttccctacatttagatggcgtcgtgtctaatttagttattaaaattttgttcccacttttaaatttgacttgttctttttaagcacagcctttcacaccaactcttattaactttatatttaaaacatatttcttgttttgctcttttgtggacatgtagcaaagaaaataaaaatataataacaataatgaaacttctatcgagactatagtgccattcatgtcagtattatttaaaacagcgaagtataaaaatactggttgatcatgggaaacaaaactttaaaatagaaacctaaagaatgcaacactggggagcctgggctagatggaagagcatttcagtcaggcatttctggccttctagcctaatggaaaaatatagcaagttatcacgtgtactgtgaaagaaatgacaggattcaccttgaaaaccagagaaaatcgatcagtcacactgtctgtctctaggagttcagtctcagaagcagagatgcagagcaggacctgggcagacagtgaatctactcctaagcctggctccctaatcagactgtcttcatcagatacgccttcccctgccattagtgatgttaagagaaactgcacctgagaatgtctgcatggctcactcctaacagccaggctatgacagcttgtctgtctggcctgtcttagcctgcctgtgtcttctttttacttatgtctcagctgccttttcctttatttctgtctaatttggaagcctcatctgatggctctcggaggaatggatccactttgggaatttttctttttggaatagaggacttttattattattattattattattattattattattattattattcagtcctggagtgaagacagggaaacagatgtatattctgggcctgggctgggctccttctaggcctgtgtgacagtggaacttgtgccttgagtcctcagctggctctttttttatgtggaatagctggaccatcctcagatggtccccaccatcttttctgtcctgtttctctctttttttcctgggattttcttttcacacagggactgtgccctcgaaggagctagcttgctctttagagtgccctcctcacaagatgagctcaggctcgacccttgagcctgtcgcagtttagaggctccctcagtggaatgaggagctcaggttctaatataaagatttcctgtggagtgcttctttgtttccctcttctttttgtgtgaaagctctgtggctcagccgttggccacctgactgactcagatgtccctttcaggggaagtatcagcccttggaccaagtcgtggtcgatgacacgtttccagattgcaccttgctgctgagatttcctgagcttgaaaagtcacttcggcatgtgacagaggaaaaaggtatggtgtacaagcctttgaaatcaggctgtggccgtgcggatctgtctgtgagcttttcagtagggagagttaagggacggaggatattctggagaagctaaggtggttagccagttgtggacttggaagagcaggggagctgagcatgggggtggagctagaggggaccagctgttttggtgtaggacaatctgcatctggtgaggcagtggtgttcgcatgagggtgagtcaagaatgactctgggcctcagcctagcccaggagacatacaccaggagacagaatgtagaccagaggagcaggctgggagatagttataggtcctagtcacaggtgttctgaaagtaggaaatgagcgatgtgcacgttggtgcgtgtagtgatgggcttcataaacaattccattcaagtgtctcatgctctttgagacttcaagtactgtattgagtaagagtggagagagcagacacccttaccagacaccttacctcattcccagttttaggggaaatactttgaggttaccccatttagtgtaatactggctgtcatcttccatgcatgacctttgctatactgaagtatattccttctctaaattcttctttattcttcataaaaagatgttggatttgtcagaggccctttctgcatttgttgagatgatcatgtggtttctattcttctattctatatgttggtattaaacttactgatttgcatatgtttaataaagcttgcatgtggaatgaagctaacttggtcatgaagaacaatgtctttaatatgctgttgatttgcttcacaagtgttttattgagaattgttggggccgcgctcattgctgtctggaaatgttctttttgttgttgtagtccctgttcagtttgggggtcaggtgctggcttcatgaaatgactttggcactgttcctcctttcagtcttctgcaataatttgaggaacagtgacgctacttctttggcactgcatgaaaattcagcaactgatcgcctgggtcaggtttcagttgagagacattttattactgctgcagtcttttgcttataaattaatttttacttatagatctgttaagttgtgtatactgtcttagtttgattttggtaagtcctacggatctaaaactttatctatttctttaggattttccagtgtactggaatataggttttccaagtgaccatcttttgaatttccttggtacatattgtcatgtctcttttctcctccaattttattactttgggtcttctttctctttcttttaattagtttggctaagtttctgtcaaccttatcttttcaggtcaatttttatttccttgatcctttatatagttcttttagttgtatttaactaatttctgccctggtctttattcttcctttctgtctctgattttaagtttggcttattctttttaaaaacatgaggtactccgttaagttatatatttgaggtctgggtggggttgtttgtttgttaattggttgtaatggaggcatttttagctataaacttccctctagctgcttttattgggtcccacggtttcggtatatcatgttttcttttcatttgtgaatgtgttttgatgaatttgaagcacagtacaaacttggtgtcagtatcttaaaaatcaccctaatagtttcaaagctaagaaaaaaaaaaaaaaaagcgtgggcaccagacagaacatgctgattggccgtttagggttacagatggtctggcaactgtgacagttcctctggaaccaagaaagtgatgactccaagaagcatactctcgagggatgtgctaacatctgagagggctgctaactcctctgtggccacatttaggatccatttcggctctgagaggtgtatggtaccaagattgtcggaatcatctcatttcagatcctccatgatgctatattttggatggacagctctcttttcatgagtgacataaatggagcttcacataaccgtttctgaaagttaaagtaataatggttcttgccctcctccaagatactctactagaatctttgggtagtatatcctttcctaataattgccttttatgtagcaaaagagagtgataggcgggagccagagagaaaaaaaagggagggagggagggagggagactgcagagagcgctcaagggattttaggcattgcatgtgtataccttccaggttatcctcagtaattgtgttaagcactggctgctatttaagtttggagtcctctattataaattagtgtttggttctagtctctggtatttatttactcagattcccccgtctctatagccctagatgcaggttacagtgcctatggtgttaaatgttagcttgagtccagtcagtatgtaagaatcttctgtgttgctttctccctgtggatgagctcagccatggtccctttaaaagtggtctgtgctctgaacacagtcagtggggatgctctgattactgacttgaggtctcagaacatgtttctgggcaaagaggctcacaatttttagagaagacacagggaaggactaatagggtcatgaactcagcgttgactgagacacttttttataaaaaacaagccagagctgctctatgctgggcgtgtaattaacaggcagatactagaaattgaccatgcaattgccaagattctaacccaggggcaggggaagggggcctgagagcttcttggttatgagaaacctttagaaagcagaaatgaaaatgtgctctaggcaatttgttcagtaaatcattgggggaattcagatttgcacacggattatccaattactggatgtgttacttaatcgtaaaattacttttttcatctttatcatgtaaactcaatctttccagatgtttcagaccagtctaaacctttctaccatatgcaaatattgtctagctcaatgattcacaagtattaagtttgggatgtgcatgcatgtgttgttgggtttttttttttttaagatttacttatttactatatgtaagtacactgtagctatcttcagacacaccagaagagggcatcagatctcattacagatggttgtgaaccaccatgtggttgctgggatttgaactcagggcctctggaagatcagtcagtgcttttttttttttttaaggtattttcctcatttacatttcccaatgctatcctaaaagtcccccatacccacccacctcccactcctctacccacccactccccctttttggccctggcgttcccctgtaccggggcatataaagtttgcaagtccaatgggcctctctttccagtaatggccgactaggccatcttttgatacatatgcagctagagtcaagagctccggggtactggttagttcataatgttgttccacctatagggttgcagatccctttagcttcttgggtactttctctagctcctccattgggggccctgtgatccatccaatagcagtcagtgctcttaaccactgagccatctctccagcctggttttttgttgttgttgttgttgtttgtttgttttgttttctgtttttttagatttttcatatatgagtactgtatttacatcatttccacccaacactctcctcctacttctgtgtcccctattccctctcaaatttatacatctttttatatatggacatacatgtatacctaatgaatataaccagtttaagcatttgctattgttcgtgtgtatatgtggtgaagaccagtgtcttgggattggatagcttatcacaggaatttaaccttaaaatttatgatataaaaaccttctaaatagactagttgttttcacagtacattgtattttactttagaagaaataatactcagaacaagacgatttgttcagacattttcagcaaatagatgaggaataaaatctgtgaaactaaaattttatgagatcagaaatggccccaataccaaagtcaaagttgttataaaaaaaaaaattaagctaatatccttggccaccacaaagcctaacagaattttaaagatagttaaatataatacaaagtttgttggccattagaaaatttggataattcacagatttgtatattataaaagaaaaagtatgatcgtgagtgaatacagagaaggcagttggcaaatgcagtcatgagatacatttcacgtgagctgtctcactctggtaaagatgtctgcagcagactccttatagcatcctagtaaagactgaacgtgttctcctttagtttggataaggatttcatcttggcagaaatctcagaaggttcagtagcaatatgaggaagagagaaggcaggcaattgaagagtcaccgtgaaaatgcctttctttgtagatagtgttgtgtgagtacaaacccaaaaggacccacaaaacagtaggacttagagtaagcaaggtgttgggatgcaagatcacttacagataacagttttgtgtgtgtgtgtgtgtgtgtgtgtgtgtgtgtgttgtgaggttcaatgggagaggggcttttgaaccatatatccacgtgaaaataatggacattggtagaaaaggaaactcaaagtggcttgttgaattaaatgcaaaagtgaaaagtttttaacttctagaagaaaaaaggacaataacctgtaagatcctgaagaactccagtatttcttatgacacagaaccaccagtataaaaaagtgtatcttgtatttcatctagtaaatacttttttaggacacagttataaccacttgacagttttatgtgactcagtagttctactcctaattctttttttttttttctaggctttattaaagtgtgtcagtgccaaattttgagtgagagtgtggcctctctgttgttttgttttgaatagcaaccatcccaaaatagcccaaatagaacaaatccatggctctttctcttgggtcagcaaatgtagtcctcctagccaggaccacaccaccatgctaaggaaggagctgctgcagacagcagtatggatacatctctcaaaaactgttgagcatattctgcaggacccatttctatgaagctctagcactgtggttcccaacctgtggctctcctccaccctttgggggggggggtggtggtcatgtatcagataccctgaattgctggtatttacatctcgggagaaatatatgtaaggagcttgtcagtccctactgctgctgtttacaaatgccattgtcctttatttttctatttagtttgtggcaggcactgtactgtgatttgtgtgtgctatctcccgttgtgctcacagcagtcccttcaggaatcccacttctttatattggaggacggaggttctgagagtgatggttccaaggtgatgctgtgatttggatgtacataaacccagacgggcggctcagtctgactctacccaagatgtgtatgggagcctagcttaaggggctcaggaagtgggggttcttctaggatattggaggtcagaacaaaagaagtaaacagcagaggtgagacttgagcacggcggggggtgggggggtctggaacatctcttagggtgtgagtggagcttctaacaagtcactaaactgtatgccttcgttaggtggctgggtgttagacttgtgtacagggtgagagatggcctccaaggagtataagccaggctaatagccttccgtgggccatgtggccaggcagccctagccctagaggagcaagagttcttagactggtagaatgcccttccttgctgtgtttccagaaacatcctcagagatgctgtgtagggtgggcaaccctccctgtcctgcttcatctggtcctttgtgtcttcagccaaacgctgcagtggggaggagatgaatgacatgagtctcagggtcatttaatagacttcaataaactaccttagaaaagcagtttccatttcctaaggcccagagcaggagagcagagctcattctgtgtagctcccaggggtctgcgctggccgtaggctttccagtagtcataaacatgactcctgcatggctgtagagaaggcctggtgggaggaagagagcctcaaagtaaaatgtgtcacacgggaggtcctggtcagagtataaagccaggtgcattgtgaagaaaggaagtatcatttataagaggtggaattgtcatccctgtcgaggaccacactgaggtcaccatgactctaaatccccctgattatgttggtaatacatcaagaagcagatatgtcgtgctttccagcatcactgatcccacccggggaagcactcggtagatactaagattttttcccccctttgaatatattcagtgaacttcccagctgcctgtcttactttgattcccaccccaaaccttggaatttccattcttattgaaagaggatgtgttttattgagaatattgaagtgagttgttcatagaaaataagattgcttagcatgttagctggctgccttttacggattgttttcttctgggttgtttatgtgagtctaggagtcctttagctcctgctcgctcagtggtggctgatttccgaggtagccagctctgctcgggactttttttttaaaaagctatctcaagcatgttctcaggtttatagcttgagtttttggatagtacacactgctgtgagatgtctttaagttactgacttatgtaagtattttgcattgtgtttgcggcttgtgtttaatgcattgcactaaggttcttagttttctcttttaattcaatgcagaagtgaacagcaagaagtactataagtacagctcagagaagacattgaagtggctggagaagaaggtgtgtggcctcgcaaactaacaagaagaccaaatccgggaccattttgaacatgcagaaaaaaaaaatgcctatagagagccaaggttgagcagagcacggttttctttgattgcatgaccctgcccctgagtgtcaggagctcttgttagatgttgctcacataactggggtggagcaagttaattctagagtcgtttctcttcgttctcacagcgaccccctccaggttgtgtaggtctcagaaagaccttgtgttgagatcatgagcactcggctcctcccttcattaactgtgcagccatctcatcttctgacagctggtgtcttagtctctgttctcctgctgtgaagaggcaccgcgaccaaggcaactcttataaaagaatttatttaagtggggctggcttacagtttcagaggtttagtccattatcatcatggtgctgagcgtggcactggagctgtagccaagagccacatcctgatcatagacagagggaagcagagcctgggccccacatggccttttgaaaccttacctcctccagcaagaccatccctactccaacaaggccatgcctcctaatctttctaattctttctaagagtttcactccttgatatctaagtgttcaaatatataagtctatggggtcgttcttatttaaactatgatagctgacaaagataactctaggtgcttaaatatttcctggatatcaggtagaccaaagccatctgaaaagccagagcattctaaagttaagttgaaagtacatccctgtgtttacctcctaggtcaaccaaactgtggtggcactaaaagctaataatgtcaatgttggagcccgggttcagtcatctgcatatttctctggtggtcaggtttccagggacaaggaaggtaagcaacaggttgcagccgccgagttaacctctgcctgcctctgagggcttcagactgcaggagcttcctgttttcctgtgggctacagatgtgggcaggtgttccctgatctcagacaccgactgtttccagccttaggtcactactcgtggcctaatagtgaccaaacactcttgaatcatttgtttgatgaatagtgttttatattaatggtgacagtgtctctgaacactcttgctcaccctttcaaagtgtttataacgtgacaggtataccaggcatgtcgtaagaggcagggctgtgccaaattcctagctagcaaacagtgaaaccacaggactgctgacaggctcttggatagactgtgtggcctttggcctttggcccgaaggtcatcatgccttaggagcccagtggaaggtggctctttacatcccagcatctcagttctcctgggagggttcattgtgttgtagaagtgaaaatgaactcacttggcaaatgttccttctgggtttctatttctatctctcctcccttccttcccttccttcccttgctgtatccatctgaactgcacctagagtctcttgcatgttgtgcagactccaccaaagccctgcatcctcagccctcctcctgctttttaagaccaaagctcattagaagcaccttttcttacagattattaaggtacattagtttgctttttctaatatgggaaccctttatctctctgtgtgtagttaaagaaaagcagctatgcagtgcagttcacagtcttcagtggtgggacagaaatgctttcgaccttaaatccaaatcagtgtttacttgttctgagttacaactcccaatttctcacatctgccgtaaacaaaaggagcacatgggctagggatgtagctcacaaatcaagtgttctctacacataaggccctgagaggagtcccaggtactgtgggaaatgaaaaaaaactcaatacacaaaacagcacaaggaacagcgtttgcatgaggttgtcgtttaggtagggctttgcatctggtttctagcacctcacttgtagcgatagctgttgctgagaagggtgggcagcatgcttgctggactcagtacatcagtagccagtgtcaaactggttgctgggtagatagagcaaaggagcaaagcagccaatcaattagtaaattgtattttttaagtaggaagggagggttagaaattatttaaatagatgtaattttaaaaggtggaaaacagcggtcgcagaggggcaggtgacttctcctcgctgataagtcttgctctgagtgcagtgctggctgcaggtctccctagcagaggctctggctggcctgctcctactcttccgctatgaagctgtggcatccactttgcaccgttcctgtcaagtagatccgtccgtaatggcaggaacttatgccacacgatagcagacagaaagcagaatgaagccggaaccaacgccctcctctactgactaatgtctgccccaccttccatgggctccacagcctccagatcaataccacctactctagaaacaagtgcccagaacatgagagcctatgggacaccgcaggcgccagcctgccagcacagtgttagaagcagcaagtgagccgtgtcgtggctttcgtacagagtttgtccccctgaatatccagaatcacagcacatctcaaggagagtctgatgagtttcagttttgtatcaactaattaaagaccagactgtggtttctaaagtaatactgaccaacacggctcccttaccaggaaggcaggagtgaacctggactcagctttgtactcatgtgcccgtgggcttttcccatccttggttgcacacagcattcctcccgtgttccttacatgctgagctgtgattggcacctggcagcactctccttagctgtgttccgttgatgtcagagctgtagtttggttggttccaaacactagaattgttagtgattctacattctgcaagtccttgttcttcctgttctgttgctgtaggagagtgtgtatgtgggggtgtgtgtgtgtgtgtgtgtgtaaatgtttgaattcttataaaagcaaatgcctagaagatataaatcgtataagtgattctacttacaagctttatttctttgaagggagcatgctcattctgtgcagtatttagctttcttctttattaaagcaagtttgtgaaaaactagccattaaaaagagatgcagatagtttatgcagcttcaggtggcttacgatttttcttacatttgggactccgactaagaaagctggcctgggtgtgtttcatgtgtgcagtggtatttaggccatccactgtgcagtcacatctgtggcagcatcccacattgcctctcatccactgtatgtctccctcaccaacgggcaggtcttagtacccctgtttcaccagtgcaggtactgaaactaaagtttaagtgaatttccaaagccacctagagcaagaatttgcatttgaatcattttgactcaagccactctaattattactaatttttctttcattccctctcctgtttctttcagaggattatgttcgctatgcccatggtctgatctctgattacatccctaaagaactgagtgatgatttatccaagttcttgaagtgagtatcatccatctccagccctaattcacaagctcctctgggcttctttctgacaagagggttctctgtggcgtggcaggttgtgatgagctgtggtccatgggctctctcatactgggtggactggaaattgtttttaatggacttcaagtagaatgatttggtttggtagaaactaattgtagcaatttaagtttaaccttaaaattattattttgtgcagttttagaaaaaagacatgtattacaattttatccctatgacagctaattggttctttgtggtcattttaagagaatgggaagtgaaaggcagatggtagttttaaaaattgcatgtgaaagttgtatagtatatctcgtttacagttacaagtcttcaccaagtacctccacggtgctgagtgctcggttccctgcagtacctctatggtgctaagtgcttgattccctgcagagcagcatcctagatagtctctcacagatgcccacaggccagtctgtctgctcttcagttgcggttccctcttcctggaggattctaggttgtgtcaagttgacaataaaaactatccagcacacctacttcaaaaaattacagagcaagctagtttctgtactagttacaggtctggaaagctcgctcttactgactgtctttctgcctgatgtttgactagattcccatgtcttgatagaggccttagtttctcttctgttacttgcattgatcttttctttccactgaaatttgagttaaatattttgggtgaaagacaatgcaaagtaaactcttctttggtagagaaaagatgccgtccatgtggctttcccaacagttaaatactttccacttttaaataaatactgcattgtcttttatgaaggaagcaatgcccctccaccaaatgcaatcatggaggcaaaagcaaggcaactcacttcaacagatggctttccactgtgtctgtcttcccttagacatctccatccattcattcggtgaaattgctttcttcactgaggcgagcaggccagtgtgtggaagtcagaactctaccaaataagaccccttacaccttggcccagcttctctgttgtctatgagaagccatgaccatgattcttatttttaacttctttaggcttccagaacctccagcttcattgaccaaccctccatcaaaggtaagaaactgggactacaatatctctagggatttagaaaaatatatttacccattacttcagccttttctatctactttaaagtatgcagaatctatcttacatgacatggtatcacttgaactctgcattgtatgactgtcttcatttgtccatttttcctggctagtgaaaacaaattggttttagcaaggtacctccattaacatacataggtcaaggctagagagctgaggtgctgtccttgtgcagagaaccagagttcagttcgcagcacccatgataggtggcttgcaactccctataacttcaactcaagatgatttgatgaacttcttggcacaaccctttgcatacgtgcacatatgcataaataaaaataagtcttaaaaatatatgaaagatataattatttattattattattttctccttgaagtaacatctcaccatgtgactcagtctggccttgatcttagtccttttgtctcagcctcctaggtcttattagtgtctgtcagccatgctggctaaaatcttcttgcattgactctacatgaaagtcactttgccaaatgtaattgtctttggcacaaaggggcacagagcatgatttttctaacataaagaatcctttgaggaaaggaagacccaggctcttcactgagtttaaaatgagaattgtgcatgattgtcatctgttaatgtgttcagagagcacgaaggtgtttttgcacatgtacacaggtgcatgtgaaggtgggagtgggtggggcagtcctccaggaagcaccatccgccttgttttcctacttggttgtttgtgtcttattggcctggagctcaccaagtcaaccaggctggccctcagaacccaagggacctgcctgtctctgtctccccagtgctaggactacaagcattcgtcactgtatccactctgttatgaggggtctggagaactcgagttcttttattggcgtggcaagcatttatctccctggccttttggggacaccttcctttttcagatttgctaccctgactcctcccacagcttgtgttaatttccctgatccaagtagagaagccaggtgtcacactgtagcctgcctcacagctggccacatcttagatcccctgtgagccctccaagatgggaacaggcacacacccttgagtgtctgaaacagtagcagtgggtaccttgaggatggcatgctgtggttaactctccctagtgttcattgttctggccttcgggctggccagcatgctcaggaccttttcatgtcctggttgctgggccaggctggtggcagcttagaagcatttactgggaaggtggaagtcatcagtgttagtctagggcagtagctctcaaacttcctaacgctgtgacccttttacagttcctcatgtggtgctcccaaccatcaaattatttttactactgcttcataactgtaattctgctactattataaattgtaatgtaatgtcatgtgcttctgatggtcccaggcaacccttgggaaagggttggtcaacccccaaaggggtctggatccacaggttgagatccgctgctttagacagtggtgagactgaagcagacagtgagtgagtggtaagattgcctggctttggtgcttagtgggggcacagcccctgtggcacccagcaaggctgtgctgcaagaacatttctttcataagaccagggctggctggatttggcggtgggccttagtttgccaaaatgtttagatctcagcatcttatgcttgagcctcagtctctagattgttgccgtctactccatgtgtcctagagattccagtgttcagaggacacgctgtacttgacaatacactgtactttaacatggctaggcatagtggtaggtagctcatgcctttaatcctagcactaaggaggcagaggcaggcagatctctgtgagttcgaggccagcttggtctactgagcaagttggaggacagccaggactaatgagagaatccctgtctggaccaccccagccccacccctccaaaaaaacaaaaacaaacaaacaaacaaaccattaaacagcacaggctgtctctgacttctgactttcctgtttgtgtctaagagttggcagttttttatatgagtgctttgttttcaggagtctgtgcatgtagttataaagtgttgtatggaacttaacatctgaactataagagccgaagaccagagagcattggtcaagggaccactgcctccttctctccctgcaacacacctgttagtcaagttctttgttctttgtgtctttctgatccacttgttcaattctctggcagcaactgcgcagtccataatgattcagacttttaaataccagaataacagaaatactgcattcctttatttcccagtgtatctagatgaattattccagaattgattccagatgaattaatctgactagttaaaagctagtcaggtgcagaagatagtccctcctctctgctccctcccttccctcccctccctaccccttccctccctctgctacccacacccttcacttttctcccctcccaccccttcctcttcttttcctgttcttctttagtagatactttctctggctttcctgtggatgtgaacctctgaagctccttttctcttactgcatgttgaacagctgtacgacacgtccttagtacagcatataagtgtatcagccatgagcagtagatttctatgttggactttctagtgaagcgaggcatgtcaactgctttttactgccatccctctgtgatatgtttttaagttgcatgtatatcattaacatgcatgtatataatatattctgctggcactcctacaccctctcagcctcctccactaccaccagtccctacaccactctcacatctttttatttttattgcttcgaagcccaccaggtttaaccatttccttgccccacctgcactccccaaccttgtgggcatggttccctggaacctgggaagctcaccagttgctacatcaagcaatgacaacttactctttcctcaaagtccccaactgccattagttggcctgggtgggactgggacctacaagtcctactctatctgtgacttggtgtttactgcctatgtcatgttccattccctctgcaagcatgtggagctgttatgagtgacagtcataccctgcatgtaagacagtggttcatggccttacggtggtctagctctttcatctttttgcctccttttcagtgatgttctctgagctttacatgaatgtggatgtcccacagaaggctgagcacgcagaaccttgattcggcaccatgagtctacattaacctcgattactttaaagagaagtttctttggttaaggtgaaggacagtcctaatctagagtcatctctgacatgttcttagtctctgcaaggtctctgagcacctggacacccaccctgattcaatgagaaataaacacttgccatagagaagggacacaaacaccttcatgacttcatgttcaattttaatattgccagctgtcagctgggtagcaactggtgaggtgtacccaagctcttttggctgaaggcctttgtggttcatgtatacctctgtaccatacctggagggaagctgtattcttttatcatttgagacagagtttgattcaatagttgaagctggactgaagctcactcggtactctaggttgaccttgaactcatggcagtccatttgcctcgcctccaaagtgtcaggactgcaggcatttgcctccatacctggcatgcagctggtaggtcagttttgcacagtacacctacctttgcttttgacaatccctttgctagagatttctctgtagccaagaaaacccctctttctgtttcttatggcaagcgaggaatctcagcaattccgtgtgactttatcttgtgtcctgggggctgtgaaggagagagtgggttgggtctgcactctcaaggcacctctgctgctgtgtatgtatctggttttctagaagagctaaaggtctgtgtaaatccaagtcgtgactaccatgcagtctgccctctacacagcagcaaggcccatccacccttctgtgctgtctccgtgtagactgtggtgggacttcctttctacactgtggtcacctgatattaagggcacagcccaactggtcacagaagtctcatatgcataggtgcaaaaggaccttgtgaatggtgagaatatgtgaaggtttactgcactgggtctaatggacaggatgtgtgtatgaagactgagattaacacacacatagacacacacacatacatatgtatgtacatatgtatgtaaatgtcactttaaaaagagagatgaggcagggcagcaagagggctcagggaataaggacacttgctgccagccctgagtttgatctttgggatctatgtaataaaagcagagagccaaggtcctcaagttgtccttggtctttcccatgtgtgctgtggcatgcacaagcctacacgtgcacatgagtaaatgtcctttggttaggtttctttctgctttcgcttttccttgagatctaactccacatcctgtgttttcacttgggagtttgtttaggttccctgtcctgcaatgcctgctgtgtatggtttctgtgtggatgagtggaaaggagaaagcaaggcaggaagctgtgcaaagctggtgacagaataatgctgcccatgttcagtagtggccatcagagcaggccagggctggagagaatgggttacgcttggcacagagccccaacagggccttttgtctccaacttctgtgccttttatttagccccctcaactgtacccacctagtctgtaactgcttagaagcccaccgtgcctgatacatacaaagtgggtttatatcattgaagagctgctggagccatgtcgcgtacctactcaagtgtggccagtcatcaccaaggctgcatcttggaagagacatgtggcttagttcttgaagtgcttgtcaactgtaaaggagtttgtaaagtatgggtcccagggatatgtttgtttgaaaggatggtgagagaatggggtctgatacgcttcaatgctctaacattgcagaaactaaagttatcagatgagcctgtagaagccaaagaagattacactaagtttaacactaaagacttgaagaccggcaaggtatgtgtgtccaggtgtggtggcatgctggcaactccagtggcagtgtgtccccaaggatggctgcactgttgactgcacttacacgtctgaccaggaaaagtgatcaacttgcatttctagcagcataattcattgagaatagttcacaatagtgaacatgttagattgtgccaatctaagaaagccctgtcagacagactgggcctgaatcttaccctgtgtccatagaacagtggatgagagggaagcaacttcaattttttttcaatactcctgccaagaagattctcagaaattagagtaaataaaaaacttcccagtcccgccattcagcgttctcctgcagtgtctgctgagtaacttttcttgctgggttttgttacacgtatcctgagtcacgtgatgcatttataacctaggtcttggctctgccctttcatttagcattacataagtgtgtaccactaaccctccctcactacatgggggtgggacatggcacacagtcatgtaattttatcacttcctgtatttggacattccggttagtgaccaaggtttgtttatctgctctgaccactttattacccacggtgaaaaagactcagagttcagagtttcaggcaattgaaatagacagctaaaatactttccagaaaggcaaggaaactaactcccagatgctgccagcgagtgtccttcctgcatccgtgcctgccctgagtgctacttttatttttgaaatttttgtttgtcaggtgagacattcccttaactagaaaggtctgtttttccaggttgcccattgtctctttgcatttgtacaaactgtcagttgggacccttgcttgtctctgtgttgtgaaagcaatgcttttctgtttgtgagaatgtattccagataaaggctagtaactcttttcatgacacattcagggtacaagaaaatttccagcatatttttagccattttgcttgtttttttttttaacagttgtaattattttttttcctaagtttagatatatagtttacatttctgtacagtttccccattttttcttcatgcttgcccatcccaagaaacattaactcccatttagattttatcaatgcataatccttatatcatttttgttgttgttgtgttgttttgtttgctttgttttgttcaattttattccttgggctttgataacagaagaaattccaatgtaagttttgcctaaatagctctttctcccagcattctgtgaattcacagactgattcacaaagtcattgtgaattattcatcactggatgactgacacaggtggtatgccaccattgctgccgtgtctgttcatcactggatgactgacacaggtgggatgccaccattgctgccgtgtctgtatggttgttgcatttaatgcaccctcaaaatgattcccagagggaaccatccttggagcatgcagctcctcggagttgggtatgctttcctctgcaccccactatcacatctggatcctgagtgggcagcagggttgtttgagctctgccactcacgtgctcattgaaccaagattcaggcttgtgtatttgcatgtacgatagtttacaaatatgtaagtctnnnnnnnnnnnnnnnnnnnnattaactcccatttagattttatcaatgcataatccttatatcatttttgttgttgttgtgttgttttgtttgctttgttttgttcaattttattccttgggctttgataacagaagaaattccaatgtaagttttgcctaaatagctctttctcccagcattctgtgaattcacagactgattcacaaagtcattgtgaattattcatcattggatggctgacacaggtgggatgccaccattgctgccgtgtctgttcatcactggatgactgacacaggtgggatgccgccattgctgccgtgtctgttcatcactggatggctgacacaggtgggatgccaccattgctgccgtgtctgttcatcactggatggctgacacaggtggtatgccaccattgctgccgtgtctgttcatcactggatggctgacacaggtgggatgccaccattgctgccgtgtctgtatggttgttgcatttaatgcaccctcaaaatgattcccagagggaaccatccttggagcatgcagctcctcggagttgggtatgctttcctctgcaccccactatcacatctggatcctgagtgggcagcagggttgtttgagctctgccactcacgtgctcattgaaccaagattcaggcttgtgtgatttgcatgtacgatagtttacaaatattgtaagtctctctttatttttattaacagaaaaatagcaaaatgactgcagctcagaaggctttggctaaagttgacaaaagtggaatgaaaagtatcgatgccttttttggtgcaaaaaataaaaaaactggaaagatttgaagcatcgaaaataaaatccagtgaagcagaaacagaaacttgcctcttgcctattctgtcttgtctcttcttgccgctgccccgacctcccagaccctaagtcactacgctgagaatcaaggtactttcgcatcctgcagacacttgctgcgctgtgactttgtgtctgacaaacacaaccattgtgggaaagtgattgtgtgaactgctgtccggggactttgggacctttgccataatgaaaagccatcaagtgcatgggtcaccgagtcacagcttccccagggaggtgtgagcattgcccaggtgttccctgctctgtcctgcatggcttcagctgaaatgagctggacaacaaaaccacacattttggtaaattttataattagccatatcttcgtatgaattcatgttctttgtaaaaataaaaatcaataaaacaaaattgcaatcttgcccctttccattatgcaggtacaaccaggtaattttcttagaataaaaacattttcaagagctt

SEQ ID NO: 32 - DNA, 1376 bp, Mus musculus
ggccccggttggcgggcccctcggcgccacttccggcagggcgcgaccatggccggaggtcgggaccgcggggacttggcggccaggcagctagtgttcctacttccaggggaaggagccacatacttaattgatatgtgtcttcaacagctgtttgaaataaaagttttcaaggaaaaacaccattcttggtttataaatcaatcagttcaatcagggggccttctccactttgccacacccatggatccattgttcctgctccttcactatctcctaaaggctggcaaagaggggaagtatcagcccttggaccaagtcgtggtcgatgacacgtttccagattgcaccttgctgctgagatttcctgagcttgaaaagtcacttcggcatgtgacagaggaaaaagaagtgaacagcaagaagtactataagtacagctcagagaagacattgaagtggctggagaagaaggtcaaccaaactgtggtggcactaaaagctaataatgtcaatgttggagcccgggttcagtcatctgcatatttctctggtggtcaggtttccagggacaaggaagaggattatgttcgctatgcccatggtctgatctctgattacatccctaaagaactgagtgatgatttatccaagttcttgaaaaactaaagttatcagatgagcctgtagaagccaaagaagattacactaagtttaacactaaagacttgaagaccggcaagaaaaatagcaaaatgactgcagctcagaaggctttggctaaagttgacaaaagtggaatgaaaagtatcgatgccttttttggtgcaaaaaataaaaaaactggaaagatttgaagcatcgaaaataaaatccagtgaagcagaaacagaaacttgcctcttgcctattctgtcttgtctcttcttgccgctgccccgacctcccagaccctaagtcactacgctgagaatcaaggtactttcgcatcctgcagacacttgctgcgctgtgactttgtgtctgacaaacacaaccattgtgggaaagtgattgtgtgaactgctgtccggggactttgggacctttgccataatgaaaagccatcaagtgcatgggtcaccgagtcacagcttccccagggaggtgtgagcattgcccaggtgttccctgctctgtcctgcatggcttcagctgaaatgagctggacaacaaaaccacacattttggtaaattttataattagccatatcttcgtatgaattcatgttctttgtaaaaataaaaatcaataaaacaaaattgcaatcttgcccctttccattatgcaggtacaaccaggtaattttcttagaataaaaacattttcaagagct

SEQ ID NO: 33 - protein, 204 aa, Mus musculus
MAGGRDRGDLAARQLVFLLPGEGATYLIDMCLQQLFEIKVFKEKHHSWFINQSVQSGGLLHFATPMDPLFLLLHYLLKAGKEGKYQPLDQVVVDDTFPDCTLLLRFPELEKSLRHVTEEKEVNSKKYYKYSSEKTLKWLEKKVNQTVVKANNVNVGARVQSSAYFSGGQVSRDKEEDYVRYAHGLISDYIPKELSDDLSKFLKN

SEQ ID NO: 34 - DNA, 1495 bp, Mus musculus
ggccccggttggcgggcccctcggcgccacttccggcagggcgcgaccatggccggaggtcgggaccgcggggacttggcggccaggcagctagtgttcctacttccagaacatttaaaagatgcctcgaagaagaagaagaagagcagcctcctgttcgtaaagctggccaacccgcactcaggggaaggagccacatacttaattgatatgtgtcttcaacagctgtttgaaataaaagttttcaaggaaaaacaccattcttggtttataaatcaatcagttcaatcagggggccttctccactttgccacacccatggatccattgttcctgctccttcactatctcctaaaggctggcaaagaggggaagtatcagcccttggaccaagtcgtggtcgatgacacgtttccagattgcaccttgctgctgagatttcctgagcttgaaaagtcacttcggcatgtgacagaggaaaaagaagtgaacagcaagaagtactataagtacagctcagagaagacattgaagtggctggagaagaaggtcaaccaaactgtggtggcactaaaagctaataatgtcaatgttggagcccgggttcagtcatctgcatatttctctggtggtcaggtttccagggacaaggaagaggattatgttcgctatgcccatggtctgatctctgattacatccctaaagaactgagtgatgatttatccaagttcttgaagcttccagaacctccagcttcattgaccaaccctccatcaaagaaactaaagttatcagatgagcctgtagaagccaaagaagattacactaagtttaacactaaagacttgaagaccggcaagaaaaatagcaaaatgactgcagctcagaaggctttggctaaagttgacaaaagtggaatgaaaagtatcgatgccttttttggtgcaaaaaataaaaaaactggaaagatttgaagcatcgaaaataaaatccagtgaagcagaaacagaaacttgcctcttgcctattctgtcttgtctcttcttgccgctgccccgacctcccagaccctaagtcactacgctgagaatcaaggtactttcgcatcctgcagacacttgctgcgctgtgactttgtgtctgacaaacacaaccattgtgggaaagtgattgtgtgaactgctgtccggggactttgggacctttgccataatgaaaagccatcaagtgcatgggtcaccgagtcacagcttccccagggaggtgtgagcattgcccaggtgttccctgctctgtcctgcatggcttcagctgaaatgagctggacaacaaaaccacacattttggtaaattttataattagccatatcttcgtatgaattcatgttctttgtaaaaataaaaatcaataaaacaaaattgcaatcttgcccctttccattatgcaggtacaaccaggtaattttcttagaataaaaacattttcaagagctt

SEQ ID NO: 35 - protein, 304 aa, Mus musculus
MAGGRDRGDLAARQLVFLLPEHLKDASKKKKKSSLLFVKLANPHSGEGATYLIDMCLQQLFEIKVFKEKHHSWFINQSVQSGGLLHFATPMDPLFLLLHYLLKAGKEGKYQPLDQVVVDDTFPDCTLLLRFPELEKSLRHVTEEKEVNSKKYYKYSSEKTLKWLEKKVNQTVVKANNVNVGARVQSSAYFSGGQVSRDKEEDYVRYAHGLISDYIPKELSDDLSKFLKLPEPPASLTNPPSKKLKLSDEPVEAKEDYTKFNTKDLKTGKKNSKMTAAQKAKVDKSGMKSIDAFFGAKNKKTGKI

SEQ ID NO: 36 - DNA, 60782 bp, Homo sapiens
agaccatggagggccgctgggtgcagccacagagcgcggggccccggcgaccccgccccgctccgcgtcactcggcgccctgcggcgcgcgatgagcacctaccactagcggagccgcgagggagaggccgcggccccttcccgttgcctgcggccaccggccggcattcagagcccctcgcctggcgctaaatttaaaaacgtaacacgagcagcaggctggtctcggaaacgaaacgaaattcggtccctgggcctcctcccgggcgctgccggtccctcagcgcgccgcgccacccggaacagacccttctcccgccattttcggcggggctgggagactgaggcccgcggcgctgagcctgcggcgccccggaagaggcgggcggcatggccgctggcgtggactgcggggacggggttggcgcccggcagcacgtgttcctggtttcaggtaaacacgcgcgcccgggcggcggggtcggcccaagaactggcggagcggcccgcgaccccgggcgcgccgccccccaccccggtggctcccactacccggcccggcgcgggatgggattctctctgggacagctggccccgcattttggtcacacgtcatagcaagtcgcggttttcaaacccggaagcgccgaaaaggaccgagcgtgtttcccgggccctgatccccggtggctcgggtgggagggtggaagccgactcagcctgaggggagccacgcgggttcgcggtcaccggtgcgctgcgggccccggaggtttctgcccttggtgtcccctacctggcagctggccctgcttctgtgatcctactgggttggaaccagggatccagtaggctcgaagtggcctcagacggtgcgcagttttaagaaagcaaagggacaggcctgcagtggcgaggcaggagggaagcgggatgggagtcgcggttaggccaagggtagttcaaagcgattcagcaggatgatgaccacaggagtgctggagccgggcctttcagcccccgtgtggatgatgaccggccatccaggacatgcgagggcttgggacagtggacagccagtgccacacaaggaaggaccgattaaatgacacagttaaaggaatttggcctagggagtgcaagccagaaaggtttggtctttttatatatgtaacattggaaaaaaggaacatctcctgttccctgtattaagttttgactttagctcagcaaatgcagtgtttgtggcagtaaatatactctgataacaatattctttcccaggaatttagagttttatgatggttattgaaaatgtttacatgacaggctgtcaataatattttttgcctctaaaaataaaacatacataaagtgtacggattttaagtatgcaactcactgaacttttcatacgtatacaccaccctagtaaccatcccccagttcaagatgtagactgtttccaataacgcctcatgcctgttcctagatagccccaggaacctctatgctgacctctgtcaccagagattagttttgcctgtttgaataagagtgtaccctttgtgtctggcttctttcactctgaaagattcatccttgttgtgaaattcattcatgttgtagcagttgtttggttggttggttagttttttcattgctgcttctgtttaattgtatgagtatccatactatgtatctctactgtggatggacatttgggttgtttccagtttgcaactattacaagttacacttctcagagcattcctttaggcggcttttggtagacatgggcactcatatctctagggtgtataccctggagtggaatggctggttctagtacttgtgtgtagagctgtagttgacaatgttaaatggttttccaaagtggttatactgatttatattcccacaagcagtgtatgagagttcccattgctgcacatcctcggtaaaaacgtttgggtggtaaaacagctaatgcaaaattcagggttttgacagaatctcgcaaagggctacccgtatacatgcttttcattagaaaaatcatcctttcttctcacttcgtcacatcaagacaattagattttcagagtaggaactctaatcattctttcagaatcaagtgcattattgttatttcagatatacacaatagctgatgataatttgagcttcttattttgttgttctgtttaatcagtattgacatcgtcattttatacgtgtgtttgtgtccttgtattaaacacaaaaccctcaaaagaattaaatattgattgtatccctgaaaattgtaggttttaatatatctactgctgggttgtgggaagagtttcagttgagtttctgttcagagctgagatctactgtgaccttttaaggcattgggggaggctgagcagctgttggaactgctagaaagagctgtgtggtcaggggggcaggaactcttaacagttaaaaacttgagctaccagctcctgcaattcttccttctggcctttagcgccacctgcaggctctgagggtacaacaaggtttgacagcgactgcagtgcaacactagttctcaaacttgagggcatcatttacctggggagctgggcctcagttcccagaggtgctggttcagtaggtcctgggctggggccagagaatgtgcattggtaacaagttcccaagagatactgatgctgctggtccggaaaccactgcccccaccccaggaaccactgcagtaaagactttgggaactagattgggatataagaatgacaagcctcatgtttggccctctttgtggtgggccagaatttatatggtcaaggaagtgcatgtaagtgcagagtgtgaggctcatcttcccagatgtagttgtcgtcttttccagaagatgagaaatcagcctgcttagttacccattcgggagttggaaacgatatgcccttggctgagggagcaccatactccagtaaagctgggcccttaataaagaaaacaaagattattaaacatttttcaaaagtatttggcggaggcggcttgtattcggttttagaaaacttgggatctgaagaacttactttgtgtactgaaaagtgagcacatgaacccacaggccaacagaactttaaagggatttatccgtgagacaagggtaaagatgcctaaccttgcaatgatacttttttccaacatttaattcatgctgttcatcgagttgcctgccacagcactgtgttatatcttgaaggatatatttaaatgtttgatttaggtatctttgcctctagttttcagtttgtttggagaagctggctatctcagataaacaaatctggaacttggaagagatactgtgagatatgcagacttgggacgttggttttcataggctggtgaagacagaaccatttcccatttcagcaaggcaagcatttcttttagtttgggatggtcttaaatgtttctgtaaaatggcctgggaatactagcctgtttgcagttttaatttctataagaggccattactttactttttggaaagtagtataagtttccatccctctttttctgccctaaaagtaaatgtttgagtcatatttttaatgtttttcttaagtccatttttcttgttaatgctactaagttgggatgtacccaggtgtgagaggtcacctgattcattgcgtttagaagactgcatttattgctgttgggggctgaacaattaattgggttcatctccaaggaaatgttaattgggaaaccctaacattgtgtattgaaaaaaaaaaaaagaagaaaaatcatttcaggcctgttaaaacaaaactcatttgggttcacttaggctgattaaaatattccttaatcagccccctgattaaacagtcctgaggtgaaactgcacctcaactcgaattttcagttagagacaagttttgcaataaagttatccccctttatttcatgaatatacatgttaaaaagtattttaggaaagattgcacttattatttatttctccacagaaagcagtttcatggaggtagaggatgggttgctttttgggagataagaatccctgtctaccttagacatttcaaatacaataacagctttttatgtgaggcatcgtgataatcacaaatgattataccagagctatctttccaattggaatgcaaaaatagatgtggaaggattgtataaattcatgcattagaactatgttctaattaaaggatttaaaaaataaatttaaaaggaaaaactaattttcttatttaatgatggagaaaatttatattaatgttatttctgattacagtcttgaagatttttttttttttttttggtccaccaactggcataattgtagctttttataagtccaaagaaatgcctcttgttttgggggaggaaaaaaagtaaaggtttaaagtgtatggcaaaggaagaactactatagatttaactgacttttcagtgacactaaaaaacactcttttcccttctttacctaatggctcatggttaatctcagaagaaaaagttaagcaggatttttgttctttgtcaaaacggtatgtatgtatatgtttgtgtttagaaatatacgtgagggccgaaagcttccttattttcagaagagatgaacttcacttggcacatgatagagaacctggccaattcaagtgctgattttagacaacctcggaataattaagctcagctttttggaagatgtgtcatttaccgaatagtctactgcaggcagtcagcagtgtaggagtctcagagttttccagcatagagcgtgtttaacattttccacatgaatctcagtctggctttgtttttgcaaaatgtttttcggtgggacccgactgacctttctcagatggccactggatctgctccccttgctatctatctgagcacgttctgaagtggatggacttcagttgccagttggtgtaatcaggctgtttccagagtctgatcttgtccctttagtaactgttccaaaatacttgggacatttataagtaagaactcatgactcccacatatttatcctccaggtcagaaaaaaattcataaaaggaaagcaagcagtgttcatgattttttatttgagtaacagaatagggactgcatggattctcccacatcctctgagactgtgattttaaaaaacaaacaactcagtcagtgtgctccaaagcctggctataataacacagacttaaaagctagatttatgctatttattagctctgtgtcattgggtggtttacttcctcactataaagcctcacttttgtcatctccacagtggggagaagagtaccagtctcatggggttgttatctgtggtttgagttactcataagctttcttacacctcaagcttttagccctgggcctgggacagagtagatatttcaataaatatttactgaacgaataaaagtctcacattccatttcttcctgcaatgtctttgcttattctgctttttcctccccttctacttctatccaaattctaccctttcctcaaggttccattcaactttattttccacaaagctaagccatttgctccagctcagcttctccgtcttgactttgtgtctgcctggaatcctgcctgctcttcactttatctacctggcaaattcctacttatcctttaaacccagctcaagtatcacctctaccaggaagccttcccatgggtctctcctcttgttactgcccaggttcgtggtacctctttgaccacctacacatttcatcatgattattcatttaagtgccatttttatataaatatgtattgaacacctaatacatgccaggagctagagagagtccaagtgtgttttccctgagtggccatttcgcttctcagtgtgggcacctcagccttctgcttcagagcacaacctccaaacagtagagcatgtcacgtaggatttccaggcctttattcagagctacctttatgacttccttgtctaaggatgactgtttgctaaagcagaatgggccaccccgtggcaaggggatgtaagggatttggggctgcatgttctagtccctgtttcattatctgtccccgaaacagctaagctggaggctggcttactcctccgagggcctaggtctcaacatttggtaaggctctcctgcatgattggctacctttgcctgattgtttttaaagattttttgttattgttgttgccttttaaccttcttttgaccagttaactctacatttacacgtttttctcacagtggtttttttttttgataactttaaataattagaataataatatttacccagtatagaaattctagtaatatggggaaaaaaataaagaataaaataatttgtccatcatcctcacccaaaataaaaattttggagatatttctttccagttttttcatgttgtttacattacaaaatgaattccaatcttcttaaatttttttttcttatttttctatttttgcctttatttcattgtttacccttactacttatttaatgtaacactaaaacactcagggagattggggttacataaaagtttatatggtgctgttctacataaaattggagaaagttcagttgatttaatagaggtaggggctgtttttttcctcttaattttgataaggacagaaactcacacagtgatatgaaacaagttgacaaagagaatttgtattttaggctttgaacattgaagaggtgtaatacttattgcttcagacagtagacagtacatatttggaatgggttatctttgaaagtggataaagattgaaaatacaaataggtgcaaaagaggtaaagatacatttacagagctgtattggacccaatggcaaactaggatgtttcaaaagccattcaaagcaggttacatttttgaggacaaccatagcctcctgcaaacatcccttggtgtgctttcctgaaaccggatactggtttgaatagcctgtgagtctgccttagtatggaaattgccattttttaatgtggggtcagtgcacctgggttgtgtgttacaaaatcaaacatgaacttctttgggagttccttagcaggttcacatcctcccaggaaggagcaggggtggtggagagcataggacatctggccctagggtgttgcagcagcaggagtccagggtttctgcctctctgagtgttaacttcctcttctcaaactaacttcctgcatttagtgaaaaactggtttcacgtgattcccaagctgcagatccccccagtgtctgctgggaggggtctctcctcttagttccagtttgaaacctttcaaaacagccttctgactggtcctgctgtggtcacatgcagtcccaccctccaccacctattgtagccagggaggggcaggctgtaagcacaaggtgggagaggaggaggacaaagtgggcacttgaggctaaagagtgcttttctggaagaaggaaagggtacaggatagacagcagaggaactagctaccacgtcgtttcaccagtgggactctgagctctggccagaaacctcagccactcatgagctgtcttgcctatggccaacattaggggtttctcagttgctggtagtctgtttgactggcttgtatataggtatagcagaggtttatttgtatggagaattgggttctagttgtaacttgtacttgccttcatttagtcaaagtttgtataatttttaggaagcccagcttctaggcctgcaacttctagctgttataactttgcaaaacactttcatataattgtatttgaccctcttgatgaccttgggaagcagttaaggcaggctttattatcaccattttgcatatcaggaaaccaagactcagagaagtcaagtaatctgtcaacatacaatagaaatccagtggcagagactgtcagctctctcaagtccttttccaggactcctgcatgtgccagaggccactctgctgactgaataatgatgcctcaccactgtgggagaggccagaggaccaggaaaggctggtctcaaactgctctcagtttgatgactagggaccagacatacctccttccctggaaccaaacctggttgctctcagtcaccccaatcaggtctgtcttttctagcactccacaatttttcctgcttcccacatagttcatgctccatccatgctccatctcagtatgtttgctggtctttgtggctctgagttggctgtgaacctgaatatttttactagcttcttcaccagtgcacaggctgttcctagaaacatggttgttgatagggacagccctgaaagaatggagattttgtcttctatggtcctgctgaaggctagtttctaatttttatatttatttatttatttatttagagacagagtctcactctgtcgcccaggctggagtgcagtggcacgatctcggctcactgcaagctccgcctcccaggttcacgccattctcctgcctcagcctcccgagtagctgggactacaggcacccgccaccatgcccagctaattttttgtatttttagtagacacggggtttcactgtgttaaccaggatggtctcgatctcctgacgtcgtgatccgcccgcctcggcctcccaaagtgttgggattacaggcgtgagccactgcgcccggcctctaatttttatttttttctccaaagcttcaaaagaaagttacacttagaggaatctattacttcagtaatcacataattttcctggtgcatgtctctcttgctttcttggtttgcctcttgtagtctttgaagaaacaaagagcttcaaagccaggaaaatgacccagatctctttgacagcagtgctaatgttttgggaagtgaaggcatatagttattactgaaattagtgttcctggaagctgcaagttacttgaaaattatgctgatttgtcttgcatgcattgtatttgtgtcctaccaaagtgtttccaaggaagtatctggcaaacaggcaggagggtgccggggcagtgggacggggagggtctgaatatattctgatggctgaagtctaaagaaaatgaactggaacctatttaggacatcgtattgcataagcatgagagtgataatctcatctctctttttcttttttctattggatcttcttaagaaacctgaatagccttgatatgatatctaaaaataaagtaaatggtgctttgatgtctgtactttctcctccatgtaacagtgggtgtatgtttctcagagtttatctcctgtgtgccaaaaatcagagaggctcaggaacaagtgtccattgcttccaagtcataagaacaattggcaaaaatcacttgtcttgtgtctttgaactttaaatgcagtgaaaaaacttgtcttaaccaagagagggataagaaagagctgccaagtttgaaaaacctgctgataaataacttcataccaactgtacaacaacctgtactatatagtctgtagatgaaaaatcatgtaccattttggcttgtacaatactttgtggctaactttaaaaaatacggaatggttaagtctgtgcattaatacgtgctgtgtaacctaacttctcagcattataatgtcacagatatctgggggtggtggggagaagtatatgcagctatgtatagaatatacacagctctccctcctttctcttccttctgccccctggctgtgtggtctactggctggattgcaatagctggattgcagctggttagatgactctgctggtttttgaggatgaggaggacaggacaagagagggaaaattttaaatgtttatatcataggagaatagtcatgtcagaatcattgtgtttccaagctgcagtttgtgctttttaagttaagaggtatgggacttcagattaagagtttctttacagtattatagtttaaaacattggctctggataatagttgactgagtttaaatcctggctctatagttgacttgcactctgaccttcaggcaggtttttcatccaaaaaagtggaaattaacatagcacttattatgtgaccaatatagaggacttaaacagtgcctggtagaccgtaaatggccaatacatattagctgttatttttgattttacattcattagacacaattgtctctttgtcactggtatgttttctttaaagtacagatgtcaggaaagtagcaatcagagattccttgtttgttgagggtgttttgttttgttttgttttgttttgttttgttttgttttgttttgacagagtcttgctctgtcgcccaggctggagtgcagtggcgtgatctcggctcactctaactgcctcctgggttcaagtgattcttatcaagcgattctcatgcctcagcctcccaagtagctgggattacaggcatgtgccaccacacccggctaatttttgtatttttagtagagacagggtttcaccatgttggccgggctggtctctaactcctggcctcaagtgatctgcctgcctcagcctgatttcacaatactgggattacaagtgtgagccaccgtgcctagcctgtggaagcccagcagatggaagatttgctgccagagttaatggtgaccggtgggatatacaattgaatctttacagagaatatagagaccatgagataactactctggaatcagttagttttaaggaaccacaggggcagagcttgagataattgggaagtttaacatattattaaacctaaaatggccagcaagactgatagctgcttctcagttgtctgagttttttctttttttgtgaaaatacttttttagccagcatgacttatgtcatctcttagatgagagaaaagagtaaaaaagacaaagtgtatagctactcttttaaaaatagtgttggaagcatagttttggaagaaggtgtctcacatgagtcaattttctagacaagtgaaatttggctcttttagtatcaaaacttgcttttataattttttattgagttttttctaaacttgaacaattcatttatgttatgtttattgagtatatctcatgtgccagaaacactactgggtactttacattgccttgatttttacatataaaatgcattgtgttctggcttttaaacaagatacactggttttaatttaatattttcttggaagactaattgttaagccgttatgtaactctgtgcttagatttcgtgactttcatattttgatcttattattccctacgtgttctcgactttttccacgtagttgagggaagggttactgattgttaattgattatttattatgtgttctaggcactttcacatacatttcatttcaatctaacagaaacatgtaaaattattattatacccattttatagatgacacaatgaaccacagagaggttgagtatcttgcacagagtcacactgctgagtgaggagaggagctgagattggagtatggacccttctgattctgggtccaatgttctttctatgctgacatcattgaagaaatagacataagttaaaagtaggtttatagatcatgacccttcctcacactccctctttcttttctaattctttcccattgctgtaaaagcagggttttcttctctaattaatttagctattcttcacctgtgctagatgcaagtaaaagacagcagaagttagaaaaagggtggagcctccaaacctgttgggtgagaggctggtccatgaaatgacccaggattttctcagagtaaatggaaaatctttaactttgatagagttaatttatagttacaagtaattttgtgtgcctaataccaggtatagactaaggaatttatcagaaatattatagtaaatgagccctttttctcataccaagtcttcaaagttcagtgagggtaaatccaccctcccataaaagcaatgaaaacactagcaaagatagcaaaaagcaactttttcagaacccctgagattagccaaaggcttccaatagtttgagaagtgtttattcaagaaaatcttctgaatcttattaggaacagcagggtttgtgggattgtaactgaactactcccatttcctctcctcagctctgcaatagccttgaaaaccagcagtcttgcaaaacttgtaaaaacggtacttgtaaaaaccaacagccttcaaccattggctaggataggcctggatggaagatcctcaagaagtcccattcccagagcattgtccctatttgacttttctcacagctccttggaaaagtctcatttgcagggcatagttgttatttgacctaccttggagctcagagcttgctctgttcccacagagccctatcttcagggtatttgtcaaaaacaatcagtgacaattgtttaacgtcgtagcttctgaggggtcaataccagttgcgcaaataaaaacctggccaaaaacttacgggtaagatgtgaggaataagatgtccataagaggcttttaaaaaactcttttgacatattcctagaggattagaaggctacacacatatgcagggctatgtgcatgctcagaaggacctgagagggcctcagtgtctcacctctgactgagtatgaggtccggagaaggcaataaatacaagctaaggcagaagattaaagtgcccaactgttgaaggtatgccttaacacacacacacaggacccttcagcaaagattggatcacttattggttcacagcatcagctaaccactaagctaactaaacagagacatcagtggctgcacaccacaagaaatacagactttacagaattagtccagaaaagtcactaaacaaacaaacagcaacaactgcaataactacaaaaaacagcaataacaaatcctggggagttgggagaggagagtctgatttccagaattgccacatttgttattatctgaagtgctcagttttgttttgttttttaacaaaaagcatgagacatacatacacaaacaagacagtatgacccatacacaatagggaaagtagtcaatagaaactgtctctgaaggggctgagatgttggatttattctacaaagattttattcagctactatcaacatagtcaaagaactaaagaacatcatgtctaaagaatgaaaggaaagtatgacaatgaagtttcaccagatagagaatatcaatagagaaattgtaaaaggatctaaagtctggatttgaaaagtataataacaaatgaaaaattcacttgtgagctcagcagcagatttgagctggcagaggaaagaattagaaaactcaaagacaggccaattgagattatccagggtgaggaacataaagaaaaagaataaagaaaactgaacctgaacctagtcccagagacctgtaggacaccatcaagcctactattatatgcattatgggaatcccagatgagaagagaagggtggaagaggaatatttgaagaaataatagccaaatacttcccaaatttgatttaaaaaaatacttgtctgcacaactaatgagtgcaggaaactctaaataggataaactcaaggagatccatacctgtgtgtgtgtcgtagtcaaactgtgaaaagacaaagagaatcttgaaagcagtaaaagaaaaatgactcatcaaataaaagggatcctcaataaaattaacagctgacttctcattagaagctatggtggctggaagtgagtgggatgacatatttaaggtgctgaaataaagagagtctcaacaaagaattctatatctgttaaaattacctttcaaaaattaggaaggaaccaagacattctcagataaaggaaaaaagaatgtgtcactagcagacctgtcccacaaaaattatgaagggagtccttcagattgaaaggataaggcactagatgataacttgaatccacaaggagaataaagagcactagtaaagataaacacagaaataaacataaaagcacaaatatatttttgtaactcatttgggtgatagataactacatagagcaataattatgaactgtgttaacaggcttataatatgtaaagatgtaatttgtatgacagtagcacaaaggagaggagaggaaaaggaatatgtgcagaaaacttactactcttgaaactcagttaatattaatctgaactacattgtgagttaagatactaattgtaattcccaggataaccactaagaaaataactcctttaaataaaagaaacaacaaggtatcaaaaatggtaccctagaaaacatctatttaactcaaaataagacagtaataggggaatccaaaggaatatgacatacagaaaacagagctaaatggcagatgtaaatcctaccttatcctaccttatccataattatattaaatataaatgcactaagcacttctattaaaaggcagagattggcagaatggagggaggaaaactcctgacccaattatatcctatctactagacacacttacacacactttaaatttaacaacaaaaatagtttgaaaataaatgaatgggaaaagatatacaatacaaacagtaactgaaggagagctggagtggcaatactaatatcacatgaaatcaactttatgataaaaattattactagacacataacagtctattgggaagatatcataattataacatacatgcacccaatgacagagccccaaattacatgaaccaaaaactgacagaactgaagggagatatagacaattgaacaataacagtgttttttttagagaaagagtctcagtctgtcacccaggctggagtacagtggtgcagtcacagctcactgcagctttaacttcctgggctcaagtgatcctcccaccttagcctcccgagtagctgggactacgggcacatgccaccacatgtgtattttttgtagagacagggtttcaccccgttgcccaggcttgtcttgaactcctgggctcaagcaatctgtccaccttggcctcccaaagtgctggagtacaggcatgcaccaccatgcccagccaagattttcttttaattactgatttcaaagtattattgtgatgtatagttttattcctgtttcttatgctttgagttcattgagcttcttggatttgtagttttcatcaaatttggaacatttcagacttactttcttcaagttttttttttgttccctcttctccttttggaaactccagttatacatatattaaaatgcataaagttgtcccgtagtttactaatactcttttttcttcaatttttttctctgtgttcccattttagatagtttctattactgtgtcttcaagttcattaatcttttcttcagctattaattttatccagtgtatttttcatctttagaaattcaatttaggtattttttttttgcaatcttctatgtctctaattaactcgtctatgaggattgttgtttttaaagcctttgtctatcaattctattatcttgtatattaatacccctctttcagtaattgattttgtttactcattatgggccatatttttctgcttctttgaatgcctcatagtatttgattagatggcagacattgcgaattttgtctttttgggtgatgagtattttgtatttctataaaatacccttgaacttcattcttggacacagttactttgaaagaattggatacttttaggtcttgcttttataattagtttggtaggaccagtccagcaaatagttagggctgactcttccctactactaaggacccttttgagtactatgcctaaagctccatgaattgtgaggttttacagtctgtctgggagtaggcacaattcaagaccctgaggaagtatgaggtactgctccctcgaatctgtttagatgggttttctcctggcttttgggtagtttcatcacatgcatgcactgatcctacttaagtaggaccctctgcagatctctggggtcttgtttctttttagccctctcctttcctgtgtgctgacctgtgaaccctaaccaccttggtgtctctggaattcttagcatcatctcttcaattcagtgagtcagctaggctttactgggttctccctttctgcactgtggcctggaagctcttttaaagcagtaagctgggcaatcatagggctcatctcatttgtttaccatctctcagggactacggtcctgcatggcttgtgtgcagtgccttgagaatagttgtttcatatattttgtctggtgttttgtgggtttttgttgttgttgttgtttcagagggttaattgaattcctgttattccatcttggtggaaagtagaaatctcaattttttttttctgtagatacttaatgtcactattagtttaagaaaaaatggtcgtattttaaccattcatgggtaagccaacttgtaaaatatgtctgctctatttaagcttatgaagatctgaagtagagtaaagggagtgggggccatagaaaaataaaagagagtaaaatctcccttctttcattctttctcttttgctcttttggtaaattgttgctatgcccccttactaatcagagccccattgttctttttggtaataggaacattttaagagttctgtgaatatgccactcaaaatatatgaagagtgttaccaataaaattgtcatggtctttatgttttaatctatgtgataaaaacttgatggttttggtacaactggttaacttctcgaaaaaaatatttaaattggatttcctcttaatatcttatacccagatatagtccagataggttaaaaatataatttctaaatattaaatgaaaatataggcaattcacagaatcttaagaaaaggtctttctaagtgtgatacaaaggatacaaccataatgaaaaagatcaatatgattacatgaagattttatgtcttttatatggcaaaaatcattataagcaggattaaaaacatagtcgatatccttagtatataaagatacctcacaaagtagtaaaaaaaaagccaaatatcccactgggaaattaggcaaaggatagttgtgtaaaaaatataggtttcaggtaaatatgtttacaatgctgtacttcataatagtaacaattacaaattataatactcataataatagctatcatttatttcatgtttctatttgcttgattacgttaatgttttcagtagattggctaatttgatactttgaaaaacaagtatactattattgtcagtttataaatggcatttgagacaggagattaagacccttgcccagggtgacaaagctatccaagtggctaagccaagattatcacccaggccttctgattctagacccctgcttctcatcattcctcatagcaatacatttaaactacctgaaattcaactgcaacttgcagagaaattggtaatttgctcaagatcacaacatttgtaagtgataaattgagttaaaaatcttacaaaagtcatataagtagaagaaaggaaaacagggtaaagtaaggtgagcaacaaaacagctgtgtgttttaattttagatattcacggtttattttcagaatatttaaaagatgcttcaaagaagatgaaaaatgggctaatgtttgtaaaactggttaacccctgttcaggtaagttctcttctcataacttgaatgttcttaaatgttgtggctaatgagtatatacacttttatgtctttgtgtccttgctctttctgaatagcttttaaagttaagatggcaccgtgaggagaagaaaacaaggtgatgacattactagtcttcccagataattcatttgacttaaacattttaaaaatttcttctcataattttaattcacagaactgttcagccatcagaaatacgggcaaaacaaaaaagtagcatgtttgagttctctttaaaaacagattaattttctttggcttccttaagccaacttttcttagttattcaacattagcctccatttatatccattttatcttataaagtaaaataaacaaccagaatttaaaaaaacaaaaacagaaggcttttacttgacatgccaagattttgattaggttcagttttagctatacttccctattttcttctgaccaaaaagtagtactttttttctccgtcaggggacttttttttttttaaatgataagcattgtttattgaagggattcatatcttattggaaaaattttattttaactttatattcagtgcattttcagttttgtcttcacattttttaggcaaaaatattaaagtgtattctaaatattgagtaatatgggtgatagtgtttatctctgtgtgtaattgtttttccattaatttataaggttttgtgtagacacctgatacttgccatattagaggtttctcctggtgacagtaatacggaatagtaaaagtatgggagggccactgagtagtgccttgttgttatagagacatgtaaatagaagcaacaagagaagaaacacattcctgactttctccagtgttcttttcttcaaaatgaaattgactgtaattggtcagctatatttagaaatcttagttatatatcagactaagttgacgtgagaaatatttcttcaagagaagttttaggtagcagtaaaggttctaaagcatttaagaaaagtacaggtacagaagaaagccagccctcttttaaaatttctgttttatctaaatgctcatagacaacagaggaacaaatgtttttatttgctacattggcagtgggaaagtaaaggctaacatttgctgagttcttactatgtgccaagtattggtttaggaaatttacatgtgttcttttttttaattcttataaaaacccttgaggaggttcagtattgtctccattttacagatgtggaaacagccacaggaaggtttatgtaacttctccaagggcacgtgcccagcatatggtggagatagagttaaagtcagcatccttgtctccagagattgtgctgtggttaaaaaaaaaatttttttttcattagttgaagtgataaaacatgcagatgtgcacagtcttcaccctcttgtgcctcctcccttttttttttttttttttttttttggttaagaaaggaaaggaaaaaaaattcattcagttgaataaagctttactcactccctatggcttcaagcatgtctgtctttctcacttagggttggcctgtggcttggtccctgtcagaccctgtgtggggagagccacacactgcccagaggcagggacccacgtgccagctcatgtcatatggctgaactgttgtgttttgatagtttaggaatggatattccctcttgatctgatggaggatttaaggacaggctttgtattagttaagataaatgacttgcactttctaattttttggtttaagtccagtgaggattatggagctggaaaactaccatctatgtataatagctgtaagctttccttggaatcagttttttagaatagacctgtgtatgtttatgttcatattaggaacattcgtcagagatactggatagtcttttggggtgtgtgtgtgtttgtgtgtgtgtgtgaaaacttacaaataaaagacagatttgtcttaacaggagaaggagccatttacttgttcaatatgtgtctacagcagctgtttgaagtaaaagttttcaaggaaaaacaccattcttggtttataaatcaatcagttcaatcaggtaggtgactagtgtaagcatttccaataactaaacacatactccagcttttccattcttcacacgtggggttgtgggtctgtcaccgggtttggagtctggtcactggtttagccttccttggcatgagagcaggtttaatcaaggagaaaggaaagatcatttgagcactaaggttaagtcatctcctgtgtgtcttagacggtaggaagttttaaactagcaactctgatttgtctcctaaaacagtgacacatcctgagttagaagttagatttgtacatggggcacatattgtgttgattagaaactcttttgaggatctttgtgtttttaacatgttatttccttgaaactggatactgatatggcttctaacataggctagagcataacaaagtttctttaaaatgctttgtcatatacctgcctgcccacctgctcccccacccccatacacacatacaccccccagcaccaaagttctgtttcttgtggtgttcccttaatttgggggcagtgctgactaaaggaagagtaggccaacggaactgttctgcctcatgttctggggtgggggcagtcagtggctattcaaagaatcctacatccccctgcccacagaccacggaagggactgtgtatagagagaatggcactgctttcccatggctttgtcctcaaaagcacaggaaattacattttactgcagctttatagatagactgacgatacaggttccctaacattgccgtcttctcattctgtctgtgcttcctcctaacccctcgtttttcagggggttgggaggctgtgttaaaaatgatttctaaagaagaaatggaaagttaaagatcaatttcagggtcttggttctcctctccacacagggatttgaagctctttggagtaaaatctcatagagcacattctgccttttgagagaatcacatagactctgaggcctgtataagaagagatttgaatttggaatttcacatatatttttcaacactgtttttcactttgagattaaggtgaaatagccacattgtctttccaagacgtttaattcccttcatcctttttgtaatctgcaggaggtcttctccattttgccacacctgtggatcctctatttctgcttctccactacctcataaaggctgataaggaggtgagtttccagctcggagcatccacagtgaggaaacagaatcaactatttttgtttgatctcctctctctccttttaatgatccaaaggtggattctaccttcagatctattatagtgactagagaaaacatgaatcatatgggccagtgcaggacagagcactactgcacaggccagagaagcagcaccttactcttgatccagtctgaccctggcttgcttgtgacctctgacttgcctgactcactgtgctgtgcaccttactgcttgacaaagcctgacagctaacactcctttatcattaagtattccttacacttgaaatacaaaacaggtatttaaaaattgaccacatgtcttaaagagtctcttctttagtgagagactgtggaataggtaaactggagcgggtccaatagaagctcattaatggtgatgtgctagttgagacttaaggaatcccagatggataaaatttacctttggaatagaaataaagacacagcttactaatagtaataattttagccagaagttctgtaatattttggtctcaggatacatttacaattaaaattattaagggttccaaagagcttatgtttctgtgggttctagcaatactcttagaaattaaaactgagagatttaaaaattatttatttaaaagttaaaaataataaggccattacatgttaacataaataacacatttttattgaaacaaacaaccaaatttaatgaggcgtgtggcattgttttacatttttgcaaatctctttagtgtttggcttaactagaagacaactggattcttatatctgattctgcattcagtctgtttccatatgttattttggtaggattatatgaaaaatatgcggccccatacatctttgtagttagaaaaggaagaaataatgttacagcctttttagattattgtggatattcttctttaatactgcctaaaaaatcaacaagtagttttttaaagtttagttgcaatgtgaaatgtgaaactttgtcagttaactttctatgctctgttacattaaaatgcattggtctatcttgcacttaaaatggatctttttaccagtgtatgattttgtaacatcatgctttggtcatttggaaaatattgatttgctgagttatgcatatcttccaaatgttgacacatctcattttacacacacacacacacacacacacacactcccttttgttaatattaccactgatctcatcagaaagctctttaggtattgagaagctgtcatagtggcagatagaaattttctacaattctaatttttgcttgaaagctcaaattttattattggccgcaaatattgtcaatctttcccgtgaaatgacaggctcacttcgttcatattctgcctaataccggggtctgaatcaccgtaattcatagtgggtttttcaaataaaaatgatatccatgaaaaagcagctggttctgcttgcaactcagccagccccaggagaacatgctcttcctggtaatcagcttatctttggttaagcagccaaaggcctttagccatacctcactttcatcacagataatttacaagacttgtgttcaagggccaagatttaagtaaaattaattgcttttactacttgctcaaggatattcttaagtgaaactggcattttttaaactgcacataaatggcggtgaggatccaaatgatgactaggacagtctggtgccaccaccagactcgtgctaaagagccagcagttttacccaccattgcatttgaatcatctgtgcagatgtccacacagtgaaaatgcagatagcgtcttagcagtattaggaaaatagctttgagcttaggtacttcatgacccagggatccatcaaccatagttggaaaatcttttaattaataactttgagtgataagtgtcactcaaacagcttagaagaatctggtttttttggactctcatgtttgcataaagtttgaacacttataaatttcttacttaatccttagatcaaattcctgaaacctccatttggtaggtaaattaatttaagttgctgtaaatactgaaagtcataaagtatcaatgcatgttttctcttgatgcagcttagcctcttttagcctcctccttccctgccctccgcccttcactgtgaattagtgaagttttatcccttcgtttaatcatgtgtcccattatctggaagctactgtgatggccggtataacgagggcacacaagctgtgaggctggtaagcctcgtgtctttaaggaacagaaatggtcctaatcaccaccaggaacgccctggggaatattcagggaggaatttgtaaacctcagtggctcacctatgtggtgttttctaggataaattaatgagcagaaagacaccaaccagcctcagcaaatgtattgatctgcacttaaggctccccctcccctttttgatagcatttctccatctcccattaggaccatgactctgggggattaaccctgtcttggcactctgggcacctccagggtgctatggcgagctcacgttgacaagtgcagaatgaagcagaaatgctgttcagggtggcctttggctttcattttaaaccgtcgtacttcccaaacacgtcttcccaagtgccaaaaatgccctttaaagtaacatttgagatgtttaggtatttccttctctacattttagacatgatcatttcctatttagttaaaaattattgatacacacttttgaaatgtgacctgttcttttaaactttattttaacatcagtaaaaataactttttttctaggtatcccactgctactagctttatagtcaaggcaggttgcttattgcatttccttcaatgtatatatggtaaataaaaataagaatgaaacactagttaattacaaaattattttatatcatgattgtatggtagtccattacatataaatattgttttagagtagtcaaatatttaagatattgattgatcatggaagactatagatttaaggtagaaatctaaagacagtaagacttgggaaaaatctgtgcattattcttactatttgaaggaaaaagaacatttaaattgagatagttcatggcactagttaacctaagagaaagtatggcaagctatcacgtgttcttaaatgattgagaagattttacccttaaaacccaagaaagctgcatttgcagaaattgatcagatgcagtttttgtgtcttcaggaggagttgtcagtacacgagaggtagagcgagctagaagtgggtcatgggcaaggccatacatctggtacagtctggtgtccccaaatcagggggctaataccttaatttagacaaacttcacctctacttgctactagtacagttacgaaaaactagacctaattccaaagaatgatgttgtgaatccatatggtctgcacttctggcccactggcaaccaggccatataaacttctgtggctgagcctgatttagcctgtctgcagcttcccatgacttctccctctggctgtcttttcttttattctggtctaaatttggaagcattgtgaggcagctttgacaggggtagattcacttttgtattttctttttgtggcgggtgcttctttcatcatccctagagtgatgatggggaggcagatgtatgtctgggcctggtctgggcttgttccaatgtgacagtcaggactcttgctctgtgaccacagctggttcttcaaattgaatgggttggaccatccccaggcagtctccaccatctttgcaagcttctgtggcttccagtgcttttgtagattgattttcttccccatttcatttggggactgtacacccaaggtagatggtgtgctgtgtgggactccagtgctcacaggagcttcctgaagggagctggggtccgtcctagagcctgtcccattgtagggattccttagatggaataggtggcttctgcactaagtttaaaggcccagccatgagttaatgtgtctttttctctttttttctgaatgtctttgttgaatgaaatgcttgctttccaactaactgttttttcaggggaagtttcagccccttgatcaagttgtggtggataacgtgtttccaaattgcatcttgttgctgaaacttcctggacttgagaagttacttcatcatgtgacagaggaaaaaggtatggtataacttaaaggcttatggctggtagaaaggatggaccttgcctaagaacgtggctgcttacagacacactgaatgtaaggcttattctgtgtccaccatagggaaaactatcattcagatttgctaacactgccagcactgttcctctattgctttggagtgtttagtctttggaactacaaccatggcagtctagggcctacgtccacagggcaggaatcacaaggtgtggcttcagtctcacttcttctttgaactagttctgtgacatcaggcaagtcactcagctgccttctgcctcagatgtctcattgtaaaattacgtaaaacctgtaccttaatagatggaagcatttatcgagcaccttccaaaaagcatatgttgcacattagtgctaagctctagatacttatgaataagacattgtccttttcttcactttgcgcccagtctgatgggggtcaatgacaagctgagcagtgaccgcacagtgtaacggaagtgaactctgaatttactggggatgcacaggacaggtttctaatctggcggggttgggtggggaatgtaggtgggtagatgttgtgttgctttcctgggggaaatgacctctttatggagtcctgaaggatagtcagagaagcagtgtaacagaggctcagatgtatggaaaagtttgtcaggttcaggaagttccaaggagttcaaagtataggattctggggaaggatgtaggttggtaaggaatgaggcgggaatgctgggcatgggtccagatggtaaagggccctgtgtgtgtttggactttgcttaatggtagtggagtgtctgtgaagttttaagcatggcagtctgcagtgtggagagtatattggagaagccaggtccaccaaggctgttgcagtgatccagacaggagataatggtggccttgatcttaggagatagaacaagaagaaagtagccatttagagatggacccaactgcatctggttgttgggtggtggtcaaggagaaggaggagtcaagagtgacttctcggtttgtgcctgacccaaaggatgtgtagtggtgggatcctggacacagggaacatgggctggaggagcaggatagggtaatgaagagatgcgttttcactatcattcatttaatttttcagagggaaaagtaaggcagtgtgtgtgaatgtgttttgacaggttagaaatagtataaaaacttggctttggtgtcttaaaaaatcatccaagtagtttcagggttaatatggaaacaaagtgtgggaaccagagcatcaggctgataagttgtggctgtttgggtcatagatggtttggccaactatgacagttcttctgggaccaagaaagtggtgattccaagaagtgtaagcttacagtgggaaagagaagaaccttattgattgcattttatgtttaaggggtccagtaaattcatacttggccacacttggagctccagtttggaactgaggggtatatggtgccagggttttatcaaagcagttccattaaagacattccctgatgctgagtttggcagaagacagcagtctttttgtgggtgacctgaattagcccataaccacttttaaaagataaagtaatgaagaataatttaattaagccatgttaatttttgtcaacttaatgcaagctgaaaatgcagttaactcattgtccagaattctgctattagctgtataagaacaatcatcttaaaacccagaaatccagatttagaaacaatgttagtgcctcagcatttgtttccttacagtctgcagccgagagcaagaggctctctctgtgtcatcccttccctcttgtacaccgaactcctgaccatttattgcatcattatctgaacttgtcttagtctcctttgcttctcaatattgcctaacttttggaagttctgtacttccattttcaaagtagctatattattagcctttatatttgccagatttcaaaaaccctaggcctcaatttttttctttatttttaagtgatgggcaaaacataaaatactttagaataaatttcacacagtaaaagatgtattcaatctctagaggtttggcagtttctttttatcaaattcttcccttaataagctgcagcctgtgaatctcaaaataatggaagttttaaaaacagaaagaaaaagatttttatttttatttttttatttttatttttttaagacaaggtcttgctctgttgcccaggatggaatgcagtggcacaatcacggctcactgcagcctcaatctctggggctcaagcaatcttcctacctcagcctcctgagtagctaagaccacaggcacaagccaccacacctggctaattttttcattttttttggagagatgagggggtctctctatgttacccaagctggtcttgaactcctgggctcaagggaacctcccgcctcagcctcctaaagtgccgagattataggtgtgagtcaccatgcccattctcaaaaagatttttaaatggggggaaaaatacgtaagattctcaaatgcctcatccttaagaagatattggaaaatcaaatatctaaaaattaaatatataaaacctaagcgggctttattgcaagaattcataattggttgagcatttaccataatttaccatatttatgcattacaaaattgtatgattatctcaaaagacacagaaaaggtatttgataaaattcagtcatgatatatattatcagcaaatgaagaataaaagggaacttccaagggcatctatggcaaacttaaacagctaacatcatcttcattgtaaaagactgaacacaatcttcccccaagactggatacaagagaaggatgcctgctcttaccacttctattcaccatgtggtggatgtcctagcatgtgcaataagacaagaaaaagacatacagattggaaagtcagtagtacaactgtctttattcatagacaatattgtcatgtatgaaaaaatccaaaagaatctacaaaagaagttactagaattgataagcaaagtttcaggatacaagttcaatatacaaatattagttgtgtttctatatactgacattgaacaattggataatggaataaaaacataccatttatactaccattaaaaataacattctagtgctaaatgtaacacaatatgttcaagaccaatatgctgaacattacaaaatattgctgagagaaattaaagaaaaattaaataaatggagaaataggccatgtttgtggattggaagactcaatatttttaaggtatctattttccccaaattacactataattacactatataattacattatagattcagtgtaatacttagccagctccatttttttttctttttttttggtaggtattgataaactgattctagaatttatatgactatgtaaagcagcagaagcagcagtctccaacctaattttggcagcaggaactggttttgaggaagacaatttttccatggatggggcagggagggggatggctttggggtgaaactgttccacctcagatcatcaggcattcgattctcataaggagcacacaacctagatccctcgcatgtgcagttgacaatagggttcgcactcctatgagaatctaatgccatcactgttctgacaggaggcagagctcagccagtaatgctcacttgcctgacactcattcctgctgtgtggcccagttcctcacaggccatggattggtaccagtacatggcttagggactggggagccctgatgtaaaggacctataatattcaaaacaattttgaaaaagaagaatttggagaacttacacaaactgaattaaagacttactataatcaagaaaatgtggagatcaggcacaatgactcatgcctgtaatcctagcggtttgggaggccgaagcaggaggattgcttgaggctgagagttcgagaacagcctgagctaagtagcaaaaccccatttctacagaaagtttaaaaattaggcagctgtgggccaggcacggtggctcacgcctgtaatcccagcactttgggaggccagcgcaggtggatcatgacgtcaggagatcgaaaccatcctggctaacacggtgaaaccctgtctctactaaaaaatacaaagaacattagccaggtgtggtggtgggcacctgtagtcccagctactcgggaggctgaagcaggagaatggcatgaacccaggaggcagagcttgcagtgagccaagatcgcgccactgccctccagcctgggtgacagagcgagactctgtttcaaaaaaaaaagaaaaaaaaattagccagctgtggtggtatgtgcctatagttccaactatttgggaggctgaggaggaaagatcacttgagcccaggaggtcggggttacagtgaactgtgatcacacaattgcactccaatttgggtaacagagtgagaccctgtccctaaatttaaaaaataaataaaaataaaataaatttggtgttggtataaggataaatatatagataaatggaatagaatagagaatctagaaataaacccacacttatatggtcaattgattttttttttccaaaagtgtgaagataattcagtgggaaaaaggatagtctttacaacaaatgttgatggaagaatttggtatacatatgaaaaataacgttgattcttacctcatacagaaaaattaattcaaaatggatcactatgttaaattcaaaaatgaaaattattgagcttctagaagaaagcataggataaaatccttgttgtcttgggaggcaaagatttcttaggacacaaaacccactaactgtaaaaaaattataaattgtattttatcaaaagtattctcttttgtttttgaaaaatgccattaagaaaaaaggagattgtgagttgtgggacagttggaacttacctacctggctgtccacggcttaaaatgatatagccacttgacaatttcttacaactcaggaattctactactccctggtacaaagtaaggaactactgctagctgcaacaaaatggatgaatctcacagaaataatgttgagcaaaagaaattggacacaaaaagtatatactgtatcatttcatttctatggtgttccagaataaagcaagaattgccctataatgatggatgagtggtgacctgtgatctgggtagccatgggagaattgactacataagggttccagggaactttgggggatgatgcttacatgactgcatacatttttccaaactcctcgatttgtacatttaaaatgggtgtgtccattgtgtgaacatgaacattgcgtgaacacctaaataaaattcatttttaaaacaatatttactgatccagcactagaagctaagcctcctgatttctaacacagtatttatttttacttgcccctttcccccaaaataatattggctccttttctctctatacttcctacctcccatgggatggagagatggaatgtgggaggcaaggccagtgtgagcactggctctgaggtttaggcctcgatattcaggagagtggtgtaggaggaagatgaaccactgggttttagacacatggaggcttagttcagggctttgggcctcccggttagtttgtttagtcttgttgatctaggaggagatcacaccagatgaaaggatacagttgactttggaggagggtgaagcagagctgggaaaagaatcagataagtcattagagacataaaaaaatagaaagcaattttatatatgccatggaggagaggttgttaggaggtactgaggaaagtgcagacctagtgatcttggtaaagtgaacatcagatccacagctttgatgtcagcatggttgggagttgggtgctcttgcctacttcctcagtgacttaggagagtttacttcatgtcactcagagccagtcttcgaagatggggacaaatcatggtttattaattgattctgagattcattctgatcattcaataagaaaatgtataaaatgtgcctagcacagacctgaataaacattagtttcttatgttttattaacaaatcatatttttcatcacaatatcttagctaatattatgtatttgctaagtggcaggtgttgtgctctaggatttgtatggattatcacatttcatgctcagaatagcccagtgagaaaaaaacctctctttacacatgggggaacaggctttgagcacaaggcggcttcccaaggagacagcatgtgctggggtatgcatgagccctggtagcatggctcagtctgtgctctctgccccttcttagagaataattcccagaggtagaggagaagcctcctagtggggctcagggagtgggagacaggaaggaaaacagcagcagatggtagacattctttgagaaaatttggaggtagaggcaagaaagaagtgagatgccagatcagggtaggattttcaggagaaccttgagcagtgagcttcttttggagtttttttttcctcaggcaatgaacataacttctaaaagccattcagcgtcatatatttatttagtgattgctgtatgctcttaaaattcccctggtttgtacatcggttgggacatgggctccagggaaattgagtccggtctcattggctttggcttacagtaggctgtttgcccaggtagtcctggctccaaaacagcagacattgcaccttggaattctgacactcctgacaatgcttttgcacctgtccctcttttttgttactgtagtgacatgtcctgagaagatggctgcagatgtccagcccccaatccatcctgcctcatcttgcctgcagcattgacaaccataggctgaaacagagaggaaattcacaggaactaaggccagggacctcccaacctctctcccatacagtttaacagactgcagaaaatgaaccctgaatgggcagttttcatttcccatcaaaaggtgggagggagaaagagcctcattctatataactcagaggtggtaaattcacatcaggcccaagggttgctagtggtcataaagataaatcctgcatggacagaggaggctggaatagaagtgctgcccttgctaattgcacagacagaagaaatcccatgaatgaaaagggttgcagaggaaatcatggtttaatgtcatggtatataaggctgggtggattgtggggaagttaagtgtaatttataagaggtgaaacttttatctccataaagggccagattgagcctaccataaatctaaatcttctcaaatagctatgattatgttggtaatatgttaaaagatagatagatctttttttaatgctcccccaatccccaataccaggccactactgagtagttaacaagatttttttcctgaatgtatgtagtgaacttcatagatacctgcatttcgtttcaattttctttattgggattttcatttttattttaagaaaaaaagtggttcattgaaaacattgaggtgagcttaaaattattcagaacagttaagactgcttagtatgctaatgtgaacacaaaatatctgagacaggtctcagtcaatttaggaaagtttattttaccaaagttaaagatgcacccatgacacagcctcaggaagtcctgagacatgtgccccacggtggttgggggtacagtttgcttttatgtatttcagggagacatgagacatcaatcaatatgtgtaagatgtacattggtttagtccagtaaggcagcaacaactcaaagtgggggtttccacgttagacatagataggagacaaaaggtggcattcttttgatcagccttccactgaatacacaatgtagtctggcttgagtgtggagccattgctagggaccggccctcttctgcccagaatttccctgcctcctgtccctatcaacaagattattttcctttcacattagtttgctgaggttttaaaattaccttttctacagagttgtttgtataatttgaaggttttcttaaattcttactcatttagtggttgatgactcctgaggtagccacattactactaacatttaaaaaaacatttcaagtatgttctcaggtttgtaaattaagcttttcaagaatttaaacttacaaaatattctttaaatggttaacttgtatatgatacaaccttaggagtttattttttttttaattcattgtgctgagtcttttttttcttttaaggtaatccagaaatagacaacaagaaatattacaagtacagcaaagagaagacattaaagtggctggaaaaaaaggtatagttcctctctagtgccttgtggtaaaagtaaaaattcagttctctaagaaattttcagagaaggcagtaagtctgaatccagagaccatcttgtatattcagtgaaaagaggaaaattgtgtagagataccaagtatgagaagaaggctttgactttttaatcctccctaacttctgtatctctgaagttagctttatgttttcttgtgacctgcattctcgtttctccctgctcctactacggaatgaaataatttgttggtgtagatttgagtcttccaagtaagaggataccaggcttggcacttgttggccactgtcagtcctgcaggtgtctccaagggtgatgcttacacacagccaggcaaagggacccagggacacagccaggcaaaggtgttcaggtttagaggaagtatgtcctgctctcagggtctggacactgatgaggggtcatcttacaggcaaaccctgtatcttagtgattctaagaatcttgacctaatggatggactggggcagtgaatttcaaatcaatttagtaggtaacaaccagtatttctcttggaatgaaacagattgtgatgggatgggacgggacaggacgggatgggatgggacgggacggacgggacgtgatgggacgggacgggatgggatgggacgggatgggatgggatgggttaaaatatagcagaggaagggcaggtattaagtatggctctgtgaaatgtatttatatgtgtttaagtattgggttgctgtatatttcttactatgggttgtgataaaaaaaaaactttgaaagccactggtctaaggataatatgtactttcacattgattaagaatctcgctaaaccatatagaataatgataaagtttttgcaagatcagtggataccagtagttgtagtactgtttcctaagattctcttccatcttttgtgtgaaaagtcatgtttgtctgcatgttctctctcataagtgggagttgaacagtaagaacacatgaacacagggaggggaacatcacacaccggggctgtttcgggggttaggggcaagaggagggagagcattaggacaaatatgtaatacatgtggggcttaaaacctagatgatgggttgatgggtgcagcaaaccactgtggtacatgtatacctgtatgacaaacctgcatgttctgcacatgtatcccagaacttaaagtataataaataaaaataaataataataaataataaataaattgtgtttatttgtcataccatgttaccaggctcattgaaagcctgggaagctggaaatgagtccagtagaataatcagtctcctaatgtgcaaagtagtggaaagatttagagtgccatgtttcattttttatttgtgatatagtagtagtagtattccatgtaggcgaagaatgagaataaatgcggagcagaatccttgatgtttacttttgctcttagccaaggaaaatgacatgaatagcgaagaggagtttatacttactgattatatttcctaggaagtgggaaatttatattattctatttaggaagttattacatataaattttgtgccaggttctattgtaagggctttatttacatatattacctcatttaattttcacagtagtcttatgaggtgaatgctatttttttcccccatttcacagatagagccacagaaaggttaagtaactagccgtggttacagagccaagcccagcagcctgactccagagtcagctctcagttatcacaatatgttgccttctcatattgtgtaggccatggaagtccatgtattgagatcatccagatattgctgccactcagcctttcttcaaatgggcaaccatttctcatcttctggtgtctggtgaagatacttctaggttctcaaatacttctttgcagatctcttaaatggtctgaaggccacctatgaattcatagatttctaaagttaagttgaaaataccctgcctttcccctcttggttgcttcataggttaatcaaactgtggcagcattaaaaaccaataatgtgaatgtcagttcccgggtacagtcaactgcatttttctctggtgaccaagcttccactgacaaggaaggtaagtaaagcattttatcagaaaagatttttgtctggagtaagttgcttatgtgtaaatgcctatcttaggatttaaaaatcttaatatcacagaagcctcatattcctaccaatgcctcatacacattgtggcaggtgtgcatcttatttcagaagcgaagaatatttctaccataggttacttctgtcattcattgatacttaagttatttattcagcaaatatttcttttacattgatagtagtaacaaccctggctatcatttattgagggtgtattgtgtgccaggccctttgctaagttgccactatacaaacatgatctcatccaaccctcccagtaaatttcataatgagcatcttgaggccctgtgcaaagtctcacaactagtaaatgccaaagctgagctacttatggagcttgtctctgaagcccacacttgtaatctttttgtgatactgttcctgtggcacagttgtactgttccagtggctgcatctgtttgcattttcttctcaagatgcatgtttcctgatacagggatcaatatattttgattttagatgaaaattgatttacttggcaatttttcttttaggttattcttttataatctaaaaaaggtatattattttcttttccaagtagagtcctcttatttttatatgtatagttgaataagaacagctatataatgcagttaacaatctcaaatggtgagacagaaattattctgacgttaaactccaattcattgttcccttattcagggtatacatatggctttagtcattacataaataaaaactaggaatagtggcctgtttgtgattgatagtaattcaggcaatctgatttgcaggaatctaccttgcatgtataggtagttggctactgccattctgggagtggtggacagcacctttgccatactgagttaccagctgtcagtgtctttaattggctttaacaatagaagatgagggattgagatagatgattaatggatagataggtgggtggatagatgcatccatggatggatggatggaaccatagattttgttttaaaagtaggagaagggatgttagaggttatttagacagatcatctcattttttaaatggagaggtaggtaacttatcctcaagatcttctgttctaagtctagtgcttttaccagtactctacatattaaggttctgggcttggctatattgccatttagtgtcctgaccataaagtaaactttacatattttacattatttcattttttagatatttaggttggtttggtaccagaagcagcaaatgaactatatgttgactttcttaaaatagttttcttggtctagtcatgactcattggataatgactatcccagatccatgagcaattttaagaagggtcaaatgataactttcagttctccattgacaatgaaaatctcttactgaagactttttgacatcaggtggtccccagacggcagtcattttctatgtaatactgaggcaaattgttactttgacttgagagcagaggagaatggaaaaaaggaagtgagtgaatatcccagcagcaaacctggggtctgcttttggtgctttatatccccacgtggttatcccatcttatgattaagtttgattatctgcttgtattctacataaaatactgaattcaggaacagagttttgaaacattttattgtcttcttatgtaactgtatttctaattgctgccagagctgcattttagtactgagaatccaaatgctttagaattaatgatgataaattctgctgagttagttgtttaagtttaagtattttattagtttgggagtgtgtgtgtgtgtgtgtgtgtgtgtgtgtgtgtgtgtatgtagaactatgtatatagaacaatatgtatgtatagaactatatatatatatttcagggttcttataaagcaaatacctagtagtagagacatggtattttatttctcttaaatgagtacactcattactgttgaataattagatttattctttattgaagcaggcttagaaaagattacccttttaaaaaagacatgactatttcatattgttgtagatgatttttaaactttatttgtattcagtggtttcaaataagaaagcaaccctgagtttttgtttttaatgtcatttagggagcatctactgtattatacttgttttatcttatatctttggtatcatcacatgtcatatctcatccctcatatcttcccactagtctgaccgatagatattactatccccattttacaaatgagaaaactgaggctagagcttaagtgagttccctttatccagatagggtcagaatttgaattcaggtcaatttgactataaaaccaccataattactattttttttttttgctttcactcctccttctgtttctttcagaggattatattcgttatgcccatggtctgatatctgactacatccctaaagaattaagtgatgacttatctaaatacttaaagtgagtattgattatcttcagtcataatgaagtaccatttgcttcttggtttccccagcagtggggtttccttatggcttatcatatcactgtttatgatacaagattattcttcagctatgtcatatactttgtgctttggggatgatttttaatggatgattggaatgaactgatttgatggatacggattgcaggaactagtgaatgtcaagattggaattatggcttggtctgattttagaggattaactatgttaaaattttatcctcaattatacttaactaatttggttctttgtgatcgttttaagaggaagaaaggagggatggaaagagtagatggaatatagacttttttttaatttacaaaatattgatatcattttcactattatcactagatgttcactaaagggactttatgcccaagacttggaagtcaaagtaatatgaaacacaatctgtgtctttgaggggcagaagaagggttttaagaatggtttaatgtatgttcctttctttataaagagcttatacatttagactttaagttgaaaaagaagtgttagaagtgtttattttctagatttttgcaaaatcgttacttaattttgttgttaagattttatgtgtgtgatgatttaatagcttttcctgatccttataaatcctttttatcctctgagtcatgaagataaaatgactttttaatagatacagttgttggttttagcaaattccagaggtcctactttaaaaaacaatgattggaaactggtttctataatagttaaagtgtgctgaaagcctgcttcaaattgataatcatatccttctgcttaatatatccccagatttctatgctgcttgtcttgttagagacctcatgtctttgtactccattgtttgtatagattcctttctttccactaacatttttaagttttggttgaagagttcagaagaaaggtatgccaattaaactgctttctaatggaagaaaagttgaaatttatgtggctttttgtgaacagttaaaatgattttcacctttaaatatatgttagcatcttcactatgaagaaaaaatactccaacaccgaaacacaaatttatagaggctaaagaaaaggaactctgttccaacagatgggttctaattttattttttagttcagacaacaccaaaacaaggacttacatatcaaaataaagactcatttattgagaaaactttcattctttacactgagttgattgaacaggaagatatatggaggtaaagctgtaagttgaaaagtaggacttactaagtcttaagttggccctgtctttctgtttgtttgtctatgaaaaacgatgactttgattgttatttttaactttcttaggcttccagaaccttcagcctcattgccaaatcctccatcaaaggtaagaagctgtgactaagatatctttgggggacttagaaaaatattacactcttaccacatgagtttagttggttctaatatattttaaggtgtactaaatccattttgcatggagtgatgccatgtggaataaagattgtactgggctctccatcactattttttatttttgtggattccacctgaatggtaaataaagtgccatgaaaacccaagaagagttggttttagcaaggtacccctgtgaaaatattaaagacatatagttaaaattaaatcttcctgcattagttagatcacttaattaaatttagtaatcactaagcatactctatatataactaaaactcattttgccaaatctaattgtcactggcacaaaggtgaacagaaaacaatttccataatacaaagaatcctttgagcaaagatgatcactttttttctgaatttgaaatgattgatgaatttacgtgtaatctttgttagtggaaaatcttttcctcattcattctcaggctgctacccacagctcctctgcagctggtatgtttatctcctagatccagagaatggagaagccaatcataaaccacacctgactgcaaattgcagcgttccttcagcccaggccagatctcagatgagttaaactctgctccaagacagggaaataaacatgtgcaccagcttgtcagtgaggtcatttcttcagccagcaaagtaacggatgccttgagaatgtaaaatggacatattgtggatgttacaaactttccttctcccttgcattgttttcttggccttcaaggtagctaaaatgctcataattttttatgtcattccctgtataaaggtggtggtggctccaaagacattgtccttagaaaaggacagaaaattgaaagtacagcagtgtttgtttgggcctatgttcagcatgttgtcaaaaaaaaatgcatgttttactctcttggagaatagcactgggcagaagtctgttgctgtaagatctaaggactgctctaggccagacccatgcgtctttcattccggtagttaatctctgacagtagctctagaggacctagagaggcacagttgtcttgctgaaactaagagggtaggttctcagcgtgcttcttatttttcttcatccaaaaatgaagcagatttttttctcccaaatatctatcttccttagtaacttagagatcattcatgaattgatctaaacctattcttgaaagctttaaccttggataccttttggagtaatatgtttcataactttattcttctctgctcctgatttctgttttcttattttaattttcagaatttaagttgtttgtgacttcatcatttatgatttagatcagagatcagcaaaccttttcttctaaagccagacagtaaatattttaggctccatgaagcagatggactctattgcagctactcaactctgctgttgtattgtgaaaacagccacagataatacataaacgaatgagcatggctgtgttccagtaaaacttcatttataaaagcaggcagccagctggatttggcccctgggccatcatttgccaagccctgattttgattttggcatcttgctcttcctaaaccccagccttgtcttctatattatttgagttgcttttcgaggtcttctactctgtgtctttctggggttccagtgtacacatgacaaactatactagacgatgtaccatcgtttaaacaagcgtagaacatatcttctgctagctttcctgtctgtatccaggatttgattgatttttacagtaatatagttgactgtttccaggaaatatattccagtagtcattaggtatctttgtatctatgttgtaatcgatagcgtggagcctgtcatctttaatatgttttatattattttcctttactatcatatgtctgcctttgttgaaactcagcttccaaccctcacttgctccagtcttttcaatttgtcactgtcagcaagcagagttgaatgcaaccagtgggtttggagatgttcccgagttccttcttgcaaatcatttgtaagaaggcctaacattatccctgtggtactctgcagtttgttctctttccagaactgtatccatttagtcatagcctttgttactgtctttctgagccacttctctgctgaaacaatctcccaaatccatagggatttggtcttttaaataacaaaaattttagtaaatgcttcaatcatctttttttccaatatattcaacagtgcactgggaataacatacaaactagttatatgtagaggctaccacaatcattttctttttttaaacacttgtaactggtatcttgttttgttgtgagctattaaaacacctgaacaagtcatttctccaattaaacattttatgtccatacaaaagtacctttcatcttaagttcttgtaatgaacactttttatttgaattatcaatgaaaagtgaacctcatcagttcagtggcacacacttgtagtcttagctactcaggaggctaaggcagaaggtcgcttgagcccaggagttcaaggctgtagtatatgatgatcgcaactatgaatagccaccgcactccagcctgggcaacacagtgaaaccctgtctctaaagaaaaaaagggaataatgtctaagtgtttataatgacatctgtgttaggaacattttgccatagagaaggaacacaagcatcctcataacttcaagctttttgtgttttgaaaatattttggccttcagcattattagctgtgagtttcaccctcctagctgaagatacctttctagtaaaaaatgtgcatcacctaaacaccctttgctgtcttaatttaaatagaaacatgtatttttttttttgagacagagtcttgccgtgtcatctaggctggagtgcagtggcacaatctcagcttactgcagtctctgcttctcaggttcaagcaattcttgtgcctcagtctccggagtagctgggactacaggcacatgccaccatgcgcagctaatttttatatttttattagagatggggttttgccatgttggccaggctgatctccaactcctggcctcaagtgaccgcccacctcggcctcccaaagtgctgggattacaggcatgagtcactgcaccaagctgaaacatatattcttaacaaagttgcaaatatacattcacttggtgctgataggtggttcatttgtgatggattagtctttttcttttaatgattcatttgctagaggttgctgtgtggccaagaggttttcctatagtgtgtggtatattcccaggatgagcctctgtttttttacagcaaacaattttaagacatggtgttttatcctcttgggttatgggataaaacaccatgggctgtggaatcttttagcaccaactctacccgttctttgtttagcaaagcaggggcatgaagaatgaagctgggaagaagtctgtttcctaggttagatccatgttgggtctggtcaacctggtgtctccataaacagcctgaaaattataaaaatctgggttgtgatcaccatgcagtcaattctccatgttcaacagcaagacttgtcttccctgcttttgtaccttttacataataagtgtggcatgatttcttctatattgtgatcattaaggccttgacaagattctcacattcactggtgtaaaatgttcatgtgaaaggagaaaatattaagtaaaggtctgacttagttgcattgggcctaatggaaagaacactgtatcagaattgaaatcttggccaaagtcctctacttggtgaccttaagctattcatttagcctctctgtgcttccctctcttactggctgcttgcttgtgcaaggttgttcttgcatggataaagtaagataaatattgtcccttcattcataagtggacattaaactggcccaggaggtaaatgaaatagggattctggctggacacctggcccccttcaagagactattctcattttgacttctgtgccttgcattcatctggtaattagcaatcccctcatgcccaccacacctggcacctacaaagcctgtgtttgctggaccagctaaggggctcagccatgtacttacccaatcatatccaccatcaccaaggctgcttcttaggagtgatgtgtggctcaattccctagatgattggcaaaatgtaaaggagcctgtaaaaagtaagccctttgctgggtctgctgtcccattcgcctctgtagaggtctaaattatacatgttgggtttttttttaatggattgatgttgtgtcaaagtgacatttgacaccacttcactgctctaatgttgcagaaaataaagttatcagatgagcctgtagaagcaaaagaagattacactaagtttaatactaaagatttgaagactgaaaaggtatgtgggttcaggtgtagtggtgtttcgttcatactcagtgcgtgatgtgcatgaatacatgaggaacagttgcacgcttgattgtgattacagttttgaccaggaagaattattaacttgcatttctgtgacttaataattaagaattgcatatgacaatgaaaatgttaagcaactaagacttattattagtcagagaaaaacaatatactacttatcaagagtgtgcctaaattttgctatgtattcatagagtgatagggtgggaaaggagggaggaagctctacaggtaattttttgtcaaccctgctgcccagaagcagaaattatgatgataaaaattaataatttcaccattcagcattcaccctggcaaatggcattttggtaacagtccttacttagttttatacatgcattataaatacatatgtggcctttaacattggcattataatactcagttctgggctttttatttaacattaaattgtgaaaatgttcacatatcattaaacattctttgaaaaaatattcatgtttttatgatattcagtcatgggtgtttgtttcaccatatggaatgtaatttaatcatttccctatatttggacatataggttacttctgatttttttattttttgtttttattgaagtgatagacattcttatttacagtctgtatctccaatcatttcattagacacaattttgaactaagactaagagcttggagaacatgaattctttcataattgaaatatatatagctaaagtgcttttcaaaaatggagaaagttgtgcttccaaacattattgccaatgagtatttatcttgcatttttgacgacattgagtattgcttttattcttgaacattgttgcctgtcaaattaggctacatttctttaactagaaaggttctttttccaaatgcttatggcccatttgcatttttgcaaattgttggttcctgtcgcttgcctgtttttatgttgagatagtaatgtttctctgttgctttgtatgagctcattctaaattaaggctattaacacttttcatgaaatataggatacaaacttgttttaactttttcatttgattttttaacagtgttaaatttttctgagtgttaagtacagaaattgtttccctttatgatttttccattgtttttatgcttaggaaggccttgcccatctcaagataagttaactttcacttagattttaaaaatactaactgccctttgagtttaatgttttttagaactgttattcttgaatcaatatgtaatttatttgggcatatgatactgaggatagttcgatttaagatctgcccaaatagcgagttatctcgatgctgtgtcaacagggacattgtcagtttctctgagagaaatctttgtgccccgcccttctgtgggagtgccacttattgtatccacttgggcacagcatggagaatgtcttaaatgcaccagataagtctgaaacagactgttgctttgcaccattgagtcaaaaataagcctactaaattataagtgacagaatgtgaaaagcagaattgtgggaatcatatactgtgcctctaaaaaatactttatcaatgactttgtcttacagttcccagggagacaggtgatttttttgttttctgattcccatcatttatgcttcttctgaacaatttgtggtgcatctgcatcaaagttaaatcagctgctatttaccttctgcaagtgctttatataagacatggaagaaaaaaattcagtgaccagagagagatagaaatgtacagggcagaattatttggagtcagctttttggaaagtattgctttgttggaggaaaaataaggcagctatcctgctggtctgggatgctttgcaacacaagtcatcttttgaatatcatagggttgtccttggtttcccatggagcaaatgaataaaatcagatggtaaattggtgtgaattattcatcatgtggtaatacaaggctgtaattcctacctctgacaattgcggcctgtgtcagttccattgtttgtgttattgtactttatgcaccctccagaattatctaccccctccccagtgtaaaccattggttggaacattctgcttcttagaaggcagcagttttgtcttctgcctcttttaacatattctgtctcttaggtctgaattctgaatagaaatcagaactttttcactcccttatgaagcatgttagtgggggatgcttaccttccttaatgaaacttgagacatgcagtcttctttgatttccatatatgattaataaatgttacattcataacaatttttctctcttattttcattaacagaaaaatagcaaaatgactgcagctcagaaggctttggctaaagttgacaagagtggaatgaaaagtattgataccttttttggggtaaaaaataaaaaaaaaattggaaaggtttgaaactttgaaaataaaatctagcaaaaatatttgctttttacatgtttcagtttgtccttcctgactgttaatgactacctttggttgggggaaggaagaggccaatttcatgttctcttaaacatttctttgcatttggtttttgtgttcctgaacaaaatatgggaaagtgtctaacttcatggctatggccttttggagtctcatctgacataatgaaaagtaatcacttgaagagaattaacatatagcatcatgattttctcaataaactgatgtgtgacaatgttagagtgtatgactgctttttaatgcaactttgcattcagtaggtttagtaataatattttcaatatactgagagaaactggattacaaaactgtgaggtaaattgttactttaaaaaggctttagtttttggtaaattttttttttttttttttgacacggagtctcgctgtcacccaggctggagtgcagtggcgcgatctcggctcactttttagaaaatagagaaaataataagaacttcaatctcccatttcttcattacccagagataatgtattgtcttataataatttttagaaaggaattacagttactttgtaaccttttttttttttcaacttttattttagactcagggggtacatatgcaggtttgttacagaaggatactgtgtgatgctgaggtttgggatgtaattgaacctgtcacccaggtagtgagcatagtacccaatgggtaatttttcaagccttgctctcccactcttcctccccttgaagtccccagtgtctattattgccatctttaagtccatttgtacccaatgtttagctcttacttataagtgagaacatgtggtatttggttttctggtttttttgcattaattcgctcaggataatggcctccagctgcatccattttgctgcaaaggacatgatttcattctcttttatggctgtgtagtattccatggtgtatatatgccatgttttctttatccattccactgttgatgggctcctgggttgatcccatatctttgctattgtaaggagtgctgtgatgaacatacaggtgcatgtatctttttggtagaataatttattttcctttgagtacatagccaatagtggccaatagtgggatttctggatcgaatggtagttctgtttttagttctttgagaattcttcaaactgctttccatagtggctgaactaatttacattctcaccaaaagtgttcccttttctctgcagccctgccaacatcatctgttatttttttacttttaaataatacctgctctgactggtaggagatggtatctcattgtggttttcatttgctttgctctgatgattagtgatgatgggcgttttttaatatgtttgtgatcacttgtatgtcttcttttgagaagtgtctgtttatgtcttttgcctaccttttaatggggttatttgtatcttattgatttgtgtaagttccttatagattctggatgttagtcttttgtcagttgcatagtttctctcactctaggttgtctgtttactctgttgatactttattttgctgtgcagaagctctttagtttaataaggcccccacttgtcaatttttatttttgttgcaattgcttttgagcacttagtcataaattgtttgccaaggctgatgttgagaagggtatttcctaggttttcttctaggatttttatagcttgaggtcttacagttaattctttaatccatctttagttaatttttgtatatggtgataggtaggagtccagttttattcctctgcatatggctggtcagttatcccagcatcatttattgaacagggagtcctttccccattgcttatttttgttgactttgttggagatcagatagctataggtgtgtggctttatttctgggttctctattctctttctttggcctatgtgtctgtttttgtatcagtactatattgtcttgattactgtagccttgtagtatagtttgcagttgggtaatgtgatacctctggctttgttctttttgcttaggattgctttggctatccaagcttttttttggttccatatgaattttagaatagttattttctaattctgtgaaaaatcacagtagttacctttttataaacattattttgttactattttcccagactactaactgttcttcataaatatgttttttaatgacagtataatttttgattatttggatatttgattatttaataaccatgatcctgtttggacatttggattattcacaaatgttcactatttgaagaatcagattataagtaaatatttgtccacatattttattgtttccttataatggatttttggatgtgggcttattggattttcaaatatatatttatgggaatatatttcatggaaagtttataagcttttgcactctaggcttattttaatggtcttgcactctaacaaacagtgggtgtgaaagcttaatgccaccttgttagcattggttgttacctttggaaataagtgtaaaaacattttattgtggttttaattcatatttccctgattagtagtgattttgaacattttttcatacttactaatcaattgtcatcttatagagaattgtcttttatattctttgctaaattattagagtatcaatatttttcttattgactaaaagtattctataacttaaggacattaattatttctactgtgtttgttgtaaatttcctttcttggtttatactttgcctttaattttgcctatgatttttgacatgcaggtgtttttagtttttatgtagacatatatacataaacttttcctttacacagatattgtacttagaaagatatttcattttacaggaaatttaaccagacacttttattttcttctgatttttttaatagttatgtttttggttcttttttgttttttttttagatggagtttcgctcttgttgcccaggctggagtacaatggcgtgatctcagctcaccacaacctccgccttcagggttcaagtgattctcctgcctcagcctcccgagtagctgagattacaggcatgtgccaccacgcccagctaattttgtatttttagtagagacggggtttctccatgttggtcaggctagtcttgaactcccaacctcaggtgatccatccgccttggcctcccaaagtgctgggattacaggcgtgagccaccacgcctggcctatttttgttttatatttaattacttaaatcatctagagaatgtgtaattatgtttaaatatgctgtgaggtaaagctgtaatttaattattttctcaccagtttagtttttcatttaatctgtaggattattttgtcaagttctaagagtaagttccaatgggatttttactgagattttgttagatgcataacttactttgggaaaacaaacatctttacaaacttaaatattcttatttgggaatatagtatttctttttagttactcaagtcttaagaatacctttcactaatgttcggttcttcatcttcaataggttctagacatatctttgtatgagtatgtgtagatattttcattgctattaatgaaatctgtttttttccagctaggtctaccaactggtcattttgtggtaaagttttatatttttatatatttatcttttaaataaccagtttactaaactattaatggaaaaattttccattttatttattttgggttttagtacataatatagtatgtaatttagtttttaaaaattgcatgcaattctttctaatagttacacctcttttattatatattttacattatattacatgggctagaatatccagaacagtattaaagagtaataatagccgtctttgtctaattggtgattttattgatgtgctttaccattaattctgacactagctgttgctaatatgataaagactatccatccttttatacttagtttccttaaggtttaaattaataattggtgttggttgttatcagaaagctttttggcatctattgaggtgtctataaagtttttactacttactatcaaactgtacccaaatgtctaataaactcaccctggcagtagataaaggatcaatagcataatggatacatcctatctttcttaacctttgtcaaatatagttttcaattagactttctacacttttattaaggaattttgcagacatattcataagcaatgctgctgttaggctttagcgttagaattaggctagctttccattttttccaatgttctggaaggattcattttgcattattatattctattgctggaaaatgtttaagaatcttagaggtaaaactatctagcactggagcctttttgttgttatagttttctttaatctgcaagagtttctcatctgttctttgtcttacttgacatttttgagtacagggtaaatatttgctggaatatttcttattctaatatttctttttgattaaattcaagtcatactcttagggcacctccaggagtaatatgtctttctcagtacaccatggcaggaatcacagtctatcccaatatcagtgttgttgactttgatcacttgattaaggtgctgcctacagttttcattgtgaattattgttgattatttttataattaataagtaatttgtgggtaagtattctgggactttgtaagtatcctatttcttatcggatgtttgcccactatttttaggatctgatgattttctaactttcatttcttctatatttatcagttggcattcttctgtaaggaagaactttcccttttccttgcttcttccctcatttatgaattcttaacagtatggatttatagatttttattttatccagtgggctatattgcattattattattaattttaatgctcatgttgtttcagaagagctagtgggagacccttcaagctgacttgtgtatcttttgggtatgtttctatcattctttaatacattcctgcttctgcgactggagtttcagcctcttgtcctgtgcaagccctgaatccacctttttttcaaagaaccctggttcctttcagtgaagaatggtatttagaaaccaagatctaggcagtaggtatgctcattgctattggtatgtcattgcttaggagccaaagctaggaaatgtgtgtgtgtgtacaacatgtacacacacatatatacactatatactcgtatcaacatttctaaatctatccatgtatctatcagtatttatctatgtgtgtggttttttgtagattccctttatcaggctgagaaagtttccttctgttcctagttcactgagagtttttatcatatataggtatttatcatatgtggatattgtcaaataatttgtatctactgagatgatcaagtagttttctttttaatagaggaatgtcttttaatatatgaattataatgattgatttttgaatgttaaactaattttgcattcttgagataatccctacttggtcacagtatattattctttttatatgtagtatggggtttttttcctaatattttgttaagtacttttttgtatctctgttcatgagggatattggtctgtggttttctttacttgtaatgattttgtctgattttgatgtcagagtaaaactgggcttataaaatgagttgggaagtattctttcatcacttattttctgaaagagtttgtgtgaggttggtgttgttgcttccttatatgtcggacacaattcaccagtgaagccatttggacctggaattttctttgggggaaacttttaaattactaattcaatttctataatagatgaagagctattctaattttctttttttttcttgtgccagttttggtaatttatgtctttcaagaaatgtatccatttgatctaggttgtcaaatttattggcataagttgttcatcacatttttattatccttttaatgtctgtggatctgtagtgatattccctttttcatacctgatgttggtcatctgtgtcttctttttgctttctctgttagtatagctaaaggtttgtcaatttcattgatcctttcaaagaatcattgtcttctggcttgcataatctctgatgagacatctatgatatttcttatatttcttctcctttacataatgtgtctcctcctcatgggttcttttaagattttcttctttattactagttttcagcaagttgactatgatgtgttgatgtggttttctttttgtttatctcatttgggagtgtattaagctccttgaacttttgagtttttaattttcatcaaatatggaaaatttctggccaatatttctttaaatacctttttccattctttcctcccttttctccctatcccctcagcttctggcctccaatttcatgtatgctggaacacttggtattgtcctccaggtcctatcactgagtttctgttttgttggttgtttgtttttttatgttccatttttagacagtttctaggtgtatcttcaagtttactttgatttatagcatttcatcttctgttaaccttagttatttaatttttactttaaatattgtaattttatttatttatttatttatttttgagatggagtttcgctcttgttgcccaggctggagtgcaatggcacaatctcagctcgctgcaacttccgcctcccgggttcaagtgattcacctgcctcagcctcccaagtagctgggattacagtcatgcgtcaccagacctggctaattttgtatttttagtagagatggggtttctccatgttggtcaggctggtcttgaactcccgacctcaggtgatccgcccacctcagcctcccaaagtgctgggattacaggcctgagccaccacgcccggccttaaatattgtaatttttagttctagacgttccatttggttcttctttatgtcttcccgtatctgttcttattatgcttgcagttttctttaaatacttcaatatagttaaaatagctacttaaatgtcctcatttgctagttctattatctttgttattttctatcttctaggtctatttttctcctctctcttttactttattttgaaataattttatacttttctagaaaagtcacaaaaatagtagagtttagatatgatgttcacccagcttccctcagtattagcatacatgaccatactacaaagatcaaaaccagaaaatttaccttattgtactttcacctatctttccactaatacttttttaatttcagaattcagtctgtgatggtacattgcatttagctgccacatctcttcagtgttttctaatttgtaagagtcccggccgggtgcgttggctcacgcctgtaatcccagcactttgggaggccagggcgggcagatcacctgaggtcaggagtttgagataagcctgaccaacatggagaaaccccatctctactaaaaatacaaaacattagccagacatggtggcacatgcctgtaatcccagctactcgggaggctgaggcaggagaatcacttgaacccaggaggtggaggttgcagtgagccgagatcacaccactgcactccagtctgggcagtaagaggaaactccatctcaaaataaaaaaaagagtccctcaatattcctttgtctttcaatgaccttgacacttttgagagtagtagccagtttttttataaatgccccttaatttttgagatactttgaaactatgttaatatcctatttcttttacgatcatttcactatactactaactaataatactgacaaacactgtatagcatttatgtgcttggcattgatctaagcactttacatataataactcatttaatccctacaaaaattataatcatagagtgccatacgagccagaatagtgacacccacccaaagctcaaaagatgagaggaggagctgcttaaacacttgcattattatccctgttgaaagttagcttcttcacaataggaactctgtaccattcaagcttgtgtcttgcacggtgccgagcacacagtatgcaattggtaaaggatgagtacatgatagtcagacaggttgaataatctcagcaatattctcactaattgagacttgattgttttttccagcaaagtcgagatctttatctacctttaaagtgcctaagctgttttctgggtttcttttgggtccttgaatatgccaagctgtttccacactggtgcctttgtatgactggtttgtctctatgtgcctttttctgaatcttcacaggactggctccatcttgttattatcacttatcttaatcacttttccagagacccaatccttgaccttcctcccctacccccacccagctcctactcagtactctccataccattttcctgccttactccctgcataggaccttgcctgactgcttcacatatagtcatgccccgcacagcaatggtttgattgatggcagactgcatatgcgatggtggtcccatgagactataacacagagctgaaaaattcctatcacctagtgagttgtagccatcataacgtaaggttgtagcacattgcattaccttttatatgtttaaataagtttagatatacaagtacttactattgttttacagttgcctacagtattcagtacactaacatgctatacaggtttgtaccccaggagcagtaggctgtaccatatagccaaggtgtgtagcagactacaccataggtctgtataagttgtataagtacactctgtgatgttcacacaacaacgaaattgcttagcaacacttttcccataacatatcccatcattaagcaacacatgactgtacatacacagcacctaacttggggttgcatacagtagaccttcaacagatgtttgttgcatgagagaattaaccaaccaaccaatccatcaatccatcctggacaccccagacaggtgttcagcaatacagtgttggagtccttgacagccttgtggctaaaccttgaacttcaagagtcgttctgagaatgagttttctgtgatgcattagtatttgaagtccaaggacttattcataaactcactcataaacttgtatgggccttaaatttgtgtgttaatgttgctggtaataaatgaaatagatacagtctttaatctctctggataaagggctgtgaattttcttctgtcagttgattgaactgcacttactggagtcattttacgtagcatttagagattatttatattaagcccgcaacctaaattattgcagtttgagaatatatgtggtttttataaactctttgtattcacagaggcttgaataggagctcatattatgatttagctacaaattatttgggaatttggtaaactggcaattttgttttcttgcctgtttcactttacctttgatgccaagttgaagatctcactggcaatgtacaacataactgagctgaataataattgaaaagtgaaaaacaaaaggtattacacataccaggtgccattttggggaataatattaggaataaatccatgtgggtttatagttatacataaaatgttcatatacacacataacacacataaacacacatatatacacataagtacacacaaacataaatgcatacccacatatggcacagatacagacttaaatctacatagcctgtcctttagaattctttaaggaatttcagactagagcctttttagactcttgtactaaacattaggatacgctagcctacttgaatcctttggccctttgcttctcttacttacatcatttttctctttgattaatgtgccaagtttgggaaagcttcacaacatttccacaaactgcaaaaccacttgggtacatagacaaaagcctccatctttttcatcaagccatatatttttttttttctgaaactgatcacaggttgccaacattcttttttatttctagtttatcttcaatttaaatttaccttgtagtctcagaccctgtcatctttcaaggtttgtgcttctcggttctgcactgccaaagagactctcctctgtaaggcttaaattggatgtcaagtggaattgtcttttgtttgttcgaatctgtttcatattgtgctgctgtccattcccaaaatcatatttctcttatttggggccttagcaagacacaaaggcaagctctaagtgagaacctaaagtgtacctgttttcttactaaatgtacagtgttgtttatattgtatgcaaacttctgacaacagtgaacaaatatcttaatctttaaaaatataaataaagtgaaaaaaggacttcacatcaaccatgtttcagtactaaacagactaattaatacaacatggcaggattgttcctggttgtagtctcagttccgccttaattctgtgagccatggaggaagtcattggcatctctggcccccagtcacttctcagcatgaaatgggactatatcatcaagattttttatgtctttccctccagccgctggtgcttggggagccatgtctcctttacacctgggaggaaagtgcttttagagttatctttcatgcagtgcttaccatgcactaggcactcccctaaactctttagatgaaccagctcatgtgttttgctggaagaaagtctggaagaaaatacaacaaaatgctcatactgggttttggggtgcccatgatatgtgtatatgtatatttcttttcttcatttttcaaagattatttcactttgccatagaaagaaatacaaagaacacaattgttggaaagtaataacaaagactggcaaagcgcattgtgatttttaaagcaactttgacatgaatttatgtgtttaatctttccaggagccatatggcacaaagggtattatttctcttgttttgcagttgaacaagggaaggtcagctcatttccccaacatcacacagctaatgagtaactgagccagaacttgaattcaggacctctcacatccagactctaccacatcaaattccctttccccagtggctctaactttgactctgttacatcctagaacatcacctctttaccagatatgaaagacaaccttttcacatagtttaggagttgactttctctgttcttaaagctgatctaacttgactagctgccttgtattacatattttctcccaaacacccctttctctaggacgaatccaaaatttggcaatcttgggagttagctatgtcatagtcagatctcttggaagacaaagagctccaggtctagagaagcaagtgggagggtgttttccaagtgtacttagaaaatgtttatgagctttgtcctcatctgaataatcagaagatatgatttgatttttacaccttggtatacacttggagattacacagtcctgaggtttatatattcctcagagccattagactgaccaaaagggttcgtccctgtgtttcatagtatttttacagttctcacagcaatcacttatcagtatttaaattgaccttagctgggcacagtcactcacttctgtaatcccagtactttgggaagctgaggccagaagtttaagtccagcctggacaacatagcaagactgtttctacaaaaaaaaaaataaaaaattagccaggtgtggtggcacacacctgtaattctagctacttgggaggctgaggagggagaattgcttgaggctaggaattcaaggttacagtggactatgattataacactccacttcagcttgggtgacagagcaagaccctgtctcttaaaaaagtaaaataaaataaattaatctttacaacaaccctccaaggtagaccagaaagaggtggtatccttattttattgatggtctgtgtgaggtcatacagacagtaggtggccaagcccagatgccaagcctaagcctcgttccttttgtttacccaaggttcctattcataccattatatgaccatttagccttaaataatctgttttaattgcaaattttattttaagaaaggaaaaaaatcacatttattctgctgcatcttcttgctttattcataatgaattctgcaggtcaatttatcctcaacgatggcaagccagaatttaagtaaagcttctacttagctggtacatttgcatgtcaaatctttaattcagctgtcagtgttttagcatttactgtactttcattaataaatgttattttgatggtctcaggctaatcaagactatttgaaatgggggacggcaccaaatgaaatttacagagaaatcagagcttcttcatggactttaaaataattgttactttacacgtgtttgaaatcagaatacttgtaaaattaaagttagacatgttgttcttgcataaacaagcaaaagaagctaaggaatcaacttagatttatttgttcctttaagagcatgtactgagcacctgctgtgtgctagacatgttgtagatagaggaaatgcggatatcaacatggcaggcaaaaataacctgccctcaagaatttccattctagagcgagtagacagatgatatctcagatagtgccagggcctatggaaaaagctgaccaggcagggcactgaattctggggagtgggtggtcagggaaggccttgcttccttctcatccacattctggcatagaagtttgatttccatgtacatgtttttttttgtaacatatagctccagaatacgttatttttaactttgcactcaataaaaaatcaacttgtagtaattaaacttgttcagtacattcttcacagggacattaggtgctactacttctatcagcaacaagtatatgcttatctattttttatacattggagtctacacaaggcttcctgctttttataaaaggaactgcctctacaaaaaaaaaaaaaaaagaaaaatggtttaagaattactcatctcagaacgttactttcgtgcatttcttgtattttattttttttcctataagatggtgcccatcctgtaagtttgggccaccccaacattatatttcactccctttgaacattcaaagaaaaacatacttcttggtgtgctctcgaggagcctgctatgaaccctagaatgagatctcggaggctggccacgatgggaaccccttcctgtgtctgaggtcatctcttagaagcgaaaatgctcagctgccctcaggactaaacccgccagccctgcgttctgttctaggagctgcagatggtgcttggggtttcaggtgactgtttctcctcaccaggacacaccacatgttttcctttcctctctagatggcagcacaaagacagaaaaggggcaagtgatggtggtggctccacgcaaggcttggcggttttccctgcaacttcagacactcccagaggactcggactttttcttctgcacttttttggaaaatcgccaggtgccaaaaggtgcattttaaagcgctgactgtaaatgctttatttctttgattagtaccactagtctatgtgggcagcggcattcctccctggagcactcagctaggcggttccgtccaggagcttgaaagcatcccagcggtgcacctgttcagtctgaggacctcaagcttgggtcaggccagcatgttttaggtatggatgtggtgacttaaagtacttgattgtcttgatttcaccctgaaagctttggcaaaccaagtttcaacccttactttaaaaatctgacactgctttactccatatcaatttggaagcttctaattcataaatatacctaaacgttggcattttatctctccaggagttattaaacatttcttcctttttagaagat

SEQ ID NO: 37 - DNA, 1663 bp, Homo sapiens
agaccatggagggccgctgggtgcagccacagagcgcggggccccggcgaccccgccccgctccgcgtcactcggcgccctgcggcgcgcgatgagcacctaccactagcggagccgcgagggagaggccgcggccccttcccgttgcctgcggccaccggccggcattcagagcccctcgcctggcgctaaatttaaaaacgtaacacgagcagcaggctggtctcggaaacgaaacgaaattcggtccctgggcctcctcccgggcgctgccggtccctcagcgcgccgcgccacccggaacagacccttctcccgccattttcggcggggctgggagactgaggcccgcggcgctgagcctgcggcgccccggaagaggcgggcggcatggccgctggcgtggactgcggggacggggttggcgcccggcagcacgtgttcctggtttcagaatatttaaaagatgcttcaaagaagatgaaaaatgggctaatgtttgtaaaactggttaacccctgttcaggagaaggagccatttacttgttcaatatgtgtctacagcagctgtttgaagtaaaagttttcaaggaaaaacaccattcttggtttataaatcaatcagttcaatcaggaggtcttctccattttgccacacctgtggatcctctatttctgcttctccactacctcataaaggctgataaggaggggaagtttcagccccttgatcaagttgtggtggataacgtgtttccaaattgcatcttgttgctgaaacttcctggacttgagaagttacttcatcatgtgacagaggaaaaaggtaatccagaaatagacaacaagaaatattacaagtacagcaaagagaagacattaaagtggctggaaaaaaaggttaatcaaactgtggcagcattaaaaaccaataatgtgaatgtcagttcccgggtacagtcaactgcatttttctctggtgaccaagcttccactgacaaggaagaggattatattcgttatgcccatggtctgatatctgactacatccctaaagaattaagtgatgacttatctaaatacttaaagcttccagaaccttcagcctcattgccaaatcctccatcaaagatggcagcacaaagacagaaaaggggcaagtgatggtggtggctccacgcaaggcttggcggttttccctgcaacttcagacactcccagaggactcggactttttcttctgcacttttttggaaaatcgccaggtgccaaaaggtgcattttaaagcgctgactgtaaatgctttatttctttgattagtaccactagtctatgtgggcagcggcattcctccctggagcactcagctaggcggttccgtccaggagcttgaaagcatcccagcggtgcacctgttcagtctgaggacctcaagcttgggtcaggccagcatgttttaggtatggatgtggtgacttaaagtacttgattgtcttgatttcaccctgaaagctttggcaaaccaagtttcaacccttactttaaaaatctgacactgctttactccatatcaatttggaagcttctaattcataaatatacctaaacgttggcattttatctctccaggagttattaaacatttcttcctttttagaagat

SEQ ID NO: 38 - protein, 257 aa, Homo sapiens
MAAGVDCGDGVGARQHVFLVSEYLKDASKKMKNGLMFVKLVNPCSGEGAIYLFNMCLQQLFEVKVFKEKHHSWFINQSVQSGGLLHFATPVDPLFLLLHYLIKADKEGKFQPLDQVVVDNVFPNCILLLKLPGLEKLLHHVTEEKGNPEIDNKKYYKYSKEKTLKWLEKKVNQTVAALKTNNVNVSSRVQSTAFFSGDQASTDKEEDYIRYAHGLISDYIPKELSDDLSKYLKLPEPSASLPNPPSKMAAQRQKRGK

SEQ ID NO: 39 - DNA, 1619 bp, Homo sapiens
agaccatggagggccgctgggtgcagccacagagcgcggggccccggcgaccccgccccgctccgcgtcactcggcgccctgcggcgcgcgatgagcacctaccactagcggagccgcgagggagaggccgcggccccttcccgttgcctgcggccaccggccggcattcagagcccctcgcctggcgctaaatttaaaaacgtaacacgagcagcaggctggtctcggaaacgaaacgaaattcggtccctgggcctcctcccgggcgctgccggtccctcagcgcgccgcgccacccggaacagacccttctcccgccattttcggcggggctgggagactgaggcccgcggcgctgagcctgcggcgccccggaagaggcgggcggcatggccgctggcgtggactgcggggacggggttggcgcccggcagcacgtgttcctggtttcagaatatttaaaagatgcttcaaagaagatgaaaaatgggctaatgtttgtaaaactggttaacccctgttcaggagaaggagccatttacttgttcaatatgtgtctacagcagctgtttgaagtaaaagttttcaaggaaaaacaccattcttggtttataaatcaatcagttcaatcaggaggtcttctccattttgccacacctgtggatcctctatttctgcttctccactacctcataaaggctgataaggaggggaagtttcagccccttgatcaagttgtggtggataacgtgtttccaaattgcatcttgttgctgaaacttcctggacttgagaagttacttcatcatgtgacagaggaaaaaggtaatccagaaatagacaacaagaaatattacaagtacagcaaagagaagacattaaagtggctggaaaaaaaggttaatcaaactgtggcagcattaaaaaccaataatgtgaatgtcagttcccgggtacagtcaactgcatttttctctggtgaccaagcttccactgacaaggaagaggattatattcgttatgcccatggtctgatatctgactacatccctaaagaattaagtgatgacttatctaaatacttaaagcttccagaaccttcagcctcattgccaaatcctccatcaaagaaaataaagttatcagatgagcctgtagaagcaaaagaagattacactaagtttaatactaaagatttgaagactgaaaagaaaaatagcaaaatgactgcagctcagaaggctttggctaaagttgacaagagtggaatgaaaagtattgataccttttttggggtaaaaaataaaaaaaaaattggaaaggtttgaaactttgaaaataaaatctagcaaaaatatttgctttttacatgtttcagtttgtccttcctgactgttaatgactacctttggttgggggaaggaagaggccaatttcatgttctcttaaacatttctttgcatttggtttttgtgttcctgaacaaaatatgggaaagtgtctaacttcatggctatggccttttggagtctcatctgacataatgaaaagtaatcacttgaagagaattaacatatagcatcatgattttctcaataaactgatgtgtgacaatgtt

SEQ ID NO: 40 - protein, 310 aa, Homo sapiens
MAAGVDCGDGVGARQHVFLVSEYLKDASKKMKNGLMFVKLVNPCSGEGAIYLFNMCLQQLFEVKVFKEKHHSWFINQSVQSGGLLHFATPVDPLFLLLHYLIKADKEGKFQPLDQVVVDNVFPNCILLLKLPGLEKLLHHVTEEKGNPEIDNKKYYKYSKEKTLKWLEKKVNQTVAALKTNNVNVSSRVQSTAFFSGDQASTDKEEDYIRYAHGLISDYIPKELSDDLSKYLKLPEPSASLPNPPSKKIKLSDEPVEAKEDYTKFNTKDLKTEKKNSKMTAAQKAKVDKSGMKSIDTFFGVKNKKKIGKV

SEQ ID NO: 41 - DNA, 258303 bp, Mus musculus
  misc_feature (1)...(258303): n = A,T,C or G
cggatggggcggcgagcaggaagactgtgcacgtaggagatgtctggagcccgccgccccggcacgtccaaggtacgctgtgctgttgctatgaaagcagagggcgggcgtgtaacctctgtgggcttctcgtgcctgtccctggtccggtgaagggagctggtgcgcccagtctgaccggcacgagcccgttggtggcggtcggtctaggcagggttccctcgctctgcctctgcccaggtctgctgaatggtcctgggaaccaagcgggtgggtggctgacagggaggacgaattgattcggagtgagtgtgagctggcgtctggcagttcatttgcctccgttttattttgttgcttaacacaccaagacagtagtgggtattggagtatctcttctgtcccaggcatcttttgctacactttgctttcccgcctaaactttctgagaggcgtgcttctcccgtgtctcccgcagtccctgtatactgtaggcactgttgtaggaactgttacatggatgaaatttaagcgatcctctacatttctccgacattgtgtttctcttggatcatattttgccttttcaaagttcctcacttacagatgattatttcataatactcaaaatttagaacagcaaacggtgcttcattccctcacctgctcttcctttcactaaatgctaaactcccttaacactaccattcgtacttatttctcagatagccttgaaagatgacactgtgaactttgtaacttatttagagagtaaaagcacgtataacttatgatttaaaagactaatttaaatttcaggaagactaaaagatgaaaaaatcaaggaattaaaacatttctacatctaacataaattagttcttgcagccctcgatacccttgctaactgtatacatttatttaagcgtccctaaagtcctgattcactcttatagctgctcattcacttctcctaactgcccagctccaaattttgactttgtgcctattctcaacaacttttttttttttttttttttcgagacaaggtttctctgtgtagaccaggctggccttgaactcagaaatcctcctgcctctgcctcccgagttctgggattaaaggcgtgcgccaccacgcccggcttcttttcttttcttttcttttcttttcttttcttttcttttcttttcttttcttttcttttcttttcttttcttttctttctttctttcttcttcttcttcttcttcttcttctttttttttttttttttttttttggttttttgagacagggtttctctgtatagccctggctgacctggaactcactttgtagaccaggctggcctagaactcaaaaatccgcctgcctctgcctcccaagtgctgggattaaaggcatgcgccaccatgcccggcgccttttcacaactttaagagtttgccctggactgcgatttttagctgtcactacagcataaagaaattacagtgtgttatgaaaccatttgtttagcttatcagggccctagcaatttttcctaacttagaaatctgttgtttttgttatttctttctgccctcttcattttattagtttccaatagcttttcttttcagtagttgtgttacttaactgttatgtaaagattgtctcaaaagtgaagcagctttccacaagtattgctatcaggattctgactgtagtttaagcttatggttgtagcttctcccaagacttctccagagaagtcttctcccaaattcactgaggtaggggccagggtggtggtggttgtggtaagtttcagtttgttagttccataggatggctcacaactttgtcaacagcaaatgagacaggatctcatgtcacacaggccgactctgaattactcatctttgatctacatttcaatttctaggattacaagtagcatatgccaccacacctgactttcatttaattaattaactggttggctaattaatttgcttttggtggagggagcagggcttatggcaggttatgtatacttagtgttttaactacatcgttatgccttggaatagtttctttactggacttgtgtttcatgctctgttcgtttcttttgtctgagtgtgtttttccttagtttggagaagatcttgtggtctatggcattcacctgggattcttcttccgcatctattacaattatttgaaagcttgatcttttcattgtatcccagatttcttggtgtattcctttcctgtgagttaaaaaattcatactctttgctttttggggggtttagagtccctactttgtcttccagtcccgatcttctgtcctctgtttgattcatttctacttgttaggctttcctttgagttttccagttatgttattgaaatttcagtttatcttcacttcagtttgagggacctacaatgtttttgtgtccttattgaatccagttttctttctggttctggcatttaattactgagtattgagtattataactatgttttgccttgtactgaaatgccagctattggtagtttcccctttttggactccttccagatatcccctacctctttgctctttcccagaaccactccctcttcatttcatcttcagaaaggagcaggcctccaagaggtaacagtcaaacaggacaagacaggattaaaaaagacaagatgaaagccctcgtatagaggctggacaaggaaacaataggaagaaaagagttccaagcataggcaaaagagtcagagacacacctgctcccattgttaggagtcccacaaacccatgaagctaacagccataacatatatgcagagaacctgctgcagacccatgaaggccccatgcttgctgtttcagtctctgtgagtttatgtgaatcttacttagttgggtcatgttctcctggtgtcctctgtcccctctgacttccacaatctttcctctcccttttctactgggttcccagatctcctatgggagggacccgatggagacctccaatttagactctttctgaataatgtctggtcctgggtctctgcacccgcttacatctgctgccagaggaagcctcgctgagaatgactggtaagacattgatctgtaaatatagcagaatatcattaatgatcatttaggtgttttgttttgttttttgttttgttttgttttttgtccagttatatttggttctaccctagatctcagagctctccagtctctggttcttggccattcaggcagtttaggtcatggcctctatcttgtggcatgagtctcaagttaaaccaaacattgtttggccactcccacaaattctgcgcatcttgcagggcaggataggttccagctttctcttttggtagcctgcaaagtaccttcctataccaaagagactagaacataggggcgaaaactccatacaggcaccagctggacctctccaggttcaatgagctgtgtagatgtcctcagcaattgggcctcactgttggttttcagagagcaaccgtctatcatcctgggttgtttaggaaactccaagggaaccccttgaccaacaactcaactgaatgcaacccagttccaccagtggaagccttgtctagctacaaaaaatggctagttcagactctattttccattcctaggagtcttcattaggttcaccctcagagatttcaggaagtttacactatacaaggtttttgtaccactttcctagtattctgtacttttttggctaatattcacttattagtgagtacataccgttcatgtccttttgtgtctgagtcacctcatttaggatattttctagttccatttgcctgcaaaactcatgatgcccttgtttttaatagctgagtagtattccatcatgtaagtgaaccatattttctgtatccattctacagttatgggacatctgggttgtttccagcttctggctatcacaaataagactgctatgaacatattgaaacatgtgcccctgtggcattgtggggcatattctgggtatatgcccaagagtggtataattgggtctttaggtagatatatttccaattttcagaggaacctccagattgatttccagagtggaactagtttgaaatcccaccagcaatggaggagtgtttctctacattcttgtcaacatgtgctgccacctgagtttttgattttagccaatctgattgataggtagaatctcagggtcatgttaattttcatttccctgatcactaaggactttgagcaagtgcttctcatccattcgagattcgtctgttgtgaattctctgtttagctctatatcccatttttttgattggattgtttcatgttttttggaggttagcttcataagttctgtatatattttggatattagccctgtattggatgtggggttagtgaagttttttttttcccccaatctgtaggttgccgatttgtcctattgactatgtcctttgccttatataagcttttcagtttcatgaggtcccaattatcaattcttgatcttagggcctaagccattggagttatgtttaggaaatttctcccccttccccctgcctccctgtgccactgagttcagggctctttcctactttttcttctagtagatagattcagtgtacctagttttatgttgaggtccttgatccacttggagttgagctttgtgcaaggtgacaaatatggatctattttaatttttctatataccaactgccagttagaccagcaccattgattgaagatactttcttttttccaatgtatacgtttggctttgtcaaagatcaaatgtccataagtatgtggttctatttatgggtctttagttctattccattgatctacctgtctgtctctgtaccaataccatgttgtttttatcactattgcctgtggtctgggatggtgattcccctagaagttcttttattgttaagagttgtttttgctatcttgggtttttttgtttttccatgtgaaattgagaattgctttttccatgtctttgaagaataattgtgctggaattttgattgggattgcattgaatctgtagattgcttttgataggatggccatttttactgttaattccaccaatccatgaacatgggagatctcgccattttctgaggtcttcttcaatttctttcttgagagatttgaagttcttctcatacagatttttcacttgtttggttagagttaccccccagacattttatatttttgtgactattgtgaagagtgttgtttccctaatttctttctcagcccatttatcctttgagtagaagaaggctactgatttgttggagttaattttatatccagccattttgctgaagatgtttatcatctgtagaagttgtctggtagattttattttagttgcttatgtatactgtcatattatctgcaaatagtgataccttaactacttctttgccaatttgtatccccttgatttccttttgttatcttattgctctagctagaacttcgagtactatattgaatagatacagggagagtggtcagccttgtcttgtcactgattttagtgggattgcttcaagtacatctccatttaatttgatattggctgttagtttcctgtatattgcttttattatgtttagatatgggccttgaattcctgatctgtctaatacatttaacgtgttgtattttgtcaaatgccttttcggcatctaataagatgattggttttactatctggttgctatctatatccatgtcaagtttccgagtcattcaaagactatgcttttactacaaccatttctgggttctaaattgctaattgtatttattataacaaagttggttttctttttctttaaaaatcacttctgcagaggaaaaggaattggcatatagaacacccatcctttcgagaagagaggtcacagcagttgagacggggaaatttcaagacagtggaagcagctgactctctctctaaagcatggctcaagtgtggagaaggatttcaggacacctctgagatcctggtaagaaagctattgtcatgaatggagaagatcctgagtatctagcctattgtagccagtttctttggaattctcttatttttcaaagcactacttttctttgtcatgctttgaattcctttaataattttatcaagttagtgtttccttcctttgtctctgtagaatctatgcatactaaggatgctgttaggtatgaaattattgagcatactattttatataacgaatagtattatgaaatatgtgtatactcagactctcttgtcagtccagttaatttttgtatatgttgtaaattataaaggagtggttttataaactaaaaatagtgtggttgaaggtagtgataagtggtagtcatatatatgagaaggcattgacattgactattatataaaatgtttcagcagttcagcttagagtcttgaaaaatatgaaaacaaatttgtgtgtctctaaggactacatgttttgggaaatactcacttggtgaatattaaaaaaatgcagaggactatatcaaggagagtataatttaatactgaatattttacaaaatattattagtgatatttagcctttccacatgagtcatataagttaaattatttttattattattttgcctgcagtcattagcaagtgaaaagacaggtattactgaaaagcacctggaattatctccaaaaccaaagacaggtaacaatgttttgttttaactctttctttctttctttctttctttctttctttctttctttaacctctcattttggagatcaaaactttggagtccttagacttgtatgcacctcactaaattcccaaaatctaaaatgttgatttattgacagtgaccttaaggctatttttcagtgattttttttttttaaatcttttaaaaatgtcacagtttggatagtttgcatattcagggttaaaatcaatgaaggtaaaaggtatttctgattcatctcaatcacaatctacccagttcttcctggtcctgttggtgactacttacattttgggtacccttactgggtttacttttttaaaataatttttaatttattctttcatatattatatcccgaccatagtttcctttcttctcttcttcctgtttctccccctaatcccaatgcattcctcctctattttccttcagaaaaaggtcaggcttcccagggatatcaaccaaacatggcattttaagttacaataatactagctaccttccctccctgggagaggccacctagtaggaagaaaagggtcccaaaagcaggcaacagagtcaagagtcaacccctgcttacactgttaggagtctcataagaagacaagctacacaccatagcatatatgcagaaagtctaggtcagacccatacaggctccacgactgtcagttcaggctctatgtgccactgtgaacccggggttagttgattctgtggaatttcttatggtatccttgacctctctggctcctataatctttccttctcctcatcttcaggattcactgaactctacccaatgtttgcctataggtctctgcatctgtttccatcagttgctagatggagcctctttgatgactgttatatgaagctcttgtctctgggctatctggcctctggttcctggttccctcttgtggcttgggtctcaagctagaccagtcattgcttgttcaatcccacaatttctgtgccatcattacatcttactgggtttattttagtcatagaatctaattcagcagttctcaacatgaaagtcgtgactccttttgggtgaatgacccctccacagggtcacctaacaccactggaaaagacagatatttactttataactcataactagcaaaatcacagttataaagtagcaacaaaaataaatttatatttaggggttaccacaatatgaggaactgtagggtcatagcattaggaagtttgagaattactgatctagtggggtagctcaggtttagaacatcagggagataatgaatcaataaataaacaaatgctttggtttgaattctagtgtcacaaaaaatttttcatatggaaaataaacatgatttatactataggaaccactgctacaaactggtgaattagttatggatgctttctaactacaaatacaaggaaactatgcacaaaaattagggattgatgttatcttcacaacaatacatccagagaatccagctattttgagtgctgtaatattaatatggggttggttctcctgggtgaaaggtggcagcttggtatcttagattaaattcttgaggctactgttggtgctgagggtttttagccaatgaactttggcttctatgggaagatagacctttacagaaccttggctagaacctgtcacatagggttatctccactaaagatggtatgatgaagttaggtgccacaggccctctggtcccctgtgcctgtgtagaaaagagtctctagagtagatgggcaaaaattaggatgtattgacaagcagtcaaacacgctagaatggtgttggatctgaatgtaatgttccagttgagcatcagacttttataatacagaataaattgcagaacaaggcacattgaatttttccaggtgcaaaaggagtgacttcaaaaggaaccagataaatgtttacattagagattagcactttctgccaggcaagagttttacactaattgttaatagccccagggtagttaactcttgacacgcctcaagaataatgtagtgtcactgaccccaaaattctctaggcctcgttaattcttatctatatctgaagactgtccattttcagtatagtatactaatttgctcttggcatggaatgtagtctgtaagaagaatttctatcttagtgagaattttagtctctatctgtaaacagctgagtaaaatggcaagtgcttaattgtttactgaatgggtaaaactccttgctgctatctggagtctaagaacactgggaaaaggctttagctatgttagaatacaatcttaaaaggcatttactataaggtaaagctatatagagtgcacatggatccatacactagactaaagtggatttggaaaattaattttatgggttagggaaatagccaaagatccgggagtaagtttccttgaaactctttcctcatgagaaagctttcagactttcatctgtcaagctgactccaccggagtccctggcagttagggaattaaaaaaatatatttattttatgtatatgagtgatctacctgcatgtacatctgcatgccagaagagggcatcagattacattatagatggtgtgagctaccacatggtggctatgaattgaactcaggacctctggaagaacagccagtgttcttaaacattgaggcatctttccagcccaaagctagggatttttatacacatataactctactagtaaacttagtgtgaattgtaatggagaagagtgggtatatgcagcaggtaccactgactttgttgctctcatctgcctggggtagattagaagagtgaaatattgtaatttcagagatctgttttcactggtcttgggaaattaagctaaatgatcacatctcagattctacatttgggaaatgggtatatgattgagggttttcttggtgattgtattaggtgagacaggaagataagaatttttgatgccaacacttgctgttgtgtctgatgacataaagagctgtatgtgggctgtatactggagtaactttctgtggtccagagactaaacattctaagacatgttatttcattttcctttacagtttattttcttcccccctcttttgagacagggtctcatgtaattcaagctgttgttgaatgtgtacctgaggctgaccttgaacttctgatcctcatgcctccatctgttgagtgctaggatagtagacatgcatcactatgctccaatagaagattctgagcatttaaactcagggtttcctgctttctagacagactgtctaaacattgagttacttccatacccagtgatctttttctatgtgaatgaaaaataaaatacccaaaatatttctttaaaatttataaaactctgtcttgtagaataaacaggcagaaatcattttgcaataccttttgatattagttcagaattatatatttctactagtgccaatgctcttatatttacaccagtttatgtttaatttttaagatataacatatagaaaaaaggtatgtatctttaaataaatatggtttgtgtatatttttttttctattttttattaggtatttagctcatttacatttccaatgctataccaaaagtcccccataacccccccccccactaccctacccaaccactcccccttttgggccnnnnnnnnnnnnnnnnnnnnnnnnnnnnnnnnnnnnnnnnnnnnnnnnnnnnnnnnnnnnnnnnnnnnnnnnnnnnnnnnnnnnnnnnnnnnnnnnnnnnnnnnnnnnnnnnnnnnnnnnnnnnnnnnnnnnnnnnnnnnnnnnnnnnnnnnnnnnnnnnnnnnnnnnnnnnnnnnnnnnnnnnnnnnnnnnnnnnnnnnnnnnnnnnnnnnnnnnnnnnnnnnnnnnnnnnnnnnnnnnnnnnnnnnnnnnnnnnnnnnnnnnnnnnnnnnnnnnnnnnnnnnnnnnnnnnnnnnnnnnnnnnnnnnnnnnnnnnnnnnnnnnnnnnnnnnnnnnnnnnnnnnnnnnnnnnnnnnnnnnnnnnnnnnnnnnnnnnnnnnnnnnnnnnnnnnnnnnnnnnnnnnnnnnnnnnnnnnnnnnnnnnnnnnnnnnnnnnnnnnnnnnnnnnnnnnnnnnnnnnnnnnnnnnnnnnnnnnnnnnnnnnnnnnnnnnnnnnnnnnnnnnnnnnnnnnnnnnnnnnnnnnnnnnnnnnnnnnnnnnnnnnnnnnnnnnnnnnnnnnnnnnnnnnnnnnnnnnnnnnnnnnnnnnnnnnnnnnnnnnnnnnnnnnnnnnnnnnnnnnnnnnnnnnnnnnnnnnnnnnnnnnnnnnnnnnnnnnnnnnnnnnnnnnnnnnnnnnnnnnnnnnnnnnnnnnnnnnnnnnnnnnnnnnnnnnnnnnnnnnnnnnnnnnnnnnnnnnnnnnnnnnnnnnnnnnnnnnnnnnnnnnnnnnnnnnnnnnnnnnnnnnnnnnnnnnnnnnnnnnnnnnnnnnnnnnnnnnnnnnnnnnnnnnnnnnnnnnnnnnnnnnnnnnnnnnnnnnnnnnnnnnnnnnnnnnnnnnnnnnnnnnnnnnnnnnnnnnnnnnnnnnnnnnnnnnnnnnnnnnnnnnnnnnnnnnnnnnnnnnnnnnnnnnnnnnnnnnnnnnnnnnnnnnnnnnnnnnnnnnnnnnnnnnnnnnnnnnnnnnnnnnnnnnnnnnnnnnnnnnnnnnnnnnnnnnnnnnnnnnnnnnnnnnnnnnnnnnnnnnnnnnnnnnnnnnnnnnnnnnnnnnnnnnnnnnnnnnnnnnnnnnnnnnnnnnnnnnnnnnnnnnnnnnnnnnnnnnnnnnnnnnnnnnnnnnnnnnnnnnnnnnnnnnnnnnnnnnnnnnnnnnnnnnnnnnnnnnnnnnnnnnnnnnnnnnnnnnnnnnnnnnnnnnnnnnnnnnnnnnnnnnnnnnnnnnnnnnnnnnnnnnnnnnnnnnnnnnnnnnnnnnnnnnnnnnnnnnnnnnnnnnnnnnnnnnnnnnnnnnnnnnnnnnnnnnnnnnnnnnnnnnnnnnnnnnnnnnnnnnnnnnnnnnnnnnnnnnnnnnnnnnnnnnnnnnnnnnnnnnnnnnnnnnnnnnnnnnnnnnnnnnnnnnnnnnnnnnnnnnnnnnnnnnnnnnnnnnnnnnnnnnnnnnnnnnnnnnnnnnnnnnnnnnnnnnnnnnnnnnnnnnnnnnnnnnnnnnnnnnnnnnnnnnnnnnnnnnnnnnnnnnnnnnnnnnnnnnnnnnnnnnnnnnnnnnnnnnnnnnnnnnnnnnnnnnnnnnnnnnnnnnnnnnnnnnnnnnnnnnnnnnnnnnnnnnnnnnnnnnnnnnnnnnnnnnnnnnnnnnnnnnnnnnnnnnnnnnnnnnnnnnnnnnnnnnnnnnnnnnnnnnnnnnnnnnnnnnnnnnnnnnnnnnnnnnnnnnnnnnnnnnnnnnnnnnnnnnnnnnnnnnnnnnnnnnnnnnnnagaagagtttttgctatcctaggttttttgttattccagatggatctgccgattgccctttctaattcgttgaagaattgagttggaattttgatggggattgcattgaatctgtaaattgcttttggcaagatagccatttttactatattgatcctgccaatccatgagcatgggagatctttccatcttctgagatcttctttaatttctttcttcagagacttgaagttcttgtcatagagatctttcacttccttagttagagtcacgcctaggtattttatattatttgtggctatttagaagggtgttctttccctaatttctttctcagcctatttgtcctttgtgtagagaaaggccattgacttgtttgagttaattttatatccagctacttcactgaagctgtttaccaggcttaggagttctctggtggaatttttcgggtcacttatatatactatcatatcatctgcaaaaggtgataatttgacttcttcctttccaatttgtatccccttgatctccttttgttgtcgaattgctctggctaggacttcaagtacaatgttgaataggtagggagagagtggacagccttgtctggtccctgattttagtgggattgcttcatgtttctctccatttactttgatgctggctactggtttgctgtagattgcttttatcatggttaggtatgggccttgaattcctgatctttccaagacttttatcatgaatgggtgttggattttgtcaaatgctttctcagcatctaactagatgatcatgtggtttttgtctttgagtttgtttatatactggattacgttgatggatttccgtttattgaaccatccctgcatccctgggatgaaacctacttggtcaggatggatgattgttttgatgtgttcttggattcggtaagcaagaactttattgaggatttttgcatcaatattcataagggatattggtctgaagttctctatctttgtggggtctttttgtggtttaggtatcagagtaattgtggcttcatagaatgagttgggtagagtaccttctgtttctagtttgtggaatagtttgtgaagaactgggattagatcttctttgaaggtctgatagaactctgcactaaacccatctggtcctgggctttttttggttgggagattattaatgactgtttctatttctttgggggatatcgggctgtttagatcattaacctgatcttgattcaactttggtacctggtatctgtctagaaacttctccatttcatccaggttctccagttttgttgagtatagccttttgtagaaggatctgatggtgttttggatttcttcgggatctgttgttatgtctcccttttcatttctgattttgttaattagaatgctttccctgtgccctctagtgagtctggctaatggtttgtctgtcttgttgattttctcaaagaaccagctcctcaattggttgattctctgaatagttcttcttgtttccacttggttgattttgcccctgagtttgattattttctgccgtctactcctcttgggtgaatttgcttccttttcttctagagcttttaggtgtgttgtcaagttgctaatatatgctctctctagtttctttttggaggcactcagagctatgagttttcctcttagaaatgctttcattgtgtcccatgagtttgggtatgaagtggcttcattttcattgaactctaagaagtccttaatttctttctttattccttccttgaccaaggtatcattgagaagagtgttgtttagtttccacgtgaatgttggttttctgttatttattttgttattgaagatcagccttagtgcatggtgatctgataggatacatgggacaatttccatatttttgaatctgttgaggcctgttttgtgacctattatgtggtcaattttggagaaggtaccatgaggtgctgagaagaaggtatatccttttgttttaggataaaatgttctgtagatatctgtcagatccatttgtttcatcacttctgttagtttcagtgtgtccctggttagtttctgtttccatgatctgtcctttggtgaaagtggtgtgttgaagtctcccactattattgtgtgaggtgcaatgtgtgctttgagctttactaaagtttctttaatgaatgtggctgcccttgtatttggagcatagatattcagaattgagagttcctcttggaggattttacctttaatgagaatgaagtgcccctccttgtcttttttgatgactttgggttggaagacaatcttatcagatagtaggatggctactccagcttttttcttcataccatttgcttggaaaattgttttccagcctttcattctgaggtagtgtctatctttttctctgagatgagtttcctgtaagcagcaaaatgttgggtcttgtttgtgtagccagtttgttagtctatgtctttttattggggagttgagaccattgatgttaagagatattaaggaaaagtaattgttgcttcctgttatttttgttgttaaagttggcattctgttcttgtggctgtcttcttttaggtttgttgagggattaccttcttgttttttctagggcgtggttcccgttcttctattggtttttttctgttattatcctttgaagggctggattcgtggaaagacaatgtgtgaatttgtttttgtcgtggaatactttggtttctccatctatggtaattgagagtttggctgggtaattgagagtagcctgggctggcatttatgttctcttagtgtctgtataacatctctccaggctcttctggctttcatagtctctggtgaaaaatctggtctaattctgataggcttgcctttatatgttacttgacctttttcccttactgcatttagtattctatctttatttagtgcatttgttgttctgattattatgtgtcgggaggaatttcttttctggtccagtctatttggagttctgtaggcttcttgtatgttcataggcatctctttctttagatttgggaagttttcttcaataattttgttgaagatgtttgctggtcctttgagttgaaaatcttcattctcatccactcctattatccgtaggtttggtcttcttattgtgtcctggatttcctggatattttgagttaggatctttttgcattttccattttctttgattgttgtgccgatgttctctatggaatcttctgcacctgagattctctcttctatctcttgtattctgttgctgatgctcaaatctatggtttcagatttctttcctagggtttctatctccagtgttgcctcactttgagttttctttattgtgtctacttccctttttaggtctagtatggttttgttcatttccatcacatgtttgtatgttttttcctctttttctgtaaggacttctacctgtttgattgtgttttcctgtttttctttaaggacttgtaactctttagcagtgttctgtatttctttaagtgagttattaaagtccttcttgatgtcctctaccatcatcatgagatatgcttttaaatctgggtctaagttttcgggtgtgttggggtgccctggactgggcaaagtgggagtgctgggttctgatgatggtgagtggtcttggttcctacctttacctttcgccatctggtaatctctggagttagtagttatagttgactctgtttagagattgttcttctggtgattctgttaccgtctatcagcagacctgggagacagattctctcctctgaatttcagtgctcagagcactctctgctggcaagctctcttacagggaaggtgcgcagatatcttgtgtttggacctcctcctggccgaagaaggaggcccaaaacaggacctttctcagaagctgtgttgctttggcaggtcccagaagctgtcagcttctgtggtgcagactctcacttgtgcagactaaattcctaagttctgcggagtcccggaaccaagatggcgaccgctgctgctgaggctgaggctgcctcccgagccaggcggacacctgtcctctggtccggtggccggctgtctgcggcccgcaaagggtgctgcctcagcggctctgtgcttccgcctgttccagaagctgtccggttctctggcgcaccctctcacctgttcagactaatttcctcgtgtatattttttgtagttgtagtatattcagctttgggagaaaattaaatattaaataagttgctacttgtacttaactacaaaacattcttttgagatgatttccttaggctagaacatacttgactcaaaattttgttatattgttattagatgatatacaatatattctaaaaggctcaaagtttgtaccaatgtactttatatataacacggtgatagttaaaccaagatgaagatataaaaggcttatgtatagaggtcagtgagaaaggtatgtaaagcacttcctagaattggtagcttttaaaattagttaacagtagcctattagtaagaattacaagataaaattttgctctaaggccagaccagccaggagtgcataggctgcagaagtggcagagcaactgagacagggtccttcctgcctccatatgcacctaggaagtggggttgttcctgccaggggagagcttgcatccagggagtactctgaccccaggactcaggtgagaacaatattttctctcctgtgactatctaaggagggaccagccaggagcgcataggccacagaagctgcagagcagctgggacagggtccttcctgcctccatctgcatccaggaggtgaagctgttccccagccctctgtgcactggtcttgccaagagagagctgcctcccaagagtaccaacacaggcttacagactcacaggaggaacaagctccagcctgagacagcaagaacatctaacaccagagattaccagatggggaaaggcaaacacaacaatcttaccaaaagaaacaaagactacttggcatcatcagaacccagtactcccaccacagcaagtcttggatacaccaacacaccggaaaagcaagattcagattgaaaatcatatctcatgatgctgatagaggatattaagaaggacataaataactcccttaaagaaatgcaggagaacacaggcaaagaggtagaagcccttaaagaggaaatacaaaaataccttaaagaattacaggaaaatacaaccaaacaggtgaaggaattgaacaaaaccatccaggatctaaaaatggaagtagaaacaataaaaaaataacaaagggagacaactctgaagatagaaaacctaggaaagaagtcaggagccatagatgcaagcattaccaacagaatacaagagataagagagaatctcaggtgcagaagattccatagaaaacatggacacaacagtcaaagaaaatgcaaaatgcaaaaagatccaaactcaatacaaccaggaaatctaggacacaatgagaagaccaaacctaaggataataggtatagaagagaatgaagatttccagcttaagaggccagtaaatattttcaacgaaattatagaagaaaacttccctaacctaaagaaagcaatgccgattaacatacaagaagcctacataactccaaatagcctggaccagaaaagaaattcctcctgtcgcataataatcaaaccaccaaatatataaaacaaagaaagaatattaaaagcagtaagggaaaaaggtcaagtaacatataaaggcagacctatcagaattacacaagacatctcaatagagaatgtgaaagccagaagatccgaggcagatgtcatacagaccctaagagaacaaaatgccagcccagactactatacccagcaaaactcaattaccataggtggagaaaccaaaatattccatgacaaaaccaaatttacataatatctttctgcaaattcagcccttcaaaaggtaataaagggaaaactccagcacaaggagggaaaaaccattctagaaaaagcaagaaaataatctttcaacaaacctagaagaagatagcaacattaacagaattccatctctaacaacaaaaataacaggaagcaacaattacttttccttaatatctctcaatatcaatggactcaatttctcattaaaaagacataaactttgctcagctctgagccccattttttaatggggttatttgattttctggagtccaccttcttgagttctttatatatatattggatattagtcccctatccgatttgggataggtaaagatcctttcccaatctgttggtggcctttttgtcttaatgacggtgtcttttgctttgcagaagctttgcaattttatgaggtcccatttatcgattctcgatcttacagcacaagccattgctgttctattcaggaatttttcccctgtacccatatcttcaaggcttttccctactttctcctctataagtttcagtgtctctggttttatgtggagttccttaatccacttagatttgaccttagtacaaggagatagaaatggatcaattcgcatttttctacatgataacagccaattgtgccagcaccatttgttgaaaatgctgtcttttttccactggatggttttagctcccttgtcaaagatcaagtgaccataggtgtgtgggttcatctctgggtcttcaattctgttccattggtctacttgtctgtcactataccaataccatgcagtttttatcacaattgctctgtagtacagctttaggtccagcatggtgattccaccagaggctcttttatccttgagaaaagaatttgctctcctaggttttttcttattccagatgaatctgctgattgccctttctaattcgttgaagaattgagttggaattttgatgggaattgcattgaatctgtagattgcttttggcaagatagccatttttacaatgttgatcctgccaatccatgagcatgggagatctttccatcttctgagatcttctttaatttctttcttcagagacttgaagttcttatcatacagatctcagagttgagcaaagaattctcacctgaggaataccaaatggctgagaagcacctgaaaaaatgttcaacatccttaatcatcagggaaatgcaaatcaaaacaaccctgagattccacttcactccagtcagaatgcctaagatcaaaaattcaggtgacagcagatgctggcgaggatgtggagaaagaggagcactcctccattgttggtgggattgcaagcttgtacaaccactctggaaatcagtctggtggttcctcagaaaattggacatagtactaccggaggattccgaaatacctctcctgggcatatatccagaagatgtcccaaccggtaagaaggacacatgctccactatgttcatagcagccttatttataatagccagaagctggaaagaacccagatgcccctcaacagaggaatggatacagagaatgtggtacatttacacaatggagtactactcagctattaaaaagaatgaatttatgaaattcctaggtaaatggatggacctggagggcatcatcctgagtgaggtaacccaatcacaaaggaactcgcacaatatgtactcattgataagtggatattagcccagaaacttaggatacccaagatataagatacaatttgctaaacgcatgaaattcaagaagaacgaagaccaaagtgtggacactttgccccttcttagaaatgggaacaaaacacccatggaaggagttacagagacaaaatctggaagtgtgacgaaaggatggaccatctagtgattgccatatgcagggatccatcccataatcagcttccaaacgctgacaccattgcatacactagcaagattttgctgaaaggacccagatatagctgtctgcttgtgagactatgctagggcttagcaaacacagaagtggatgatcacagtcagctattggatggatcacacagctcccaatggaggagctagagaaattacccaaggagctaaagggatctgcaaccttataggtagaacaacattatgaactaaccagtacaccggagctcttgactctagnnnnnnnnnnnnnnnnnnnnnnnnnnnnnnnnnnnnnnnnnnnnnnnnnnnnnnnnnnnnnnnnnnnnnnnnnnnnnnnnnnnnnnnnnnnnnnnnnnnnnnnnnnnnnnnnnnnnnnnnnnnnnnnnnnnnnnnnnnnnnnnnnnnnnnnnnnnattgaaaatgtaaatgaggaaaatacctaataaaaaaaataaattaaaaaaaaaagacataagctaatggactggttatataaacagaacacaacattttgctgcatataggaaacccacctcagtccaaagacagacactacctcagaataaacggctagaattttcaagcaattggtctcaagaaacaagctggagtagccattccaatatagaataaaatcgacttttagtgtaaagttatcaaaaaagataaggacggacacttcatattcattaaaggtaaaatctaccaagatgaactctcaattctgaatatctatgttccaattcaaggacactcacattcataaaagaaactttactaaagctcaaagcacacattgcaccccatacgataatcgtgagagacttcaacaccccactctcagcaatggacagatcatggtaacagaaactaaacagagacacagtgaaactaacagaagttaggaaacaaatggatttaacagatatctatagaacattgtatcctaaaacaaaaggatataccttcttctcagcacctcatggtaccttctacaaaattgaccatataaatctgtcccaaaacaggcctcaacagatacaagaagattgaaataatctgatgcatcttatctgatcaccacggactaagcctaatcttcaataacaacataaataatagaaagcccacatacacgtggaagctgaacaacactctactcaatgataacttggtcaaggaataaataaagaaagacattaaagactttttagaatttattgaaaatgaaggtacaacataaccaaacttatgggacacaatgaaggcagtgctaagaggaaaactcatagctctgagtgcctcccaaaagaaactagagagagcacacactagcagcttaacagcacacctgaaagctctaaaacaaaaagaagcaaattcacccaagaggattagacagcacagaataatcaaaatcagggctgaaatcaaccaaatggaaacaaaaagaactatacaaagaatcaaccaaagcaggagctggtttctttgagaaaatcaacaaaatagataaaccttacccagactaactagagggcacagagacagtatcttaattaacaatatcagaaatgaaaagggagacataacaacagaaactgaggaaatccaaaataccatcagatctgtactggctagttttgtgtcaacttgacacagctggagttatcacagagaaaggagcttcagttgaggaagtgcctccatgagatccagctgtaaggcatttcctcaattagtgatcaagggggaaaggccccttgtgggtgggactatctctgggctggtagtcttgggttctataagggagcaggctgaacaagccaggagaagcaagccagtaaaaaacatccctccatggcttctgcatcagctcctgctttctgacctgcttgagttccagtcctgacttcttttggtgatgaacagcagtatggaagtgtaagcagaataaaccctttcctccctaacttgcttcttggtcatgatgtttgtgcaggaatagaaaccctgactaagacaaattgataccagcagagtgaggtattcctgtgacaacctggccatgttttggggaggactgtggaaggactttggaactttgggatagaagacccattcggtgttaagacctctgtcagatgttgtgtaggagcttggaagataatgttgaaaacagtgcaaaagatggaggcctggcttgtgaaatttcagagggaaaaattaaagactcttttcagggccattgttactttggttgtgaagattctgtgtttctggttagctggggctgaagaatcagctgtgattaacaagataccagaactactaaagcataaactttgcattactgggactgttgatgctggttagctggagctaagaaattagcggtgcttaagaagagaccagcatcattgaggtgacatcttctgggaagtgttttctgaaagcatagaggctgtgttccagagatagccaagtttgtaccttgtattgtggctggacttggtaatatgtaagaatcacccaggtggtactggttttgaaggcatgaaggggtcacgcagagcagctgcggcccacactgtgagaggccatggaaggccattggtgaaggtgcagcctcagttgcaattgatggcccatgactgaaggggtcatgcagtgttttggaaatgccagtacaatgagatgaccatcaagagcagcagcaaaaaaaaaaaaagaaaaaaaaaagagcagcagcagtggagtacaggcatctggagcctagaggacgacatgtgtgttacaaagggcatggctggagaagtgaccaagcccttggaggagcccagaagatcatgagttggatcccagacattgaacggttggagattgagttttgcttttgattgtgactgtgccctgatattttccctcttgaagaaaaaaactatttagtggagcccacagttaagagacttttaattgtaaaaagactttggattttaaaagaaatggatattttaaagagattgaaaatttaagaatatataaagactgtgggatgtgtaaagttatttagatcttggggatgaataagaatgtaaggttgaggcttactagtgatgtgtttgtgtgtcaagctgacaaggggtcaattgtactggctaattttgtgtcaaattgatacagctggagttatcacagagaaaggagcttcagttgaggaaatgcccccatgagatccaactataaggcatttcctcaattattgatcaagggggaaagaccccttgtgggtgggaccatctctgggctggtagtcttgggttctataagagagcagcctgagcaagccaggagaagcaagccagtaagaaacatccctccatggcttctgcatcagctcctgctttctgacctgcttgagttccagtactgacttcctttggtgatgaacagcagtattgaagtgtaagcagaataaaccctttcctccccaacttgcttcttggtcatgatgtttgtgcaggaatagaaactctgactaagacaagattctactacagaaggctatgctcaacacaactggaataactagatgaaatagacaagtatctagacagagcagatactgaggttagatcaggatcaggtaaatattctaaacagtcccatatcccttaaggaaatagaaacagtcattaatagtctcccagccaaaaacaacaacaacaacaacaacaaccacaaaaatccaggaccagataggtttagtacagagttctatcagaccttcaaagaagacctaataccaatactcctcaaactattccacaaaatagaaacagaaggtactctacccaattcgttctatgaagcctattattctgatacctaaaccacacaaacacccaacaaagaaagagaacaactgaccaatttcccgtatgaatattgatgcaaaagtactcaataaaattaagcaaatccaatccaagaacacatcaaaatgattatccatcatgatcaagtagactttatccaagggatgcagggatggttcaatgtacggaaatccatcaatgtaatccactacataaacaaactcaaagaaaaaacccatatggtcatctcattagatgctgagaaagcatttgacaaaagccaacacccttttatgataaaagtcttgaaaaaatcagcaaatcaaggcccacacataaacatacaaaaagtaatatacagcaaaccagtagccaatatcaaactaaatggagagaaacttcaagcaatcccagtaaaatcagggactagagaaggttcctctctctctccctacctattcactatagtacttgaagtcctaggcaaagcaattagacaacaaaaggagatcagagggatacaaattggaaaggaagaagtcaaaatatcactgtttgtggatgatatgatagtatacttacgtgacttctaaaattccaccagagaatttctaagcctgataaacaacttcagtgaaatatgtggatataaaatttactcaaatcagtggcctttctctagacaaaggataaacaggcagagaaagaaattagggaaataacacccttcaaaatattcacaaataatataaaataccttggtgtgattctaactaaggaagtgaaagatctgtatgataagaacttcaagtctttgaagaagtctcagaagatggaaagatctcccatgctcatggattggcagaattaatatagtaaaatggctaccttgccaaaagcaatctacagaatcaatgcaatccccatcaaaattccagctcaatttttcacagaattagaaagtgcaatttgcgaattcatctggaataacagaaaacctaggatagcaaacacttttctcaacaataaaagaacttctggtggaatcactatcccttacctcaagctttactacagagcaattgtgataaaaaaaacttcatggtactggtacaataattgataggtagatcaatgagatagaattgaagatcctgaaatgaacccacatacccatagtcactttatctttgacgtggagctaaaaccatccaatggaaaagagacagcttttttaacaaatggtgctggctcaactagtgcttagaaagtagaagaatgtaaattgacccattcttatctcctagtacaaaggtcaagtccaagtgggtcaaggatcttcacattaaaccagatatattaaaacttatagtggagaaagtggggaagagtttcaaacatattggcacaggggaaaaattcctgaatagaacagcaatggcttgtgctgtaagatcaagaattgacagatgggacctcatataattgcaaaggagactgtcaataagacaaaaaggcaaccaacagattgggaaaagatctttaccaatcctaagtccaatagagggataatatccaatataaacaaagaacacaagaagttagactccaaagaaccaaataacactattaagaatgggtatagagctaaacaatgaattctcaactgaggaatactgaacggctgagaagaatctaaaaaaatgttcaacatccttattcatcaggaaaatgcaaatcaaaacaactctgagattctacctcacaccagtcataatggctaagattaaagactcaggtgacaggagatgctggccaggatgtggagaaagagtaacgctcctccactgctggtgggattgcaagctgatataaccactctggaaatcagtttggtggttcctcagaaaactgaacatagtactacctgaggacccagcaataccacttactcgaatatacccagaagatgctctaacttgtgataaggccatattctctaatgtgttcatagcagccttatttataatagaagctggaaagaacctagatgttcctcaacagaggaatggatacagaaaatgtggtacatttacacaatggagtaccacacaactatcaaaaacaatgaatttatgaaattcttaggcaaatggatggatctggaggatatatattatcctgagtgaggtaacccaatcacaaaagaaaacacgtgaaatgtactgactgataagtggatattagcccaggagctcagaatacccaagatataatttacaaaccatatcaaactcaagaaggaagaccaaagtgtggatactcgagccctcttagaagggggagcacactacccatggaaagatttacagagacacagtgtggagcagagactgcaggaatgaccatccagacacttccccattggggatccatcccatatacaatcaccaaacccagacactattgaggatgccaacaagtgcttgctgacaggagcttgatataggtgtctcttgagaggctctgccactgcctgacaaatacagaagtggatgctcacagccatccattggactgagcatagggtccccaatgagggagccagagaaagtacccaaaaagctgaaggggtttgtagccccataggagaaacaacaatatgaactaaccagtacccccggagcttccaaggggtaaaccaacaatcaaaaaatacacatggttgagacttttggctccagctgcatgtgtagcagagcatggcctagttggccatcaatgggaggagaagcccttggttctgttaaggctatagtcccagtataggggaatgccagggccaggaagcagagtgggtgggttggtgagcagggggaggtgggaggcgatagtggttttcggagtggaaaccaggaaaggggataacatttgaaaagtcaataaagaaaatatctaataattttttttaaactctaaaaaacaagataaaaatttcaaaaacaataacaaaaatcctccaaaatgaaaatcaatcaatcaaacaaacaataaacctcaaccatatttatttagtaggctgaagaactaatatttttatgagagctggaaaatataagaaacacatttttgtaagtaattcttagggtctgagtctatgttcatggttgggttgttttgtttttgttttttttttttaaactttctgtgttgtgttttataatttttttgaactccagcttttgtccttggcttaaattcagagaatccttgtggactgttcatggaacactaagtaggaagatctaacactacatagtttttattgtctttagtgtttttgtgcttgtggctttgtctaaataatatgcattaaaatcctggcctttaatctcagccctgcacttgaggcagttctctgaatttgaggccagtctggtctacggggtgagttccaggacagccaaagctacacagagaaatcctgtctttaaaaaaaaaaaaaaaaaaagaaaagaaaacacaaaacaaaaggaaaatagcataaaatctcattctgatcaataacaattaccagctgatcttgtcttttctttttctgcaacagaaactacaagtaagaatgctagtgagcttccaaatataatatggagttccagtgaaagtgatttctccgatgaagataagacacttcctgcattacagagagatggtaggcatggccctagagccgacaggcttggtgacaggactatctcatgtcccgaagacgaagacattgaaggtaaattgctggttttgtaggaagttcagtttctgttaaatattgggtttggtagttttttgtttgtttgtttgttttttgttttttgtttttttgttttggtttttcgagacagggtttctctgtatagccctggttgtcctggaactcactttgtagacctggctggccttgaattcagaaatcctcctgcctctgtctcccaagtgctgggattaaaggcgtgtaccaccaccacctggcttggtagtagttttatgtatttattatgaatttgtttattatgaattatgagttcatatatatatctagccctttagaaacatatttctcatgacaactttaagaaatagatattacagtgacttcttattttgttttttaaaaaatattttattcgctctttgggaatttcatatcatgccccccaattccactcatctctctgtcccctcttactcgccttttacccttttgaactcccacaccaaaagaaaagtcatctcattgctgaagctgtagtgtgtcacagtgtgtctcacagtatactcttttgtctacacttctttgcttacaatgttcattgcaatggctcgttgatttcgttggaggcctctggcttctgctacactatctggaacttcactgggactcctctcggatatcttgttgttgcccggtgttgtggagatcctgtagttttggatctgtaggaccagccccttcacacagtctagcatttcattgatggggtaggtgttggggtaggcaactcaaagaactgaatctgggcctgagaggtatatgagctggccagcccaccagctctcctgcatttacaccactagggtgagccctctagccctactctggctagctcatccaaatgcctaacccaggaaggggtaggtagggtcagctttcctgatctcatgccttcattactaggtccctcataacccctgaaactagggccagctctactttgctgcccacatgaggtatagggcccactctcccaagtgttgcagctgttgagggacaggaccagttctctcactctcatgactccagggccagatcatttgcaaccccaccaccagggtcagctcttctgtgctaccttggtgaggggcagggtctgctctcttgctcttatgaccccagggccacaggtagtgaggggcaggagagactctctttctcttcctctctcttcctctctcttcctccctccctccctccctccctctctctctctctctctctctctctctctctctctcattcatgccattgcactggagatgagtggcagggccagctctcccagacacaccctctgggctggcttcactttcctgagtactgcagctggctaggtgtggggtcagctctcccactctcatgcctgcaagatcagctctcaagatgctcaggtgagccagcttggcctgcttatggcatcccagcctgtcttagtcagggtttctattcctgcacaaacatcatgaccaagaagcaagttggggaggaaagggtttatttagcttacacttccacattgctgtttatcaccaaaggaagtcaggactggaactcaaacaggtgaggaagcagaagctggtgcggaggccaaggagggatgtttcttactggcttgcttcccctggcttgctcagcttacttcttatagaaccaagactaccagcccaggcatggcaccatctgcaaggggccctttccccttaatcactaattgagaaaatgccttacagctggatctcatagaggcacttccccaagtgaagctcctttctctgtgataattccagcctgtgtcaaggtgacatgcaaaaccagccagtacacaacccatgcttggttctatattgagatcttgttccataaaacaaaatctaggggctggggaaatgcctgcatcagtaaagtgtggctgcacaatgtgaggacttgatctcgatctctagcagccatttttttttttttttaaatggacacactgaagtggaagagaagggaaaatccctcgtgctttcaaaccagctagttagtcaagtcatcctgcttgggaagagaactcaaaatataagattgaaagtcacgtaggatgatacctgactctgatttctgacctctgcacacatgtacaagcatgtatgtatatgtgcatcctcacacactagccaataaattaaaaattagattatgtaaactgtgataatatgtaacatgtgttgactttcttataaagctgatcctcggagtctgaagtcatgcatacagctgttggagtgtctcgcctttcagttctccttcacactatttcctcctttaattttttaaaaaatctttaatagataatcagtactgctgatatcaagattttattttgtttaagacatggagctgggaattaaatatgttatttccatttttatatatgctcttatttcatgacctaagaaataacctcaatttattaaaagaagattggaactataaaagggcatatgattgttgctgagccatctcttcagccccatgtactatattttaactctattattattttttttctttaaaattttaacttccagtcaggtactaaatctggtacactcataatgagttattacttcctttcagtgggagaaaatgatgctcttccactgagtgagatccattatcttagttctctgagtacttgtacttcgaactgtaggaaagatgtatgttatgtatcatactttacagtttagtctatctgtgacaaccactttcagttatatagacttagcagattagatttagtatatttagtatattttagttaaaaataaatatatgctgggcggtggtggcacacgcctttagtctcagcacttgggaggcagaggcaggtggatttctgagtttgaggccagcctggtctacaaagtgagttccagaacagccagggctacacagagaaaccctctttcgaaaaaccaatatatatatatatgtgcataatttagctttctttcttaaaattttctaaagttataatgagattatgtttatgaaataaaatgaaattaaattagtgtgtttccatattgatgaaagatatttcctgaataaaattttgggtgatttcttttaatttaaaaaatttatttatttttatttttattttatgtatatgcatgtttgttcaccacacacatgcagtacctatggaagccaaaagagggcattggatttttttggagtagtaattacagacttttttttagaaccatgtgggtgccaggaatggaacctaggtcctctgcaagagcagtcagtacttctaactactgaaccatctctctaccctgaaaattattttttaacaatggactatataaataagtcatggttcattgatagcttagactactgaattatgtagaagaatgaggtagctttctgtatattggtaaggagagatttcttcacgatcttaatttagaaaacatcaagatgtataagacaggagaaatgatatttatcttattttcttgagcacgctgcagaaactacaaggacttgaaaccagttgaataaatacttgttcacttatgtttgaggttgggtaagagttgggaagaactgtggctagagagagaattggagaacattttttactgtaggtgtgtttgtagaaatcatctcatgctatgggcacatcagccactgagaatatgtttgtaaaataaatgtgaaggggatatagaattaataagggtaaaaatgtattttttagatgaattacaggttattgactgggaggttaacagtgacaaagaagatcctggtgggcctagtgagtgtgaagatgataagggtaccctggacatctcagattgtgattcctgtgcaagtctgacaagtgatgacaggctatgtgagccttctgaggtaagaacagattgtttaaaaatctattattgttcttataacattggtaattgtaacttaggtgacaacacatgttgacaagaatgtagaggaagagaaacactcttccattgcttgtgggtacaatcacaaactggcacaaccactctggaaatcaatctggaggttcctccgaaaattggaaatatatctacctgaagacccagctataccactcttaggcatagtcccagaagatgccccaccatgctacaggggcaagtgttacactatgttcatagcagccttgtttgtgatagccagaagctggaaccaacccagacgtcccacaatagaagaatggatatagaaaatgtggctcatttacacaatgcaatactacttaggtattaagaacgaggacatcatgagttttgcaggcatatggatgaaactaggggagagggagaggaaaaggggaacatgattaggtattgggggtgggggaacaggagagaaaccctgggaaccatcagaatggacagaaatatgcaacctctggaggggcaggtgggggaccctctagaatgtaccagagacctgggaggtgagagactctcaggattcaaagggaggaacctttgatgaaatgccaacagtggggagagggaactcatatactccacctccagtagaaagacagggcatcaagtggagagatggagttgccaacccacactcaaaaactctgacccagaatgtccctgtctaaaagaactgcagggacaaaaattgagaaaagcctgagggaaaggcagtcccgtgacttgggatccatctcagggggtgaggggctccaaggcctgacaacatttttttttgcctctttggttttttttagttctttgtataatataatatcaagaatttgatattaatcctttgtcagatgtatacctggcaaagattttctcccattctgtgggattaaatttcacccatttaattgtttctttagttgtacagaatccattttgacaagtctcacctgccagttcttggacttaattcttggatacaaggaatcctattcagaaaatcttttcttgcaccaatatcatgtaggatactcactgtattttcttctagaaattttagtgtttcagagttcacatttaggtgtttgatgcatttggagtcagtttttgtgcagggtaattttggtaggtatggacctcatttcattcttttgcatgtagacaacctgtttttccagcaccatttgcagaagatgcttttttccttatagttttggcatctttgtaaaatattaaattgctgaagttatgtatactattgtcaggatctttgattttgttccaatggtctaccacccttgtcttttgattggagaattgaggtcttttacatttaaagatgtttttgaaaagtgtattgatggcaatcattgtatttttgatttttggtggtgttgcttgtgttctcagtggtactttttgtttataataagttacacctttttctttctcctattactgggctgtgtttattcctctcttcagtttgataaattcctcctgtatttttgttagagataaagatattgctctgtagatactttttaaaagactttatattgtggaaagttctgtgtgtgtcagctatgacagttttgcctggtatagtaatctagattggttttcatggtattttatacttgggagtgcattgcttcaggttctgctggctttaagagtttccactgaaaaatctgcagttactgtgattggttttcctatatatggggcttatgtttcttttcttgaggctttcaatactctttctttgttttgtattttgctgttttaactatgatatgctatggggattttcttttctggtcttgcctatgtggtgttctatgtgttccttgtaactgtatggacttgtctttcttaagtttatagaagttttcttccatgtttttgttaaagatctggtctaggccattaacttgaatacgtctacatttattgtaataattctaactttttttagtttttttttgttttgttttggtttgtttgtttgtttttgctttcatgatgtgccacattctttcctgactttacttttttttccatattctttgcttatttcatctagatcatctnnnnnnnnnnnnnnnnnnnnnnnnnnnnnnnnnnnnnnnnnnnnnnnnnnnnnnnnnnnnnnnnnnnnnnnnnnnnnnnnnnnnnnnnnnnnnnnnnnnnnnnnnnnnnnnnnnnnnnnnnnnnnnnnnnnnnnnnnnnnnnnnnnnnnnnnnnnnnnnnnnnnnnnnnnnnnnnnnnnnnnnnnnnnnnnnnnnnnnnnnnnnnnnnnnnnnnnnnnnnnnnnnnnnnnnnnnnnnnnnnnnnnnnnnnnnnnnnnnnnnnnnnnnnnnnnnnnnnnnnnnnnnnnnnnnnnnnnnnnnnnnnnnnnnnnnnnnnnnnnnnnnnnnnnnnnnnnnnnnnnnnnnnnnnnnnnnnnnnnnnnnnnnnnnnnnnnnnnnnnnnnnnnnnnnnnnnncccaagttctgggattaaaggcatgcgccaccactgcctagctataatttgccttttacttgatgtgtgaacactgggtcttcttaccagcaccaggaccacaatgtatataggtttcatgatatagctatgggggcagaatggctgtggcacatagatcaggggcaggaagctcagatcctggacctgctgcagcccaggatgacagtggctcagcatgtatatagctgagcatgctctgggcagggcagagcctcagtgtcagaaagggcaattgtgttgtaaaccggcctgcagcctacttgaacagggtacacctgggaggcaggttggggctgaaaaagacttagacggtgagagagattaatggagaccaagacacgattttgttcaaggcccgccagtttactaagagagtgtgcttataagggggaaggcccacccccctccagtccactcttggtgtctggagccagcctgtaggtgacgggcaggaatggttgttcctctggaatatctcaggggcatctcagcaggtagcagtgtcctggagagagcagtggcaggtgacagagcaatagagccatctaggtcggaaggctccaccctaggtaatctccttcttagtggcagcaaggtcaaagtctggatctgcctgcttgaggcttggggagcctacaaattagactctgctgttataagtttataaactataaaactaggttataatgagagatctttatatatagctactataatactaatttctgtctgaatagagtagtggtgaatttcataagtttaagtgtattttgctacttttctttgtttgtttgtttcttttttttttttttcttataaaaaacaacatttaattggagctggcttacagattcagaggttcagtctattaccatcaaggtgggaacatggtagcatccaggcaggcatggtgcagaaggggatgagagttctgtgtcttcatccaaaggctgctagtggaagactccttttctttgtttcttgtttaaaaatttatttaatgtttatgaagttttcagtcttccttcttttatttctagcttaattttatgttccaaaagttagtttggtgttctttcaatcttacacagaagtgtagagcagtggttctcaacctgtgggttgtgacccctttaagggtcccaaatcaaatatcctgcatatcagatatttacattatgattcataacagtaacaattacaattatgaagtagcaatgaaagtaattttatggttgggtgcctacaacatgaggaactgtattaaagtttgcagcattaggaagggtaagaaccccttgtatagagacttatgttgtagtttaatgtgttttggtcaatgatatcatgctttcggtggggcagcacagtggccacttagtcgtcccctggtgcgcaacagagctgacatcactggtagcttcctgttgggtttttctctgggtcttactcttgcttctctctgttttttccctccaatattttggtcttattgttgcatgaagctgttcaaggagttgggaatataatgttgagctagaaaaaagacagctgccctcccgacaagggcaatgtcataggttaaatttactgcacaataagtaagaacacatgtatgtaaacaaataaagcagcagcaacttcttaatgcagttcagttataaattttcttcattatttgcctcatggtctagtctatcattaaagtgggatacctggcccacacccaggtctacaattctttgggtagtccatgaatattgtttagtcccagtggccctttggacccacaattttttcctggagactgacacatcagcttggaggaggaccaagtattgggcccaattgtccgacaagaattgggtggatttcccttttactttcaaggttaccccgggctgggggagggggtctgagccctgtcctccctagttgctgtctttccccagggctaacactttcaccatttggggatgcttttcccaaggcctggaatttcccacctctggcttccttttgttggggcactcttgggctcagtggcccctctccttgcaatatgcacattggttattttcaaggggctttctgtctttctttggttgggggtctctcttctttgctttccctaattaccatagccaagattctctgtaaattccttccttgtcgcttttcttttttcttctctgctttccctaattaccatagccaagattctctgtaaattccttccttgtcgcttttcttttttcatcttcttcctttctctttctctgctccttttcctcctctgtctccctgtaatggtagactttctcagcaaccttcactaaatccttcaacaatttatcctgtccctctagtctcagaagctttttcctgatatctctactagcctggtctataaaagccatagtcacagtagctttgtgctcctcgctgctgggatcatagggtgtatattgaaggaatgcctctatgagctgctctagaaaggcagcaggagactcatctgatccctgtctaacgtcatgtatcttggtcaaatttgtggacctcagggcagctgtcttgagacctgtagatagagattggtggtagatcttaaagtactgaattaaagtcccaatcaggttaggttgaagggaattctgtgttaataactgctgggttttcctagggagctcctgtgtctgaggacacattcctttggacctcgttgaggatcctttctctctctgtagtggtaaagaggtaggctgatgggtaaataggatagtttcaaagagattaatcaaacccttgggattatctgagaaagggggatgctgagactttcacttgcataggtcagcagatgagaccacccaatattgcatagcctgattgccctcattatctagaggtctatatgtcctcagcgggaaagccaccatggtatcaggggaggtagctctctggctttgggtccccctggtgggaccgggaagttgggggtctcctcctgctcctccttctggtaaaggcggcggtggggggaggtacaacagccccagttctatatggagcaaggataccagagctggtgttggcacttatggaggatgagggtctaggaacaacaggtctgctgtcaaagggtcttggaggattgacttctcagatctggatccctcctcccatggttcctatttcctgatggccggaacctttgaggtgtgttttggggaaagaaaggctttcatccatggagggtggggggtgggttggaggggtcctccactagattcttccaagttattatatagggtacctggttagggtgaccacatggttcctgtctaaaaagcttccttcaactgccctgatgacaagcaagtcgaagggctctgtggtgccaaaggcaggccactctgaggaacatagggtgactaattttcccttgtttactacaacagacaggttctctcctctttccttaacttccttacaatatgctattaagatattcagcagggtagactcagtctgttccatgtccaaaaatattgtcagtccaactccaagaacacagaatgaaatatccaacaaacatagaaaccatggtataacaacaaacacagaaaccgaaccctccaagactttaggagttgaattagagtgtgactcagctggaattggctgcctgctatatccgcatgctcagaagggaggagagtccttctgactccctccagggagtttgagtatcttccagacttcccacaggaccgacaatgtgcccctgttaattgctgccctattcagtagccctcttgctcatgagccaaagtgaaagtaaaaaacaaacaaacaaacaaacaaacaaacaaacaaccccagcagtactcactcactcttcacacttaagacactcagacttgagcttgagcctggtcctctgatctgggtggtctcaagtaccactcttggggggtgggaggagtgtcagatcccagacgagcccccagatgtaaagccccagagggtctttacttgcttggagacccctgagtgagacattgagactcagattggtgcaaaagcaagaggtttatttttcctgcgcactgggatcaaccttcagcaatctctcaagggatgagaggtgatccccattctaacttacaaacaccttttatacattttttagagggcagattacattggtgatggctggccttttgcttatttgcttatcagatcatcctgggagagtatctttgtttcccagagggcccagatggccttcatccagtacattttatggtttttctgacaaatgtttagtcagagtcatttctatgaaattgtctgtggggcctgagaatataaatctctcccttggggcctaacaccctttcctggagccatctcagggttggatcaaaattgcttaatcttatcgatctcaaataagagacataaaacctttatatttttaattagtcttgtagcactagaactgggcaggtatcagccctctgtgctgttttgtctacttccctgtcaataaccctgaaatataactttctgtgttccttctggactgctcttactccaattggcttgttctcatagtcatgttctcaccacccacctaccttatggtgtctctccttcctcctctctccttccctagggtctctgcctcagaactcaagtctgggaaccgaagctctgccttacactcttctgcccagctacaggctacaggcatctttattcaaccagtagttttaaactaaggagcaaggttgcatatcatcttgtggtatacatgagaatctccttgtccttgaagcaaccagagccaatatttagtattacaatacacagcaacagaccaaacttcaacatgcaactttttatgtgtgtgcacttgtgccagtgacatagtgttctgctgagttgttaattggtgaagacatctgacttcttcacagtcaggattagggttattccaataagttccagtacttattctgatatagttgggaatgctcctcttgcttttacatgtgaggtagtctagggaatgaatcgttttaaaacaagcttattagtatgtttgattttcatgattacaattttttcttcttgtatggctctggtagagggcttgttgcttacattcttggttacgtgacttagcatgctcaaattggtttaaccattgctgaattacaatttactgtaggtgctagaaagatgctcagagttaagagcactttctgctcttgcagaggactccagcttagtctttagtacacaggtctggtggctcacaatcacctataatttcagctgtagggtcttagcaagcctgcatgttcagaaaacccatatacaaacagacataattaaaaataaaaagtaaattaactctaccacacactatactgacttgccatttgaggtattattttataacattaaacgaaatctactcagaaagtgttttgctctatttcaaaatttgaaaaattaagttaggaacaagaaaaacagtatttggtaagaagtatatgtctaacatactatgtccatctttcagtattttatttattctttcagtgtaatgaaatgttttccctttgttccccctccccactctaccattctgtctcttttacattagaaacacaagtaaaaaagctcaagggtagacatataaatgacacatgttacacaaatgttctttaagaatatttattttgcatatatgggttattataagtagtacaccagatcctcagaaggttaccttttatttttttctatttaagccagtttttaacctaactaggaagtttctgataatgaaagtggaaaaaaaaaataaaaataaaagaggcttaccttagagttggaatatgtgctttgtttgtttgtttgtgtgtgggggggggcacatgcatgcatgtgtgctagtgtggttaatatctacaatttatcattttttatttattgatttctttctggaagaaattcatctcttcttaaccagaattatcaccttgttaatgactgcaaagcagagttcaatgctttatgatggagagttttttctgttaacattttttttttgttacacacacaatatatgcacatatacatgaagcaaataaacctaaatatgtattttatatattataatttgataaatacattaagtatttaaaaccaacccattgtttaaaagtgatatagaacttttcctttggaacgattttgatttttttctacatgggttatataaactgggtatcaagacgtcagtgatatttgaagaaacctatcttcccattaaatcttttttttaaacattttttattagatattttcttcatttacaattcaaatgctatcccaaaagtcccctatagcctccccctgcccccagtaaatcttttactctctatatccttccatataagttgtaggtgtagactatggtctggaactacacagtagttacagctttcatttgtatgtatatacccaatgtgttatataatatgttgggtactatagactcttttgcacagtgttccctcattcagtttccagagtaactctgttgaaatgaatatcactgtgtttattttgcatgtgagatttacttggccatatctcaaataatagaaatatgccccaaataactttgcttgttagggtcatttgtggtggtcatctagacagttttactaactgtctaactcatgtaagattttcttaaaggagtaatatttaagagaaagcaataaagggcagtctgaatttactatttaggtctataagggaacagataacttactttgctagcttgcttgtcatcatctacttgcgtaggaaaaccttacatctaggttttggcacactgtggtatttggctctcatggagggaaaatcattccactgtgtcctcacttttaaggtacctgttagaacttgctatacttgtttggcctttgtgggaggctgtatgcagcattctgtctggtggatatctttcctttggtttacttgagaggcctgccagattctgcccatggagagcagagtaatgggtgtcagacgattggggaaaaaaacatatttgcttgaatcaaatttctcacttgtcttgtgtttttacttctatcatttttttgtggtagtgggttacattattatacaatgaaacaagactgcctttactttcatttgtgtataatatttagttttttttattgaacatttttagaaggaaaatccaatggatctttaaaaaactttttattggttctttctgagtttcacatcatgcactccaaccccactcatctctcagtccctttgtacttaccctctgcccttgtcacctcctcctaaagaaaaacaaaacaaaaataaaatataaacaaaagaaaacaaagtttagaaaacatcttgtcatggacactgtagtgtgttacagtgtgtcccacaatatacacttctgtccacatgtttttgcttgcagatgtttatttcattgaatcattggtctgcttggaggctatcagtactggacactatcagtattggatcttcactggcactcctcttagatatcttgttattgccctgggttgtgagttcctgcagctttggatcagtaggactagcttattcacacactctagcagttcatctatgaggtagatgctggagtaggctaactcaaagccctggatctgggcattggtggtaggtgacttcctcagcttgacagctctcctgcatctgtaccactagggggagctgtccagcattacttgagcgagttcacacagtgctgccaatgacaaggggcagagtaagctcttaggttctcatgcccctgaacagctcatcttcaaccataggactagagacagctctactcttgtgctccgttcacccatctgcctaccacatacttatactttgtagtggctcccactgcaggaagaccatgttgctggtctctgggtgtcttcctctgcccatgccactggggcccctccctgttcctaagctaacctgtgtacaataaaccatttctgtaaataaatgctttgagtttcacatataagaaaaacagcctaaaatctgaaattagagttctgaaaaaatttagacaagggaatagaaaggaaagactttatgtatgttaacgatgtaatttcttttcctttctttttttgttttgttttgttttgttttgagacagggtttctctgtgtatccctggctgtcctggaactcactttgtagaccaggctggcctcgaactcagaaatccgcctgcctctgccacccgagtgctgggattaaaggcctgcgtcaccacgcccagcaacgatgtaatattttaatgcttcatgaaagtcagaaaatagtaaagagaactgaagaagatatgtttatttgttattacagcaggtttgtgtgtgttcgggtcctaaaaaagtaatttctatttatttgctatttagcttcctctcgcgttctctctctctctctctctctctctctctctctctctctctctctctctctccctcttcctttctctctgcctctctctcctcctccctccctcccccacccccccattaattatctgtagctgtccagcagccatggagaactgggtacacttgaaaggaaggctgggaatgaaatagcactgcgggcgagaaaagaatgaagccaagacaaagatttcttatcatggctcaaaatttcagctctgagtttttataggcaaaagccaaaaaccaatccctttgtttcagctggattctgttgctttgtttcagctagattgagttgcaaagtaaactcagtaagtggtcagctccttaaggctccataggaaatgcaaatgtggcaaggccaggccctgactccagctgcattgttaaaccagctgaagtttgtttagcctattcaaggctgggggaagggcacaattattccacatacctttcttatttcatagcttatattttcatcaagttgtgatcagtggcatatgattgtaatcctagcatttaggatgctgaggcaggagtatcacagattaaaggcaagcctgagacacagtgttagtttgtggttagcctggacttagagggatcctctcttggaaaacaacagtagcagtagcagcagcaactgcagcagcagcaactgcagcagcagcagcagcaacagcaacaacaacaataacaacaacaacaacaacaagaactaaaaaggcaacaacttagctttccctctctcttttagatataataaatttacagtggtttcctagtgacccaatttccagcagtgtcaggagacactgtataacaccaggtttccttaaggctaaaatttttaatcatcctcatagcaatagtgtgaatagaagattaagatgtaaagtcatattgtcgttccctgtaaattgttttaagcatggaatggcattggcatatctagttagaatttgtttctcaactcaagattatttacctgatcattgtgatacttccaaaggaatttgcgtgagtgtgtgtgtgtgtgtgtgtgtgtgcgcaattgcaatttatttgcataaaatgtgtttcttgttgtgtctttagtcttgatgatatttacacttaggaatttaggatatgagatttgtatatatgcacatcccactaagttttaaaatagcacataattacaatattttgtgaggtctttggatagagataattggtattaacattttttacttctgtttttttcctttttttaattagatattttctttatttacatttcaaatgtcatcccctttaatggtttcccctctgaaaatcccctatcccatccctctccccctgctcaccaacccaaccgctcccgtttccctttcctggcattcccttacactggggcattgaaccttcacaagaccaagtctctcctcccattgatgtccaacagggccacccaccctctgttacgtatgcagctggagccataggtccctacatgtgtactctttgtttggtgatttagtccctgggagctctggggatactactggttggttcacattgtttctcctatggggctacaagctccttcagctccttcgtcctttctctagctcctctattggggaccttgtgctcagtcaaatggttggctaagagtttccacctctgtatttgtcaggcgctgacagattctctcaggagacagctatatcaggctcctgttagcaagcacttgttggcatccacaatagtgtcttggtttggtgactgtatatgggatggatccccaggtggggcagtctctggatggtctttccttcagtctctgctctctgtatctcctcccatggtattctgttcccccttctaagaaggactgaagtacccacactttggtcttccttcttgagtttcatttgatctgaattatatcttggatattccgagcttttgggctaatatccacttctcagtgagtgtataccatgtatgttcttttgtgattgggttacctcactaaggatgatattttgtagttccatccacttgcctaagaatttcatgaagtcattgttttaaatagctgagtagtattcctttgtgtaaatgtaccatattttatgcatcctttcttctgttaaggaatatcttggttatttccagcttctggctattataaatgaggctgctatgaacattgtggagcatatgtccttattacatgttgtaacatcttctgggtatatgcccaggagtgatattgctggatcttccggtagtactatgtccagttttctgaggaaccaccaaactgatttccagagtgattgtatcagcttgcagtcccaccatgagtagagaagtgtttttctttcttcacatcctttcgtgcatctgttttgtttatttgtttgtttgtttttgagatagggtttctctgtgtaggtctggctgtcctggaattcactctgtagaccaggctggcctcaaactcagaaatcagcctgcctctgcctcccgggtgctaggattgaagccatgttcccacccagagcgagcatctgttgtaacttgagtttttgatcttagccattctgacaggagtgaggtggaatctcagggttgttttatttgcatttccctgatgactaaggatgttgaacatttctttaggtgattctcagctattcagtattcttcatttgagaattctttggttagctgtgtaccccattttttaaatagtgtcatttggttctctggagtctaacttcttgagttctttgtatatattggatattagccctctctcagaagtagggttggtaaagaactgttcccaatttgtcggttgtgattttgtcctattgacagtgtcctttgccttatagaagctttgtacttttatgaggtcccatttgtcaattcttgatcttagagcataagctattgttgttttgttcaggaaaatttcccctgtgcccatgtgcttgtgggtcttccccactttcttttctcttagtttcagtgtatttggttttatgtggaggtcacttgaacttgagctatgaacaaggagataagaatggatcaattcactttcttctacatgttgatcaccagttgaaccagcaccatttgttgaaaatgctgccttttttccactggatggttttagcccctttgtcaaagatcaagtgactgtgggttcatttctgggtcttcaattctattccattgatcaatctgcctgtcactgtatatatctgcctatcactgtatcaataccatgcagtttttgctctgtagtacagcttgaggtccgggatactgattccccaagaagttcttttattgttgataatagtttccactctcctgggtttttggttattccagataaatttgagaattactctctttctttctttctttttctttttttgaatgtctggtttattgaagaggctgtcagagccccaccacaaaggaggctgggagctgggaggctaagccaagcagggtggcactccagacaattgaaggtaaaaaaggaactcagctgaacacccagagcagcaataaggacaggctgcgcacaattggccaggccccatgaagcccagctccactaatggcatagaaccttgccacttcctctttggggttgccttgggctgggtctacccacatctgaatgcagcagctgctccctctgctgtagttgctgagcttgtaggagtggctccagatttcctcacacagagcagcaaatgtggggaagtaagactgtgaagggaaggcaggaggctcccacaggaagctcattatgctccgaggaccagttccttcccttgtgccagttgctcttgcaggtaaaagagctctggcagtcctcccaccactgctgacagtcctctttcacaggggaacgtcaaggatccgctctttgcaccagttctggtccacctactgtatccagggtctcaagttctgggaacactcatagaggcaggtgtcttggataaagtgccctttgcattccaatgtcatagttccgcagtggttccattcctctgttgagggacatctgggttctttccagcttctggctattataaataaggctgctatgaacatagtggagcatgtgtccttcttaccagttggaacatcttctggatatatgcccaggagaggtattgcgggatcctccggtagtactatgtccaattttctgaggaaccgccagactgatttccagagtggttatacaagcttgcaatcccaccaacaatggaggagcgttcctctttctccacatccttgccagcatctgctgtcacctgaattttttacctcagccattctggctggtgtgaggtggaatctcagggttgttttgatttgtatttccctgatgatgaaggatgctgaacatttttttcaggtgcttctcagccattcagtattgctcaggtgagaattctttgtttacctctgagccccattttttaatgggattatttgattttctggagtccaccttcttgagttttttatatatattggatattagtcccctatctgatttaggattgctaaagatcctttcccaatctgttggtggtctttttgtcttgttgacagtgtcttttgccttacagaggctttgcaattttatgaggtcccatttgtccattctcggatcttacagcacgagccattgatgttctattcaggaatttttcccctgtgcccatatcttccaggcttttccacactttctcctctataagtttcagtgtctggttttatgtggagttccttgatccacttagatttgaccttagtacatggagataggaatggatcaatttgcattcttctacatgataattgccagttgtgccagcaccatttgttgaaaatgctgtcttttttccactggatggttttagctcccttgtcaaagatcaagtgaccataggtgtgtgggttcatttctgggtcttcaattctattccattggtctacttgtctgtcgctataccagtacaatccagtttttatcacaattgctctctagtacagctttaggtcaggcatggtgattccaccagaggttcttttatccttgagaagagtttttgctatcctaggttttttgttattccagatgaatttgcagactgccctttctaattctttgaagaattgagttggaattttgatgggaattactttgaatctgtagattgcttttggcaagatagccatttttactatattgatcctgccaatccatgagcatgggagatcattccatcttctgagatcttctttaatttctttcttcagagacttgaagttcttatcatacagatctttcacttccttagttagagtcacgccaatgtattttatattatttgtgactattgagaagggtgttgtttccctaatttctttctcagcctgtttatcctttgtgtacagaaaggccattgacttgtttgagttaattttatatccagctacttcattgaagctgtttatcaggcttaggagttctctggtggaatttttagggtcacttatatatactatcatatcatctgcaaaaagtgatattttgacttcttcccttccaatttgtatccccttgatctcctttttttgtctaattgctctggctaggacttcaagtacaatgttgaataggtagggtgagagtggacagccttgtctagtccctgattttagtgggattgcttccagcttctcaccatttactttgatgttggctactggtttggtgtagattgcttttatcatgtttaggtatgggccttgaattcctgatctttccaagacttttatcatgaatgggtgttggattttgtcaaatgctttctcagcatctaaggagatgatcatgtggtttttgtctttgagtttgtttatatactggattatgttgatggatttccatatattgaaccatccctgcatccctgggatgaaatctacttggtcaggatgaatgattgttttgatgtgttcttggatttggttagagataattttattgagtatttttgcaacgatattcataagggcaattagtctgatgttctctatctttgttgggtcgttctatggtttaggtatcagagtaattgtggcttcatagaatgaattgggtagagtaccttctgtttctattttgtggattagtttgagaagaactggaattagattgtctttgaaggtctgatagaactctgtactaaacccatctggtcctgagctttttttttggttgggagactattgatgactgcttctatttctttaggggatataggactgtttaggccatttacctgatccttacttaactttgctacgtggtatctgcttagaaatttgtccatttcatccaggttttcctgttttgttgagtatagccttttgtaaaaggatctgatggtgttttggatttcttcaggatctgttgttatgtctcttttttcatttctgattttgttaattaggattttgtccctttgccctctagtgagtctggctaagggtttatctatcttgttgattattctcaaagaaccagctcctcaattggttgattctttgaatagttcttcttgtttccacttggttgattttgcccttgtgtttgattatttcctgctgtctactcctcttgggtgaatttgcttccttttgttctagagcttttaggtgtgttatcaagtggctagtgtgtgctctctctagtttctttttggaggcactcaaagctatgagttttcctcttagaaatgctttcactgtgtcccataagtttgggtatattgtggcttcattttcattaaactctaaaaagtctttaatttctttctttattccttccttgactaaggtattattgaggagaatgttgttcagtttccacatgaatgttggccttctattatttatgttgttattgaagatcagccttagtccatggtgatctgataggatgcatgggacaatttcaacatttttgtatctgttgaggcctgttttgtgaccaattatatggtcagtttttgagaaggtaccatgaggtgctgtaaagaagttatatccttttgttttagaataaaatgttctgtagatatctattaaatcaatttgtttcataacttctgttagtttccatgtgtctctgtttagtttctgtttccctgatctgtccattgatgcaagtggtgtgttgaagtctcccactattattgtgtgaggtgcaatgtgtgctttgagctttactaaagtgtctttaatgaatgtggctgcccttgcatttggagcatagatattcagaattgagagttcctcttggaagagtttacctttgatgtgtatgaagtacccctccttgtgttttttgataactttgggttagaagttgattttattcgatattagaatggctactccagcttgtttcttcagaccatttgcttggaaaattgttttccagcctttcattctgaggtagtgtttgtgtaagcagcaaaatgttgggtcctgtgttttgtagccagtctgttagtctttgtctttttattggggaattgagtccattgatattaagagatattaaggaaaagtaattgttgcttcatattatttttgttgttagagttggcattctgttcttgtggctgttttctttaggtttgttgaaggattacattcttgctttttctagggcgtagtttctgtccttttatttatttatttatttatttatttatttatttatttttttctgttattatcctttgaagggctggattcgtgaaaagataattgtgtgaattttttttgtcatggaatactttggtttctccatctatggtaattgagagtttggccgggtatagtagcctgggctggcatttgtgttttcttagtgtctgtataacatctgtccaggctcttctggctttcatagtctctggtgaaaagtctggagtaatcctaataggcccgcctttatatgttacttgacctttttcccttgctgcttttaatattttgtctgtatttagtgcatttgttgttctgattattatgtgtcgggagaaatttcttttctggttcagtctatttggagttctgtaggcttcttgtatgttcatgggcatctctttaggtttgggaagttttcttctataattttgttgaagatatttgttggccctttaagttgaaaatcttcattctcatctcctattatccgtaggtttggtcttctcattgtgtcctggatttcctggatgttttgagttaggatcttttcgcatttctgattttgttaattaggatactgtctttgtgccctctgattagtctgactaagtgtttatctatcttgttgagtttctcaatgaagcagctcctggttttgttgattcttttatttcagccctgagtttgattatttcctgctgtctactccttttgggtgtatttacttctttttgttctggagctttccagtatgctgttaaactactagtgtatgctctctccatattctttttggagtcactcagagctatgagttttcctcttagcattgctttcattgtgtcccatcagtttgggtatgttgtaccttcattttcattaaattctaaaacgtcttttttttttttttttttttttaggtttttgagacagggtttctctgtatagccctggctgttctggaactcactctgtagaccaggctggccttgaactcagaaatctgcctgcctctgcctcccaagtgctgggattaaaggcatgtgctaccacacccagctcagaagtctttattattttactttttccttgatcaagttatcattgagtgagcgttgttcagcttccatgtgcatgtgggctttctgttgtttttgttgctattgaagaccagccttaatccgtagtgacttgagaggaggcatgggattatttcagtcttcttatatctgttgaagtctgttttgtgaccgattatatggtcaatatttgagaaggtaccatgaggtgcagagaagaagatatattcttttgatttaggatgaagtgttctatagatatttgttaaatccatttggtccattacttctgttagtttcactgtgtctctgtttagtttctgtttccattatctgtccattgatgagagtggggtgttgaagtctcccattattattgtatgcggtgaaatgtgtgctttgagctttagtaatgtttctttaatgaatgtggatgcccttgtatatttggagcatagatgttcagaattgagagttcatcttggtagatttaacctttgatgagtaagtagtgtccctccttttctttttttgataactttaagttgaaagtggattatattagatattagaatggctcctctagcttgttcttgggactatttgcttggaaaattgttttccagccttttactctgaagtagtatctgtctttgtctctgaggtgggtttcctgtatgcagcaaaatgttgattcctgttttcatagcctgtctgttagtctctgtatttttattggggaattgagtcagttgatgttaagagatattatgaatagtgattgttgctttctgtttttttttttttttccactttcatctcgtttttagtttcttgatctatacctatacttcccaaatatatgtacacatatataagagataaaagcataccctatttatatatgtacacatatatatgagctagaatatggtatttgtgtgagcttggcttattttttttttttccattttttattaggtatttaactcatttacatttccaatgctataccaaaagtcccccatatccacccacccccactcccctgcccacccactccccctttttggccctggtgttcccctgtactggggcatataaagtttgcaagtccaatgggcctctctttccagtgatggccgactaggccatcttttgatatatatgcagctagagtcaagagctccggggtactggttatttcataatgttgttccacctatagggttgcagatccctttagctccttggctactttctctagctcctccattgggagccctatgatccatccattagctgactgtgagcatccacttctgtgtttgctaggccccggcatagtctcacaagagacagctacatctgggtcctttcaataaaatcttgctagtgtatgcaatggtgtcagcgtttggatgctgattatggggtggatccctggatatggcagtctctacatggtccatcctttcatctcagctccaaactttggctctgtaactccttccatgggtgtgttttttttttttaatgttatttttatgtttgtgtggttatcttcttccagtttgttgaaaaattactttcttgctttttctaggttgtagtttccttcctttcttgtgttggtgttttccatctattatcctttgtagggattgatttatggaaagatacggtgtaaatttggttttgtcatggaatatcttggtttctccacccatggtaattgagagatttgctgggtatagtagcctgggctggcatttgttttctcttatggtttgtatgacacctgcccaggatgttctagctttcatagtctctgttgagaagtcttgtgtaattctgatacgtctgcctttatatgttacttgacctttttcccttactgcttttaatattctttctttgttttgtgtattttatgttttgattattatgtgacaggtggaatttcttttctggtccaatctattatttggagttctgtaggcttcttgtatgttcatgggcatctttttctttcggctaaggaagttttcttgtataattttgttgatatttactggctctttaagttgggaattttcactctcttctatacctattctctccttaggtttggtcttctcattgtgtcctagattttatgaatgttttgggttaggatctttttgcattttgcattttgcatttcctttgactgttgtgtcaatgttttcgatggaatcttctgttcctgagattctctcttctatctcttgtattctgttggtgatgcttacatctatgactcctgatctctttcgtagattttctgtttctagggttgtctccctttgtgatttctttattgtttctatttccctttttatatcttaaatggttttgttcagttccttctcctgttttgttgtgttttcctgtaattcctttagggatttttgtgtttcctctttcaagtctcctatctgtttacttgtgttctcttgtatttctttcttttttttaaacatattttaagatttatttatttatttattatatataagtatactgtaactgtcttcagactctccagaagagggagtcagatctcattagggttggttgtgagccaccatgtggttgatggggtttaaactcaggaccttcagaagagcagtaagtgctcttaaccactgagctatctctccagccctctctcgtatttctttaatggagttgtttatgtctttctttcttttttttttccatttttattaggtatttagctcatttacatttccaatgctaaccaaaagtcccccatacccatccacccccactcccctgcccacccactccccctttttggccctggcgttcccctgtactggggcatataaagtttgcgtgcccaatgggcctctctttccagtgatggccgactaggccatcttttgatacatatgcagctagagtcaagagctccggggtactggttagttcataatgttgttccacctatagggttgcagatccctttagctccttgggtactttctctagctcctccattgggagccctgtgatccatccattagctgactgtgagcatccacttctgtgtttgctaggccccggcatagtctcacaagagacagctacatctgggtcctttcgataaaatcttgctagtgtatgcaatggtgtcagcgtttggatgctgattatggggtggatccctggatatggcagtctctacatggtccatcctttcatctcagctccaaactttgtctctgtaactccttccatgggtgttttgttcccacttctaaggaggggcattcttaaagtcctctatcgttgtcatgagatgtgatttttaaatcagtgtcttccttttctggtgtgttgggatagccagggctcactgtgctggaagtactgggttctgatgatgcaaagtagccttaatttctgtttcttatgtttttacccttgccttttgccatctgttccctctggtgctgctggtcttgttgtgtctgactgtcgcttgtctgtcctgcaaccctgtgtgtcagtactcctgcgagaacaattttctcctggaggaatttaggtatggagatctgtggtacagggtcagctcttgggtgcagacagaaacagtaggatcctgtctccagctgttccttggttgctttttccttatgtctctgggcaggtccctcttgggtcaggaatttgaagagaagtggtggttttacctgtgctcacaggtgtgtaggcactcctgggagaccacctctttcctggcagtatttgtgtatgtagctctgtctcacaggatcagctctgggcacagacctctcaccaggtagctcctcggttcttgtgtcctgaatgttctgggcaggttcctctgagcaacagtggtggtcctactagtggtcctacttgtgctcataggcctgtccgaactcgtaggaggcttgctctctccaggtgctatttggctatggaaccctgtggcagaggattgcctccagttgcagatggaaactggaatacttctgtcccagtccactcctaggttcctgtgtcctgagagttccaggggtttcctctgagcagcagtggtgatcctatgctcacaggtttgtctgcacttctggaaggatagctctttcctagcacctcctgggtatggagccctgtggccagttttaacatttttgtaaaacttattttcatgttaaggtaccagctctagtgtaactaggatttcatagacctctggtgataggagtgagccgaaatctcaacccattttaaatctttacacatctaaggatagatatgtttttttaacactagtctgtatattaccagtgagaattataaatcttatcctctgtttctattgtattgggacaaaaccctttatttcacattttgactaggtcattcttttgcaaaacaccttggattggtgcctctttttgggactcccaagtctgtatttttctaagtaagccagagccagcctttctatttgttcatctcttaagggtcaagtcggggaaaaagagctgatttaaacagtgtgctaattctatgtaatgcttttctttcaggacaaggatagtgggttgatttgaaaattgtctccagagttctagaatatcaacttacctaaccattggtcactcaaaagcttgtcttataaagttcagtgcatgaagctgtagtaaaaatcatttaaaccccaatataggacttgtgcctgccttgatcatttagttctcagataaaagatacacatagcctttatattctcaatgtgcattaagcagcataatagctgggcagctgcctaccctccatgttgttagaatctatttccccattgataacccaagttattacttattgtgtttcatctgtgctgctcttagctccaattgggcagccctcagggccatgctttcctctctttcaacccatggctgctcctttcttcctcctgcacattcttctttcattccatggtggcgtcttctccctcttcctcctcaggtattctctgcttcaagcccactaagcacaactccacctatgtccctctgccaagttatcgatattgacatctttatttacaaatcacaattaactggggtgtcttgcatgcagactctcttttctttggggtaacctgatttaggagccccaaattagtattagaatataagcagcattagaccaacccactacagcgaggttctcatttatgaaagcagtataataatttctgtatattatctatactttttgttttgagaatatttttgaattatgaaatcatttcaggatatgctactggtttcctcctcctaaatagaggttctcaataaaagcagactcattacagtgctatgttaactggcagtatgcctatggctggacccatgaaggtctggaacaatttactgctctcctttatagatatggaggtactcacttttccagaagagagacagcaagatctagctcatgactctttgctatgtgactggcaatttgcctattattgtgcatgagccaggttgttactgttaaaattgcagtttgctgatcttggaggagtatattctgttcaatctgcttgttactgatcttttaaactatgtaactccatgcttcaaagaagatggtgtagaaaaggaagccagggtcctaagtactcagagtggttctcctgtctctgcagaaggtcatttccagctagctgtgactattcaagaataagatccagtgttcctaggtgccttcaacatcatgaatgctaactattcagggatgtatgtgtattgtcccaatttcttcatgttcacattgtaagactctggggagccttagcttactggggaccccctgagtgaaccacatggagctgaaattgatgcaaaaagcaagaggaatttattgttccagtgcactggggttgtcccagaccccaaggagaggcagagaccccccagcaccagttcagcgagtttttatatggttcccaagggtagaacagagcatcagcaactaggcacactatgattggcggaacagtgcgccctttaaactgattggtctttagggaatgaggtgacaaggtattcctttgtcagaaggtgagccaaggtcagtcttgcaaaatgtgtccctaccttcaggtccattcctgccctgtggtcagagaaatgctaattagcctcttccgaaggggtgagtgtttcatgaccttcccaaagttcctatgctgacctattcaacatcaagttcaaatggagcaaaaatcaaaagtgaaacacttatctgctgtctctcttatgctttcagagctttaaggtgctttctcaggtcttaccctagtttttggaattcttggcctgtaaacattgctatatttgtaatcatgacagagtaaaacccttgttccaacatttaaaataaaaatttgagctcataatataatcacataattttcctctatccaaacattcccatatagccatgttctttctaatttatggacttttttcccactaattattgttacatatggcaataaaccaaaatttttttctgtagtgagaattttacataatttacacatttcttaagtattgttatacttaaaattattgaaataatgagtcatggtgatcaaaacctttaaaaagtgcaactgataaatggattacatgcctataatgatacaaaaatagatagtaaattactagtattgtgatctcataagctttgacttctgttttgccatctctaatatggtagtatttatactacttatatttgtacttatattagtttgtttctcattgcacagagaagtgtctggggggaggccttaaggaaggtttcattatggcctactgtttgaagagatataatctgtcatggtatggaaggcagggtgatgggaccatgtagtgaattgcttctacagtcaggaatcagaggtaaattctggtgtttggctgacctcctattttgggtctttttattcagtctggaaccctattccatgggatggtgacttgcatattgagagtagtattcccttttctgctaaacctcgctggaaacatcctttggttacacccaaagatgaggcccaggcagttcaaatctagtcaggttcaatgtgaagataaactatcatgattcctttagaagtcaccataatatttacattaagttataggatgaaaaatgtttttaaaaataggaataaattattgcttattaaagagttttgttcaagtcaggcatagtgacatatttctattgtctcaacctgtgagggatctgaggcagaacacttgtgttcagaatttcaaggcaaacctaggcaattaaatgagactctgtctctttaaaataacaatgatggcaacaacaacaacaaaaacaaaaccagttcatcatagactgattgcctttatctatctgaatattagttacatagacacagaatgagttcacaaagatgccactttaatggctctgtggtatactctgcttcttaggaaggtctggatggagacagtcattcattgttccagaaaaagttatgaacttggggtgaatgagtctgtttgaggtaaactgaagtgaaaccagatattcaggaaatgtcgagtagagttgtgattctcaaagtttggtttcttagcaattagcagcagtacccaaaagactgctgtgtatctgtgtatattctttgcttacctcaactctctgaactatggggaggagtcctatggagtgctcacaaaaagggacctagcataactgcactctgacccagcaagcacctgaatgagtcagatgcagatatttgcacccaacccatggacagaaacagctgacctctgttgttgaattagggaaggctgaaagaaactgaggactctgtaggaggaccagcagtctcagttagtctggatccctgagatctatccaacacagaaccaccaaacagacagtatacaccagctgatatgaggctcttaacacacatacagtagaggactgccaggtctgtgttcattcatgatgtacctaaccctctagagactggaggccccagggagtttagaggtcaggtggggtgggggttggggacatccacgtgaagacagggggttggggaggaggtatgggatgtggaacagtagcggggctggagggagaggaataaaatatggagtgtaaaaaaataaattaataaaaaaaagaataaaatttaaaaaatatctgatcctttaaactacacttacatatcagactgaaaggaataaaattcaattaaaaaacaaacaaacaaacaaaccaagatctgtgggtgattgttgagaattagtctgctgctatgtattataatgctaaattctgtatgggggtggggggtgtctagttgcctctagtgaattctcactctgccagcttttgttgtgcaaaccttcctccttaatttaaaactattggttgaataaagatgcctacagcctgtatctgggcagaagggggtagacagggtttcagttcctggggctaggattctgaggagagaccagttggggagagccagagaggaggaagaaggaagaataatccagggaggaggtggattgtgagagcctgtctgtgagaccaacctgttggaataggagtggcccaggtggaacatnnnnnnnnnnnnnnnnnnnnttggaataggagtggcccaggtggaacatggcaagatatattttggctttatcgacagagaagtagacaaagtaccacagaagcttgatatctgcccagccctggtgctttttaaggcttattataaatataaagggtttttttgtttgtttgtttggtttttttttttttttttgtcttttatttgagaaccaaatgatctaagctgggatagaaattcccaaattatatttaccgcaacaggtgattatgtttcttgagaattactaggtaaacgaccatgctaaagatcaggaatgtagatgataggactggctggagacaacaagttaagtgaaatgcagggcactgaaggcaggataccagcaagagttgtattttagttgacttcatttgtcccagataacataccttttgtatatcatgaaagccaggagcaaaggacacttagctcccaggaaaatgttgtatattcctggatctctctatgcggcatgtcctttgatataagtcctagagtaaccacagggcctacagaacagtgtttgggagcagaggcatgggtgcaggaacctgttatatagggatacagggcactatgcatttttctacatgtgaatgaggcatactcctttaactgaatacaagaaatggcctgagcagtacagagtgagaggttctttctgagctttaagttgcatcaggttgaagtcctgcaatgataggtgttgtggtgaatattatttggggaattctaccctatctaatatcatttagttcccaaataaaagacactaaacctttatatttataataagccttaaagcaatagagctgggcagatagcaaccctttatgctattttgtctacttccctgtcaataactcagagattatcatttgtcatgttctgcctggactgctcctactccaatagcctggtccttacggccatgtgctcacaatccacctacctcatggtggcttctttcacctcctctctcttctcctctcttgtggttcctgtctcagataccaagctcaggaactgaagcctcacctacatctcttctaccataccacaggctgtagacatttttattaaccaatcatggataacttggaaggcaaggcttatacaacaaaaactggtatatatgaggctctgctcatcttggagcaaccagactttgacacacagaatttagcatttgaataaaagcagcaacagaacaacccactacagatgggaatgtgcacagggtcaaaatgtcccattctgttctgttgcagtgtcactggttagatgtcatgtttgattagactcttctgtgccctttggctaaggcttctctgtatagtatatttctctggtagagtgcctagagtcagccttatcttaaaaatatttcccattgacctttgattactcatatttacttgccaggtgagccaacttcttagcattcttataatggactttgtgtatccaacaggaaatgtatgggatttttactggagattgattctggggccatatttgttctaagatatactaccgccagacggtagtggcacacacctttaatcccagcacttgggaggcagaggcaggcagatttctgagttcgaggccagcctggtctacaaagtgagttccaggacagccagggctatacagagaaaccctgtctcgaaaatacaaaaaaaaaaaaaaagatatactaccactgagatttatctcccagctggaacttgtgttataagtacattggcatcatgcttttctgaggtgaacacaaagaagagaaatacacagtctttgcttttattactctaacaaagtattatcctttaagaaatcagacatttggttattggtgcattttattcattttgcctagaacagaacctgtgtcacttgaaactgactttaaccaattctaaactctcagatgacttgtcctatcctggaaatcaagccaaagttgtaaggagggtgtttcctctagctttcttggttcctttgcttggatgacacacagcagctcttatgtttagatgtgtagctccatattcctcatttgataagtatttgaaaatatgtttaatatgctccaagtgtttgatgatgacatggaaagtatacatcttaccaagtccatttggtgttccatcaagcagtgagaacttcattcacatgccccttatagatagtattttcccagttttccatctaatataaatgaaaatataaattttttggtcttattttcttactttatgcttcttttgttctatgtttttgatatctaaaagaagaaatttcttttttcttttttagaatcttttttccatttatatacttttttttttttggaatcctaagtgtaacttaaatgttaaataaattgatttgaatttatttagttactattatttaaacagttacttcattctcaattagaccagggtagatggcctagtttattaacgtttcttcttctaggtaaagaaagacaaaagattataagaatgagtaaaagagcagaactggagcatatattggattgtgggtatgctgcttagttttttgtcaatctgacaaaaaattgagggaatttcaattgagaaaaggcctcaatcatattggcctaataggcaagtctattgagtactttcatgaattaatgattaatgttggatgatgccacccctgggcaggaggtcttgtgttgtacaagaaagcaggccaagtaaaccagtaagcaacattcctcttggccttgttttagtttctatcttcagattcttacttgagttcctgctctgacttcctttcatgatagagtatcatgggatatgtaacctaaataaggtgctttctctccaagttgcctttagtcatggtgagttttttggggggttggggggtgagggtgggatggggcgtgttaggacaggatttttttgtgtagccttggctttctgggaacttgatatgtaccttccaagtactgggattaaaggtatgtgctgccacatccagatttgattattgagttgtattacagcaatacaacacaaattaggacagtaggcaaaagaagttgtttagcttcccatgtttacaccttaagatgctatgggatattgttagggagagggagagggagtcacagaggtacatatcttacatggtaaagagggagaggtaaaatgcaagtgttaagaacagtagatgccagaacaagttaggtagacttgtcagaacaagaagagattgtggatgaggtcagtgagcagagtctttgtggactttttgggcagaatgtatctgcttgagcagggaactgagcagagactttaggttgggtcaggaagtaaaggatccctgattctgagaatgtgatagtggcatgagattagttggtgtgtttgaggtgttgagtttgagccctgggcgagagaatactactaactgagccctgagataaggcatgttatagctctacctggagagaacatggaactcagtattgggatctttctctctctaggaatgtataggatggtgcaagtgggcataaagacataaagaaagaaaacagcaagaggtcacatcaggggaccagttatttctgatgatcttgttttagaaatgaggactacctgagaatgaagaggaagattgaattattaatatttatcatcagtgaaggaatttcagttccatttgatataaaaagaaaacaataaattacaaataaaatgcccacttgatggctgaaatcctagagtactctctactaggtagtatggcagagatcttagataacgaaagttattaattttttattttgtcatgtgaaattgatatataaatatgtctcagtataaatgtctctggcacatttgcaaagataaatggattaaaactaaaagaaataaaggcatagatgtaagaattacctataatttttgtggttatatcacttcttttcttcccctcctcctctttttttttttttttttttggatattgttttgttttgtttttatttttttgttttttttgagacaagctctctttacatagccatggatgtcgttgaactcactatgtagaccagtctggactcaaatcccactcaggggtagaggagtcgacctcgaggggaaaggggccttagtttttataggccctcagctgggaaaggagaaggggggaattggggatttccagatctaaacaatgtctattctcaagaaatgggtatgggaggggtacaaggaaagagtctggtgcaggtgtagcaactccggattggcccagctgttgttgctggggagattttctgactcttagcaaccaatatcacaaacacctggcagtgaggtgtagcagtgggcacacacctgggttcaaggaacggtcagaacattggcagacacatggattcaaggagtgtccagagcattgtgcacctctatttttctaaatcagtgaagctacttctactaacaatgaaatctattttgccaatttcagggcttctgtgacctattacattctgtcaggatctttcaaagtcacagagatctggctgcctctgcctcttgaatagtgaaattaaaggtcatttgtgtgtatgtgtgtgtgtgtgtgtatgtctgttttgcttaactgtggtagtgaattctacgtgactataacatacccactttctactatgtgtagaaagatttgttgtcttgagttcagtgtagtttactactgtaattatatttttttatatctcacatttggttttcatctacagtggatatgacctaatcccgtgagcctttaggtgtgtgtctagtagtcaggaaatgagagactgaaaataaaactggagttgatactctgtagatggtgcgaggatgaaggaggccccaccatatatgaccgtttcagagcatagagcagacctagcaattagccagtaaattaatgggacttatgtcctattatgccaaagctggccttggaatttggatcattctctagagtctgtgaaggagagctaagcccaatgaatagtttgatatcagttttgtggaatgctgagcagaggaaccactaaagtgaatctcattcctaactacatttcttttttcttttgatttttcgagacagggtttctctgtataggcttggctgtcctgggactcactctgtagaccaggctggccttgaactcagaaatccatctgcctctgcctcccaagtgctgcgattaaaggcgtgcaccaccacacccggcatcctaactacttttctttaagcctttaagtttgtatgaattagccccagctgtagaaaaattaatacagagcttataaacaactgttgaaatgtatagactgcgccttctgtccatacgtccacctgcactctcagaggatttacatgcaagcttccctactccacaacccagcctgactctcaaggaggactgctctaaccagagacacagtgacaaagaaagtctattccaaacaaagtcacaatagacctgctctaaacagagacacagctctgcatgcttcccagaaggcctgctctaacctaggacacaccattctgcctgcctcctgggatacctgctttaattcatgaaacacaggccagctaacaccagagaaaaccagatggtgaaaagcaagcatcagagcataatcaacagaagccaatgcaatatggccccataagaacccagttttcctactactgcaagccctggatattttgacacacctgaagggcaagattctgacctaaattctttctcatgaaggtggtaatggaggcttttatagggaataaaaacaatttctttaaagaactacaggaaaacataatcaaacaggtgaatgtaatgaacaaaatagtacaagacctaaaaatggaaatagaaacaaaaaagaaagtacaaatggagtcaaccctggagatggaaaacctaggaaagaaaccagtaactacagacataaacatcaccaacagaatgcaagagatggaagagagaatctgagacataaaagataaccatagaaaaaattaatatgttggtcaaagaaaatgccaagtgtaaaaagtccaaaacattcaagaaatttgggacagaaggaatagaagaggatgaagattcccagttgaaagggccagaaaacatcttcaacaaaatcatagatgaaaatttccctaacctaaagaaagagatatctgtaagtgcacaagaacacgaaataggttggattagaaaagaaaatatactgccacataataatcaaagcactaaatgtacagaacaaagaaagaatcttaaaagctgcaagggaaaaagataagcaacatataaaggcagaactatcagaattatacctgacttctaagcacagctaaactaactctaacatctagaagattttggacagatgtcttgaagactcttagaagactatagatatcagcccagactactatatccagtaagactctcaatcaccatagaaggaaaaaccaagatattccatgacaaaaccaaatttaaacaatatctttctactaatctagccctacagaggatactagaaggaaactcaacacaaggagggtaacacccaagaaaacataagaaatttatctcacaacaaacccaaaagaagagaatcacacccatatcaatgacaaaataacagtaacgaacagttattgctcattgatatttctcaacatcagtggatttagttcaccagtaaaactatacaggctaaaagactgggaatgtaaataggatccatcattctgctgcatacaagaaacataccttggaaaaaaagatagatagaatctcagagtaaaggtctcaaaaaaggtttttccaaggcaacaattccaagaaacaagctggagtagtcattctaatatctaataaaatagactttcaatcaaaagtaatcaaaagagattgggaaggatacttcatactcatcaaaggaaaaatccaccaagatgaagtctcaattctgaacatatatatgcttcaaattcaaatgcacccacattcataaaagaaacttcacgaaagctcaaaacacacattgaaccccacacaatgatagtgggagacttcaacacaccactcttacgaatagaccagtcattgaaacagaaactaaacagagacatagtgaaactaacaaaaagtatgaatcaaatggatttaacagatacctatagaaccttttaccccaaacaaaagaatctatattcttctcagcatctcatagaaccttctccaaaactaccatataattaaccatgaaacagatctcaccgtatacaagaagattgaaattaccctttcattctatcagatcaacatggactaaggctgaatttcaacaacagaaacaacagaaagtccatatgttggaaactgaacaactctctactcaatgataagttggtcatggaagaaacaaagaaaaaaaattaaaactttctagaattcaatgaaaatgaaggcgtaacatacccaaacttatgggacacactgaaaacagggttaagaggaaattcatagcaccaagtgccttcataaagaaactggagagatctcatattaacaacttcacagcacatttgagagctgtagaacaaaaagaaacagacacaccctagagcagtagaatgcaggacgtagtcaaactcagggctaaaatcaaccaattagaaacaaagagaggggttggggatttagctcagtggtagagcgcttgcctagcaagcgcaaggccctgggttcggtcctcagctctgggaaaaaaaaaaaaaatagaaacaaagagaataattcaaagagtcaacaaaatcaagagctgcttctttcaaaaagtcaacaagactgatgaacccttacccaaagtaactaaaaggtaaagagacagtatccaaattaacaaaatcagaagtgaaaagggagacataacaacaaaacctaaggaaattcaaaaaactatcaggtcttaattcaaaagcctagagttggcaaaactggaaaatctagctgaaatggatgattttatagacaaatactacaggacaaagttaaatcaagatcagacatactgtctaaacagtctcctaacccccaaggaactagaagcagtcattaaaaaaatttcccaactaacaaaagcccaggaccaaattgctttagtgcagaattctaccagactttcaaagaagaggtaataccaatactcctcaaattattcctcaaaatagagtcagaagaaacactatgtattccattctatgaggccacactcaacatgatatataaaccatactaagacccaacaaagaaagagaacttcagattagtttcacttatgaacacctatacaaaaatactcaagaaaattctcacaaactcagtccaagaacacatcaaaaacataattcaccatgatcaagtaggcttaatcccaagatgcacagatggttcaatatatgaatatccatcaatatatatacaaactcataggaaaaaaatcaaatgatcatctcattaggtgctgaaaaaggcttcagtgacacccaacagcccttcatgttaaaaatcttggagagatgaggaactcaaggtacatatctaaacgcaatcaaagcaatatacagcaagccaataaccgacatcaaattatatggagagaaacttgaagcaatcccattaagatctgagtcaagacaaggctgcccactttctccctatccaatatagtacttgaagttctagttagagctataagaaaacaaaaaagagatcaagggtatacaaataggaaaggaagaagtcaagttattattatttgctgatgatatgatagtatgcataaacaactcccaaaattctaccagataactcttagagctgataaccactttcagcaaattggctggatataaaattaactcaaacaaataaacaaaaatcagtagcatttctttatacaaatgataaataggctgagaaagaaattcaggaaacaacacccttcacaatagctacaagtaatataaaatatcttggggtaactcttaccaagcaagtggaagatttgtatgacaagaacttcaagaccataaagaaagaactcaaagaaaacctcagaagatggaaagatctttggtgctcatggatccataggattaacattgtcaaaatggctgccttactaaaagcaatctacagattcaatccaattcccatcaatattccaacacaattttttacagaccttcaaagagcaattctcaactttagcaattctgaaaaagaaggactcatcatccctgaccctaagctgtactacagagcaataaaaacctcatggtatcggtacagaaccagacaggttgattaatgggatagacgataaaaataaatccacacacctgtggacagttgatttgtgccaaaaaagccaaaaccatactgtgggagaaagaaagcatctttaataaatggtgttagtctaactggcagtctgcatgtggaagaatgcaaattgatcaatatttatcactcttcccaaagctcaagtccaagtggatcaaagacctcaacataaaactggatacactgaaagtaatagaaaagaaagtgagaaatagccttgaacacattagcacaagagcaaatttcctgaacagaacaccaatagcttatgctctaagatcaacaattaataaattggaccttataaactgaaaatgttttgtatgccaaaggatactgtcaatggaacaaaagggtagcctatagattgggaaaagatcttcactaaccttgtatgtgactgagggctaatatacaaaatatataaagaactcaagaaattagactctaaaaatcaaacaacccagttaaaacattgggtacagagctaaacagtcctcaacagaggaatatagagtggttgagaagcactcaaagaaatgttcaacatctttaggaaatcaaaacgactctgagcttccatctgacaccaattggaatggaataaaaaactcaagtgatagcacatgttggcaaggatgtagagaaagaggaacactctcccattgctggtggaattgcaaactggtacaaccactctggaaatcaatctgacagtttttcagataatttgaaatagttctacctgaagatccagttatcctactgctaaataattttatatacctaaaatgtactccactacagcacaagaatacatagctctctatattcacaataggcttattcataatgtccagaaactggaaacaaccctgatgtctctcaaccaaagaatggattcagaaatgtggtttacttacagaatggaatacaattcagctattaaaaacaaggacatgaatcttgcaggcaaatggatggaactagaaaataatcatcctgagtgaggtaacccagatccaaaatgccatgtactcagttataagtggatattaatcaaagagttcagaatatccatgatataacccatagacccaaagaagttaaaccagaaggaaggccctgagtgaggatgcttagaaggaacaaaatagtcatgggagacatagaaagcaagaggcctgggtgggagaggggaagggaagtaggcaggatcagttgtggggagagacagaagagagcctcagagggccaggagaataaatggaaatatgtagcgatgggaggcagggttggggaggatctctagaaagtcccagagacctgagatgggtcaggctcccaggactcaatgtggttgaccttagccaaaatgcccatccgttgagatatggaacctgaagagaccacatccagtagtagctagacagaacctataaaacttttgactccaaatttttcctgtctaaaaaaaatatagggacaaaaatggagcagaggctgaaggaatgggccaccattgacatagccaacctgggatccatcccatgggtggggcaccaatccctgacactgttactgatgctatgttgtgcttgcagataggagcctagcatatcagccctctgaaaggcttcacccagcagctaactgagacagatgcaggtactcacagccaagcattggatagaggtcggggacctctatggaagagttaggggaagaattgaaggaattgaaggggatggaaacctcacaggagaaccaacagtgttgtcaacgaatctcaaactgtgggagctcccagagattgggccaccaaccaaagagcatacatgggctggtcaaaggcttttggcaagtcctgcctcagtgggagaggctgtgcctaatcctataaagacttggtcccccagggtggggggatacctggggagggcacattctcagaggtgaaggatagggcagatggagagggggcaatatttaggatataaattaataaaataagtaattaattaaagaaaggagagtataggtagtatgggtggctgtgcatctcacagtcttagtaggaacatgggtatatacaaagggaagtaccttaatgatcacctctgttgtcttttccccactcatcccctgtactttcatagcacgtaacacacgaagactggtatcacatctaggagatacatggtattcagcaagtcttttcaaatgatacaggttatggagtatctacagacgaaggggctagaaatagctattagattttgaaaccttataatgaaaggatgatagctgtatcccaaagaaatgacaggtagggtttttgttttgtttttgtttgttgttgttttgttttgttttgactagtgtacagttcctaggcacatggaaatacagtttcagtgaactagccacatatcatatagagattggaaacttaggcaagagagtttggtgctgggtttacagctgaacaggatgtttgtttcaggacgttttaagttaaacatgattaagattcttagtggtaggagcaagtcatcgagagtatccttcccctctgtctctttcagttggtatcattatcagattttttttttccccaaaaaatatttgtataagaaatagagctgcagataggtagctgcttcttaatagaatgaggtttatgtagacatgattcgacttgtggtttgtccttacataatcaaagtgcacggttgaggttttatatttataattaacgataatctgaacttattgaatgttttagctatatttgagacattagtttcttcagtattttcttaagtgcttgaaactgattctccctcttcacttcttcatctcagaaactgcaattttgtttttgtgacgaacaacttcctgttgtgcgttctctccagccacttctgggttgagtgctgtgtgttttttacctaaggctgtaagtgcattgcaacactaactggctatttcatcatgatttggattgagaaagtctatcaggaagtcacaagtgaattgtccccaacatagcttttagcttcatgtttctcagttgctgtgtcatgataggcagttggtattccgactagcagttgtaaaaagggcacaagaggataatttagagattaagcgatggcttcattgtatcatttgattatggtcactggagggtcggtttctgtatgtgacatgtaggaaggaagaagcctcatggctcgtctcctggggcagaaggaactgcttcaatttctctgtcagcctcagaaatgattgcaagtgtagctcctcactgtccttcagaagttcccccaggtctcctaaaacctgaggaaaaggtatgttgtcaaaaaaagatttgtccttgccactgtttaaataaattagatgaggagttttcagtaagtgatatgttgaagattattcattatgtattttcccagtagatttctttctccagggtagaaatatagttaagcagatacataaaatacaagtcagactgtccaggacctcacagtttgaaaaatagttgtaatacaaataaatgtattaatgaaatggtagtaatatgtgctggtgaccatcagtgggttaagaaagcccttataatagatgcgcctacagcaagtataggaagccctccctaccgctgaatctcagtgtactgcctaggttctcagctgcaaagtctacccagaatgttccagttggagaaaggaatgctaaatgaaaggcacttgaactaatcccaggcccagagctggggtttagtgatgtggcctgcacagccacacccctttcctcatgcttgtattgacgaggagttgtcagggtaacacttcaggtagaagaaccatgtttgtgtaagaaagtcaccatgtttgcccacctgccacatgccttgttttctttctttataaaacgataaactgcaccttcccttacctgaaaaaaatatgtatttaaaaaaaataatcacatttatatgaaaatttatagattaaatttatattaaattgctaatatttatttgaaaagtggagattttgtgtgtgtaacttccactcagagtgcattaaattattttatgatgcaaatgaagttttacctgacagtgaggagaattggacacacatattagtaaatagcctccttttctcacagtgtggaggtgacaggcattcagaggatttgcagtttcagggtttcaaagttgtcagtagccttggtagttggttttcgttttgcaggtatagcagagcctttcactgtatccttggccagatggagccagtgatttttctgtaggaaagaaggtcagcatactgttgctgatttgcaaatcaagaagacttttaattttaatgtcccaaaacatgattttttaatatatttgtgaaatgtattcacatttgattacattgaaattctggcttaatatccatcttttagaattctaaattaatacaataaatcagaaaggggatggtcttcagatataagtgtactccgggcacaagttaggagaaattagtcttggcaagtacctgcttttcaaagtgctgttgccagctctggtgatcagatatttattactgtttgttttttgtttgtttttgttttttctttttttttttcttttccattttttattaggtatttagctcatttacatttccaatgctataccaaaagtcccccatagccacccacccccactcccctacccacccactccccctttttggccctggcgttcccctgtactggggcatataaagtttgcgtgtccaatgggcctctctttccagtgatggccgactaggccatcttttgatacatatgcagctagagtcaagagctccggggtactggttagttcataatgttgttccacctatatagggttgcagatccctttagctccttgggtactttctctagctcctccattgggagccctgtgatccattcattagctgactgtgagcatccacttctgtgtttgctaggccccggcatagtctcacaagagacagctacatctgggtcctttcgataaaatcttgctagtgtgcgcaatggtgtcagcgtttggatgctgattatggggtggatccctggatatggcagtctctacatggtccatcctttcatctcagcttggggttgtactaaatgtatgttgtgctagtggatactgtgttagtcagtttttaatttgaaccaagacgtttcagtggtacagctgtttgtaggtcacgcatgtgactgcaactgacctctttttactcaactattcagcatgccagacttgacagaatcactctgtcttcagctttttcctgttatgggagaataaacttattcctcccaggaaagtcatgaagcagattcctgctgagggccaacttctatgacccagaaccgcctttgtaacccatttcatgattctaccacagtctgtgtatcaagactttaacaactgtggttttggaggacacttaccaagtcatacaaatactgaactaaaatttaaaatttattcatacttctgacttaagaggttgaactttagttgttaatatttttatttatttatttatttatttttattagatttttttaatttacgtttcaaatgttatcccctttcctggtgtcccctccaaaaacccctgatcctctccctcctccccctgctccccaacctacccactcctgcttcctggccctggcattcccctatactggggcatagaaccttcacaagaccaagggcctctcctccctttgatgaccacctaggccattctgtgctacatacgcagctagagccatgagtcacaccatgtgttttctttgattggtggcttggtccctgggagcttttagggtactggttagtttatattgttgctcctcctatggaactgcaaaccccttcagctccttgggtactttctctagctccttcattgtggaccctgtgctctgtccaatggatggctgtgagtatccacttctgtatttgtcaggcactagcagagcctctcaggagacagctatatcaggctgctgtcagcaagctcttgttggcatccacagtagtgcctgcatttggtggttgtttatgggatggatccccaagtgggtcagtctctggatggtcattccttccatcttagctctgaactttgtctctgtaattccttctgtaagtagtttgttcccccttctaataaggatcgaagtatccatactctggtcttccttctttttgagtttcatgttttgcaaattgtatcttgagtatttcgagcttctgggttaatatccacttatcagggagtgcataccttgtgtgttcttttgtgattgggttacctcactcaggatgatatcctccagatctatccatttgccactgaattacatgaattcattgtttttaatagctgagtagtacttcattgtgtaaatgtaccacatattctgtatccattcctctgttgagggacatctggattctttccagcttctggctattataaataaggctgctatgaacattgtggagcatgtgtccttattacagggtggatcatcttctgggtatatgcccaggagtgatattgctggatcctccattagtactatgtccagttttctgaggaaccaccaaactgatttccagagtggttgtaccagcttgtaatcccaccagcaatggagtagtgttcctctttctccacatactcaccagcatctgctatcacctgagtttttgatcttagccatctgactggtgtgaggtagaatctcagggttgttttgatctgggttatgagaattttattgagtgttttcacattgatattcataagggaaatatgaaattttttgttgtgtctttttgtgggttaggtatcagagtaattgttgcttcaaagaacgaattgggtagagtaccttctgtttctttttttttttttgtaatagtttgaagagtattggtattaggtcttctctgaaggtcggaaagaactctgcactaaacccatcttgtcctgggcttttttttggctgggagactattaatgactttttaattactataggggatatggaactgtttagatcattaatctgatcctgattaactttggtacttggtatctgtctagaaagtttccatttcatccaggtattccagttttgttgagtataggttttttagcaggatctggtaatattttggatttcctcagtttctgttgttatgatttcatttctgattttgttaattaggatactgtccctgtgccctctagttagtctggccaagggtttatctattttgttgattttctcaaagaaccagctcctgctttggttgattctttgtatagttctttttatttccacttggttgatttcagccctgaatttgattatttcctgccatctactcctctttggtgaatttgcttctttttgttctagagctttcaggtgtgctgtcaagttgcttatgtatgttctctccagtttctttttggaggcactcagagctatgagttttcctcttagggctgcttacatatcagtttgggcatgttgtggcttcattttcattaaactctaaaaagtctttgatgtccttctttatttcttccttgaccaagttatcattgagtagagtgttgttcaggtctcatgtgtctgtgggctttctattatgttgttattgaagatcagccttaccctgtggtgacctgataggatgcatgggattatttcagtcttcttgtatctgttgaggcctgtttgtgactgattatatggtcaattttggagaaggtaccatgaagaagttactgagaagaaggtatatccttttgttttaggataaaatgttctgtagatacctgttaaatccattcatttcacaacttctgttaatttctctgtgtctctgtttagagtatgattccatgacctgtccattgatgagagtggggtgttgaagtctcccgctattattgtttggggtgcaaatggtgctttgagctttagtaaagttcctttaatgaatgtggatgcccttgcatttggtgcataaatattcagaattgagagtttatcttggtagattttaccttcaatgagtatgaagtgtccctccttgtcttttttgataagttttggttgaacgtcaattttatttgatatgactactccagcttctttcttgggaccatttgcttggaaaattgttttctagccttttattctgaggtagtgtctgtctttgtcactgaagtgggttttctgtttgcagctaaatgttggatcctgtttacataatcagtctgttggtctatgtctttcttttgggggaattgagtccattggtattaagagatattaaggaaaattaattgttgcttcctgttatttttgttgttagtgatgggattctgttcatgtggctatcttcttttagtttttttgaaagattactttcttgctttccctagggcatagtttccctccttgtgttggagttttcccttaattattttttgaagggttggatttgtgcaaagatactgtgtaaatttggttttgtcgtggaatatcttggtttctccatctatggtaattcagagttttgctgggtatagtagtctggcctggcatttgtgttcctttaggggctatatgacatctgcccaggattctctggctttcatagtctatggcagtaagtctggtgtaattctggtaggtctgcctttatatgttatttgaccttttccccctccttcttttaatattctttttttgttttgtgtatttggtgttttgattattatgtgacaggaggaatttctcttctggtccacactatttaaagttttgtaggtttcttgtatgttcatgtttatctctttctttaggttagggaagttttcttttataattttattaaagatatgtactggcccttcaagttgggaatcttcactcatgtctacctgttatccttaggtcttctcattgtgtcctggatgttttgaattaggagatttttgcattttgcatttttttgattgttgtgtccatgttttctgtgatattttctgcacctgagattctgtcttctatctattgtattctgttggtcatgtttgaatctatggctcctgatttctttcctaggttttcaatctccagagttgtctcctttgtgatttctttattgtttctactttcatttttagatcttgcatggttttgttcaattcctttacctgtttggttgtgttttcctgtaattctttaagggatttttgtgtttcctccttaagagcttctagtgtttacctgtatttctttaagggagttatttcgtcctttttttttttttttttggtttttcaagacagggtttttctgtatagccctggctgtcctggaactcactctgtagaccaggctggcctcaaactcagaaatccgcctgcctctgcctcccgaatgctgggactaaaggcgtgcgccaccacgcccggctttatatctatatatctatatgtcttgaagagtagtccatgcatgctggtttctataaaggatgacactgaaatttttattttaattaatataaaattaattacacaatacattgcgagtctgttcttcctactcttgcccctacctcctcccacgtttacccccattctcctaccctcttccaatttgtttgcttgttttttataatctgcctatgctgatttatgctgcccatatactccaggtcagtcacaagaaccatggtcagtctatcatgacctagtataggagacccacccctataaatacctattcttcctctcccaaaagccatcaacttttcagtgttttctcagaggtagggactcaggagcccctttcacctccatgcttgaatgttgactgacttggtgttctgccagccttgtttaggcaaaccagttgatgtgaatttatgaatgctatggccctttcaagacagcctgttttaagaagggggaacactgttttgctctggtgctctctgacctcttgcctttttgttctatatgagtatttgcgtgtgtgcgtgtgtttgtgtgtgtctgtgtgattggtgctctttgtggcctaggcttgccacaaaataatctaggaataagtctaatcaggaagctgagagacttctttatgagaacttcaaattttaagagagattgaagaacacattagagcatgagaagatgggggctggcaagatggctcagtgggtaagagctctgactgctcttccaaaggtcctgggttcaattctcagcaatcacatggtgggtcacaaccacccctaatgagatctgacaccctcttctggtgcatctgaagtcacctacagtgtacttatgtataataataaataaatcttaaaaaaaaaacagaacatgagaagatgttcatagctcatggattggtagaattattgtagaaatgaccatcttaccaaacttataaatcaatgcagtaccaaaatatctcaacattattcttcacagaaactgaaaaagttcctaaaattcataagaaacctcagataatccagatagctattgtgtttctgaacaaaaagaataatgttgtaggtattaccataccaactttcatgctatgttacaaaactattgtaatataactgtataatgctggcaaaaacagacatgccaatctatggagcaaaaccaaaggcccatgtgtgatgtcttagttagggttactgttgctgtgttagattaccatgacccaagcaacttggagagagtgtttttattagtcttatgcttccttatcattcttcataactaaagaaattcaggacaacaactaaagcacagtatgaatctggaggcaagagctaacttagaggtcatggaggggtgtttcttactgacttgctccccatgccttgcttcatcttctttcttatagaacccaggaccaccagcccaggatggtactacccataatggtacttcccatcaatcactaattaagaaatggccctacaggcctgcctaaaacttgatcttatggagacattttctctttctttttttaaaaaaaagatttatttatttatttatttatttatttatttatttatttatttaatgtatatgagtatgctgtagctgtcttcagacacagtagaagaagacatcagatcccactgcaaatggttgtgagctactatgtggttgctgggaattgaactcagtacctctggaaaagcagccagtgctcttaactgctgaaccacctctttagctccaatggaggcattttcttaattgaagttccctctcacatgatgttgtgtctggccagtagatcacaacctgggttttagcctggaaaggcattttggaaacctggaagagaagaggggctgggctgtgcgagataaggaagaaaccaagacaaagctctctgctcaaggtttaatttttactattttggcactcagttataaaggaaggaggaggggcccaatttctgccaaataatctcggaatccagtagcagggtgagcacatgtgtggctctaaacagcaaagctgcacggtctggcattgggtgtggcagaacgaatgagtaggaagctccacccctgagcaagcaggtttcaggctgggggaggagagactacaacatgacttcagcttctgccaggttgacattaaattaacaaacacatatgacttatgtgactatatgaaatcaccacatatcaaagatgtaaaaggttcccagcgcctccactgtgagagggaacagcttcaatcagtggttctccacatgtagaataattaaattaaactcatctttgccattttacaaacatcaatcctgaatgccttaaagatttcaacatgaaacctgaaaatgctagaagaaatcatagttgttacctcatgaggaaaggataggactctatttgcccatgtattaatggtaccaattgacgaaacagaaactcttaaactaaaaacttctgtacagataaggaaacaatcaactaagtatagaggaagctcatagatgggagagggtctttgccagctatagattttatagagaattaatatccagaatatataaagaacaaaagccaaagaattttttaaagacctattcaaaacgtgggctgtagcgtcaaacggagagttatcaagaaaaaaataaagaagaaaagagaaacatatctcaaaaaatgtttatctgccatagaatcccaatggctatagtcaagaaaacaaccaataataaatgtttgtgagaatatgggcaaaggaaccttcatgcagccactctgaaaactagtgtggagaattttttttaaatatttttatttatttatttattttaattaggtattttcttcatttacatattcaaagaaaagaaaggaaaggaaaggaaagcaaaggaaaggaaaggaaaggaaaagaaaagaaacccctcaaaaaaatatctacaatgtgacccacacacgttataccttcccatacggtcaaaagactctctttattccacattctgctcagccatgttgatggcttctctattataatagctaggaaatagaaacaatctagatctccccaaactgatgagtggataataaacatgtgatacatatacagagtgtattgatattcatatataaaaaatagaaatagaattttcatgtaagtgcactgagaaaacatttctaaaagatgagctctggataaaacagccgctgcctgggagagtttcttgtattttattgtgttcatgcatagagagatcttctgtcttcttcagatgatgtggatgtaagagggctggctacccgctgttttcccacagtccttcattgtgctttggttctcttatgtatgtgatgagtacatgatttctttggttggctaagacaatgtcattttgattgtcactgaagacattacttactaaattttttattgtcctttattgtatgaaatgtctgctaaaattgagaaaaaactttataaaaataaatataaaatacctaatcttccactggggctaataaatatggctaacatttcctaagtatttaatattgtattattgtctttctagtttgaagattaagaaacaaagcatagttaaattctttgccttatggtagtcactcgcagcaggtcaaggctgggactttatcagagtcaaacaccagttatgtgtgggaagactctctagactgttaacatatagtgatctttcttccctgttcttgtttcttctctctacagactgtatttggaattgttcacaaggtgttgtgtgattttagtttatttcctcctcttcaattttcaaatttactgtgaacaaaacaaaatgagagttggaggatattttttgtattaattacgcagtcatgatagtgtgtggatagcaggcattcattgtattctaatttataatttacttttcatttaacaattgacagcctaaaacataagtaagttaattacggattgatgcctagaaattctaaaacactactcatctcctgttaataattactgttaagttctttgctgaggaaattcatgtggattgtatgatttgtctttaaaattatcccactcattgtgcaatgctgaggaatgcctttttgtggaatctttttttaatcattgaaagcaaatgaaatagatatgagcttcctaagaggattagcaaatttgcttttcttttttctctctctctctttttaacttcatctccaaattattcttcagagcacattgtcatcagttctcccgtattgtgtataggtttaaatgcaaggccttcccaggagctgcttttttctgccccttcccggctacctcgtgcaccttccagcctagctctgggatcagaacagccacttctttcctacctgcctttgctcctggaagggtcaggttgccagcgcctaggccatagaatgcaggatagaagacacacacactgctcctggaagggtcaggttgccagcccctaggccatagaatgcaggataaaagacacacacactgcacccttacctttagaacttgctcctaggcacaaacgttggtcctagatacttcctgcccggaaatgggtgcccttataaatttattacctccatctctacctctgccttaaacttaatggcttacatcagctagcacccccccccccacacacacacacatctttggcccccacccataggggaggctacaggctctagctgccccaagaccttacatgactgctgctttctacttgttgcaaagcgtggcaaaaaagcccctctctctttccctgcatctccttttcctcttaggagctaaaagtcccacctgtgccaccatccagcaattggcccccagtcttctttattgataagtcaagaaacaattgtggaacaagaccttagggacagaacctccccttacactaccgggttttgtatacccatgcaatctctcttttgtcagatcaaaaccattttttttcctgtcttccctgtcacagcttaaatgtttttattatgcttaagttgttagcttggctcttctcaattgtatgtcctttccatggacagtcttctctaactcttttctacacattgttcctattctatggattcttaaaggtatgtcttctaccgaagccactctagtaatccagtggcatggaactgtcatatgagggtcagtctagttctaagtattccacacatcatagtcaaactaattgttaagaactacccctccacacttaagttctggagtcttccttctgcataaatgcaacttcattcactttatgctcacagttgatgcctggcatcttctttgactccatgcttagctctcatttctactgtgagtcctctatgtacttgcaccattttgttggttttctcttaagtccttctgttcccaatgcactcaatcctcttgtggcttgctctgagtatccttttcagtatgttggcataagtcctgtgctcttccatgtcacagtctattattcagaatattggcttgatgatccttccacatcaacatctgatgttagctcctgcttaaaaagctgatggttctctgctgcctcagagcaaagctgtagccactccccagtcttgtaaacattcacatagccacatctctgctactctgtgtgtttccctgcctgtcttgtgttcccccaaatcacactgctctttttccttagaatgggctttctccctcctctcaggtgttaacattcagcattctattcaatcctagagagggagttgttgttggtggtaattggttgctttaattcatgttggttgctatagtctccctgacaaagagatgaataataaattagatatcctgaaagcaaagatcaaacttgcctcaatgaacttgatgctctagtcagcaggatatggtctaacgatattatcccctttcctgcccctgatatttttggggattttcttttctctcttttcttaattcttttttctcctcttcctagttttggggggctgaaaggggggaaagaagaggggtggacaaggattgaagaaaaaagatcccacacataactccagtgtactttgaatcctcttcacatttgcttttgagtctgtggcacaagctgtgtccctttctaggacagacagtacttttggttccaggaagcagtaggctatgtatgtctgggcatgttctgattgtcattactgattggacatgtactactctcctctgatagatgttggcaggggctgttactaaacactccacagtgcatattttcctaacttcaactggcaatagaactaactgaggttgagagatcttgctttaggatgaagtgaaaaccttcattctaaagaaaaattctcagccattcctagggtgtaggcctaaaatttcagctactcagaggttagactggaggattatatagttcatagtacacctgggctatgaacatttttttaaatagaagcaatgtacagaatatagctaagaggtatagaatcctacgttcaatccccatggggcttggtggggatgtctcataagaaaagacataaaattattttttaagccgggcgtggtggcgcacgcctttaatcccagcacttgggaggcagaggcaggcggatttctgagttcgaggccagcctggtctacagagtgagttccaggacagccagggctatacagagaaactctgtctcaaaaaaaaaaaaaaaaaaaaaaaaaaaaaaaaaaaaaaaaaaggaaggaaggaaaaaagaaaaaacatttttttttttaatttatctatatcccaaacactgctcccgctcctgctccctccctcagagagtccctcctcagattccccctctacctcccttctaagaggtggagccccctttgggtatctctttaccctggcacatcaagtctttgccagattaagcacctctcccactgagtccagacaaggcagacatagagactgtgttgcatgtctgctacatatatgccagggacctcgttccaccctgtgtatattctttggttggtggctcagtctctgatagcacccaagggtccaggttatttactctgttggtcttccggtagggttccctccccttcagggccttcaattcttcccccatcttttccataggtgtccatgacctttgtccaatgtttgcctgtgggtatctgcatctgtttcagtctgctgcagggtacagcctttcagaggacatttatgctcagccactgtctgcaagcataatagagtatcattaataatgtcagggatttggtgctcacccattaggtgggtttcaagttgtgcaagttctttcagttggcctttccttcagtctctgctccatccctacatttcttttagacagggcaaattttgggtggaaagttttgtggttgggttggtgttcttatacctcctttgggggtcctacctagttataggagttgacctcttcaagttctatgtcctcactgttaggcattttgcctaaggtcacttgcattgactcctgggggcctcccccatcccaggtctctgggactgcctagagatttcccccatcccctacccctggcagatgtagattttcattcattttcctgtttctgtggccctctttcttgactatccccatacctggttctccccccatccctctcaattccctctgcctccttttgagtattttatttctccttctgagattcaagcatccttccttgggccttccttctggtttaacttctttgggtctttgtgctgtactttctggctaatatccacttatcttcgaggacataccatgcttgtccttttgggtatgggttacctcactctggatgttattttctagtttgatacatgcctataaaatgcctataaaattcatgatgtccttggttttaatagctgagtagtattctgttatgtaaatgaaccacgttttctgtatccattctttgtttgagggacatctgtgttgtttccagtttctggctattatgaataaaacttcaaatgagcatagtggatcatgtgtccttgtgatatactggaatatcttttgggtatatgcccaggagcaggataactgggtcttcagatagaaccatttccaattttctcaggaactgccagatttatttctagagtgattgtataggcttgtactcctaccagcaatggaggagtgttcttctttctacacattcttgccagcatatgctgtcacttgagtctttgctcttaaccattctgattgatgtaaggtggaatctcagggtcattgtgatttacatttccctgatgactaaggatgttaaaccttttttaggtgcttctcagccattcaagattcctcttttgagaattctctatttagctctgtaccccatttttaaattagattatttgggttgttggagtttaacttcttgggttctttatatattttggatactagccctctgtcagatgtagggttagtaaagatcttttcccaatttgtagactgcccctttgctctattgacagtgtcctttgccttatagaagcttttcagcttcatgaggccccatttttgttgttgatcttagggcctgaatcatttatgttctgtttaacaaattgtcttctgtatcaatgagttcaaggctatttcacattttcttttgtattagctttagtatttcaatttttttgttgaggtctttgatacacttgaactggagttttgtgctggaagatcaatttgcatccttctacattcagacatccagttagaccaccataatttgttgaaaatacttcctttttttctattgtatggttttggcggctttgtcaaaactcaagtgtccccaggtgtgtgtgtgtttatttcaggatctttgcttttattccattaatcaatctgtctgtctctgtaccaataccatgtacttttatcattattgctctgtaggtgcagtttgaggtcatgaatagtgagtgattcctccctaagttcttttattgttcaggattgtttggctatcctggatttttttgttttgtttttccatatgaggttgagaattgttttttttttttgatgtttgtaaaaaattgtgttcgaattttgatggagattacactaaatctgtggattgatttggtaagatggccatttccactatgttaatcctaccaatcgataagctttagagaccttttcattttctgaggacttctttgatttcattcttcagggatttaaagtcttgtcatctaggtctttcacttgcttgggtagagttacttaaagatattttatagtatttgtagctattgtgaaggttttttgccccctgatttctttcctggcctgtttatcatttgtataaaggaaggttcctgatttgcttactgatgttacttaacagctgtaggagttctcaggtagaattttggggactacttaggtatactatcatatcatcggtgcatagtgatcccgtgacttcttcctttctaatttgtatcctcttgatcttctttttaaatagtaattttattttataaattcagcaatttgagtaagacagggaagaaatattttaagaaattttaagcagttacattttaagtaattcctatttttgttaaaaatttctaactggtttctaaaaaatatattggagttgtgccagaaaaggcaagttttcttatttactcttagtccctcctttgctgaattaaaatgctttatacttaaagagacaatatatttagtttgtgactaaagtgaatgttatctcttgattaaaacttcatttaattaaatattagaatgtctattccagcttgtttcttgggtccagttgcttggaaactcttttccagctctttcctctgagataatgtctgtctttgttgctgaggtgtgttttgcgtgcaacagaatgatggagcttgtttactcatccatagcctgtgtctttttattagggaattgagaccatgttgagagatattaatgaacaatgattgttagttcctgttattttgatgttggtggtcgtactttgtgtttgtgtgttggatttgttgtggaattatctgttccatgtgttagaattttccttctagtatcctctgtagaactggaataatgaaagatattgtttaatttttttttattggaatatcatgttttctctgtctttcaaagttttgctgggtatagccttccaagctggcccctgttatttcttagagactgtaagacatctatctgttcaggcccttctggctattaaagtcttggttgaaaagttaggcataattatgataggcttgttacttgacctttttcccttgcagcttttaatattatttctttgttctatacatttagtgttttgattattatgtggcaggacaattttcttttttggtccatctatttggtggtctgtatactccttttatggttataggcatctcttactttaggttagggaaattttcttctgtgattttattcaaaatattttctaggcctttgaaatgagagtcttctctttgttctattattcttaagtttggtctttttctagtgtcccaaatttcctgagtattttgtattagaaatgtttagctttagcattttctttgactatgtatcaatttcttctatggtatcttctacacctgagattctgtccttcatttcttgtactctgttggtaatgcctctgtctgtagttgctgttctcttttctaggtttttcatctctaggattgcctcagtttgtgttttatttattgcttctatttccatttttacgtcttgaacagttttattaatttctttcacctgtttgattgtatttccctgtttttctttaaagtctttattcatttcccctttaaagtcctctatcatcttcataagattagatttaaggtcatttttattgcaataaaaatggtgtgttagtatattcatggcttggtgtagtaggatagatgggttttggtggtgccatattgccttggctttcgttgtttgtgttcttccactggcctttagccatagattgtccctggtgttggcaggaaggcatgttcatccctgatgggaataggcctgtggggctgcacatagagctggttgtccttgatataagcaggcctttaggatttcaggtagagctgtttgtccctggtggtagcaggcttccagggatgcagacagagctggtagattctgatgacattaggctgcttgttgacctgggttgggacaggcctccaggggtgcaagtagagggatgcaatgttgatccctaatgattacaggcttctctttgtcctgggcagcagcaggactccaggaatataagtgaagttgttgccctggagtcaagtgcagtaggggcagggtggagttatcagttgctgtagttgtcaagcttgaccaacaggcaggggttggggggggattctattaaaacttcaaagttaagtcatcttttcggcagttccgcttgtttacctttttgagttctgtggactgtatcttgggtattctgtactttttaaatttttggctaatatccacttattagtaagtacataccatgcatgtcgttttatgtttgagttacctcactcaggatgatattttctagttccatccatttgcctgcaaaagtcaagatgtcctcattcttaatagctgagtagtattccattgtgtaaatgaaccacattttctgtatccattcttctgtcgtgggacatctaggttgtttccagcttctggctatcacaaataaggctactatgaacacagtggaacaggtgcccctgtgacatggtagggcatcttttgggtatattcccaagagtggtatagctgggtcttcaagtacattgatttccaattttctgaggatacctcagttccacttgggaaagagaaggaagcaatcataagtgagtggggagggagggagggacctgggtgggaaaatggacagagaggggcagtggaggagagagaggggaatctgatctggtattgggtgagggaaaaggactgaagccctgagggccagcagaaagaatggaaacaggcaacctcatgaaataggaggttggggggacccttcagaatgcaccagagacctgggaggtgagagactctcaggattcaaagggagagaccttagatgaaattcccaacagtagggagagggaactaatagagctcacctccagcagggagacaggatatcaagagagggatggggttgctttcccacagccacaactctgacccataattgtttttgcctgaaagaattacagggattggaaatggagaggagcctgaggaaaagaaggtccagcgacaggcccaaagtgggatccagctcaaggggaggtcccaaggccagacatgattactgaggctatggagcgctcataaaaggggacttagcgtgtctgccctcagaaagacccaacaagcagctgaaagagtcagatgcagatatttgcatccaaccaatggacagaagcagctgactcctgttgttgatttagggaaggcttaaagaagctgaggagaaggcaatcctatagaaggacctgcagtctcaattaatctggtcccctgagatctctcaaacactggaccaccaaataggcagcatataccagctgatatgaggcccccaacactcatacagtagaggacttctgggtctgtgttcatacagagatgatgcacctaaccctcaagagactggaggccccagggagtttagaggtcaggtgggttgggagttggggacatccatgtgcagacaggggagtggggaggaggtatgggatgtggaacagttggagggtggatgggggggaataaaatatggaatctaaaaaagtaaattaattaaaaaatttaaaaataatattaaaaaaaaaaggaagtcatcttttcccattgcctatcagaaagtacccactcctaggctttcaggtagtggtactggattactgttgtgactcgtgtggtggcacatactgctcgcctgctaaatgaagataaaagcagacttgtgctgattttgagagtctataaaataatccctgtcttagaactagttttatctattcctctcttcatctttgagtattaaagggctttttgtcaacagtgatcgacatatttgcatgtgggcttacatgaagaatacttaattgtatgtctcttaatttttccagccaatttctacagaaattttggagtattcatcagatagtgaaaaagaagaagacccagaacattccctgttcattgattcagaatcccctcacaaataccaggcggattttaaatctgatgcaagatggtgtttggttagtcagactgactcagaagcaaattcagctgagcctacattgacaccccagaaatatacggtcaagtttccgaagactccagaatattcagtaacaaagaagaagcttttaaggttagatcaacttttaaatttcctattcctctgttcatgtctttctttaaaatattaactgcgattttaattttaaaatacttttttaattgagaaagaaaattgacaatataaaattctgatttttgatatgcaagcctattcaggaaccagtttacgaaattgttcattcaattggaacatttatgaatttagacatggctagcttgcatgactactttccttagtagaaatgtgttgtttggtttgtcaagttttattatatatcagtgttgtaggtgctatgtttgaaagtagagacagatgaatcactgtttccttatcaaatataactcataaaataagcataagtcctttagcttatctttatggcatgaatgtggttagagagattggccagaataatgcttacaaatacaagaaaatataagacccttgtttgaaggataaaaacacctcatggctgaggagagccatagtggggaaaaaatccttgttactggtttatcagtgagagactagcctttgttcccaagcaggatatgtgagggagcatttagagacatgttccaactttatgtcaaatggtatgtttgtgtgttatatattggaataaaataatgtccctttccccaaaacaaaataacgaaagtgagaaagaaccagtgtcaagcagcacagtgccttatactacaagcaacagagagttcctagagaatggatcacagtagaaagaggacacatgtggagggctgggggtgaaagcaagaaagaacctgtgccaagtagcaccatatcttatgcccagaagtagcagagagttgctaggagaatggatcacagtaggaagaaaatatgtgcagagagtgtgggtgtctattaatatttccacagcaaactgggagtaattgactaaagagtggttgaaacacagggcagactgaatccaaaacttacactctccatggagagtcgtaattgttatgtcttgaaagggctctagtctctagagtagtcatagagaatatttccagagacagataatgagattggcgctttatgttgaacaaattaatatttattctcatgttgttttttaaaataaggcacaaggttatgtactcattctagataaaccacttcctggtatccaaaaaccttgggcagtgtcatgagaccaaagaagaatgaagattagacagagtttaattagtgacttagtggtagaaatttggttgtatacagctggaagaccagtagatttctgggatttcagtcaaaggaagaaggcttattaaatggtcaagacaaaagtgacctcattcaggtcatcatagatgtggcctgtatgagtctgttatcagagacatcagacatattcctgatgcagatgggtccattcaaaagctaaacatactactcttatggtttgtattgcattgggaaacactgcaagtgaaactcctccagtattactactcagtggtcattgtgactcaagatagtcagttatgccaatctgaatccatcaatgccccaaatgaagttattgcttcagaagagaaagatagttggacattataatgcacacttacaatcacaccacagactgtagaattatagttcaagacaagcctgggtgacaaggtggatttgaactcagattagagtggtacatagatctcatctcaaaaattcaagaactaggaatctaaatcagtgatagaatctttgtctaacatgtttaaaaggctctgggttcagctaccaggaagggaggagggaatgggaaagatattgtgcttgaaattaaaattattttaatgctacaggtgacgttacttaattccagaacatcgtattcccaaccctgttgaggatcttttctatgatgagtatgcttttatatgtagaagacacaacagcctttgaaacctctgcctgttctaggtagactgattgtcagccaagaagtataaagtagtgttaaaagtgggatagtaggaacagcaagttttggatgggaagtggttggttaagcacttttgggttaagctactagataatggtaggctcttagacttgaattaatggaggccaggagcctgcccggcatggaaggggcctaagggggcacagaggtggcttaccatgcctgctctttctgttctctctacagcttcttctttgtctccttttctctctgcattctgcacattactcttttaaaattttaagttcccttataatttctaagttattctactctgctgtccttctccttcctcttgctaatcttgctctctcctcctgcttggatataataaatgccctacaatgtaatcctctataggttctttgtacctagttttttctaggggagtagatcacatgatttctccaagaatccttttttgttgttgttttgttttatttaataaaagttcactaagtgtttaaacataaattcaaaccataaattgaataagaagtttacaacaaagaatgtttacattatgtatccaataagactagacattcattatttgtcattagctctacaggttcatggagaattaaacaccataactaagttatcactgaagtttcatatagataaacctagtcaatattctgtcttctgtacttgcaccaacaataaattgttagtttctttttatgatctttggttaattattttgtaacctcttggaatgtgttcttagttgtaaatgcctgctttctatctcagaagcaattaactcgtgatacttgaagactggcagggtcctcattgcagttttaatatcagagaggacttaatagcagtcctattataaagggctaaatagttactagcattattttaggaattagagaatcatcattaagaattaagaaatcatctatttgtctatatagcatcaccacaagacagtacatcttcattgttcttcagaacaatacctagtgatatatatattcaatcataacaggaaaagcatattagtaacaggaatttttcctcagatgtaacctcttcagacataacctagaggagcaaatccgtcatgactttgcagtccatagtgaaacaatctcaggaagatcacctgctagcttttaccttctcatagatggctcctggcaagagacaccttgtaaatttcagatttttaaaaaataacttactattttttttattttatgtgcattgatgttttgcctgcacataggtcttggatcctggagttacaggtggttgtgagcttgtcacgtggatgttgggagttaaactcagagcctccggaacagcagttagtgtttttaacctataagccatctctccagcccataaatttcaaatttagaattgactgtgggatggatagatgaggtgggtagatgaaatagagggaagccactcaggatacctgcagatttccctctctttccctgttcctttcccttcttccccttgccttcttttctttttctttttttttaagtgttaaatgctctttatttgatatcatacataaaccacagtaaatgcctttcaatagtaaaaggcagcatccttgatgtagggaattctaattaaaactgcactgttgagaatagacagttgcctcctggtggttagccatgacctgtaagaggccagtgaacacaaactgaaacacatttgagtcttcttgtttctgagacagtgatagaattttcccagtgtttaagcatattcatatgcccagttatataaatctaagtataaaaccatttagtaggtttaaggcgacatgcccctatttatggaaagtaaaacattactaatcaagtcccatcttatcttgagaaagggagagccgtggtagcatgtatacaactggaactgttgctttaataaagaccgtacccactttatgacaagtcagttttacttaaatcaggactgtccaacaagaacattgctagccattcatgatctgaatttggtgtatgaattaaattatagtgtacattaaaagccatgagacatttgttttgtaataaataaggcagtggaattactcattagtagcctttttaagataagctattaggtctgccctttctcccttcttcttaattccagcgaagatcatttttgttccagggatgtactttttgggattctccaaatactccatcagggtatcctctccccaggtgatgcctctgttcttgttggcatctgtgtaagagaatccagcagcctggcctatcttccccccgaacagaccatggagatttggtccagtcttatgcttgcctcccttttccacagtgtgacaccgggcacacttctgaacaaaaattttcttgcctttttcaacatcacacatttttaattcgctctgggttgtcaacaccgcgaacgttcggactcgaagacagacatcccgcgctctacgccttttcttgctttgcctttttcatcctgttttttcttactttattttttaataaactaaattatcttaaggagttcaaattatattcttgccgggcagtggtggcgcacgcctttaatcccaacatttgggaggcagaggcaggcggatttctgagttcaaggccagcctggtctacaaagtgggttctaggacagccagggctatacagagaaaccctgtctcgaaaaaaaccaaaaaaacaaaaaaattatattcttgtttgattattgggtccatcaactgattgacaagttcattcttgtctatagatctgaagattgcttttatgtatttgcatgtttggagtccctatttgcatgacagaatggggcattttctaacctgagctaagtagtaactgcaggcagtaagtgtattacacacttagtagtgaacaaattaagagaatatagaatgagaaccaaactgacttaactgttagactgtgagtaaaatagcagtgcagcttttatatgaaagataataaaccttctaagaaaactagaaattggaaatgatatccagaaagagagcataatacagaagatgttaacatttcccatgttcatctgtttctgaagaggggctgtaaagtataagagctatagctttcttgaaggcttttgtttttatttaaacatagaattttataatccattaaacaggggcgggctagcagaaagactccaagaactgcagaatcgaaagagatctgccatttctttgtggagacatcgatgtgtttcttaccaaatgacaccattaggtaagatttacacctgcttctaaaatgatgggtacaaaacattagagctaaaatatctttttgtacattaaaatacatgaaggtgattgttagtgtttttgtgactcaaaaaaattctccctgatagttttgtttaagtggggaggggtacttttcagtatataatttaaatctcttttggtggggcatggggctggacgagttggtaaagagcttgctgtgcaagcttgaagatgtaagtgcaaattttcagcatgcacctggaaagacggatgtggcattgtgtacctgcaatcccagctctggggagatagagacaggattcatgcctgtcagtcgagccaaatgtgtgagcttctggttcagtgaaaggtaccaactcacaaacatggcacatacacacacacacatacacacagagagagagagagagagagaaaaatatctttaccaggataaagttttttcagttgtttaaacatttgcaaaagccacacattcttcttcagttttattgtaaaatagctggaagaacatttagtatatatacaccagaaaacaaatgttttcagtatagaaaaggcaatttaacttataagatgacctgatatatgaatgcctacccagcaatgaaagaggtcaccaggctgagcctggtggtggtggcgcacacctgtaatttcagcacttgggaagtagaaaagcaggtggatctctgagttaagaccagcttggtctacagagttctaggacagccagcactatgtagaaaaaccctgtctggaaaagcagatacaaacaacaaaccaaaccaaaacaacaacagcaacaaaaacaaagcacacaaaaaacaaaaaaacaaaaaaataggttaccaatctggacagttcagcaaatgtcatactcagatgactaaaacttgtcaaaactgatagtataatacaaaaggtgttaacatttttcagttcagtccaaactgaatcattgttctccagtaattcagggttcattttgcacagctgatgccctttgctgggaacactgttaccatctcacccctcagaagcacctcccactcataagctacttatcatgtcttctcctttctggagtacttatggcatcagtttataatctatgcgcatagaaaaataaatttaatataattttcacaccctgcccttttcatgagatgttgatttcataaatttgcatcataaaaactagtggcccatggaaggagttacagagacaaagtttggagctgtgtcaaaaggatggaccatctagagcctgccatatccagggttccatcccataatcagcttccaaacgctgacaccattgcatatactagcaagattttgctgaacggacccagatatagctgtctcttgtgagactaccccggggcctagtaaacacagaagtggatgctcacagtcagctattggatggatcacagggccccccaatggaggagctagagaaagtacccaaggagctaaagggatctgcaaccctatagatagaacaatgttatgaactagccagtaccccggagctcttgactctagctgcatatgtatcaaaagatggcctagccggacatcactggaaagagaggcccactggacttgcaaactttatatgccccagtacaggggaacgccagggccaaaaagtgggagtgggtgggtaggggagtgggagggagggtgtgggggacttttgggatagcattggaaatgtaaatgaggaaaatacctaataaaaagtataaaaaaaaaaaaaacaaaactagtgtcaaggactgtcacctttacttatatggtagaatattagtttgtttttcctgagttggagagcagatagtcctcttttcctgtgttccatatttagtaaataagcccaagcactaacccagaatcccatgatggatcagttgatgagatttgtatgatgggactagcatgctcaacatgtgtagatgcttgctgtcggcatttcttgtctccccaaagcctgcgttggcttccacattcctcccatggcacatatgtgccccctttcaaacataaaccatataactgaggtgttagaacgggagaaagagaaggactttgatatcaaagtactgatagctctatttgctgtaataatgcaaagcaatttttatatatgttattggtgcgtttaaatgtatcatagaaataaaaaaaagtcctttattacaataggattcaccagattggtacatgtatagagagactaaatataattttccattaagacatgctgtctcaagtgttctcaggcttactcctcagagtttatgttttgaaatataaggttttcatgagtaaagttaaatatgataccaaacatttatgtaaagattcattagaatcgtgacatttataacttttatgggtggacagagtttttccaaaactagattctcatcaaaacttattcttttctcataggaatggaagaagggcttttggggagttagaacatcatgtataataagctttgtatggtgtattctgtacttaaagttctttacaatgcaataagaaattcaccattcattagaaaaagtggagaaagttttagattctaaaatctttctagatttcatgaaatctttggactgtaatgtagtttcctcatagcggttttgaggaatcccttgattatcctccatggagcaggcccgtaatggacatgacaaagacaacttacaagatcgtagtaaatagattaggatctattctgtaagtaaaacgagaaagtattctgtaagtaaatcttattctcatatgttcagtttaaatacatatcagaagctaaaaggaggtgttttgtttcgttttgttttgatttcctcacctaaatgtgctaattactagttctctgaagctgttttaggcaagccgtggctgagtttttaagaagcagagagtaaagaaatcatgtcctcagcagtatggcttttaaaattttgccaaagaagggccatccaaagatcgccccacctggggacccatatcatatacagttaccaaacccagacactattgtggatgccaagaagtgcttgctgacagaagcctgatatggctgtctcctgagaggctctaccagagcctgacaaatacagaggcagatgcttgcagctaactgttggactgagcatgcgtgcccaatggaggagtgaaaggactgaaggagctgaaggggtttgcagccccataggaggaacaacaatattaaccaaccagacctccccagagctcccagggactaaaccagcaaccaaaaagtacacatggagagacccatggctccagctgcatacatagcagaggatggcctagttggttatcaatgggaagaaaggcccttggtcctctagccccagtataggggaatgccaggccggggaagcaggagtgggtgggtgagtggaggaacaccctcagagaagcagggagagcggggatgagatagttggttgtcagaggggaaaccaggaaaggggataacatttgaaatgtaaataaagaaaatatctaataaaaaattcaagataaaataaaatatcatcacttaaaaaaaaaaaggaatttctccaggatattggtgcatttgtaccatttgctcccagaagagattgcactgttacagtttgtaaagactcactttaagtgccataagtaactgctttggcataaggtacctgttcttgaatcattttctctcctctctctctgtccctttctctctgcttctttctccgtctctgtatctctctatatctctcactgtcttgcaatcctatgtaaatcttataatttcattgcattccagaaccgttcttttgacaggttcagtgaggggctaagtgtattgatggttctttacctgctgtaggacgctcttgagtttgctttacagctggctagggtctttggatccttccttctttctttccttccttccttccttccttctgcctgnnnnnnnnnnnnnnnnnnnntctttggtagagctatatcataacaatagctgtacccttcctttctgcctgactacatctcttatgattcccacagacaattcttttgtaaggtccctccccctaaatccttgctgtattctagcccctaactccagaatacactcactgataactcactgaccattcctgtatgtgaatcatggaagatgtctatagatcttcccctctcctttacttcctgtagaatacctaccagtccaattcccagctctatagcaatccttctattctagggtgacctcttttctttctttctttctttctttctttctttctttctttctttctttctttctttcttccctccctccctccctccctccctccttccttccttccttccttcctctctctctctctctctctctctctctctctctctctctctctctctctctctctctctctctctttctttctttctttctttctttctttcttttctatttgatttccagcctctcttggtaaatccagtaatgcttcttatgggaatcaagtgaaaactatctttaaaatatgaaaggatagacttttaaaaactggacctgtactttttctatcagcttttaaatacctgatttgtttgattgttttggagacagggtctcactgtattgaccagggtagcctcaaatttactgagatctaccaggggctaggattaaaagtgtacattgccacgcttggtctaattatctgctttttactgataggaataagttctatgagcagatgtggatttagctcatatcctattaaaatggctttttcataaatcctttatacatatttggttttaaatatttgaatttcttaaaccttaaaaaaccttacttgttctagtatctcattgcatattcacatgcatatgctgggtagttcagaatgccatattccaaatcatgttctatcaagttatttgttaaatgtgttctaaagcccttgaattatatttattcttttttcttattttttattggttattttatttatttacatttcaaatgtgatcctcactcccagtttgccctccacaagcccactatcttctcttcccttccctgcctctatgagagtgttctaccccttcccacccccattcctgcctcagtgtcttagagttcccctatcctgttggtcatcaagcctccactggaccaagggagtcagtgctgtcacataaggtagtcctctgcaacaaatccagctggagccatgggtaccccctctgtattctttggttggtgctttagtccctgggagctttggggatttggttggttgatattgttcttcctatgaggttgcaaacctcttcagctcctacagtccttgacctaacttccccactggggtccctgcactcagttcaacgtttagctgtgtatatccgcatctatattggtcaggaattggcaaagcctctcaggagacagccatataagtctcctgtcagcaagcacttcttggcatctgcaatagtgtctgggtttggtgtctgcatgtgggatggattcccaggtggagcagtctctggatggcctttccttcagtctctgctccactctttgtccctgtatttcctttagacaggagcaattctgtgttaaaatttttggagatggtgggtggccctattcctcaaccggggggccatgtctaaactctggatatggtcttgacaggttctccctcccctttgttgggtgtttcagttaatgtcatccccaaggggtcctggaaggctcatgctttcctggcatctgggattttctggtagctacccccagttcccaatcccacattgctacacacctctgttgaagtttctggctctctgtacatctcctccaactcctcccataactgattcttcccctctttttctgctccccctcttctcttcctcccaagtccctcccaccctctacttcccttgattattttgttccctattctgagtaggaactttattatccacactttgttcttccttcctcttgagcttcatgtggtccatgagttgtatagtgggtattttacactcttgcctaatatccacatatcagtgaatacataccatgtgtgttcttgttttagcataaaatgggctatagatatctgttaaatccatttggtctataatttctgttagtttcactgtgtctctgtttagtttctgtttccatgatctgtccattgatgagagtggggtgttgcagtctcccactattactgtgtggggtgcaaatggtgctttgagctttagtaaagtttcttttatgatagcatagatgttcagaattgagagttcattttggtagatttttcctttgatgagtatgaagtgtccttctttatcctttttgataatttttggttgaaagtcaattttatctgatattagaatggctattccagtttgtttcttgggaccatttgcttggaaaattgttttccagccttttactctgaggtagtgtctgtctttgacactgaggtgcattttctctatacatcgaaatgctgtgacctgtttatatatccagtttgttagtttatgtctttttattaggaaattgagtccattgatgttaagagatattaagaaaaagtgattgttgcttcctattatttttgttgttagaggtggaattatgtttgtgtggctatcttcttttgggtttgttgaaagaagtttactttcttgctttttctagggtgtagtttccctcattgtgttggagttttccatctgttattctttataggtcttgatttgtggaaagatattgtgtaaatttggttttgtcatgaaatatcttggtttctctatctatgttaattgagagttttgctgggtatagtagcctgggctggcctctgtttaatcttagagtctgtatgaaatctgcccaagatcttctggcttttggattctctggtgagaagtctggtgtaattctgataggtctgcctttgtatgttacttgacctttttcccttactgcttttaatattctttctttgttttgtgcatttggtattttgattattatgtgacgggagggatttcttttctggtctagtctatttggagttctgtagacttcttgtatgttcatgtgcatctctttctttaggttagggaagttttcttctataattttgttgaagatatttactggccctttaagttgggaatcttcactcttttctgtacctattatgtttaagtttggtcttctcattgtgtcctggatttcctggatattttgggttaggagcttttgcattttgcagtttctttgattgatgtttcaattttctatggtatcttctacacttgagattctctcttctatctcttgtattctgttggtgatgcctgcatctatgacccctgatctctttcctaggttttctgtctctagaattgtctccctttgtgatttctttattgtttctatttccatttttagatcctggatggttttgttcaattccttcacctgcttggttgtgttttcctgtaattctttaagggatttctgtgttttctctttaagggcttctacctgttttccttttcccatatttctttatgtccttcttaaaattctctatcatcatcatgagatgtgattttaaatctgagtcttgcttttacggtgtgatggggtatccatgacttgctgtagtgggagaactgggttctaatgattccaagtagccattgtttctgttgcttatgttctcacacttgcctctcactatctagttatctctagtgctacctgcccttgctgactctgactggatcctgcccctcctgtgatccttgctgtgttacaactcttcaggatccacctgtctctgtgattctgggatcctgtgatcttgggtatgtttgagctcctgggagtcaagctgcctctgagatcctgaaatcttggtgtgatcacgcttctgagatcgtgttgtgtcagaactgccgggagtcaagcttactctgggtgttgcaggggtaggtggggaaccagagccctgggtttcctctgggcacaggtacaagttggaaggaacctgtccctctggctgggcagtggtttgtgtttccttggttcctatgggggtcccagttatgctaggtgtgggaaggatgtggtggtgtcaactgtgatcttgaatgtatcaggaaagctgcagtgctcttgggtatcgagcttttctctgtggtcttgtgatcctgggtgtttcagagtccctgggagttggtcttactctgggtgttgtaagagtgggtgcagagccagcaccccaggtctgctctgggtccaagttcagaccagaaggaatctctgccactggttgagcgagggttcctgcgtccctggatcctgggggacccagttagtccaggtgttggagaaggtgttggcctctcctgtggtcctgcatgtttcagagcacctgggaatcaggctccctttgggtgtgcagattcaaactgggaggaacccgtgccactgaccaggtgggggttcctgtgtccctggatcgccggggtcgcaataactccgggtgttggggcaaatgttgtggccccctcacttgtgatcctgggcatgttagagcatctgggagttgagcttactctgggtgttgtgggactggaaaagaattcatcttgtttggaatattgttaggatttacaatgttccaaaaatgaactgtgcctaataatgtggtccatcttatgtttttgtaagtatttttagatagaatcaaagatagttgtattctaacactacttgtgtgtttttgtaattgttttccttttgtgaactcaggatttctacatgttctaaggtaaccactgagtttctgttaccttttgctaccaggataggtagttctgaattcctggtgtgattgtacatcacatattgtggctacaagaccaggaacctgtggcagcttactatctggactttagctgcgtgtccagtactcagtaatgcagcagattttgaatccctggacaggtctgtagtcagaaatatgtaggacaagtggcacttctgtagtgtttgacataaatccccaatacaagcataaatttttgaatatactttgaaaatatgtctaaacatactacaagcatcagtttaatattctacatgttcatgtccttccctaattccatttccttcctgtgctcaaaaaagggagacaggtaccaaactgtgagaaacagtccttatgaacagtgctgtgacaaattggtgggccagctcagtgtaccagcctatactccagcacttagtcaggagaatggacaggaacctttgtacaaaacagatgattgaaacagaagtgagagaagaagtggaaatggaaatgaaactgtgaataactcaaaacttgcctttgccgtcaatcatttggtctacaatggttgagggactggtgatactgagtgttatttgcaggcctattttgttattctgaattaatttttcattttaaaaattaaacagcaacagaaaaagataaatatattcataacctgtaactaatagcacatgttgatctttgacctctatgctctatcttattatatgtgttatagtaagaacattaagtgagattgatttgaaatctcccagtttcccttctgagcagtctgtttctctgcagagacatggcctactctgacatattttgtccttccttaccacattttttaattcctaccagctaacctccttcctttcccctccccattttgttgcctgagttacctagactagctgttaactcaagattttcttttcttggtccctcaagtagctaggactatagatgaggtgtaccacacccaacatgaaactctgcaaagagggccgggtgtggtggtgcatgcctttaatcccagcactgggaaggcagaggcaggtggatttctgaggccagcctggtctacaaagtgagttccaggacatccagggctacacagagaaaccctgtctcaaaaacaaacaaacaaaaactctgcaaagatttttgtggggaatattttgtgtgccacaccctattctattccaaccacttgatcttattagttgagtctccaggaccacccacaactacccagttctttgaacttttacattggtacaaggtgtccataaatattattgcatcggttcaccttcgtctatctcctctcattctctcagatgttcactggagcaagtggcatgaactgtttcatagatgaggcaattgagaagatgaaatctatgtaattggccgaccttataaagagaggcactactgaaatccagatcacctctacccttctaaatccttaccccaaatatccagcaatccatgaacactcttataggcgttacctttcctgttcccggtacacaatatctaacagaagcaagggcaccaacattcagtttaagtggttatagattcttgttcacaaaatgtgcaggaagtttctaagtgttgttttttgtttgttctcttctgtcttctaggcagaaaatctggtgtattaactgtgaaaattctagaactgcatgaggaatgcagcatgcaagttgcagtatgtgagcagttagcagggcctccaatcaccagccctcccggaggactagctcctagaccaggagcctacctgaaggtactcttcaccagagagactgcagaccacttgatggggcatccccaggacatcatttacatcttccctccttggtgagtgtaaagaactgagtctaccagttgttaatcattaaggttaccttccataggagatctttctagagcatcatagccagtggtcatttatagtctgcagtgacctctcatggttcttaggatcacttgtgaaatggcatcaggctacctgtggatacagctcctagattgtttccttcttatatgtgtgtgtgtgtatgtgtgtgtgtgtgtgtctgtctgtctgtctgtctgtctgtctgtgcagattggagagtgtgtgtgcatatgagtacagttttcctcacaagtcaggagagagaatcagattcctgagaactgccccacaactctttttttttttcccccgagacagggtttctctgtatagccctggctgtcctggaacttactttgtagaccaggctggcctcgaactcagaaatccgcctgcctctgcctcccaaatgttgggattaaagacgtgcgccaccacgcccggcgccccacaactcttataggcagttgtgagccaccctacctaggtgctgggaatttaacttgggtcctctacaagagcaataagaattcttacctcctgccgggcagtggtggagcacgcctttaatcccagcacgtgggagggattaaaggcgttttgcaaaggaaaaatttctttataatgttataaggacaaatgcttatagattattgttaggaactatgttattttaataaaatagtggatgtagattctccttcaataatcatgacttcaccagcagtgtgaaggttttcagtaccaggcgtggtctctttcttgttaagcaagtcttaaaatctaattagagaacaatgggatgacagaaggaatgcagaagaggatacaagtgatctaatagggaagtgggaaggaggcctccttgaagagagggaggaagctaaaataacacaaatggctaaaaacctacaaggaatcaaccattagctgtagcatatattaataaacaacaaatacacactgtctctggctaggcaccggctggcagtctcggtctgttcttagcctggcacataggccgagactgcattttttccctttaaccaaagcctgtcccatcaaaattggctctgcttatccaaagcccggaaatgactctccaccttgtggctggttgctgccaaatccactccgcactctcaaattcctgtggctagctggcctgtacttcttgcaaatccatgccctgccatacttacctttcccttggagcctgaacacggatctgccatggatctcagttgaatcaccctgagaaagcaaacaccagacaatcttagacatcaacagataacaaaatcgttgggcgcagaacctagcatcctaatcttcccaaatcttctggtggcggatccaggacccaccactcatactaacagcctccggcctcctacatgttggttgccttgctcctgttgtccaaaaagcaagtttctttctcctgttttcccctcttcctctcctgacctgaaagttctgcctcctcgcccagtgattgggtctcacagatgtcctttgctggtttcctctttagtatccaatcaatagtgggggggggggggattccactataattagctttttacttaaaatagtataatgcacataattgaggtagaagcatactactgcttatcactgccatgctggctgttggtatgtttcataagacaccagtggctaggactgtaggttgcatctgtcctttggaagcttgcacaatgccttttggtaccatgaaagctagtcttcagggaggaggcactcagattagttctacccaataatagttctctccattatgtttatttatctttttagcccaacataatacttcctgtattttccttgatttcttttttttttaatatataaaaaatcttagactttttatgtagtgaaaatttttcttcctctttcagttatggcagagaggtttcgtgggtagtattagtatgtagttagtgttggtgttagtatagtgggtagtaactagtagttgatgttagtgtatgttcctggaatagtctttcaggacttggaatgcaatctcgaggctcctctggcttctgatactttctttgagaaatcagctgttactagtgggatttccttcataggtgacttatgttctcattctcttgtactttcttttttttttttaatagttaatgttttgaatataacatgctgtggggattttcttttccagccttgtctatttagtgtttttttgtgattctgtgttcatatggatgtgtcttttttagattggagtaattttcttctataacgttgctgaaggtctggtctgccactgacttgggatttttcctcatcaattcctataattagaagatttggacttcccatggtctcacagatgtcctttgttggtttctttttgtttcttttctgctttttgttttgttttgtttgttttgagggatagagtttttctgtgtagccctggttgtccttaaactcactttgaagaccagtctagcctcaaactcacagagatcatctgcctctgcctcccaagtgctgggatcaaaggcgtatgccaccatgcccagcttgtattgcttttctgtattttaattttttttttatgttccttgatattttggtctgaatcctctattttatctttgagacattgtgcttgattcatttctaattgtaaagctttcctttgcattttctagttagactactgggtttttcaattccatcttaatttagtcctaagtgttctccagcatttctatctctattgaattttattttcaaatctttgattctttgtcatttccatcaaccttatgtttgtattgtttttgttatcacagaaggagaaaagttaagctctttcttgaattttttttatggtgtgcgtgtgtgtgtgtgtgtgtgtgtgtgtgtccttacttttaaaactccttgaattctttgaggaaatttatgatgattcctttaatgcttgtgccctggagttgatctggatcattctccttagcatttggacaagctggtaggttttaaagaacatagtaacatagtggcttgatctttaatattcttggtattcctgccatgagatccaggcgtgagaacttcattagtttttagtatattatagatgaagaagggtcaaagaagagagaagctgtagggttcagttcagcctagagcagcagttctcaaacttgcaggttgaggggtcacctaagatcatcagaaaacacagtttacattacataacaaaagcaaaattacagtttttttaaagaagtagatagagtttattcaaatttaaacaatataacatcaaataatgagagcaaggacatttatttttattcctttttgacgatatggcagaaaaccaattgatatttgaaatgtagaattgactgtagcttttctttcctaagtttctcttttccaacttatggaaatataagtaagcattaaaatatttctgctaaactttgttacttttagcaataatctagtcaccaaaatgctattttcagaataggttctttttttgcatattttatttttgtgctatcattaaaacttcgtagttttatatctatgctaagacatatgtcctttgactctaattaatagtttcattttctataatcaactgtgttactcttctggattttatggcctaatatgacataagatcaaaaaatcctttaattgtattctaattagttaacctattatcacagccccactaataccataggagatcattatcatttgtttcttttctcttctattagttttgccaatcgcaacgctcttttgtcatatctcatttttcaaagttgaagacaactttattaaatcaagggcatggtttggcccagtcctgtccatcttctgcctatcagtcaaatgttctggataaattctaggaaaaaaaatgtacttctttgaataaaataatcaaaagaaaataaaaatgtagagattagttgactaaaggatatcttctgaaatctcctgttaattagcctgatgaatatgtgaagaatgatatatactatggataagacaagaatgtgaaatataatcagaatttgacattgatgagaccatgatgggtcattatacattctttttttaaaatttatttaattttttattttctttttttattaggtatttatttcatttacatttccaatgctatcccaaaagtcccctacccactcgcccatccactcccccacccacccactccaacttcttggccctggcgttcccctgtactgaggtagatgaagtttgcacaaccaatggtcctctttttccactgatggccgactaggccatcttctgatacatatgcagctagagacacagctctggggggtactgggtagttcatattattgttccacctatagggttgcagatccctttagctccttggttactttctctagctcctccattggaggccctgtgatccatccaatagctgactgtgagcatccacttctgtgtttgctaggccccagcatagcctcacaagagacagctatatctgggtcctttcagcaaaatcttgctagtgtatgcaatggtgtcagcatttggaggctgattatgggatggatacccggatatggcagtctctagatggtccatcctttcgtctcagctccaaactgtgtctctgtaactccttccatgggtgttttgtttccaattctaagaaggggcaaagtgtccacactttggtcttcattcttcttgagtttcatgtgtttagcaaattgtatcttatatattgggtatcctaagtttctgggttaatatctacttatcaatgagtacatattatgtgagttctattgtgattgggttacctcactcaggatgatgccctccagatccatccatttgcctaggaatttcataaattcattctttttaatagctgagtagtactccattatgtaaatgtaccacattttctgtatccattcctctgttgaggggcatctgggttctttccagcttctggctattataaataaggctgctatgaacatagtggagcatgtgtccttcttaccggttggagcatcttctggatatatgcccaggagaggtattgcagtgtcctctggtagtactatgtccaattttctgaggaaccgccagactgatttccagagtggttgtacaagcttgcaatcccaccaacaatggaggagtgttcctctttctccacatcctcgccagaatctgctgtcacctgaatttttgatcttagccattctgactggtgtacgatgaaatctcagggttgttttgatttgcatttccctgatgatgaaggatgctgaacattttttcaggtgcttcccagccattcagtattcctcaggtgagaattctttgtttagctctgagctctattttttaatagggtgattagattttctggagtcaaccttcttgaattctttatatatattggatattagtcccctatctgatttaggataggtaaaggtcctttcccaatctgttggtggcctttttgtcttattgacgatgtgttttgccttgcagaagcttttcaattttatgaggtcccatttgtcattctcgatcttacaacacaagccattagtgttctattcaggaatttttcccctgtgcccatatcttcgaggcttttccctactttctcctctataagtttcagtgtctctggttttatgttgtggtccttaatccacttagattttacattattacaaggatataggaatggatcaattcacattcttctacataataaccgccagttgtgccaacaccatttgttgaaaatgctgtcttttttccactggatggtttttgctcccttgtcaaagatcaagtgaccataggtgtgtggattcatctctggatcttcaattcttttctattggtctacttgtctgtcactataccagaaccatgcagtttttatcacaattgctctgtagtacagctttaggtcaggcatggtgattccaccagaggttcttttatccttgagaagactttttgctatcctaggttttttgttattcgagatgaatttgcagattgctctttgtaattcgttgaagaattgagttggaattttgagggagattgctttgaatctgtagattgtttttggcaagatagccatttttactttattgatcctgccaatccatgagcatgggagatctttccatcttctgagagcttctttaatttcttttttcagagacttgaagttccaatcatacagatctttcacttccttagttagagtcaccccaaggtattttatattatttgtgactattgagaagggtgttgtttccctaatttctttctcagcctatttatcctttgtgtacagaaaggccattgacttatttgagttaattttatatccagctacttcattgaagctgtttatcaggcttaggagttctctagtggaatttttagggtcacttatatatactatcgcatcatctgcataaagtgatattttgacttcttcctttccaatttgcatccgcttgatctccttttgttgtcaaattgctctggctaggacttcaagtacaatgttgaataggtaggagaaagtgggcagccttgtctagtctctgattttggtgggattgcttccagcttctcaccatttactttgatgttggctactggttcgctgtagattgcttttatcatgtttagatatgggccttgaattcctgatctttccaagacttttatcatgaatgggttttggattttgtcaaatgctttctccacatctaacaagatgatcatgtggtttttgtctttgagtttgttgatataatggattacgttgatggatttctgtatattgaacgatcccggcatccttgggatgaaacctacttggtcaggatggatatttgttttgatgtgttcttggattctgttagtgagaactttattgaggatttttgcatcgatattcgtaagggaaattggtctgaagttctctacctttgttgggtctttttgtggtttagttatcagagtaattttggctttatagaatgagttgggtagagaaccttatgcttccattttgtggaatacattgtgaagaactgggattagatcttctttgaaggtctgatagaactctgcactaaatccatctggtcctggacttttttggttgggagactattaatgactgcttctatttccttaggggatataggactgtttaggccatttacctgatcttgatttaactttggtacctggtatctgtctagaaacttgtccatttcatccaggttctccagttttgttgagtatagccttttgtagaaggatctgatggtgttttggatttcttcacgatctgttgttatgtctcccttttcatttctgattttgttaattaggatgctttccctgtgccctctagtgagtctggctaagggtttatctatcttgttgatttttctcaaagaaagagctcctcctttggttgattctttgaatagttcttcttgttttcacttggttgatttcgcctttgagtttgaacatttcctgccatctactcctcttgggggaatttgcttccttttgttctagaacttttaatgtgttgtcaaggtgctagtgtgtgctctttctagtttctttttggaggcactcagagctatgagttttcctcttagaaatgccttcattgtgtcccatatgtttgggtatgttgtggcttcattttcattaaactccaaaaagtccttaatttcttcattccttccttgatcaaggtatcattgagaagagtgttgttcagtttccacgtgaatgttagctttctattatttattttgttattgaagatcagtcttaatccatggtgatgtgataggatgcatgggacaatttcaatgtttttgtatctgttgaggcttgttttgtgaccaattatattgtcaattttggagaaggtacaatgaggtgctgagaagaaggtatatcctcttgttttaggataaaatgttctgtagatatctgttaagtccatttttttcataacttctgttagtttcactgtgtccctgtttattttctgtttccacgatctgtccattggtgaaagtggtgtgttgaagtctcccactattattgtgtgaggtgcaatttgtgctgtgagctttacttaagttactttaatgaatgtggctgcccttgcatttggagcatagatattcagaattgatagttcctcttggaaaattttacctttgatgagtatgaagtgaccctccttgtcttttttgatgattttgggttggaagtcgattttattcgatattagaatggctactccagcttgtttcttcagactatttccatggaaaattgttttccagtctttcattctgaggtaatgtctgtctttttccctgagatgggtttcctgtaagcagcaaaatgttgggtcctgtttttgtagccagtctgttagtctatgtctttttattggggagttgagtccattgatagtaagagatattaaggacaagtaattgttgcttcctgttatttttgttgttaatgttggcattcttttctttttttttaagatttatttatttattatatgtaagtacactgtagctgtcttccgacactccagaagagagagtcagatcttattacatgtggttgtgagccaccatgtggttgctgggatttgaactccggaccttcagaagagcagtcgggtgctcttacctactgagccatctcaccagcccggcattcttttcttgtggctgtcgtcttttaggttagttgaaggattactttcttgttttttctaggacatggtttctgtccttgtattcgtttttttctgttattatcctttgaagtgctgcattcgtggaaagataatatgtgaatttggtttggtcgtggaatactttggtttctccatacacagtaattgagagtttggctgagtatagtagcctgtgctggcatttgtgttctcttactgtctgtataacatctatccaggatcttctggatttcatggtctctggtgacaaatcttgtgtaattctgataggcttgcctttatatgttacttgacctttttcccttgctgcttttaatattctatctttatttagtgcatttgttgttctgattattatgtgtcacgaggaatttcttttctggttcagtctatttggagttctgtaggcttcttgtatgttcatgggcatctctttctttaggtttggaaagtttcttctataattttgtttaagatatttgctggccctttaagttgaaaatcttcattaaattaattaaatcttcattaggatctttttgccttttgtattttctttgattgttgtgctgatgttctctatggaatcttctgcacctgagattctctcttccatctcttctattttgttactgatgcttgcatcgatggttccagatttctttcctagtgttttcatctccagcgttgcctcactttgggttttctttattgtgtctacttccctttttaggtctagtatggttttgttcatttctatcatctgtttggatgtgttttcctgtttttctataaggacttgcaactctttagcagtgttctcctatatttctttaagtgagttattaaagaccttcttgatgtcttctaccatcatcatgagataggcctgtaaatccgggtctaggttttcgggtgtattggggtaccctggactggctgaggtgggagtactgggttctgatgatggtgagtgctcttggtttttttttttttttttagtaagattcttatgtctgcctttcgccatctggtaaactttggagtcagttgttatagttgtctctggttagaacttattcctctcgtgattctgttattctctcccagcagaccagggagactagctctctcctgagtttcagtggtcagagcactctctgcagtcaggctctcctctttcaaggaaggtgcacagatgttgggagccgcgcccacattcgccgttacaagatggcgctgacagctgtgttctaagtggtaaacaaataatctgcgcatatgccgagggtggttctccactccatgtgctctgccttccccgtgacgtcaactcggccgatgggctgcagccaatcagggagtgacacgtcctaggcgaaatataactctcctaaaaaagggacggggtttcgttttctctctctcttgcttcttacactcttgctcctgaagatgtaagcaataaagttttgccgcagaagattctggtctgtggtgttcttcctggccgggcgtgagaacgcgtttaataacaattggtgccgaattccgggacgagaaaaaaactcgggactggcgcaaggaagatccctcattccagaaccagaactgcgggtcgcggtaataaaggttcccgtaaagcagactgttaagaaggattcaactgtatgaattcagaacttttcagctggggaacgagagtaccagtgagtacagctttacgagaatgaagacaacccattttggataccagaaagactcacccgaaaaatccagactgaccaagggaatactgatgtccctcgtcttggtgatgtccagggcgtcaataataaagagagagcagcgttgggggataatgtcgacatttccactcccaatgacggtgatgtataatgctcaagtattctcctgcttttttaccactaactgggaactgggtttggccttaattcagacagccttggctctgtctggacaggtccagacaactgacaccattaacactttgtcagcctcagtgactacagtcatagatgaacaggcctcagctaatgtcaagatacagagaggtctcatgctggttaatcaactcatagatcttgtccagatacaactagatgtattatgacaaataactcagcagggatgtgaacaatagtttccgggattgtgtgttatttccattcagtatgttaaatttactagggcagctaatttgtcaaaaagtctttttcagtatatgttacagaattggatggctgaatttgaacagatccttcgagaattgagacttcaggtcaactccacgcgcttggacctgtcgctgaccaaaggattacccaattggatctcctcagcattttccttctttaaaaaattgggtgggattaatattatttggagatacactttgctgtggattagtgttgcttctttgattggtctgtaagcttaaggcccaaactaggagagacaaggtggttattgcccaggcgcttgcaggactagaacatggagctccccctgatatatggttatctatgcttaggcaataggtcgctggccactcagctcttatatcccatgaggctagtctcattgcacgggatagagtgagtgtgcttcagcagcccgagagagttgcacggctaagcactgcaatggaaaggctctgcggcatatatgagcctattctagggagacatgtcatctttcatgaaggttcagtgtcctagttcccttcccccaggcaaaacgacacgggagcaggtcagggttgctctgggtaaaagcctgtgagcctaagagctaatcctgtacatggctcctttacctacacactggggatttgacctctatctccactctcattaatatgggtggcctatttgctcttattaaaaggaaagggggagatgttgggagccgcgcccacattcgccgttacaagatggcgctgacagctgtgttctaagtggtaaacaaataatctgcgcatatgccgagggtggttctccactccatgtgctctgccttccccgtgacgtcaactcggccgatgggctgcagccaatcagggagtgacacgtcctaggcgaaatataactctcctaaaaaagggacggggtttcgttttctctctctcttgcttcttacactcttgctcctgaagatgtaagcaataaagttttgccgcagaagattctggtctgtggtgttcttcctggccgggcgtgagaacgcgtttaataacacacagatatctagtgttcagacttatctcctggtagaagatgaaggcccgaaacaggacctgtcccagaagctgttagcttctgtagtcaacactgtcacctgtgcagactagtctcagtggagtctgggagccaagatgtatctcgcagatgctcagtcaaagccctctctggccaggtggacacctatcctctggcaaggaaggtgtccagatgtctggagcctgaaaagggggctgcctcacaatctctgtgcctcccgcctgttccagaagctcttagcttctgtagtccacactctcacctgtgcagagtagtctcggtggagtctgggaaccaagatgtctcctgcagatgctcaggcaaagccttcccagactgggtggacacctatcctctggcagtgaaggttcccggatgtctggagcccaaaaagggggctgcctcgggtcattatacattctaaggtaccacatgttctcaactgttctgtaattctaaagaaagcttcgttatctgttaataatattattgttcaggtgcattcttttattagatttttttttatcataattgaagtacaacttttctcccttctctttcccgcctccaaatttcccatagacctcccctcactcctttaaattaatagcatcttcttttatttattggcactggacaacaactaatgtcccattattttttagagagttgatcaaaaggaggtaatatcaaaatacaactgacaacaggttggctactattgcaactgtcattaataatagttggccacttatatatcatattagggaagagacagttttgcatttggaacaaaatacctccaggtatagctgctcaatcttttacagaagctagggaaatgggttattgtgttccatattgtggatatgattattaacagagatgggtttttgtctgtgataaaactatacctatgaaaaaattaacaaagtacaaatgtagttttcaacatgcacattggccttcagctgggtccctgcagctgctggaactggttgttatgtgttgtccctggcatgatagtagtgcttattagttgttttgttgttgttgctgctgctgttgttgttattactgatgccactgtaacagctatgtcttctctgacaacaatgcaggctacagtaattctccatggcaactccatgtcccagatggctactcagatgtcaggttgtccaactgggacagcctgacctgggaggagacagtacccaaacatgtagccagcccttcagtagtgggtttttgtcttggcagaatccagcagttgtctctcctgtattcaagttttcccattttggatagcattttgtgtgcagtatgaagcttgtcatccttaatatcatctccaaatataagttcttagatgatcactttctttgaagtggaatggtggtaccttagtgccaggagcagatctggtggcatttcagcaattcatctttattccttggcatgtgattccttggagattattatctatgtggatttatttatccattttttctcttttagtttattatccttctctgtattcaattttatttaaaccccttttgttggaatatcttttcttaatgttccatcattttctttagacatttctcttgtccagtggtctctggattccttagttggatgactttcttctcaggttcagagattcagtccattatcatcaaggcaggaaacaaggtagcatccaggcgggcgtggcacaggaagtggtgagagctctacatcatcatccaaaggaagccaaaagcagactgttctcaagcagctaggagaagggtctcccaaaattacagttttaaatagtaataaaaatgaatacttttgttgttatgtggtggtttcattgtgagggttgcagcattagaaaggttgagaaccactgggtctagaggttggaaatatcttgggtgggatagaatccgttagactgaggagatggggctgctatacagggtgtgtagatggcaaggaaggaccgatgacgctgctgcagaaaggatgttcaagaaaagatcagcattacggagcaggatagattctggaggagggtgtggggtatgtggggataaccattttcacaatattaatcctgctgatccatgagctttggggagtcctaattttctgatatcttcatttttttttcttcaatgttgtagagcagtggttctcaactttcctaatgctgcaaccctttaatatggttcctcatgttttggtgatcccctagccataaaattatttttgttgttacttcataactgcaattttgctaatgctatgaattgtaatgtaaataattttgtagatagagaggtttgccaagagggttgtaccttcagatttgaccaaacctcaccacaagttgagaaatgctatcttggagtttttattatacaagtatcttacttccttagttggaggtaccccaagatttttttgagagagttgtgaaagatgtttttccccctctgatttatttctcactgtgtgtatataagttatagattttttgtgtgttaactttgtatcctgctattttgctgaaagtatttatcagctgtagaagtttcctgaaaactctttaggatctttcctgtataaaattgtatcatctgcaagtacaaatactttgtctcctttcctttgctattgaatcctccttcattcccttcagttgtcttattcctctagtgaagactccaagttatatattgactagatatggaaagaatgaacaactttgtcttgttcctgattttagtggaaattctgtgtgttacacatttctcttttagaacatgttgatcatgggcttcttgtaaattgcctttttatgttgaagtatttcctttgtatcagtaatctctctaggacttttatcatgaagtagtgttggatttagtcaaagaccttttccacatctaatgagatgactatttggtttctgtccttttgtctgtttatatggtgggttgcatttattgattaatgttcattcaaccatttctgcatctctaggatgacgctgacttgagtgtggtggataatcattatttgatgtgttcttaaaattattgaaataaaataatttgctattatattattgggatttttttgtttaagagagatatttgtctatagatttttgtttcatctggttttgatatcaggataatgcttcataataagtgtttggaaacagtccttcattttgtagtttatgaatagtctggtgagtagtagtgcttctttgagtctggtagaattttatgctgagttcatttggccctaggctttttctggttgggagattttaaattactccttatatctcagtagggcttatcagtctatttaaataatttcttcatcttgatttaatttagtaagttttatatatctagaaatctatcactttcctctaggttttccaatttggtgaaatacatgttttaaagtgatgtccttataattatctggatttcccttgtctgttgtactttttcatctctagttttattagttgggatcctcctaattttattaattgagtaaaatttcatcacatatgtagtttttttttccaaagaatcaactctttgttttaaatgttattgtttctatttcattaatgtcagccctgagtttgattctcttgtgttgctgtattttattaatccactctaatctccctggctgcagcgtgttccttgctagcgggcccaatgctctggattctggaatgacagacagacaggcagacacacacacacacacacacacacacacacacacacacacacacactcactcactcactcacacagccttatacttaatatgccttaattcagctcaatggctggaccactcccaaatctccacattgtttacgtctcccctctgattttcctgaattattacttatcaggatattatataatatctatattctatctttgctaccctgtactcaatgggggcgggggacccattgggactgcacttccctggctcttacatgattgtctgctctctcttctgcagctctcaaacctgtttccccagcatggtggtactaaatctttttcttccttggttaccttgcccaggaaatctaaagtcccacctctgtctccctccctccagctgctttatttaccagttagagctaactagggacagggacctgcataatcttaagttcaggattatcttgtaatttttgggaacccagttaacataatacaagtgttaaatcaaatccacaataattttgccccttttaattttggaggagggtgctgtttcttcttgtttttctaaagctctcaagtgtctcattacattattaatagatcccttcaggttttttgatgtagacatttagtgttattagtgttcctctcatcatttatagaggtttgagtatattgtgatttcattttcatttaattctaagaaattatttctctcttgatttctgctttcatctaatttctatgcaatagtatgctgtttagcctccgtgagttgctatcttctgttttctattcttgctgtccagttataatttatgatggtcagagcgaatgcagagtgttacttcaattttcttatctgtgttgagatgacctttgaggtcaatcttgggaaaatttggtgaactcctaaaaagtaaatgtatactatagtcttgattgaagtgctttgtagttatctgttaggtttctttgtttgtgatattgttctggttagtttttgttgtcatcttgacataggcctgggttatctgagaaaaagaaccctcaagttaggaaatgtctcaatcacattgtcttgcaggaaaggctgtagggcactttctcagttaatgattgatttagaaatgcccagccactgtgggttcaagcctattattagtaccccttatgaacatccttttctcctcaagttgcttttggtcatggtctttatcatagcaatataatgcaaactaaaatagatgctatttaaattcagagttcttagatttgctttgtgtctggatgacttgtctgataagaatcaggcactaaagacacccacttttactgtgtttcagtttagtatgtgattttagatctaagtgtttcttttgtgaaattatgtacttgtgcatggtatgtgtgctggccagttttatgtcagctttatacaaactatagtcattttggaagagagaccctcaaatggcaaaattctccagctcgattgacctattgagaagtctgaaggacattttttcgattgatgaatgatatgggcgttttgagctcattgtgggcagttccaccccttgacagatggtccttgatggtttaagaaagcagcctgagcaaactatggtgagaaggccagtaaacagtgttcctccatggcctgtgcatcacctcctgcatcattgttcctaccttgagttcctggccagactttcctgaatgatgaacttgaagctgtaagatgaattaaagtctttccttcataatttgtgtttggttatgacattttaatcacagcaatggaaactctaactaagatagtatgtaaatattaaaattgtaatatccttttggtagatttttcttttatgagtatatgtacctccctatctcttctgatgagttttgggttgaggtccatcttgtcaactattaagatagctagaccttaaatttccatccttctaacctaaggtggtatctgtctgttaatatgatatatttcttagaggtagcaaaaacaaacaaagctataagatacacaatgtttataaaagtactgtcaagtccattttatattggccacttactgctgaggttgtacagattttaggacacatacataactgaaaagagatcaagaaggatacaaataggaaataaagaaatcaaagtgttcttatgcacaaattttatgattttatgcataaaacacactaaaaattccatcagggaacttttacatctgataaacactttcagtaaagtagcaggatgcaaaaattaactcagaaaaattaggagtctttgtatatacaaatgacaaactagctgtgaaataaatcagaaaaaagcaccttttaacaatgacctcaaaaatgtgcatgtatgagagcgtgtgtgtgtgtgtgtgtgtgtgtgtgtgtgtttgtgtgtgtgtggagagagagagagagagagagagagagagagagagagagagagagagagagaccgaccttaggtaactataaccgagcaagtgaaagacttgaataataaaaactctttgcattaaagaaagaaatgggtaaagacctcagaaaattgaaaaatctcccgtgctaatgaatttgtaaattaatattatgaacatggccatcctgctaaacataatttattttcaaaagtccatatcaaaatgccagcataattcttaacagaaattgaagcaatgtttcttttttttttttaattttatttgatagacaagctattttttgcttcatgtgaaaacataaaaactcaggataggtaaaaacactactgcataattaaagtaattgctgaacataacactatctaaggtttcaagtcaaaaaataaaagcagcttagttctgacataaaaacagacccattgatcaatggaatcaaattgaacacacaaacataatttcacatgcttatggacacctgagttttgacaaagaagccaagaatacacattagagagaagagaatcttcaacaaatggaacaaatggtgctggtagaattgaatagttgcatgtgcaggaattcagatagattcattctctctctctctctctctctctctctctctctctctctctctctctctctctctctttctcatgtgtgtgtatgtgtgtatcaccatatcaccctgacaaaaactcaacatcaagtagatgaaagccctcaacgtcagacccctaatttgatagaaaagaagtagttcaataatgtcagactcattggcacaggaaaagtctttctgagaaggaaaacaatagcacatcactaaaactggtagttaataaatgggacctaaagaagctgcaaatcttttttttttaatttaattttattttttacactccatattccattccccgccccctatccaccctccatctgctcctcatcccacacctcctccccaccccaccccacctccacatcgaagcccaaacaccccaccccacctgacctctaaactccttggggcctccagtctcttgagggttaggtgtatcatctctgaatgaatacagacccagaagtcccctactgtatgtgtgttgggggcctcatatcagctggtgtatgctgtctgtttggtggtccagtgtttgagacatatcaggggtccagattaattgagactgctgatacttctacaagattccccttctcctcagctttcttaagccttctctaattcaacaacaggggtcagctgaagcagctgcaaatcttatgtgtgtcaaaggacatcatcatttgcacaaagtgacaggctatagaatataaaaagatcttcattttttacacatctgatacggttaatatccaaaatatataaagaataaaaataactgaacatcaagaaagtaaataagtgcttccattgtgcttctgcacccaggagatggggctgttctacagccctctgagcacaggtacagccagaggaaagctggtctccaagtagtgttctgacacccaggctcagaggtgagatctccaaattttttttccagtgattgtctaaggtgggaccagccagaagtacacaggacacaggagcagtggatcagctaggacagggtccttccagttgccatctgcatccaggagcttggactgttccacagacctctgtcttaagggtcctaccaggggagagctggtctcccaggagggctgactcccaggcgggcttacaggtccacaagtgggacaagctcaaggcagagaaagaaaaaccaaataacaccagagataaccagatggcaaaaggcaagcacaagaaacttaacaacagaaaccaagactacgtggcatcatcagaacccaattcccataacacagcaagttgtggataccccaacacactggaaaagcaagatttagatttaaaatcacatctcatgaggactttaagaaggacagaaataacacccttaaagaaatagtggagaacacaggaaaacaggtagaagcctttgaagaggaaacacaataattccttaaagaattacaggaaaacacaatcaagcaggtgaaggaaattgaacaaagccatccaggatctaaaaatggaagtagaaacaataaagatatcacaaagggagacaagcctggagttagaaaatccaggaaaaaaatcaggaatcatagatgcaagaatcactagcagaatacaagagatagaagagagaatcttgggggcagaagataccgtaagacattggcacaacagtcagagaaaatgcaaaatgcaaaaagctcctaacccaaaacatccaggaaatccaggacacaatgagaagaccaaatgtaaagataataggtatagacaagaaggaagatttccaacttaaagggccagaaaatatcttcaacttccctaacctaaagaaagagatgcccatgaacataccagaagactgcagagctccaaatagactggatcagaacagaaattccttccgacacataataatcaaaaaaccaaatgcaaaaaacaaagaaagaatattaaaagcagtaagggaaaaaggtcaagtaacatataaagttatacttctcagaattacaccagacttctcgccagagcctatgaaagccaggagatcctgggcagatgtcatacagacccaaagagaacacaaatgccagcccagggtactatatacagcaaagctctcaattactatagatagagaaaccaaggtattccatgacaaaaccaaatttacacaatatctttccacacatccagcccttcaaaggataataaatggaaaactccaaaataaaaaggaaggaaattacaccctagcaaaagcaagaaaataatattcttttaacaaaccagaaagaagatagctacataaacacaattccacatgcaacaacaaaaataatagaaaataacaatcacttttccttaatatctcttaatatcagtggactcaattccccaataaaaagacatagactaacagactggatacgtaaacaggaccccacatttagctgcatacaggaaacctacttcagggacaaagacagacactacctcagaataaaagtctggaaaacaattttccaaacaagtgttcccaagaaaaaagctggagtagccattctgatattgaattgaatcgattttcaacctaaagttatcaagagataatgaggaatacttcatactcatcaaaggtaaaatctaccaaaagaactctcaattctgaacatctatgggacacatgcaagggcgccaacattcattaaagaatctttgctaaaattcaaagcacacattgcaactcacacaataatagtgggagacttcaacaaatactctcatcaatagacagatcatggaaacagaaactaaacagagacacagtgaaactaacaaaagttacgaagcaaatgtatttaaaagatatttatagaacattttatcctaaaacaaaagaatataccttcttcttagcacttcatggtaccttctccaaattgaccacataattggtcacaaaacagacctcaacagatacaagaagattaaaataatcctgtgcatcctatcagattatcatgaataaggctggtcttcaataacaacaaaaacgatagaaatcccacatacatgtagaagctgaagaacattctactcaatgataactttgtcaaggaagaaataagaaagacattatagacttttgagtttaatgaaaatgaagccacaatatacccaaacttgtgggacacaatgaaagcagtactaagaggaaaactcatagctctgagtgcctccaaaaagaaactggagagagcatacattagcagcttgacagcacaacttaaagctctagaataaaaagaaggaaatacagccaagtggagtagaaggcaggaaataatcaaaactcagggctgaaatcaaccaagtagaaacaaaaagaactatacaaagaatcaaccaaaggaggggctagttctttgagaaaatcaagaagatagataaacccttagctaaactaaccagaggtcacagagacagtatccaagtcaacaaaatttgaaattttcagggagacataacaacagaaactgaggatatcaaaagaaatcatcagatcctattgcaaaagcctatatacatcaaaactggaaaatctgaatgaaatgggcaattttctagtcagatcccatgtaccaaaattaaatcaggatcaggtaaatgatctaaacaatcctataacccctaaagaaatagaatcagtcattaatagtctcccaaccaaaagaagcccacaaccagatgggtttattgcagagttctattggaccttcaaagtagacctaataccaatactcttcaaactattccactaaatagaaacagaaggaacactaccaaattcagtttatgaagccacaattactctgatacctaaaccatacaacgacacaacagagaaatagaacttcataccaatttcccttatgaatattgatgcaaaaatactccataaaattcttgtaaacctaatccaagaacacatcaaaacgattatccatcatgatcaaataggcttcataccaggaatgcagggatggttcaatataaggaatccatcaatgaaatctactgtataaacaaacacaaagaaaaaaaaaacacatgatcatttcattagatgttgacaaagcatttgacaaaatccaacaccccttcatgaaaaatgtcttagaaaagccaggaattcaaggcccatacctaaacatagtaaaagcaatatacagcaaaccagtagccagaatcaaactaaatggagagaaacttgaagtaatgccacaaaaatcagggactagacaaggttgtccactctcttcctacctattcattatagtactcgaagtcctagccagaacaattagacaaccgaaggaggtcaaagagttacaaattggaaaggaaaaagtcaaaatatcactatttacagatgatatgatagtatacttaagtgacccaaaaaattccaccagagaactcctacactggatagacaagttcagcaaagtttctggatgtaaaattaactgaaacaaatcagtgccctttctttacacaaagaataaacaggctgagaaagaaattaaggaaacaacacctttcataatagttacaaataatataaaatatcttggtgtaaatctaactaagtaagtgaaagatctgtatgagagaaacttcaagtctctgaagaaagaaatcgaagatctcagaagctggaaagaacccagatgtccctcaacagaggaatggttacagaaaatgtggtacatttactcagctattaaaatagtgaattcatgaaattcttaggcagatggatagaactagaaaatatcatcttaagtaagttaactcaatcacaaaagaacagacatggtatgcactgattaataagtggagagtagctcagaagttcaaaatacccgagataaaattcacagactacatatagctcaagaagaaggaagagcaaagtgtggatacttcgttccttcttagaaggaggatcaaaatacccatggaaggaattacagagacaaagtgtggagcagaaactgaaggaaagcccatccagagactgccccacctggggatccattccatatatcgttaccaagcccagacactgttctggatgccaacaagagcttgctgacaggagcctgatatagctgtctccggagaggctctgacagtgcctgacaaatacagaagtttatgttcacaaccatccattggactgagcacagggtccccaatggaggagctagagaatgaacctaaggaggtgaaggggtttgcagcctcataggagtaacaagaatatgaaccaaccagtactcccagagcttccagtgactaaaccaccaatcaaagaatacccatggctccagttgcatgttcctcagaagatggccttgggagatgtcaatgggaagagagtcccttggttctttgaagtctggatacctcagtataggggaatgccagcactggaaactgggagtgggtgggtcagtgaatagggagaggtgggatgggataggggtttttcggatggggaaggaggaaagtggatagcatttgaaatgtaaataaggaaaatttttaaaaagaagaaaagagaaaggaaataagtgaaattaaaattggagtgcataaaaaaacagagagttctcaaaagatgagacacaaatggctatgaaacacttaaatgttcaaaatctctagcaataagggaaattcaaagtaaaatcctgttgagatttcaatttaaaccggtcacaatggccaagatcaataaaacatgacagctcatgctggcaagattttgaagaattttaaaacttgtttcaaatgaaaattcaaacttgtacagtcagtttgcaaatcaatgtaattgtacctcaggatcctgaaatagatctgcttcaaaatcttcttgggcatgtacccaatggacactactccctactccctactgccgagagtcttgctcatccatgttcattgttgtgctgttcataatacccagtgttttgaaatagcctaaatgtccatcagctgataaatggataataaaaatgtggtgcatttacacagtgactattaatgcattgtttcaaaaaagaaaaaactaggaaatcttaggtaattggatagaattagaaataaatcattgtgagggaaccctgcctctgaaagataaagattgtatattttctctaatatcaggattttattatagatatccagtaaagaagcaacgtaaatcagtgacaacatggaattagcatccaaagaaaaagattaagaaacaagctatttaatcacatgtgtcataatcccggaattacataaggctctatgtttggcaccaacatgtttgtcttttagtgtgtgaattatgtattcccacataactgtaccctgcaaatctagggggaaagtactaagtccttagatataatagcatggcctgtttttttggaaatatagtttgtacttgcagcctttcaaatcttagaaatgaggaaattccaagcattccacatgaatagataattttagtcgatgacatgaagtgtttgaatgataaacatctctgttcacataaactgaaaagtacaatttgagatcatgtgttccctggactgtggttgatcagcaggtgggcagcctgtataagcatcctgtgtcctggcttgcatttcagagaggcagtaataggcacaacaccagtttatttccctctagcccacctgaggagggcctgtagctgattgcttcagtccttctacctgattcttcacttctttatggagattaatcacttaattgggactaggttgatctgtcagacaaacactttgggccacatgttaacaaaattgtttgagaacctaaaaattcgcaagtagttatgtttcagtactatctttattaaatctgtcataattttccttatgaaatgataataaatgtaattgttcttagttgaaaagttaatttagtatcattagtcatctggttccctggaattattaagtagtgtgagtggtatttgcaaaacaagtgaagacactttgttgttgaaggatagtatagacactagaggtacctttatggcattataattaatagtattctgggtgctcttatcttctgactcacagacatcctagtcacttggtcagtgttgtagtagtgattacatttagggtttatagtatatgaaagcaatttaagaaacgggaaagataaattgacatttttgtctatgtgtgtatatattaaatgaaaaacactgaactgtcatgtaatttatgaccgtactaccctgaataagcttgatcttttctgatctcaaaatctaagcagggtcagcctagttggtatctcagtgggagaatagtcagttcagcttaggttctgggacaggcagtatgacaggagactcactaagtcagggttgagggttctgtcttgtgatgatcctgatgttctgtagccaacagtggcttggcttacacagcttgtgttcatttgtcagagcttgaagactactcactgtatgttaataatacacgggtgaaaatatttgacagatgtatgcaaattttttttttttgctttattttgcttttttttttgctttattttgctttgctttccaagacagagtatcactatattcctttggctgtcctggaactcactatatactcctgggaggccttgaactcacagagatccacctacatcagcctcttgagtgctgagattcaagcgttggtaactagatctaacaagcaccatcaagaaaataaatataatctgggtacccaggagaaaaaaaaaaaaaaaaaaagaagatcaaagagttcagtggctttcctcattacacagtgaattcaaaaccagcttgtgcttgtcagaaaggagaagaaaagatggtcaggaagggagaaccctgggacttgcttcctggcctgagacgtgggaggggtctgacaacatgacacatgagttatgaaaagggtgaattactgggaacaagtgtacaacagggatatcagggagatagacaggaagagcaggagaagttgcccttgtactgaacctatgtaaatgtcttccttgtcacaattaccccccaaatatatatgtatacatataatatatataatatgatatgtaagtatatatataaatatatattggtacccatatatatgtatatatgatgtctatataaataaaaaatatatagtcaattaaacagtcatttctgtaaggccactgaacatattgtgatcatgttcattagaatatgtgccatttgattatagcttcttcaatcatgtggttcattcttagaaatatgcttgaaagagtattgggatgggatagggtaggcaatggttctcaacctttctaacgctgcaaacatttaaaacagttcctcaagttgtggtgacccccaacctataattatctcattgctacttcattactgtaattttgctgctgttatgaatcataatgtaaattcctgatatgcaaggtatctgatatggtgcccccaaggggtcaccacccactggttggaacactgggttaaagttattgtgttatctaaagaaagctctctcagccctttaggcaggggaggtttgctcctttgtcagtttgtatcttgttcctttgaggcagagtttctcactgaatttgaagagttgttttgttttgatttgtttaggctagcaaggcccaggccccagtggtctcatctccatcccactctggggttgcgcctgccgcttacatgaatgctgtccttgtctagtcctcatggatttcaagcactcttacaatggtccacccccccccaatctctgattttttaaaataagtcaaatcactttattctaattaactcacagatgaaaacaccatacagctggtttaaggaagccattcaaacacttgcccagagccaaactatgtatctcagcaaacttttatgcagttagaatcttgattctgcatcaacagagcttcacatagagttttacatttccgccatcaattatatttttatttcttatccaccacagcagagcaaaagctggagggaggcaaagttgtacattctccttcatggtccacatggaattagcctcggttttcttcttcctcattatttaatatgatgttctattagtctcctttctgaattttatactacacctacacttaacacctgttgacatatataatctatcagttgcatctacatataaggcagaatgtacaggagtgttgcttttgttttgtttgtttttcccctttctgagttttggtcatctcagaaagctctcagattttgaaaaattgccagagtctataaaagttaattaatgtatgtgattcttgccttaataataattttcttgaatcagtatccaagaatgaggttaaataattggagtgtaggtgtctaactcactagaaagatggtctcagtgcttggtacatggcctaacacagaggagtgacttaataaacgtatccagcaaaggagtgtacatttctgacagttccctcaccaagtttagaaccaatagaacatgttcctacttattatactttgcaatcagtgataccttgaaggacagatgtgtgtgcccccataaagtcactttaggaggctatttgtccatttctttggagcagctgtgaaattgattgtaaggtcaaaggagatagtctatctcccatagagtaggctttttgtacaagttctgcccttgagtgtactaagacttgagtgctacaggggaatgtaactgtgagagatggtcagcaactctgaccatacaaaagttagagagtagaagccaagcattgaaacacagatgcctcttttgatcatagtccttcactgagaagcactgctctaaaagcatcattgggaaagctggtatactttgaatataaactgcatattggattataatatttttccatcccaaatgttttcattatactgtggctttacaaaggaaagccgtgtgcttcggaatacatctaaaagtatttagagttaaattgtatagtgtctataggctattctctgtagttctataaatcaataacagttgtaactacaatgaccacaactatatattgtttatttggaaacagtggcaaagcttacttgtttcagggaaataataaaaaatccagctgacatgttcccgtcctagtgtggcctggctggccatgcactcactggctgccaatggccgacctgtttttatctcttggtgactctgattcagaactccacaatctctccacccagctctctaggttcccactggcagttgctaccacaccaaccctgtgcttcaaatccccggtggcctttgtggtgcacacctggcaaacccatgctttgtggccatacctttctctcttgaacccagacgagctaccgtgtgaaggaaaacacaatacaaacttagttcagaaacaatggtaactcaatctctgggtgcaacaactgaaacctaatcttgtaaaccttattaaaaaatgattcctctgatggcgaatccttgcagatatgccatgacaccaggaaactctagcacagctacatcttacccctctctgcccctggtccaaaacgacctaactctctcctgcttcctctctttctccgtccaacccagaagtcccgcctactcacccagtgattggctcctttattcattacgggattggttcacaagaatagcaccaggcccatccacaatacttattcattaatctaggagaatacaaaggcattttccatattctacattttcttttattactttttttttttttacaatctagttgttgcctcttttctagtcctccctcccatagtttgtcatcccattcctcctcccctctgcctccaagaggatgtctcccacccacccacccctatcaagcctccccactccctggggcctcatctctccagggttaggcataccctgtctccctgaggccagaccaggcagttctctactgtatatgagttgggggtctcttaccagatagtatatgctgcctgattggtggctcagtgtctgagagatctcgggggtccaggtgatttgagactgttggtcttcctatggggtagccctcctcttcagctttttcaagccttttcctaattcaactaacaggggttccccgacttcggtctagtggttggatataagtatctgcatatgtctaagtcagctgcttgttgagcctctccaagagcaaccttgtgaggctcctgtctataagcacaccatagcattagtaatagtgccaggccctggagcctctccccttgagctggatcccaattagggcctgtcactggaccacctttcccacagtctcttctccatttttgtccctgtagttcttttacaggaacaattctgggtcagagtttttgattatgggatggcaactccatccctccactttatgccctgtctttctagtggaggtggactctacaaattccctttccccactgtagggcatttggcctaaggacactttgagtcctgagagtttcccaccttccaggactctgctacattctagagggtccccctacctcccacctccaatattacatatttccattcattctgctggccttcagggcttctctcctgtctccccccacccttaatacctaatcatgttccccttttccctcccctttccctctcccattcagatccctccctccctctatctcctgtgattgttttcttctctctcccaagtgggattgaggcatcctcacttgggccctttggcttgtttacctttttgagttctgtgaattgtatcctgggcattatgtactttttggctagtatccactaattagtgagtatataccatgcatgtccttttgggtctgagatacctcacttgaaatgatattttctagtttcatccatttgcctgcaaaactcatgatgtcctcgttctgaatagctgaacagtattccactatgtaaatgaaccacattttctgtatccattcttctgatgtgagacatctaggttgtttccagcttctggctatcacaaataagactgctatgaatgtagtagaacatttgcccctgtggcatggtgggtcatcttttggttatatgcccaagagtggtatagctgggtcttcaggtagatgtatttccaattttctgaggaacctccagattgtttttgagagtggttgtaccagtttgcaatcccactagcacatccttgccaaaatgtgctgtcacctgaatttttgatcttagtcattctgattggtgtgaggtggaatctcagggttgctttgatttgcatttccctgattactaaggacattgaacatttctttaagtgcttcttggccatttgagatccctctgttgtgaattctctggttagttgtataccccattttttgattgcgttgtttgggtttttggaggttagcttcttgagttctttgtatattttggatattagccctgtattggatgtggggttagcaaagatttttttcccaatctgtaggttcaattttcaatttcttcacttgtttgattttgttgtcttgtatttctttaagggatttgtttcccctttaaaggcttctacctgttttcgttcagtgagttattcatatcctccttaaaggattctattatctttgtgagataggattttaggtaagcattatgcttttcaagtgtgttaaggcatccagggcttgctgtggtgggagaggtgggttctcatggtgtcaaagtatattggcttctgttgcttatgttcttgggcttgcctcttgccatttggttatctctggtgttaactggcctgagtgtctctgtctgcagcctgcctcctgtgtcccttggttgcttgaggtctcctgggaggccttcagactgtggggtcttcagaggagcagacatgctgctgatgatctgccctggcagaaggagcaggctggaaaggaggtggagttcgagcagaggaaatgagtctggagtcccctgggctccttgggacgtcccacctgctgtggttatttgggagggtcctttacctgttgctctgggtgcagcaggtctcctgagaggcttccagagtgtggggtcttcagagggacagacatgctgataatcttccccagcagaaggcccaggccaccaaaggcattttttgaatattttcttcaagtctaaaagtatttcagagtggaatggtggtcagttttagcacagggtctattattttagcaagctacaaacccatgtacagaaaaaataatctcatgaaacatggaggagaagcaactcagatcaaagaaggtattgatcatgcctgctttcataaccagaagaatagacatacaaagacctacagccactactcttaagttttgttttgatttactgatttttgtttgttttaggtagagtcccaggtatccctggcaggcctcaatgtcactttgtagctgtgtctgcttttgaacttctttagctcccaagtgctagaatctcagaagggtgccactattcacagcctttctgtctttaaatgattccatatgaaggcctctttatacaaaatcctatgtagctgtggcagatgatagaaagctgagaccctacaggatgggacaaggcctccacctttaacccgtattatgccatccttggattgcataaggcgcccattcctaatctacaaagacagagcctgcttaccaacctctctccatgccagttgcaaacacagaaaccctaatcccacctccccgctgcccccaaatatgtgatgtattctatcaagactacccagtgatcccctcaagcaggaacatcctaacttgagtgacctgtgtttagcccacagtataactctcctgatttccattagaaaagacacagcctccactccatcatccatatctttattcttcacaagtgaaacaacttcctttagcaaagtaagcagcctccttacaaggctttcctctctagggcttggtttgggaagatttgtctgattttttatccctaggatacctttgtgtttccatgaattcacttatgtttcatgattgtaactagtgactagcttgaaaagctgaatattagggaaacaatgtctgagtcatggacagcctctccaaatggctatctgattttccctctccttttctctgctgagtttttactgcttatcagaaacaggattttcagtgggtagcctgcccacttccagagccctctccctaagccacttctgttcttgtcacattccttgtttgttctgaaatcttaatctgtcttttctagtgtttatccttaacctgcttcttagcttgcatgctaagatttcccttcagcttgttctaatgtgtttttggttgatctgccactgtttgagccagttgatgaaccacctctaaattcctagtatttctgccctattctgtctgaaatgtcttgactttccgtttagacatctcttattcttttttgtgatgtctcttagttttcagctgagtgggcttcaaacattatagttttttcttagttttgttttaacttgtgtttctcatattgtatttgccatattcttcttggcagtttggttctacttcctttgttgtagatttctaacttctttagaacagaaagtataaatattctacagaaaacagattttctgcgatagaattgctataattttgattgatatatatgatattacagacatgctagtgaatgcttgtaatcacaagctcttggggtctgaggcaggatagttaagagttccagggtagccggggctaatctgtttatcaagatctatcattgaaacaaacaaataaaaccctttattcttagaaggaagaggagaaaaaaagaggagaagcaggaggagtagtattatcattagcattatattagccagcctgagttaataaattctgggagattcttatctattagtcataagatgttactttcaacactaaggtggtcatggaattgctgttctggctgctcaagataaggtaattagtgtctggaccagtaacactacaatctctccacagtacacttgttctcagttaatttttcatagtctctgcaaacacagcttcttttcaggagttgatctttacatggggaaattccattttctaataaatcatataaaccaggagcttgtcaggaatgtgatgggaatatttgcctgtcaacatttaagttggatttagcagtaaatccacctggtcctaagatttatcttgtggagagacttgatgacagctttgatatcattgattggtaatgagtctgtttaagtgctgtgtatcttgtagctttaattttagtaggtcacatgtgtttaaaaactcatccatttcttctaggttttccagcttttaaagaataagttttcaaagtattctctaagtatgttcttggttgtattagagtctgctttaacagtacctcttttgtctccaattttgttaatttgcttttccccccttactactttgactgaaggtttgttaatcttactttttcaaataactaactcttgggttgtgtgtattgttggagtttttttgatgatggtgttggtttttcattttgtgttttttgctttgctttgcttctacagaacagctctgtagctgtggctggcttggaactcactaaatagaccaaatggccttaaactcaaagtccactggcctttgctcctccacatactggaaatgaaagtgtgtaccacctggtttagcatttattgtccgtaaaaagcaataaataagtcacattcatttatttcttgatctatattatttcttgctttctactactatgttttctattggcttatttttttccagagccctgaggtacaacattgtttattgtatattgttctagcttttaatgtacactcttaaacctatttattatgtttcctctaagaactgacttgactgtatcccaaaggtgctggtaaagtatattctcagtttcattttgagtctaggaattttttttaatttcttctctaatttcttcgatgactctcttttcattcaaagtatattgttggtttccaagtggttttataatgttttttgctgttgattagtttaattacactatagtctgatggaacacatgccatagtgccatttttttaagctggtaagtttatttgtgatccacagtatggtcaatttgttagaagggtctatgtgctagaaagaagaatgtattccttatctgatgagtggaatattctgtatatatctgttaagtccacttgatttatggtgtattttagctctaaagtttctttgcttattttcaatttggaagagccatccgattattaaagtctcccactaatgttatatttgaactaatgtaggctttcagtgtttgttttatgaaactgagcgagtctaatatttagagtgtagatattgtattagtctgggttctctaaagtcacagaacttatatatagtctctataagtttgttggtgactcatcaatttgttgatgactgtagtccaactcctcaacaaaggtcagcaacagctgtgaatggaagtccaaggatctaacagttgctcagtcccacaaggcaagcaggcaaagaagagaaagcaaaatcttcttccaatgtccttatgaaggtgtggcccagatgtatgtgccaccacacctggatctgggacttgctttgtaccagatgaccttgaactcagagatctccctgttttaatcttctgggattcatagcctttatgccccaagatctccatgccaagattcaggtcagaaacttgtatctcccagcctccagattaggatcacaggtgtgccttccaattctgggttgtagttcattccagatacagtgaagttgtcaaccaagaatagcctctacaggtattgacagcaattgtgtcttttgtatgttttaattcaaatatcattacataggtttccttctacctttccagctccttcctgtttcatatcccctccactctcaagttgataggctcttttctttgattattgatgttcattcttgcatatctatggctacacttaaaaattatggcgaatatgagtatatttcaatatctattctttttcaaaatgtatgtgtatgcatataaggctgcatgaatttctatatactaggtatatgtggctgcatttggagaccagaagagggaatcagattctctggaactggagttatagatggctgtgtaatataggtgttggaaactgaacccaggtcctgtgcaataggaatatgcactctacactgagcttctttccagctccacaaccgttacatcttcttggtgcattgtttcctttattaatatgtgttgatccttctttagcaatctaattagttttggtttgcagtcttctttatcaattgcagagatagatatgtctgcttatttatggattttttttacttagtataatttacatcctttgatcaatttacatccatttttctatgtctttgaatggttcttatttttccaatccagttgatttgtctccatatttttacttgtcaacttagaccgtttacatttagtgtctttattgattgtttataaatgttttagagaatagtttcctggattgttgtttcatttaatttttctgaatgaattttgggagtatgattacttcctgttttagataacattgatttttttctagttccttttgttcttttcataggatttatacttttatgtgttcatgtggggaagtgtcttagtcagggtttatattcctgcacaaacatcatgaccaagaaacaagttggggaggaaagagtttattcggcttacacttccatactgctattcatcaccaaaggaagtcaggactggaactcaagcaggtcaggaagcaggagctgatgcagaggccatggagggatgttccttactggcttgcttcccctggcttgctcagcctgctctcttatagagcccaagattaccagcccagagatggtcccactcacaaggggcctttccccctgatcactagttgagaaaataccttacagttggatttcatggaggcatttcgtcaactgaagctccttactctgtgataactccagctgtgtcaagttgacacaaaactagccagtacaggaagggttttttaaattccttctctgtagtattccttttaaaaatattatttagtgctgatttggctgtcatgaattgccttacattttgtttgtcagaaatatttttgttttttcatcaattttgaaagggaacttgctacgaaaaaacactcttgtttcaattcacagttatttactttcagagcttaaagtatctcaatgcatgcttttctagctttatagagtagataataacggaagtagttctgataactgtatggtacaaaggtacatgagttgttcttctcatatggcattgatatcttcactatgatgtatcatggggaattccttctagggtcatttctgtttaggattctaaatttcttttgtgtttgaatgtatactccattttctagatttagaaagttttctgctttaattttattaagtctctgtgttacttatttacaacttatctgttactgtgataaaatataataaccaaggcaacttaaagaatgcagtgtttgtttagtcttatgattccagaaatggtagaaatggtagggaaggcacagagaaggtactgtttagattacattgtaggggagttaaagcagttgagttcatggttaggagctgtgtcatattctttggatttgttattgtcatgttgtgtgcgtgttggaatggactgtcttccagtttttccttgcttccaattctatttgattgtgttgggtttttttattaggtattttcttcatttacatttccaatgctatcccaaaagtcccccataccctcccccccacttcttggccctggtgttcctctgtactgaggcatataaagtttgcaagaccaatgggcctctctgtccaatgatggccaactaggccatcttctgatacatatgcagctagagacacgagctcagggaggtactgggtagttcatattgttgttccacttgtagggttggagacccctttagctccttgggtattttccctagctcctccattgggggccctgtgatccatccaatagctgactgtgagcatccacttctgtgttttgctgggccccagcatagcctcacaagagacagctatatctgggtcctttcagcaaaattttgctagtgtatgcaatggtgtccgagtttggaggctgattatgagatggatccccgggtatggcagtctctagatggtccatcctttcgtctcagctccaaactgtgtctctgtaactccttccatgggtgttttgtttcctattctaaggaggggcaaagtgtccacactttggtcttcattcttcttgaatttcatgcgtttagcaaattgtatcttatatcttgggtatcctaagtttctgggctaatatccacttatcaatgagtacatattgtgcgagttcctttgtgattgggttacctcactcaggatgatgccctccaggtccatccatttacctaggaatttcataaattcattctttttaatagctgagtagtactccattgtgtaaatgtaccacattctctgtatccattcctctgttgaggggcatctgggttctttccagcttctggctattataaataaggctgctatgaacatagtggagcatgtgtccttcgtaccggttggaacatcttctggatatatgcccaagagaggtattgcgggatcctccggtagtactatatccaattttctgaggaactgccagactgattttcagagtggttgtacaagcttgcaatcccaccaacaatggaggagtcagtgttcctctttctccacatcctcgccagcatctgctgtcacctgaatttttgatcttagccattctggctggtgtgaggtggaatctcagggttgttttgaattgcatttccctgatgattgaggatgctgaacattttttcaggtgcttctcagccgttcggtattctttgtttagctctgagccccattttttaatggggttatttgattttctggagtccaccttcttgagttctttatatatattggatattagtcctgatatttccaagacttttatcattaatgcgtgttggattttgtcaaatgctttctccgcatctaacaaaatgatcatatggtttttgtctttgagtttgtttatatagtggattacgttgatggatttccatatattaaaccatccctgtatccctagaatgaaacctacgtggtcaggatggattattgttttgatgtgttcttggattcagttcgagagaattttattgagtatttttgcatcgatattcataagggaaattggtctgaagttctctatctttgttgggtctttctgtggtttaggtatcagagtaattgtggcttcactgaatgaattggatagagtaccttctgcttctattttgtggaatagtttgtgaagaactgggattaggtcttttttgaaggtctgatagaactctgcacaaaacccatctggtcctgggccttttttggttgggagactattaattactgcttctatttctttaggggatataggactgtttagatcattaatctgatcctgatttaactttggtacctggtatctgtctagtaacttgtgcatttcatccaggttctccagttttgtagatggatctgatggtgttttggatttcttcaggatctgttgttatgtctcccttttcatttctgattttgttaattagaatgctgtccctgtgccctctagtgattctggctaagggtttatctatcttgttgattttctcaaagaaccagctcctcatttggatgattctctgaatagttcttcttgtttccacttggttggtctactcctcttgggtgagtttgcttccttttgttctagagcttttaggtgtgttgtcaagctgctagtgtgtgctccctgtagtttctttttggaggcactcagaggtatgaattttcctcttagaaatgctttcattgtgtcccataagtttgggtatgttgtgggttcattttcattaaactctaaaaagtctttaatttctttctttgttccttccttgaccaaggtatcattgagaagagtgttgttcagtttccacgtgaatgttagctttctattatttatgttgttattgaaaatcagccttagtccatagtgatctgataggatgcatgggacaatttcaatatttttgtatatgttgagtcctgttttgtgaccaattatatggtcaattttgaagaaggtaccatgaggtgctgagaataaggtatatccttttgttttaggataaaatgttctgtagatatctgttagatccatttgtttcataacttctgttagtgtcactgtttccctgtttagtttctgtttccatgatctggacagtggtgaaattggtgtgttgaagtcccccactattattgtgtgaggtgcaatgtgtgctttaagctttactaaagtttctttaatgaatgtggctgcccttgtatttggagcataggtattcagaatcaagagttcctcttggaagattttgcctttcatgagtataaagtgcccctccttgccttttttgataatgttgggttggaagtcaattttatttgatattagaatggctactccagcttgtttcttcagaccatttccttggaaaattgttttccagtctttcattttgaggtagtgtctgtctttttccctgagatgggtttcctgtaagcagcaaaatgttgggtcctgtttgtgtagccagtctgttagtctatgtctttttattggggagttgagtccattgatattaagagatgttaaggacaagtaattgttgcttcctattacttttgttgttagagttggnnnnnnnnnnnnnnnnnnnnnnnnnnnnnnnnnnnnnnnnnnnnnnnnnnnnnnaattgagagtttggctgggtatagtagccttggctggcattggtcttctcttagtgtctgtataacatctgtccaggatcttctggctttcatagtctctgatgaaaagtctggtgtaattctgataggcttgcctttatgttacttgacctttttcccttgctgcttttaatattctatctttatttagtgcatttgttgttctgattattatgtgtcctgaggaatttcttttctggttcagtctattgggagttctgaaggcttcttgtatgttcaagggcatctctttctttaggtttgggaagttttcttctataattttgttgaagatatttgttggccctgtaagttgaatcttcattctcatctactcctattatccgtaggtttggtcttctcattgtgtcctggatttcctggatgttttgagttaggattttgcattttctttgattgttgtgccaatgttctctatggaatcttcttcacctcagattctctcttctatctcttgtattctgttgctgatgctgtcatctatggttctagatttctttcctagggtttctatctccagcgttgccttactttgggttttctttattgtgtctacttccctttttaggtctagtatggttttgttcatttccatcacctgtttggatatgttttcctgtttttctttaaggacttctacctgtttggttgtgttttcctgtttttctttaaggacttgtaactctttagcagtgatctcctgtatttctttaagtgagttattaaagcccttcttgatgacctctaccatcatcatgagatatgcttttaaatccgagtctagcttttcgagtgtgttgggatgcccatgactgggtgagttgggagtgctgcattctgatgatggtgagtgtcttggtttctgttagtaagattcttaagtttacctttcgccatctggtaatctctggagttatttgttaaagttgacactgattagagcttgttcctcctttgattctgttagcctctatcagcagacctggtagactagttctttcctgagtttcagtggtcagggcactctctgcaggcaagctctcctctttcagggaaggtgcacagatatctggtgttcggacctgccttctggcagaagatgaattcctgaaacagggcctgtcccagaagctgtgtcactttggcctgtcccagaagatgttagcttctgttttccacaatctcacctgcgcagaatagtctcggaatgatcccccaggtgctccggcaaagccctcccgggaggggctaacacctctgctctggcagggaatgtgatcggatgtctggagcccgaaacagggtctgcctcagaagctgtcctctagggaccttgggggtgtccgccgactccgtcctcaggtgaccccgtgctggcgcagactggaagggacttgtgaccctggtcaggctgggttttctgcttccctaatgctgtctcagctcccgtgagattggattgggacagaagttgttttccactcaccagagatcctaaaattgctgtgtagtttttattttattttattttnnnnnnnnnnnnnnnnnnnnnnnnnnnnnnnnnnnnnnnnnnnnnnnnnnnnnnnnnnnnnnnnnnnnnnnnnnnnnnnnnnnnnnnnnnnnnnnnnnnnnnnnnnnnnntatatgggcatgtacccagaaaagccataagaggatatcacatcccctggaacttgagttacaggtagttgtgagctaccccacatagatgttggaaattaacctcaggtcctctgaagtagcaacacggagtcatctcttcatctctggttgtttggctttctgtgattcttcctagaagaatgtccacatgaagttcagtttgggaggcaggtgaaactgttagttgggaggtgggatccctgagtgatcaagtcttgggtaggtggcagcaggaccgaggttggagcaacaccagattctggtaaaaattccattgcacattgtattctaccaaccctctggggccttgatttaaatgtggcagcctaagaatgaccttgaacttctgatccacctgtttccacctctgagtgctgggattacagtcatgtgccaccattcctggatttatttggtgctgaggatcaaaccttaggaccccatgggtgataggaaacactccaccaactgagctacatccccattgataatttatttttttaatacagactagttaaataagtagtgagtagtattccaaatgtgattagttttaagtaagatttatctgccatggaagtaaaactcacattttgacttgaagtacaatttccaattttttaacttgaagaagaatccattttgttttcattttcctcattccaatggatgatgtttttgtttttgttttgaatgtccttaggcactgttatgaagtataataccatgagggggtacctggtgtgtccctgccaaggtgtccccctaagaaatcacaccatggaacagatctcatataaagggggtttatttgagggaaggaatgggagtccctgttggcagtccttctgggctctaccccatagttacctggcaacagtcaggtatgcctgacagtataaaaggggctgcttgccccctcactctattgctcttcctctcttcccctcttccttctctgtcccttctctccccattccctccccacatgttctccttccccttatctctcccctcatcccctctcctcccctcttcatgtcctaaataaactgtattgtatagtatacctctgactggtacctcagggggtagggatatctcagcatgggcctgcagaggcacccattcccccacaccatatggtgcctccaccaaacatactcctggcatcttgttctgttttataaaacacaacagtccaggcctaaagaatgggtagagttaggcagaggacggcagaaccatgaagtcagagaagaagggacagagaaggacagaaaagtgaagaaagggagacacacacacacatacatacacacatacatacacacacacacacacacacacatacacacatacacagaggatggggggtggggcagagatgatacacatgggaacagagagaaagaactggggtagtgagcagtcctttttatagactgcatgcccctggcctaggcaggtgatgacataagccattgctaggtccctgggagctaacaggcacaaatgtatatgtgtatgtgcatatgcagctagatgccctatattattaatgttggaggccatacgaagtcactcttctactttattattgagactaagtcacacccagagcttgctgatgaagttagtcatgatgatagcttgtaggttgctcactaaataggcacacacacaaaaaatggcatgtgttccttccaacaccctttcttcctcttttctttttcctcatgcactaccttcttcttttcctttttctttcctctttcctttcttctatgcaaagtttgttgctgttgtttttcactttgaaagaagttctgtcccttgctttgatcatggccagcactaaaacacagcacagaggttctctgtgtgatttaatgaaggccttagctatctcttctcgggggtttagctgaaggccagagcttcccaaaaggcctgactgggaaggagtggaatgcagctctgacatcacagcctcagctcctgggaatgctttgcattcttcttcctggcagtggtgtagtggcttccagcaaggaaggagtacagttccaaaaagaaagaaaaggggggagagaaagagagaggcagaagaagagagagaactggttataatgaaactattgttgtttgagaggtatttttattctaaaccaaattagtaattgcaaccagatgtcttagattttgaagctcctgaaacactgagtttattaattactttaatagctgaactgtcagggtttttgcttgaaaaatcttgaaactttttaagatttaaggggactggtttacaatatctctgtagtttgattggttgtggtttctgtaatggtcttcatctgttgaaagagtttatttgatgtggggtgatttttcacacagtaacaacaattaacgaaaaaaagagcaaagagggtatatgggaacgtttggagggagaaggggagaattatacattatgtataatctcgaaaaataaaaaatacacacacgtatatgtttgtgcatatgtaggggagggggagaggggagagagagggactgctgagagtgatagagtgataatgcacacctttaattgaagcgctgctgtggggtgtggcagagacgggcagatcgctaagcctggtttatatagcacgtactagtcttgccaaggctatatagtgagacctttcccaccacacacaaacagagacagagagaaacagagagagacagagacagagacagggagacaaagagaggcagagagagagagaaagatagaaaataattaaggaaaaagcatctttcctgctgtgcatcaagaaccctgatgaactgagctgtagacagtatgcaagcagttttgaagcttgttaatctgaaaagttacttttgaaacaaaactgcaatctactagtgaattttgtgctgtttggctgtccactgggagaagaaaaccattctactgtctgctgtagagtatttgtccttaggggattgggttcccagtgtcatttctggtccttaatctagtgttccaagtagacacccaaaacaacattaagacgttaaagagcctggtgcagcctgtgcatgtaggcagctcctgaacagagacacgaaacagagtgtcacttcctgacttaaactttaaactcaagttgtctttttcctgtctcctactttctaaaaagctgtgtataagtttagatactctcaacttgtttttctgcattttagaaataaaatattaagccctttaaaaatatgctgcatagttccctttgactatcacataaacaataattctcaagttaggtataaacccatttgagtacttcctgttgtacagaggctgagtcactagtaaaagttgtcagaaatgtggaaaagtgcatgccagtaatgtcatgtatcctcatccattggcagcatggcttttggagattttcttagagttcttggctaaacaaaacaaaatatgtggttctaattctgttttatttttggaagtaagggtgggtgtagaggacagactattgcttgagatgggttttctgttagtttaaaattggccaaagttgctaggcatgtgtttaagtgtatacttttgtatagttcattaggatttggtcaacaagtttttttatttttttgttagaaataaaatattttcatacaatatattatgatcacagtttttcctctctcaagtttttccagcttctcccctccttcctacctacctagctccatagcatctttctctttaagaaacaaacaggcaaacaaaacagtttaaaataataaacaacaaagagaaagcacaaaacataagcatacacacaaaaatatttaaaaagctataaaatacaaaattggaaatcataatgtatgatcaaaagaccaatcagacagaaagtgtccaaagtagtgagacagaaagtttacagaaacaccattgggtttcctgtgtggtggccatctactgctggacatggggcctgcccttatatgtggttaatatccccagtgatatgctattggagaaaactagtttttctttgcatgtggacatcagtaggagacagcttcttaggtagggatgagtaattgtatccacttcctgctctcagtgctggcaccacatgtgatttgaacctgtgcaggccctgtgcattataccacagtctgggtcttcaaatgtgcattagtcctattgtgtccacagacttggtttcctcagtgtcatccatctgctctggctctgagaacctttccacctcctcttcaccatagctccctgagctttgtcatggggagaagggtggctggttaaagacattctgtttaggactagctgtttcaaagtctcttactctctctgtcttacataacaacacaactgttgttctcttctcctttgtaccccatgggtgacctacctgactactcagactggtgtgctggctcctgcctctaagtgcaagtcatatctttgcttgtatataaagggtaggtctcattgcaccttctgccataatacctagaaaggcctgactctaataccaatttcctaaattgccagaacctgaaagtattgataagtttgtcattcagctggtaggagagtggattcaaatccatgctatgtgttctttggctgggattctggagctattgagttgctggttggaagtaatttgaatagaatatgcccaaagagataaaaatttagaaatttagtctaatggggaagttgtaagaaacatgtgacaggtatacagcttcttaaaaggaaaaacaaatatgaatgaagttttggagggttgagggtgcaaggaatgggccgattatgatcaggatgttgtgtgtagggaatataaactctctagagttctcttcctaaagagacgccaaaacaaataacccagatggtgatggttattttaattaaaataaaacccatgtgtacttgtgttgtaatgtatacatgtgttttcatgtgaaggtggaggtcaaaggtcagggtcggcatgagttcattagtcactttccaccttgttttgttttctgtttttgttttaaacagtctcttcactgaatctgaagctcatcatttctgctatgctggctggtcaagttcttcatttctatagctctccagccctttccaccttgtttggctttttacattagtactggaatatgaaattaactgtgctggcatgtttactagacaggtactttaccacttaagccatgcccccagccactgcagtcactttatataggtggaaatcttgtcattagagtggggagtgttctgtgttaaggatgagtgttcctagttagtaagaatggaaaagaattggatcctgaaggatggacctgttactccagttgtacgctttcctgcaccacttgtgcttcatgactatctaccctttttcctcgaatctgggagcaaataaatccacttattttctcctcttggttgaaagtttggctagattcaatgtggaaatataaaaaggacatcttcacatgatagctgttctagtgaccctgggctaatgactactcctgctatgttgattaatatataagtgtattcacaaagaaaacaaatcactgacgtaaggaaagtagcttaacttgtaaagtgcttgcctagcatgaatgaatccctgagttttatcttcagtactgaataaacttagtatagtggcacatgcctatgatcccacactcagtaggaaaaggtagaaggattagaaattccaggtcttaggaacaaaggagtttgggaccaacccctgattcaaacaataaagctaaataacactgtgttgagtgcattcagtattcagtattgtttgattatttaaaaagaggactaggaatgcatgagcccagtactcaacatgaataaatgtctaaacaaataagcaaataaaagttaagtgagtaagatagagttcagcagtggtggcacatgcttgtcgtcatagctgtgggaaggggaggctgaaacaccaggatattagggtcatccacctctactattccactagatgtttgtgtaactaagttatttttagaaatgtcagttatgatgtagatgagttgatacttgaataatgttgcagggaaaatgggaatatcagagaaagcctagcacatgcttacactaaaatattatccgtttgtaagtcacgcattaacatataactatgcatcttgtattttatttaaatctcacaactttacacttaaagctagcatatgtaaaatattacaatcagagttgttatagtcagggttccattttgtgagtttttaatcttgttgataaaagaatttaaagacaacatcagaacaaagaagatcattttattaaaattttggagaaagacaataggtcttacaattttaattcttggtaattgctaagaggaaagaaatgcttaagagagaaagataaaattcatttttacaatagaaataaatcttgttagtcttcatggattagattagatttaattttgtaagtacctttacgagtttgattatttgtttattatcaacttggtacaagctagagttgtctgggtatagggaatgtcaattgagaaaatgtctccattagattggcctgtaggtgattctgtcggacattctgttaaagattgatgtgtggggtcataggtcaaataatttaatccctgtggtctgaaataactctggaattggtgagagaatgctcccacaattcccactatgcctttgggtcctgtttctcactaaattgtgagattgagcagaacaggatactaatactctctagaaagcttgtgagtcctgatcctgacctgccagaaaacttagttcttagtgactaaggtaactctcagttcccaaactgttgtttcctattgatttggctttcagatgtattctccatgatgaaaacaacattatcaccaagcctaaaaagaaaaattaaacttgactttgtttaacttactaggcaatttatatcaatttttggaaagtgtgactaatagcaatttgacctttaaccccatgcctaataaatccattttggaaaagataaaaagcaaccagatgtgctctatgtataagcttttgttcaaaactagtgtaaatgatttttgggtgtctcaacgaccaaaattgaagtccaaaagtaataaatacatagggctaagaaggcagtcaatatattgacccttgcctctaggccagataggtttcaatggatagataacaggacatctctcaacagaccctgtagttctgctaaatgacctttctattgatcaaagaggatgtaaagactcagaggcaagccagtaactaatgcacattttgcagagtcagcagtgggaaatgaaatcaattcttcctagcaaatcaacatgatcagcaagtgtctgacctgtcctaccagatggtataactagtaaagtctataggaggatggaactccctaaaagaaagttggaggaggaactcagagcaggaactgaagcagaggcaatgaaggagaagtgcttattggcttgttcctgtaggcttgcttagcagtctttttatacaacaacctatgtgttcaggacccacagtctccttgattagtaggaatcaaattttattcttttctttgtttaaatttggtaaaagaatgaataagtcttttagatatggcagtgatgtcctttttttaaagatgtggactggttaggaggaaacccaaagagaaagagccacttactctgaccacagtgtgttggaagtttataaccatgggggaagtctgagagagccagttggtcccttatgtaaaataacttcctcaaagcctgaaaaccccacagtcaggtctggtttatataactccttgctctgatttttaaaaatgaataaataaaaaaataagaaaaaatagaccttgttatatggcaataggacacccaggaaacatacatatgtatagccaccatttttaataaaatgcatttaaatgagattagtataaatataagagtcttaagtacttatgaagcaagagaaagtggcctggggtatacagcccgaaatgaggaaagagcctgtagtttatcacagcaatatatacacagaaggaaactgtaagtagtaaggaatggagagttttagcatcttgacccaaaggagtagagtccatatcttcccactatgaaggtgaaggaaatctatttgtaactaggaacatcaaatgatctcattttggctttttcctcagctcctaggtctttagttttccacgatgcttttgtgctcacaaaagaactgggagggatcaggaagtgtgtccaacatgaatttgcactactgcgttgggagcacatggaggcactaagggagagaaagcatattatgatgtggatactataacctaccttaggatgaagtgggctgagactggacagtattagctgagcagtcaagtccttcagaaatgaagttgttaaaaaccgttaatcttggttttaatagctcagcaagttatggggcacttctgtccaattagaaattcaaacgcctggggatttagggcgtgtgttcaactgagagcacagtacagatagtgcaaggcactgcctgtactctccattttggttagaaacagaaggtgaagtccaaaggtcattataactgagtgtccatcctctgtggccttcaagcctgataatacttgataatgtatcatgatataattaagacatactctgtcctcccacacctaagtctttcagtttgtaaaaactgttcatcatttctcctattgtttcctcacatacatatacagtttaatatgtttgtaactgacttttagcttactgatttatgtgctagaccaaagtccctcttggcttctataattacagcatcattttgggaaggctggccataggcagctggcataagtccagacctctcttgaggccctttgcagaactagaggccagcaacatttgtacatatgtgcatcttcttgaagttgtttgatagccttggccaactctggaggcacaagaaaccggcataggaaccaactggcacagttatgatgtggttgagccaaagtatgtggctgtccaagttctctcagggcctcagcattttcatactaacttatcagtggtcgagagaacaagaggggaattgaaagttggcatgaagtcagagtgaactcagagattagaagggagttggtagaatgattgatgagctcttattattcaacaatcagtaaccaagagagagagagagagagagagagagagagagagagagaggagaaaaaaaaaaacgaacagaagtgacaaggctacaaggctacagctctctaccaaaaggtggtagttgttggaattcagatatctcttgcaatttctgagtataatgtaatgaatgaagattagtctctgtgggaacatttttaagaaggaaactttactatgcaaagaattttatgaaaggtataaaggccacagtgtgaattgaggatgacacaccctgttttgaattggatttcctgctagctgtgatcagaggcattcttcccggactagggtgaattcagttccagtgtttacttgtaaaactgaattcagtcattgtgtttgtactttggcgtcctgcctgcaattaaaagtacagagcagacttcagttagttaccctctatgattttgtgtcctttataaagaggagggagaggagaggggaaaacccaagaggtgactgagttcatttacatacagtgccagtgggcagctgctggctgcctgtggtcacatgattctgtggaggattctgatattccacttactggaattgggagtgggacagagaacactcccctttaatacttccagttttgtcatagctgaattattacttgcttctatgttattaataaatgcagatgaaaactttttttggatattttattttttttacatttcaaatattatcccctttcccagtttctcctttggaaaccccctgtctcatcctccctcctcctacttctatgaggttgctcccacacccacccacccactcttgcctccctgccctggcattcccctacactggagtatccagccttcccaggaccaaaggcctctcctcccattgatgttcaacaaggccagcagatgaaatttaggatacttccttttccttgttctttttaaactcttgtgtatgtaaaaacgaacttctaaaaggagaggttacaggccctgttgtagagcctggtgggcctgtctctcagttactttagagggaacacaagcaacggacacaattgattaaagttatggggattatctatgggatggacttctcctctctagagtcatagaaaccagaaaagtctctgttctttgtagtttgatggttatatgaagatacctggcaactactatagaagatggatctgaatggattgtttttccagtgcctatgaaagcaagtcagccctcacaccctaagaggtagtatattgaatgatttccttgattcaaatttatagcctctggatttggaaaagacagagaaaaggactggtctttgggggcctgttcccagaatttactatctcacactaaagatgaagaggtcagctcaggacctttggaaaattcccctttcccctcctagaagagcgaggacagagagcctataggcacctctctcctccagaagcaagaggctgattacattcttcaaaaagaacacaggcgggaccaaccattggccatccgaagataaggaaagcctttgctacctcattccctaaggaccagtttaaaagtcacactgttctgccaatcacattgtgcctagtgactgttgcccaatatacccctgaaaattgtataaaacctggctgaacaggcagtccagggtcactgcctctccttcaggtgcaggacgaccccagcactatggaacaataaattcctcttgcttttgcgtcgatccccagctccgtgtggttcattgagagggtccctggttgctaaggttcatcaaagtcttataaaaaaaaaaatctcgagggctgaaataaggagcagtggactgtctgtgtcttatatgtcatgaattgtacttctttttactccagtttgtctctgccagacactctccctctcccactgaaatccttcttctcagcaaggcttcatcctaatttcatgtattttttttttttttgtgtgtgtgtgtgaaccactgaggtaaattagggttgcctatattagcatgggtgagagagaatatttactggagcatgggcagtttatcagtggttatactactgaagaaaatggcactccagccttcacagcaagcaataacacatccatgatgaaatattgactttcagtctacaatcttgtacagttcttatttcagtaacctcagctgtagtgagctctcttaggtgcaaagtcttgcacttaacatttttttatgtttttttttttaattttatatcttggatggaagaacaaactcatttgtgccacagcacacatatggaggtcagagtataatttttcatgtgtgtcccaggaatcaaatgcaggttatccaatttggtgacaaatacctactgaaccatgttgccagatcccatcagagcattttgaggccagagatcccacagttacttccaacattggagtggctatcaagtaggtatagaaaatcacaaacttctataagcaatcatggtatgaaaacttaaactaattgtcacattactggagacctagaataaacaaagctcaaaaaaggaaatactccaaagatcacagacctgggaagagaggtacatttattggagttttagctctaggaaccctaattgcttttcacaatcaacacctgaggacatgcttcttctttcttccacaatgatccctgagccttggcaagaagaggtgtattttagatgtaccatttagggccgagaactccagactcttattctctgcccctgtactacttgtgggactctgttaaacaccatctactattgaaaaacaaagctgcttggatgagatttgagagatgcacacacagcacacaggtgtagcaatacgttatttggcggtgctttaggagagttagagcagtaggttattccctagtgcctatgacctttctagccacaggttcttggcctcgatatggtggagcaggcctttaatccgatttttttaaaaagtaatttttttattcccgtgacattggtgcaactgtcggaacagtggacatgcctcgccaggcctataattacagtagctttcaaggttctcagctgtaagtcagatgaccgttgatatactatggcagcatgcacagcacctgccagcattatgaaaggcagctgttaggagtaaaggaacttctgcatcaggactaagttgaattctttgtgcttcagcaactaggtcttgtagtcacggtctggaggataaccaagtgcagtggtaaaagtttgcagtgtttgagtgatcattgggatttcactggctaacacctttgaaagacttactgaactttcatttcttaacctgtggtatctagcattgttgacctttataagttaactctatttaaacaatagatgtatgggttgtattgaaggaattttctgcactagtagtttttcatatttttgttcagaagttctttagtcttagttatctctctccatattttttactcttccctgttcttatctcccaaagttaatcctctttctctttgttctcgaaccttgagagccctccagggttcattcctaattatggagcttctgtaggtattccagttgaaacacatctagagattcaaaggcaacatccacaaaagaactaggatttccaaaataatcttgaacaattaaaaaaaaaatttaagtatcactatctcaaatttcaaattactacaaagctattgtaataaaaatagcatagtgctggcataaaaaccaacattggctagtggaatagaattgaagactcgggcttggtggtgcatgcctttaatcccagcactcaggaggcagaggcaggcagatttctgagtttgaggccagcctggtctgcaaagtgagttccaggacagccagggctatacagagaaatcctgtctcaaaaaaacaaaaaacaaaaaacaaaaaacaaaaaaaaccaaattgaagacccacatataagcctgtattttttagggaagagatgggggcatagggtgagggaagagctataagcctgtatttttacagacacaatttttgacaaagatgccatcagtacattagagaaaagacaacctcttcaacaaatagtgctgctcaaattgtatagctacatgtagaaaagtgaaactagattcttacctcattccatgcaaaaaaaaaactaaactccaaatagacttaggacgtcagtataaaacttagtccccagaacctgatcgagcagagtagggaagttacagacacaggaaaaatctttctgaacagaatacctgatagcgcaggcattaagatcaacaaatagtaactggacctcatgaaatttaagcttcagtacatcaaaggagaccatcattcggggggaggaagcagcctacaaaatgagggttactatctataatatacaaagaacactgaacatcaagaaaacaaataggccaaaataaatacttataaaatataacctctcacactcctatgtttgaaccccggctggtagctgttagggaattgtgggacctttgggagtagagcctagctggaagaagtgtattagtggaaaggtagagttttaattatatgctggcaccacctctagtgccatctatcagagttctgtttcaccaagatgtgaggatgtgaagaatgtcagggacaaacttatttcaccgtaattatatcctcaacttatgagtcagagtaagttattgctttctttaacttgcatcttatatttggttacagcaatgaggaaaatagttaattgataccaagttaacagttaaacaatactaagacatgagggctttgttatagaaaacctggctgtatggttcatatactgcattgtgccatttattttgtgccatgattactattcttggctcttcgacaaatacacagtgagagagagctgagcgacatgaaaaatttatggtttatcagtgaaaggaacaagaacaagtttaaaggtacaaagcatgtgtaataaagaatctaaaacttgcacactttatacttggacagaaagtataccttaggggcaaactccttcctatccaggtatctaggatataaaaatacaaattccttttaaaagagaattcttggaaagatagaacccccaggatacctgctggagaccaaggatgctgggctgtatctcatgctggcagtggacctttgtgctttccctgtgctgctagttatgcagatatgtggaatgttagcttttcaagataatgaatacaagccctagaattttccagcatgttgttgctttgaattcctgatatataaaggccctatatgttagtgcataaagctctggagatatagcctatgttgtagcaaagaccccaagatatttaagaaaccagactttcattgagaacatgatatttgagaccagtgctttcgaaaagacacatattcagaggtatgacatctactttctacccattcaagactgggcccagaatagagaaagtcggtggaatttcggtgtcagaactagtaaaacctggaatgagttctctggcttgatcttctttcatcctgactcatctttaggaaccatcttccttcctttctcagacaattaaagaagaactaacagatctccatatccaggtcctaccaggagtgagctggtctcccaagagagctgacacacctgagagcacaggtgagaccagcacttctgctcaatatcctggcataagagtgacctgcccagagccatagggacacaggaaccaaagaacaactgggaacgggatccttctgatttatatatgtgccccagaactgaccctgtgccacagctctctgtacccagatcccaccaaatagccctgttaaaaaatggggaagactggttagttcatattgttgttccacctattgggttgcagaccccttcagctctttgggtgctttctctagctcctccattggggcccctgtgttccaaccaatagatgactgtgagcatccacttctgtaattgccatgcactggcatagcctcacacgagacagcgatatcagggtcctttcagagaaatcttgctggcatatgcaatagtgtctgggtttggtggctgattatgggatagatccccaggtggggtagtctctggatggtccatcctttcgtcttagctccaaactgtgtctctgtactccttccataggtattttgttccctattctaaggaggaatgaagtatccacacgttggtcttccttcttcttgattttcttgtaggacaacaatgtgaactaatagccccagagctcgtgtctctagctgcatatgtagcagaagatggcctagtcggccatcattgggaagagaggccccttggtcttgcaattttatagccccagtacaggggaacgcaagggccaagaagtgggagtgggtgggtaggggagcagggccgggggagggtacagggaacgttcaggatagcatttgaaatgtaaataaggaaaatatctaattaaaaaaatggggaagagagctaaacagagaactctcaacttaggaaactgagaagcacctaaagaaatgttcaatatccttagtcatgaggaaaatgcaaatcaaaacaaccctgagattccacctcacaccagtcagaatggctaggaccaaaaactcaagtgacagcttatgttgtcaaggatatggaggaagaggaacacacctccattgctggtgggattgcaaactggtacaaccactctggaactcaatctagagattcctcagaaaactggaaatacatttacctgaagacccagctataccattcttgggcatataaccaaaagatgacctaccatgccacaggggcatgtgctccactatgttcatagcagccttatctgtgatagccagaagctggaaacaacccaggtgtcccataacagaaggatggatatagaaaatgtggttcaagctgggtggtggtggcacatgcctttaatcccagcactcgggaggcagaggcaggtggatttctgagttcgaggccagcctggtctacaaagtgagttccaggacagccagggctatacagagaaaccgtgtctcgaaaaattaaaaaaaaaaaaaaaaaaagaaaatgtggttcatttgcacaatggaatactgctcagctattatgaacgaggacatcctgacttttgcaggcaaatggatggaactagaaaatatcttcttgttgaggtaattcagatccaaaatgacatgtatggtatgtactcactaaaaaatggatattagccaaaatgtacagaatagccaggatacaatccacagaactcaaaaaagttaacaagcaaaagggtccaaatgaggatgcctcaatcccacttgggagagagaaaaaagcaatcagaggaggcagagggaggaagggccctgagtgtgagagggaagggagagggggaaagggagaacattatcaggtattgtaattggaaacaggattgaagctctgagggcagcagaatgaatggaaacatgcaacctagggaggtaggaggtggggtgaccctctagaatgtaccagagacctgggaagtgagagactctcagtactcaaagggaggggccttagatgaaatgggcaacactagggagagggaacttgtggagtccacgtccactagaaagacggggcatcaagtagatggatggatttgccatcccatagtcaataactctgacccagattgttcctgtctaaaagaactacagggacaaaaatggagaagagactgcaggaatagaggtccagtaactggtcccaatttggagtatatcttaaggggaggctccaaggcctgtcactattattgatgctattgtgtgcttgaagataggagccactaggctcccatccaagaagcccatcaagcagctgaccgagacagacacaggtacttatacccaaccattgaactgaagttggggacctctgtggttgaattagggagagggtggaagaagctggggacctgtagtaggaccagcattctcaactcgcctggacccccaatatctttcagacactgagccaccaaccaggcagcacacacttgctggtatgaggtgcccaacacatatacaacagaggagaagatgtacccaaacctccaaagacttgtggccctagggagtggggaggtctagtggggtggagtcggggggattggagtgtatagacatcctcttggagacagaagaggaggaataagatgatgaaatgtcggatggtagactattaggggttaaagataattaaataaaataataaaaacagtggttatatggaaatatacttagttttggaaattatgtaagaaataccttagaaacttctttgcagggttttttttttttgatgtttggcagaatatttattagcatattgggggaaatttatatcaataacttgaagatgaaattccatgcaaagtatttttcctcatatttaaaatgcttttttaaaattaatcattccatttatttatatctcaagtgatatcccacttcctggttacccctccacaaaccacccccccatcccacatatgccctcttccctcacccttttctctctataagggtgtacccccacccacctaccctatccttccccgccgctcctgcatcccctatgctcgggcatcaaaccctcacaggaccaaaagccactcctcccattgatgtcagacaaggccatcctctgctacctatgtatgtagagccatggatccctccctgtacactccttggttggtggtctggtccctgggagcactggttggtccaaccagcctatgttattcttcctatgggattgcagtccctctccactcctccagtccttctgccagctctgaggatcccacactgggatcctgagctcagtctgatggttggttccaagcatccacatctacattgttcagttgctagcagaacctcccaagaaatagccacaccaggttcctgttatcaaacacctcttggcaacagcaacagtgtatgggtttggtgtctacagacaaaatggatacccagctgggttggtctccagatggcccttccttcagtctctgctccattttttgtccctgtatttcctttggacaggaacattcctgggttaaaaactttgtgatgggtgggtggccttatcccacaatcaggggacaagcctatttactggaggtgctatctacaggttctatctcccctttactatgcatttctgctaaagtcatccctgttgggtcctgggagcctctcacttccctggtgtcagggacactccagtggctatccccagttcctcatcccccactgctacatatttttattcaattcctgaccctctgtacctctctcctgttccctctagtacctgatactgcccccctctttatttcctcccctcctctcctgtgacattctgttctgccctcagtgcaggactgaagcatccacaccctagtcttcttttctcttaaactccatatagtctgtgggttgtgtcatgggcattgtgagcttttgggctaatatccacttatcattgagcacatatcatgtgtgttcttttgtgtcagagttgcctcactcaggatgatattttctagtgccttccatttgcctgcgaatttcataaattcattgtttttaatagctgagtagtattccattttgtaaatgaaccacattttctgtattcattcctccgttgagggacatctaggttgtttccagcttctggctattataaatatgactgttataaacatagtagaacatgtgtccttgttatatgttggagcatcttttgggtatatgctcagtagtggtatagctgggtctacagctaggactattcccaactttttcaggaacagccagattggattccaaagtggttttacaagttgacagttccaccagcaatggaggatgttactgtttctgctgtcacctgagcattctaactggagtgaggtggaatcttggggttgttttgatttgcatttccctgatggctgagggcattgaacattactttgtttctcaaccattcgagaatccgcagttgagaattctttgtctagctctaccccatttttaaaaatagggttatttggttctctgtcttcaaacttcttgagttctccgtatatattggatattagccctctatcagtagggttggtaatgatcttttccctatctgctggctgacattttgtcctgttgacagtgtcctttgccttacacaagctttgcaattttatgagataccttttatggattgtttttttttttttaagatttatttatttatttatttattatatgtaagtacactgtagctgtcttcagacacaccagaagagggcatcagatctcattatgggtggttgtgagccaccatgtggttgctgggatttgaacttcggaccttcggaagagcaggcgggtgctcttacccactgagccatctcaccagccccttttatggattgttgatcttagagcataagcctctggtgttctgttcaggaaaatttccactgttccctagagtttgaggctcttccccactttctcttgtattagattcattgtatctcgttttatgtggaggtccttgatccacttggacttgagctttgtacaaggatataagaatggattgatttgcatgcttctacaagctgactgccagttgagccagcaccatttgtagaaaatgctgtcttttttccactggatggttctagcttctttgtgaaagatcaagtgaccataggtgtgtgggttcatttctgagtcttcaattctattccattgatctacctgcctttctctgtaacaataccatgtggttttatcactattgctctatagtacagcttgaggtcaggggtggtgatttccccagaagttcttttactgttgagaatagttttcactatcctggattgtttgggtttggtttggtttggtttggtttggtttggttttattacaaatgaatttgagaattgctctttctaactatatgaggaattgggttggaattttgatgggaagtgcattcaatctatagatggcttttggtcagatgcccatttttactacattaatcctgctaatccatggccatgggagatttttccactttctgaggtcttctttgatttctttcttcagggacttaaagttcttgtcatatagatctttcacttgcttggttagagtcacaccaagatactttatattatttgtgagtattcttaaggatattctttccctactttccttctcaggccatttattctttgagtagaggaaggctactgatttgttagagttggtttcatatccagcctctctgctaaagttgtttatcagctgtaggagctctctggtagaatttttgtggtcacttaagtatactatcatatcatctgcaaatagtgatatcttgacttcttccttcccaatttgtatccctttgatcaccttttgttgcctaattgctctggctagaacttcaaataatatattgagtaggtatggagagagtgtgcagccttgctttgtccctggttttaatgggcttgctttagtttctttccatttagtttgatgttggctattggtcttctgtttattgtttttattacatttaggtgtggaccttgaattcccgatctctccaataattttaatgtggagggatactttattttgtcaaagccttgttttagcatctaatgagattgtcatatgttttttcattgaatttgtttatatattggattacactgatggatttctgtgtattgaaccatgcctacattcctgagatgaagcctatttgatcatgatgaatgatcactatgatgtgttcttggatttggactgagagaattttattgaatgttttcacattgatattcataagggaaattggtctgcagttctctttctttgttgggtctttttgtggtttaggtgtcagtgtaactgtggcttcttagaatgaattgggtagtgttccttctgtttccattttgtggaatagtttcagaggtagtggtattaggtcttctttgtagttctgatagaattctgcactaaaaccatctggccctgggctatttttggttgggagacttcaaaagactctttctctttccttagaggttatgggactgtttagatggtttatctgttccggatttaactttgatacctggtatctgtctagatcatccatttcatccagattttccggttttgttgagtataggcttttatagtaggatctgattttttttttaatttcctcagtttatgttgttatctccctttcattcctgattttgttcatttggatactgtctatgtgtcctctggttagtttggctaagggcttatctatcttgttgattttctcaaagaaccagcttctagttttgttgattctttgtatgttctttctacttggttgatttcagccctgagtttgattatttcctcccctctactcctcttgggtgcatttgcttctttttgttctagagctttcaggtgtgctgttaagctgctagtgtatgatctctcctatttctttatggagacactcagggatatgacttttcctcttagcactgctttcattgtgtcccttaagtttgaataggtagtgccttcaattttattaaattctaaaaagtctttaatttctttctttatttcttccccgaccaagttatcattagtagatagttgttcagcttctgtattcagtgtatgtgaactttctgttgtttttgttgttattgaagaccagccttattccatgggtagaatacatgggattaattcaatgttctttgttgcggtaaatctctccaatctagttatgccctagcaatgaaaacacaacacaatttatatgaatacatgttgtgcacctagattgggcagatctgctgctacatcttccacatctatgagaccacttagaacttttgatttctctaggccatgtgcttctgctcttcttttcttcttcctcctctgccttctctctctcaaacctccttcttttctttctttctgcttcaccttctctctctctctgcccaatcatcaggtcacctttattttacaaattaaggtgggaagaaggtctacaagaaatcatctgagtgctgactcattccttgttcataacccctcacagggtaatggaattgacatcaaatataattagccccaggggtatccacaacagttcttgtatctgttgacctttgttttgtgtccgattatatggttcattttggagaaggtaccatgaggtgctgagaaggtctacatttttattttagggtgaaatattctatagatatctgttaatccactttcttcatcagttcttttagtttcattatgtctctgtttaatttctgtttcaatgatctgttcattggtaagaatagggtgttgagctctctactattattgtgtgaggttcaatgtattcttggagcttcagtaacattttttttacaaatgtggatgcccttgcacttggtatatagatgttcagcattgagagttcatcttgttggatttttccctcgatgtgtatgtagtgtccttctccatcttttttgataacttttagttgaaagcatattttattgcatattagaatgactactctagcttgtttcttggagccatttgcttgaaaaaaagtttccctgccttttactttggggtagtgtctgtctttgtcattaagatatgtttcctgtatacagcaaaatgctggatttttgtttacatatccagtctggtaacctatgtctctttattgaggaattgaatccattgatgttgggagatattaggaaccaagaagtgttttctctggtaatgactgagcaagcatatgtgtgtgtgtgtatatatatatatatatacatatacatatgtgtgtgtaatatatactttaatatataaatatatttttcagaaaattaaaatattgtcattttaatgagaatttatataaatctctgtactgaggttagagttctttattaggggacaattgagtttttcagtccatattatgttatgtctctctagttccaaaaattttatctgtattttgtagcttcagcattcaagtcatacatattaaactgaaatttttttctttttcttttcctctctcttcccttccttttttcactcctttttttctttcttggaagaatcttgctatataatttgtgctgctgtaaacattgtggttcccctgattcagcttaagaagtgcatgaattttaggcatatatcaccatgccctgctcattacttcaggtccaatcttggtgatcctgtgtttattgaaaatgtatgtacatgtacttggtttttatttcttccattctaaaacattactgaaactgattggacttgggagttatatttttaatctttgggtactatttgtttatgattttatttactcatttatttttgcatggcatatgtgtgtgttgctatctttggccatgatgttgaataacaaattgaaggcttgaagatcacatgttcaagatcatcctcaaccatacacagagttgaagccagcttgcccaacatgggatccctgtcaaagcatgcatgaagtcatgttggcctgcttcttttctgatgtgctcgcttgcccttcccttactgtgcctcgtattatggactaggacttttgacattatatttcataaaaatgtagaaagaaacaaattcttgatttccttcttagcatttactttagttgtcattttataaagggaaaagtttcctttttgtatttaaatgagttcaatacagatgcaaatacagatttctgagttaaggtagtctttgctttgttcctttaaatacagaaagttggctctcgttggggtctagtgatagttagcatgatttgccaatttgacatgacctagaatcatctgggaagaacctcagtgaaggattatctacatcacattggcctatgagtgtgtctgtggggaactatagttaatggatgtggccactttgaatagcaccattccctagacaggaggtcctaaataggagtccagaaattagagcatggagaaatggcttagtgattaagagtacttgctgtttttactactctatcattcctcaggtactaagtttctctctctctctctttctctctgtcggtgtgtgtctccgtctctctctcatttctctctctctccttcccttctccctagatagtattctgccttctctctacccaccagtgtggtttaatgagagattaaggtgacatatgtatcaaattcttgttccagacctgaagtttttagtttttcttattgacagcacatcttgatttaaaggatgtccattgacgtgttttatcacattagagtactgagtaaaacctcagaattttgtttgatatgttttcagcttgtttgtatgttttgccaataatgttgatatcaaggcttcaagttcttacatcttttaatataatattctttgaacaattagagttgcttaaatatatagggttttttggttaaataatatccaattcagtgtttgagtgcttctttggtactcatagtctttgctcattctttgtatctatatttcttcctgagaggacatgggtctcccagatagagagcaagcctagggacttaaaggaccttccattactaatataggactttcggggccttcactggaaaagtaaagttctgtcattgaatcatatttacttgtaatggctatggattctgctgactggcaaggtcctagctgtcaattgttacagatggatctctcttccagggtcctgggcaactgtaatgccttgccctggtctgttgttacccactcgttgttaggaatgctgtaatttactgcattatcttaatttaactacaacattctttgtttaccaaaaaatataagaacccaagttataaatgaactaataaatttctttttctttttcaggcaaaaacttcttatcccaaatggaagttgctccattattctgaatacttatttttgtcagaaagctattgcaaaagaaacagtgcgcgaagacctatacagtccggacatatctctttcaaggagaaatataactttggcccagacatttagaattaaggacataacagacaattcatccatcaatcaggtaaattctcattggcttatgatttttacacttgtagtagtacttgtacctgtatttgaaaggacctgtgaataaatgaatatatctatcttctgtcctcaactatatatgttagagcatgttatcatcatttatgccaaaagatatgaaagctcaagtagcatttagtcatggtctcattacagttttctatcctcccattatgtagtcttaatctttagttcaatttattaaaacataaaagtactttcagtcccatggggctatggttaggatagtcaggactcagaaagtatttttctatgttcattctgaaaataagagttttaagcctttagtaaactttatgttttctataggaaacattatgtgtgtgtgtgtattccttgggataaagctttataaattatgtttgaggttatatgatagaagttgatttcatagaatttgggtggggggctctgagctattccaaaatgaatttggaatttcacagtaattcgctggtactgggcagggtatacgtccatgaagactctccgctttgggagtctggttccagtacactggccacaaattctctggattactagaatcatcacagcacagactactgagacgaaaagctagaagtagggaaaataaagtatgtaaacctttaccctgctttcaatcatataataaatatctttctttgactatcaaaagaagtatctggaagggatagtttgagaagggtgccaaagctgccctgtgacctttacatacatgccatgtgatatgcacaagcacaaacatgggagtgagggtattaaatttaaaactacaaaattaaatttgtagaagcatacttttaaacagtttgtgctaacgtgatagtactgacatatgatttgttagataacagttaccatgtagcatagtggtgaaaaactacaggttttgagagggcttgagaggaaactcagcattcagactgtacttgctgctgttccaaaggacccaagttcacttcccagaacctacataggtgtctgataactgagtataattccaaatgcaaggcatctggtgatctcttctgtcctccaaatgtgcctgcacatatgtaccactgacactaaagcaaaataaaatagggtttggagctatttgtattgtgtcccatgccacctctgcagctttattctagttcacattaggtaatttctctgtgcttccattttatctatgagaataattagagttgttgtaaagataaatattatttaaaaaacagagtcttgaagataataaaatgaaacagaagtatcgttggtttatgatcattgacgttatatagttttggggagaatacatgagtatgcaaagtatataaattagcagataacacattcaaacacctaataaaatgactcattttaattaaactgtattcattctttttggacaaaccaaaaagggaagctatcctcatgaggtcattaatagtaggacactgttcgtaggagaaattctgctctgttgtcttcagtaggtagatgccagtgtagcatgattgtctgttctttagtgcactgctagtgctttggcagtcacctaatgatgtcacttttttggacagcacaacactatgcatagaacttaaattattccttttgcatgtcttggacagactacatatgatagcctggccacccctggcacaggctggacccacggacatgagaaggcagagcaacatcttatagttgctgctcccctgaggaattctcttctggacattgtggaaagccaaagagctggcctatggtctggagtcagggtccaagtagtagtgcagagggtgtactctcttctcagcagagatggtgccaggagccagcaagggcacacagtgggacatgcagatgcctctggagcatggtgagtggcaaacttaggcatgggaaaagggaagcacaacagagttcccaagaaaggaagctctgctcagaggaatttctaggtgacatttactgtatgagactgttttgtatatctttttcttacattagaattcggaacatgtgtgtattagttaaagttctctagaggaacagagctgactgaatcaatatgggatttttgtggtctagctagccaaacaatggctgtctgcctaccaatagaatgtccaagaatccagtagtccacaggactgaatgtctcatctgatcttcagtccatgctagaatccttaagtgggctgtaatgtcgctgatgaaatgagcttgctagcaagcctgaggcaagcaggcaaagagcaaagcttcctccgtggtctttatatacgcgggggcagcggcgggtgggcccagatcagatgtatatcatactctcgcacaagttccaagttaaagttggaccttcgatttctaaattatttcaataataaaaatcactcataggtttgctcaggtgcttgggttttggttaattccagatgtagtcaggttgacaaccaagaagagccatcacaatgtatagtacatataacaaacaattttgtctcttttatataagaagctttactaaaaatgttcctgggctgatcagtagtatacatggtatatctaccacactgccatcaggacatgcactacctgaaattgttgcatttactggcttatgtaatagaaagtaatacaaatttaagaagtattttgtagggttatggaaaagaatgacatgtgttactatacctaaaataatcattacagtatcaattctttaaaaattaagtgacagtttgacagtctgtgactctaagagactgctatttgaaatggtatatacatttttgtcttattgacagtgtcctttgccttacagaagctttgcaattttatgagatcccatttgtccattcttgatcttacagcacaagccattggtgttctgttcaggaacttttcccctgtgcccatatcttcgaggttcttcctgactttcttctctgtagattttagtgtatcttgttttatgtagaggtccttgatccacttcaacttaagctttgtacaaggagataagatgggttgatttgcatccttctacatgctaaccagttaaaccagcaccatttgttgaaaatgctgtcttttttccactggatggttttagctcctttgtcaaagatcaagtgaccataagtgtatgggttcatttctgggtcttcaattctcttccattgatcttcctgcctgtctctgtaccagtaccataaaatttttataactattgctctgtactacagcttgaggtcagggatggtgattccactcagaagttcttttattgtttaggaatagttttcactatcctgggtttttttgttattccaaatgaatttgcaaattgctctttctaactctgaaaaattgagttggaattttgatggggattgcattgaatctgtagattgcttttggcaagatggccatttttaatatattaattctgccgatccatgagcatgaaagatcttttcatattctgagatcttcttcaacttctttcttcagagacttgaagttcttgtcatatagacctttcacttgcttggttagagtcacaacaaagtatgtaatattatttgtggctattatgaagggtgttatttccctaatttctttctcagcctgtttgtcctttgagtagagaaaggccactgatttgtttgagttaattttatatccatccactttgctaaagttgtttatcagatttaggagttctgtggtagaatttttcgggtcatttaagtatatgatcatatcatctgtaaatagtgatattttgaccaacagattgggaaaagatctttaccaatcctacattcaatagagggctaatatccaatatattcaaagaactcaagaagttagactccagagaaccaaataaccctatttttaaaaaggggtaaagaactaaacaaagaattgtcaactgagaaatattgaatggccaagaagcacctaaagaaatgtacatcatccttagtcatcagggaaatgcactttttgacatccacaatagtgtctgggtttggtaactgtatatgggatgaatccccaagtgggacagtctctgggtggcctttcctttagtctctgctctacactttgtctccatatttgcttctgtgattattttgttctccatctaagaaggaaagaagtatccacactttggtcttccttctttttaagcttcatggggtctgtgaattgtatcctggttatttggagcttatgggttagtatccacttatcagtgagggcataccatgtgttttgttttgcaattgggttacctcactcaggataacattttctagttctaaccatttgtctaagaacttcatgaattcatcgtttttaatagctgagtagtattcctttgtgtaaatgtaccacatttgctttattcattcctatgttgaagaacatctggggttctttccagctcctggctattataaataaggttgctatgaacatagtggagcatgtgtccttgttacatgttggaacatcttctgggtatatgcccaggagtgttatagctgggtcctcaggtatatgtactatgtccagttttctgaggaaccgccaaactgatttccagagtggttgtaccagcttgcagtcccaccagcaatggaggagtgttcgtcttcctccacatcctcaccagcatctgctgtcacctgagtttttgatcttagccattctgagtcctgtgaggtggaatctcagggttttttttttgatttgcatttccctgatgactaaggacgttaaactatctttaaagctaagggtttcacataggcaataggcagatggattttgtttcttatttcattcagctagtctgttccttttaattgaataactgaggctattaatatttagagtgtttgttgaaaggtgtatgtatattgtggtcattttgatactttttgctggtttgtgttgtttattgtggtttggtttgttttctttctacatcctcttggctttgcttcaatctagagtattgctttaagtattcttcatagtatttttctgttgtatgtgatttttttaaagattactgggatgatagaaagttctctctttcatctatagcagacagttttgctgggtacagaagtcttaagttggcagtaatcatagtcttctagaacttataactccaggtacttcagactttcagcattttagttgagaaattacgttattctgatgacctttcctttttatatagtttgtgttttttttcttgcggctttcaatttttttttcttctgggtaattgcgatatgtattaaagtgtttcttgtttggtcttatctgggtttctgtgtgcttcttgtatctgtatgagtatatctttccttagtttggggaagttttcctatataatcttgttgaagatctagtttctgccattgacctgagattctttttccatctatgcttataattccaatatttgatcttcttattgtgtccaacatttcttgtatgttcctatcctgtgccttttaatttttttattttctttgtttattttgtctagaccctctattacatctttgagtcctgatagtctatcttctgcctgacttgttagatgtgtaactgcagttttgatattttcaattccattttcatttcagctttgtgttcccttcagtatgtatacctctttattaaattcagttgtccaaccctcaattctcttcattattatattcagctgtttatttgtaaatttcttgaataccattaagcatttattgttatcctcttgaagtttggtgaagtattcgtttgtgtcttcttaaattgactgcattctttcataaggtttattattgttcttttaaattttgtatcctggggtttatctagggagttctcattacacaatacttctatgagactagtgggtttaatgggggaaaagttttttagaccactaatgttgtttttgattttgcttgtgtgtctgatgtgataatctggccttcattattagattgtagtagtagcagtagtgcaagagatgggcaacctgagctaggctgggtaaagctgaattaattggagtatggaaacatgactcctaaagcacaggtctaaaactagacaagacaaaaggattcacacaatgaagagagccatggccacaggtctgaactcagcatgcatgcttgtagatggccgtgagctaggagaagtggagaaatctgcctttgttttcttgaagatagcaattctgtccaaggttagatggaggcttaaaacaaattttaattgacaatttcctggaaacttatgaaattgaacactttttaaattattagcaacttttgagaactctgttccttagctctatggcatgcctactctataagtttttgcctgaatcctacgcttcttggaatctgttttttttttcttttttttcccccattaattaatttatttagtccctttacatccagcttctctttcacctctgagaagggggaggtaccacatggataccaacccatctagagcacctcctctcccactgaggctagacaaggcagtcctgttaagggagcagaatccataagcaggcaatatagtcagggtaagcccccactccagttgttggggtacctgcatgaagcccatgctacacatctgctacataagtgcaggaagcaggtgggggcctaggtccagctcagctctttggttaatggttcagtctctggtagatcccaagagcaggtgagtggactctgttggccatcttttggagtacctatcccctccgggttcctcagtccttctcccaaatcttccacaagatttcacaagctccatctaatgtttagctgtggatctctgcatttgtttccatcatctgctggctggaggctctcagctcaggtagtgtgggtgtcctggataatatcgacttataagtgagtatacaccatgaatgtccttttgggtctgggttacctcatgcaggatgatgttttctcatcccatcagtttgcctgcaaattccatgatacccttgtttttaaataactaagtagtattccattgtgtaaatgtaccacattttctttagatattcttcagttgagggacatctgggttgctccagttcctggttattacaagtaagggtgctatgaacagctgtctacaaacaactatgaataacttgaaaactaatgctggaaagacagtcctgaggagagcatatagaacaatttgacttaaggtcaggaatttaccacttccaatggaaaatccacttacctgctcttcttcctgcctgtgaaagagaggggctattttagggttttattgctatgaagatataccatgaccatgacaactcttataaaggaaaacatttaattggaggtggcttatagttcagaggttaatccattatagtcatggcaagaagcatggtaacatgcaggaagacatgatgctggagaaggagctgagagttctgcaggaagtgaactgagacacactttctccaacaaggctccacctcctaatagtgccattccctatgggcctatgagaggcattattattgaaatgaccacataggccttcagatgactagttaaagaataaaccagaataaggcaaaggctacttacttctaaccactaactgtgtctctccatcagtattatggcctctcagtgccctagatgggtataaatcggaaaagaagaccccatggtagaagattaaaccagaggatggaagttagggtatgagtcctgggtggagggatgactcaacaagtcagtgtctgccctgcaagttaatggctcaggcattaagcatgatcccctcaatgggtacagaggaaaaaaccttgtgcagctcactgaataacaccagctattcaaaatgccagtgcacctccctagattttaagttgatatttcaaacatattaaaaggtaagattaactctttgatatggaataattcatatactctcttcattttaatcttgaccttgttcaatagatgtatttagtataagataaaatagaaaaaagttagaagataagtcaacaagaaattgttttccttaagaatttagagtcaggtatggtggcatacttctcaatcctagttcttgagaacatcaacgggtcaaggccagcctgggctacatagctagtgccgatctcaaagcaacaaaaaaacataaaaagaatttaaaatatgagctatggcattgcgaaagctcagacttaatgattctgtaggtaagctcaagaaatgactttcccatgttatgacacatgtgtgtactcctgtaccctggcagctgaagcaggatgatcaaaattttgaggtcaacctgtgctgcctgtgctctgtgtcaaaaaaatctaactgtgctgcagagatgacacagaggttaagagtatttgctggccgggtgtggtagtgcacgcgtttaatcccagcactcgggaggcagaggcaggcagatttctgagttcgaggccagcctggtttacaaagtgagttccaggacagccagggctatacagagaaaccctgtctcggaaaaaacaaacaaacaaacaaacaaacaaaaaaacaagagtatttgctgcttttccaagggacccagtttcaatttccattaccatggcttctcacaatggtctataactccagttccatggtagctgacgccctcatttggcctatatgggcaccatgtgcatacacatgatgatcagacatagattcaggcaaactacccatacacttacttgattatttttttaaattagagaacctgggagctagggagctagctcagctggtaaagtgtacaagcattagaacctgagattattccccagcacccactcaaaactagcatgatgaggtgctcctgtcttatcaacactggggggagatggagacaaaaagaaccccgaggttccatagtcagccagtctagcctgctagcaaagccccatgccccagctatagactccatcttaaaatacaaggcgagtcctgtagaatgagaatggagagtaactgcttacctatatacacgtgcatttcatatgtgtttgtgtgtacacaaacatacacatataaggaagaatgagcgttggggtacatgtctataacctcaacattcagaaggcagagactgaaagaacagtcgttcaagatcatcctctgctgtacagccagcccaggatacatgagactttctccaaagaaagaagagaggtgaggggaagggcggggggacaaattactgagggtcttctccccttgctttagaaattgttctgtctcttgtttgttgcagaacaagatcttccaggaaaaaaaaaaaggtactcatattagcagactatgttaaactctgcccgaccactggtccttggcacattccttgcacatactgttcagtaaacaacttaagggaaccagatccagccagatcattcactgagagcctttggaagggcctgtcttagtacagccttgacgtggaagaagttgagaagttagcatttgtgttttcattagttctttttagaacaatgaaccagctgtagctggttaatagaagccaggcctgcctgttagtgtgcaggtctcttacgcatgacaaagggcttctgacggaaacaggttttattactcatgaagccactcatgctgtttacataaagctacttgtgcagtcatgtgatgtgattgagaatgtccgtgttaatgctccctggatgcagtcccactccatactgcaaaaacaaacaaaagactccaaaatatagatcacttcctattaaactagtcatccttggatggtgcattcaagccagccaaatcctagctaccaaggattttttttttcttttcgatgttttaaattagatggagaaagtcattattgtttcaaacacaactaggtataatatttgggggatagagaataatttaaccaactatttctagttaagttaaacagaatcattcatattactgggtaaactgcctgaaggcaaatgttaactttttatatgaatcattaatttaggataaattaatacctttcattagaatgtatttttctttctaacaaagtgaaaaacctcttaaataaggtttattaggggtgtgtgtgtgtgtgtgtgtgagagagagagagagagagagagagagagacttgcttagagattttagtcaattttcttaaatagcctgctctgtgaatcagtctcattattcacaaagagagcttaggcctttgaaaaatgcttaatgagtaatttgtgaaaatagaaggactggcattctttctatgtgtaaagagaatcagccagttcagctgtttaaggacattttcacttttctgacattttcttcccattcatgaacagtataaatgatttagtaattcatatgttagggtaaagtgagtcccctgcaattactatcaccatcccacagaagaagttcatagttaatgaggtaaagatgaactggctaaactactcaagatcttgatttttttttttcaaatataacatgggcaaacacattggcaggccatgccagtttctctattcccaacaaccatctaaagcaggcagagaatacataaatagatgatagtgctgtgggccagtagatgttcacctacaaaaatcgtgaagtgagcatttggtccacagcttctgatctgcttaggtagggagatgtcttgatgtctagatttttctttgcgctgccaataaggacagggaattttcaacctctgttgtaggttcagctctaacctcacacattgtacatcaaaacagtgatggaaggtgtaagtatgggctttgttttgtttttaactaccttcaaaaaataaaattgcagtggtacattatatattaatatgtaataagcatatgttagtaaatataatatattaattaattcatatattaattgtctcaactcagttttgaaccaagataaaaatctgaaagttttattaaagaattatgtagtgattttaccttttttttttttttttttggccagtgtcaggtgagctctgttccttttgtagaccgaccatcattatgtctggtttgttctcctagccattgttcccctttgttttccctccccctgtctgctgccctttgctttcatggccagtgtatgcatcaccttgtatttctcatgggtacttcctctcgcttctgggagcaaagtgggagaaatagaagcaccacaaaagaaaaaagcaagtagcataaaaataaaagtataaaatgaaagcaagaattaatgtaaattcaaaaaaaagcagtagaggttagtgggaaagaatattcaaatagtgtattcagtggcctcaattctaatgccagcttggatcttggctcgagcgtgtgacattgagttgtttattgcttgcagcctcaggtttctcagcattacagagagagatggttataatcccacacactattttgtaatatagtaaatgtgtttcatactccagtgacttcattcttctataaatattattcttgaatgtccactggatagtagcttttcttagatatccatgcattcatcttggctgccatactcagaatatgtgctagatgtgggcaagaagaaatgaacttcttattccgcaaataacacacagtctgcagccctaccttctgagcatgcctgtgtggctgatctcattttcctgttccttgttctcgtgatctgtaaatcagatctgcttcctgattcagaaaagtgaaagtcctgcattactggaaagatagagactgttagaacaggaaggtagccagcagccttggcactgcaagagaaggggttcagagggaggagccagtagtgaagaagctgaagtacacccacatttgtgatcatttcctgatgtgaaagtgttctgtcctgtcctggatgtgctcaaagagctgatgctgaatctgggactgtcccaaagctttttaattgtggcttgaataaggctgtggattctctgtgcccttaggttttgagaaagatttctattagggaagtgagaagcttttctttagagtccttgggattcttacctcctaattgttgcatatttaatacattaaagatattttttaagccatgtgggtatcacttataatgaaattcacatttaaatttcatgacaaactgtatgtccttctaagcagaccagcacctagaaatggctaacatttccctacaatgatcttaggaagctgaaggacctgccattttagattagttaggtgatgagaaccatgagcatttataacattattttagaattggccctgtgagttttaagacacagaactgaatgtactgccagatatttttgcaggagtcacagatgtgaaagaaaagtctgtacacacatcccccgtcccagcacccaaatggaacatatgagtgaggccttctggatttggctatttttagagaaatggaggtgaggccagaaaatactttcttgcaacatttttttttattatataacatgaaaaatatttgttataatagtgatctatcctatattgtgatttaccctactgattcaattaacctcttccaaacaattagtgaagttttgcttcctaatatttgagagctaacacatggttctcagacaggggctagatctggcagagctcgaaataaagcagcattattcaacatttcattttgtgttgtttgtgttcgtggctcaggttgtgcatggaataatgtgaccacaggactgtcagtctgatccttccgtattaattatttgggaggaggcatgtttgtgctgtggtgcctgtgtggagtcagaggataacttataggagttgcttatcttgttccaccctgtggagtccaaggattagcctcagattatcagacctaaatattttcaagattttcaataaatttattctgagtcccattctcatgtgagtagtttactttaggttgaagtcatgaaaccttttgttcatagaacatcagtgaatgttttcttctgttcaacatttttgactattcaagagggagggaatttggctactagaatatctagatgctgggggtatggtctttagatcccttctcatttatttgtttgtttttgcaagtcctgaaataaagtaaaataagtactcaaactttccgtacagtaccaagccttcagggcatctacacagtagttctagaaggggtatatttgagatgcacactatccaggattcccttgaaggaatcctgggattcccatcccaggctgagatggaacatgaagccaggtttgtctgtgaacattaaagctgacaaatgcaagagacaattagccttaatgaaagctgtacccaagttatttcacattcagagtataagaagttattttgggactggagaatatagctctctagtgtagcacttgattagcatacatgaggctacagattcaaatcccaaggtcatactcacaaaaaaggtattctcaactgttcactctggtgagaaccaacattgctatagatgatttttaactagaactaatttcatttgcttatgagcaatagagtatctcagcttttacctggcaagaactctcctgtcaaaacaggtatctataaacagcaattaagtaaattaacattgcttttagcatgttatttcttgatgagtgaaaaacatttgaaacaaaagtcagtcatcttagactctgatgagatgagaaagaaagtaaatagtgttctgttgttcctcttccttccttctgcaagccgggcaactaggaaagagcccagtgttcttcctcatgaaggagtaggccttgaaaaagagcagaatctcaggctccagaccttcttccttgccgtagatatgggtgtgtgtctgtgtctgtctgtctgcatatgggtatgctcattgtgcccattgaggttggaagacagcatcagatttcctggagtggtttcaggcatttgttagctgcttagaggagtagtattctggcctctgaaagagcatcacaccctcctaaaccactggtccttcggcacaacctttttcctatctttttaagactaaggtggaaatgacaaaagaagggaaagataaaaagatgaaagcatacatcagtcagacgtaatacatgagaagtaaagaggagggtcttttctggtcacgtgacccatttaaacaaagtctagaactgcagccactacactgagtctgttgtatctcagactgtgtatctgtgtccttgtccctaagctcaagtcactgccatggttcctgaggggtatggactgtaaaagtcctttctcacctagcacaccctggtcgaaaggtcagtatcacagatgtgtaacttctctatctaatcaaaattgtgatgagaatatactaactaaaaagatgtttattcttgggttgtattgggacatcatgtttgtggtttaaaaaaaaagtagtgattttgtttaccaacatagagcctagagatttttattagcaaatgctataattgtgttcagtaaagtttttaatgccattggaatgtgtttgagaagaggttaactttttgttttttgtttaattttttttattgaatttaacttatcataagtgtatgagagaggcagacaaagacagagaatagctgggcacatgaatggaggccagtagacaaataccaggacactattctctctttctcttatgggttctgggaccaaactcaagttttgaggtttgtgtggcaagcacttttacttctgagccatctcactagcctagggttctctttttacttgtactctctgtaggtagatatacattctatgcattctgtcacacatgtattctcattatgtatgccaccacagtgaaataccaaacagatgaaaacttccatctccagctattaatatgttctttatttctctagttttattatttcaaggatgttatatagatgttgcatggatgcatccttaaccacactgtggctgagtatagccatagtttatttacatgctgaaggacatttggaacgactccagtttgtgggttctagagcaggggtaaactacagctagcaaccatacaaccaagactcctttacaatatatctggttctacatttggataagagagaatataaaatatgtcttgagcatggaatattggcaataacaaaaggaaaggttggtggttaacccaccttttctgaataagtgtagttaccacctctcatcaaagtccccgccttacaacagagacattgcagaaaaccacaactagttacaatgtagagatcaacaaaccatagagaacccaactccaacttgtacatcttcatcaccatccccacatctatggctcactgaacatcaaggaagagatggcagggagattataagcatcagaatactagagagtctgatatgcaacagtgcctcctagaaatggctatataaacaaaactggaacaatttcaatgtcaatagacatttaacatacaagggaagaaatctgtgggtcaaatgggtcaaaatgatatgttaagatagttttaaccttaggtttggtcttcccattgtgtcctggatttcctggatgtttcaggttaggagctttttgcatttcgtatttcctttgagtgttgtgtcaatgttttctatggtatcttctgcacctgagattctctcttctatctcttgtattctgttggtgatgcttgcatctatggctcctgacttctttgttttgttttgttctgtttttgtttttggctcctgacttctttttttgtttgtttttgtttttgttttgttttgtttttttgagacagggttttctctgtgtagccttggctgtcctggaactcactttgtagaccaggctggcctcgaactcagaaatccgcctgcctctgcctcccctagtgctgggtttaaaggcgtgcaccacctcgcccggattggctcctgacttctttcctaggatttttatccctagagttgtctccctttgggttttcttcattgtttctacttccatttttagatcctggatgtttttgttcaattttttcacctatttggatgtgttttcttgtaattctttaagggatttttgtgtttcttctttaagggcttctatctgtttacctgtgttctcccctatttctttaagggagttatgtttgtccttcctatagtcctccatcatcatcatgagtagtgacttaagatcttaaaatcttgcttttctggtatgatggtgtatccaggatttgctatggtgagagttgggttctgatgattccaagtaaccttggtttctgttacttctgttcttatacttgcctacctgcccttgatatatctgattggagcctgttcttcctgtaatccctgttgagtcagaactcctcagagtccagctttctctgggatcctgtgattctgggatcctgagatcctgagattctgggtgtgtcagagttcttggcagtcaagcttcctctgagaccctgagatcctggtgtgaccaagctcctgggaccctgggatccctaagatcctgggcatgttagagcacctggaagtggtacctcctctggggaccctggggctgtctgctgagttcaaaaccaagataaaccagcactgccaactggaaggaactggagccactggacaggcagggctcctgtgtccctgctcctgctggctccaggaactcctggttgtgttgaaacagatgttatgttccactcaccagtgatcctaagatcctggacgtgctagggctccgggggttgggggacaggggatggagagtcatctggggaccatgggactgtccacagagttcgcgacgccatccaaaaggaacctgagccacttgttgagcagggttcatggcctagtcggacattaatggaagaagatgccctttgtcctatgaaggctgtacgccccagtgtggggaaatgccagggacagaaagctggagtgggtgggttggtgagcaggaggaatggggaggggatagggagagggtgtttttcggaggggaaatgagaaaaggggataacatttgaaatacaaataaaatacccaattaaggaaaaaaaaaagaattgttgttactctaaaaaaaaaaaaaaagataattctaaaacattatggtcatttgatgaccaaatatgatatctactctaaatatagtatgatacttaccttccagtgatatggtagataatgtccaattgcatgtgtaaagttcttgcacactcagtggacccctgtaactcagccacaagaaaagtaatagtgagattataatgtgcctgagaaaaatgtcaaagtcatgaaagtgaaagaaaggtaatgatgaggagctctaacatttgcagaggagaccgacttacagacaagatgccatgtgaagctctaaaggccatgcatgaacagcaaggtgacacaaatggggtcagtgcccacaaagactgtgtgggaagttctcatttgtatggaacagacataaacattcttggagatgcagagacttcagaaggaagttctctggtgtaatttaggggagaaatttgaagatgcttcattattttctataatttttacaaaagtgattgacagatgtaaataaagcctgtgagctctaggaagttggcaggaaggaaggtcagtgaaagaactactagaggaggagacttggctaatctgctcatggaaagaacaaaatgatatagggtactcgatagtgaagcagatctgaaggtgtctagtgtgagcatgagtaataccagcgggaatacaccagtgggaaggaagttgggaggcatgttatacaggcttggcaggcaccttacaggttgaagtaagcagcctgaagcaaattcacacctggacccaacctttctagaaagaagagagttgtcatctaacggtggctacttagctacctgctgtctctggtacaggaaactgcatatggtttaatattgaaaataatttatttaaagtacattaaaacaatttaacgggtttcagtaattttgttcctagaacttgtataataacttataaggttttcattaatattgggtgcagggcttgtatgtatgcattttactaaagctgttttcatttggtagagtcagagaggataaagtatatatgtgtacttcataaatgagatgatttataaaccattacattagacaagtcttgctggtgtacttctgtttgtttgtttttacaattttattaggttcttaacctctactgcctttccaaccgttgttgaaccctaatcccttccaaacccccaatagtaggtagaggacaaagctgagaggggaaagggtgaatagatctatttcagccaacaaaatagactacttcctattgattagagatattgaatttcttggggcaagtccacccttcatcatcaggatatcttcacttttctttttctcatctctttgctcatgaacacttgactaactgaaacaacagcaagcagggtcttgttggagctccagagagaccccagaattaaactgtctcaccagtatttgggagccatcttagatctaatgtcatataatacagatcaggactctttgtagagtcagaacctgtgatgcctcgctctccatcccactttttccttcacaagttgacctctttatccctatgccccaaaatgaagaaccttttggtttctgaagcaggagagacagaagtctgatcttcagcagacaggactgtttattaacacacacaacttgggacaacctctctcaggctacaaactgaaggaagtgatgactgtgattcttcatcaaggaggtgtgaggggcttggaaatgaggaaactgttgtagtctacaactgcctcacctacaatctgtctttacagaaattgtgtgcctgagtcaagacatactatcacttctgggataactggtgacagatcatctctaatatcataggagttgcttaatgttgtgacagtggtagtagatatggaatcctacccggtatcaaaactatatgaactatacatttagcaaggaaagtttattatttgttcctgtccagtggtactggaaagttcataccaagcatggtggcacatgcctgtaatgtcaatacttaggaaactgtaacaatgagcttcaagtttgaggcaagccagggatacatagggaaatcctattttagtatggagagagagagagagagagagagagagagagagagagagctcctgtcacattttagcaggaaaaaatatggtttttaaatgaataagaaacatttctgtagagccgggcgtggtggcacacacctttaatcccagcacttgggaggcagaggcaggcggatttctgagttcgaggccagcctggtctacaaagtgagttccagcagccagggctacacagagaaaccctgtcttgaaaaaaaaaagaaaaaattctgtatagcaaaaaacctgctgttaacatctcttcatgttaaaaagataaacagcaggattaagtgtttactttgagctcccatgcctggctgtttttcgagaaaagggaacgcagtgtcctgtgtctagttcccagctgcagggaagcagccctcctcctgtcttctggggagctcctctctcatctgggtcaagcctctcctggctcttcctgctcctgggccgcccttctctgtctcttgctttttatgtttatactccgtactccagttccttctcccttgttcttgagttgatgcttagtaaaaggttctgaagtagagaataagattttgtagatcctcagagactgcagcctccgacagtgacctagaatagaacagccagcctgtcttgattccgggaattcttagtggactgctaagaactgccccgatctcagcgtaaacacccacatggtcacttaatcttccttcttggcaaatgtgcatgtgctgacacacacgtccgcagtttcccttgctccctctctgtggagcagtgaaattgtaccactgaatgaaagaaagagaagttagtttaaaaggaagagggagagtttgaaattctcaaagggattagcctttaaatacccctctacaaatctaacttttttcctttgtcattcatttgatagtttttgttttttattatatgtaatttttaaagcgttttaaagctgcaatgaagctgataaaggcaaaaaataaaaagttttcagggtctggatatagctttgactgaatgcttgatttctacacacgaggccctgagttcaatcaccagtgtatgtaaatgtgtgcacacatatacacatacacaggagggaaaacatttttcaaaggcaaacattaactatataatagacctttatatgtctagcatgttagacctcttatgtgtgttcttttgtttctgaaaaggatgataagggttcataaatgtcacctgcgttctctttgttgttgtgtttctttttgattcggtgtctcactgtgtatcacagagtaactttggacttgctgtatatatcccacagtggcttcaaatcatgatctctgccttgggcctgggattagaggctgatgccattgtgtctaccactgtggctgtctcctgattgcggaggttcttcctgggtggaaccgagtgactagctaggacagggccaatgtaggtaatgcatttccaagttatttttgctttacccttagcaaaacattacattacaaataaaaccacagtagctaaggggtgagattgctgccataaaacccgtcatcacaggttggttcaggcagaagctttacgctgctatcatctctctccctctttgctttcacataaagattacccttctatgaagacaaataaatgaatatcactagcaattcagattgtctagatggatgacagaaaataagatttttgatttgggaaaaagtataagaactcaggtggtggtaagcaagttaaagttacctggattgtgtgggagccagtggagttgtgttcatcagccacagagcacaaagttaagtctctttcccaggccttgcaggcttttctgttccacatgataacagccagagacatgggaacctgtttggataagggtgtttgttttatgcctcagtactataagagtagaatttacttattagaatgttattccaagcacagaatggtgagctgtctgataaaataagtccagttctggagctcttattctaaccatgaacatcttactacctccctgtgaaacagttttctgttggtaatctaaattaatcattactaaagatagtatccatctctccttcatgacaagtgctcacaaacagttctgagagctcccgtgatgtgagtcggtgtgaatatttagcttaccagtggcagggcagctaatggacaagcctcagtccactgcccaaaatggagggttattatgagcactacatcacactaactcagagcacaactctaaagtgtcaaatcttctgacacacacctctcatagcttgcctctcttatttcccattatctcccaaccatctaaagatagtgctattcttgcttgttgtcttccaggacacaaccacacaatataccaagtctcttctgggaattcaggtgttggtatctgagcttcagcctactctaaaaacatatgaatatatagacatcctggaactaaaatcattgaaactccttgtcttggaagggaatccacacccacagagtaccctggtcacatctttgctcgtgttccctctaccaccaaattagtctagggtttgttttgcttttaagacagattctcgatagtagtctttcttccttagcatccagagtggcagtcataaaccattgtgcctgcattgagcagtttgaatctccaggctcataatggcaaactatttggtcctcttggctctatggggagagatctgacacaagcagtcaggcagacatatactgtgggagtgcctagtgtaacacacagtctctctctgtcgcctatggatcaagatgtagaactctcagctctttctacagtactatgtctgcctggacactgccatgcctcccactatgatgatggtagactaaacctcttttaaaaactgtaaaattaaatgttttcctttataagagttgccttggtcatggtgtctcttcacagcaatgaaagccataaataagaaatgagcataaaagaatatttgtagtagtcattttattgtttggggttttttttgttgttttgtttttacaccagtaatatttggtttatcttaggtgtctgtgttatttcagctctgattcttagccactcatagagtctcaggtatgggttttatctcatggagtgtgccttaagtcaaatcagacattggctggttactcctgcaagtctgtgccaccattgccctagtgtgttttacagcaggacagattgaagatcaaaggttttgtggttgggttagtgtttacttttcacttttttgttttgtttttgtttttttgtttgtttgtttgtttttcaaaacagggtttctctatatagccctggctgtcctggaactcactttgtagaccaggctggcctcgaactcagaaatccacctgcctctgcctctgcctcccaagtgctgggattaaaggcgtacaccaccaccacctggcttatttctaactttttgagacacctccacactgatttccatagtgactaccagtttgcactcccatagacagtgaataaatgttcccttttccctacatccatgctagtttctgtcttcttaatatctttctttctttctttatttaatcctggcaattctaccaagggttgaagatgaaattataaagtgtttttcatttgcatttccctggtcttgtattttaaaacattttttaaaatgtttctcagtcgtgtattatatcttttgaaatatggttctatatatactttctgttgtgataaaatgctataaccaaaaaacagcttaggagtaaaaagacttattttggcttagagttccaaagggatagaaaccatcacagtgtcagagccatggcaacctgtagggaagtaagatggcaaagtcaggaaactggccatgtattcatctacgaacagaaagtagaatgagactatcccttctcaacgttagccactaatgaccgcttcctctaacaaggttctgtctcggaaagtttccatcaagtccacaatggccccaacatgggaatcaggtgtttaaatatatgtatgggagacattatcccattcttattcaagcctccatagttgtctactggaactaaatgatgaggtttttggtttttttttttttttttttttttttggtgaagacaatacaatacagaaaaagcgagctagggctgagccagacgcctcctctgctgagtagctttcccagcttgggggatggggataatggaggagaagagtcgtcaatggtctttcccactggtggacctctgatgctatagtaccaacctgctggggatatgtgccaatactggaacaatagtatcaccggtacaatagtggtatgaccattcgggattatagagtattttcccttggatttgaggtccattcttgaagagaaaattcatgcctaatatgctgtacctagtattttataaagcctcactgccaaggagatcagacttagggatgtggaagctgctgctttaccaaatggccatgatgtgaaactgtctctaaatacttgttggttttttgtttttgttttatttatttattttattttttttgagacagggtttctctgtgtagccctggctgtcctggaactgactctgtagaccaggctggccttgaactcagaaatccgcctgcctctgcctcccaattgctgggattaaaggcgtgtgccaccacgcccagctaaatacttgttttataccatagaataatgatttcaatattggttagagaagtttctttttgctgtaggcattggataatacagaaacttaaacctgaccaaagtactgagaataaataaatcctagttaaacaggccatctatgttatctatgttatctgtctccctatgcccaaaacttatccaaagagagggagaaggaatgtaaaaactggaagataagaagaaggctgtgcactagtcaatttcatgtcaacttaacacaagtcagttagaaaaagcttctataagacttgcctgtacatacatttgaagggcattttcttaactaattaagaaaatgagatgacccagctgatgggggatgatgccatcccctgggcacgtggtcttggatcatataaaaaagaaggctgagcaagccagtgatcggtgtttcttctaccacctctgcatcagctcctgcatccagacttctgccttgagttacctcattgactgcaaaccctaggatcaaataaaccctttcctccctcccaaagttgcttatggtcagtgtctttatcacagcaatagcatcaatcctaagactaatgtaaaatgctttcttctggatataatataccattattctcagggactcacagcacatctgtaggttatgtgcacaaaactgagcctagcaacagtccggcatggatgaagaaggggctcatgaggacccaccctgactgagaaggtttggccagttcatggctactaggaacctgtgctcatgaaacaattttccttaaactcagtgaattatttaaacaaacaaaataagcaaacatatggcacatgctacaatccagcacttgggattgaggtaggagatgaaaatttcgagattatcctcagccacacaacaaattcaagactagcctgggctatatgagatcctgttgtccacataaaaaccagagatcttatctttctggttttttgaaacaggatttctctgtgtaatcctgattgtcttggaatttattactctagaccaggctgaactagaactcagagatgcacctgcctctgcctctgcctcctctgcctctctgcctctgcctcccaagtgctgggattacaggaccgcatcaccaccacacggctacaacattcatctcaaagagagtaagaggtgatttattctactagagccattatgagtgaccacggcccagggacacagatgtaggttataccaaagtcaatgttccaatgcagaagcagtttcataaagtttttatggttttatagaacagagaaagtcataaattaaggcaagtttaaaatatattggtgggtggaaaggcccaaggtgctttctggtgacatttgtagctctcaggatagtgaaaactagtgttcagttaatagcatctaagaggtgcttagtatattttatcatgatgtgttagttcagatacaatatatggcaagaaatggcatcttagaaggctaaaagtaacccaagatagagcgaccagcttctgaacctacaaaaccctgtctccaaagttctgagatccccagcagaatctgcaaacacagactccttctggaggttttgttctcagccagacagcctcgtttcagggatgtttgttcgcactgttacaaaggaaaacaaacagaatcagaagtgaagaagcaaaactggcattgtgaaatgattccattacaaacaaggaaagttagtaaagatgataggtcatagatgttcaatacacggcttagctatttttcatttacccacaatatctgacaaacaaaattatcatttaataaagcaactaaatccatagaaaatccaacaactgacctaatgtaacatgtgcaagaatgttttagggagaaaaaaaaccctttttaagctttgatatcagttgtgctcactaaagaaagatttgcacactgtgccatcgactgaacccagccctatgttctgtgggtaactttccagtgctgcctgcattaacttctgttactcccatgttaaaatgagtaaattcaggctcatatacgtaatttttgcaaggtcctaaatctttgacaggatgctgctttgctgggaagccatttgagttccactcaacatttgtagtggctcaagaaaagcaagcagatcatggaattttttttttgcagagacctgtgccagcattggatttttagagatagtgtttcacaaagaggaagcattgacaagtaggtggaattcactgtgccctgtaaggtaactgctgttgtggaaaccctcttcaggtgtgagccagctcatccctaagccacagctctatgtggaggtcagtgagtgggagagcacatccagccagcatgaactaagggggaacggtactcagagcaggggcctggaggcatgacccaggcccatatagcaaaccagggcaaaaaaacaaacaaaagtagcctccagctcctttggctatttgagataaaagcaatagtcaagtaaactaggaaagagtaatatcagttccccacctgtccctttgtagtataaccaagaaagagaactttatattgggtttcatagagattttaatattaactttttaaagagtaaggtttagtaggcctatatctatctactaaagggccactttgctgctatcttcctgtaagaacgctgagggccttcttaataaatgcagcctgaacgtggacctcctttcacccccattccccctgctctcctttaaaggaaacagagagaaaccctggatatagaggtagctgggaagtgaagaaacatgtaaatgactatgacagaaagcgagtgtcagtctaatataaaaggatatgggttcattatttctctcacagagacaataaaaacaacagaaggggcagaaaaagcatgactagattttaaatgaaaaactaaatcttactgagatatctatatccatctcaacaggccagcatgtttgagagtacagaggatcaatagtgtcatgaataatttccaggaattggtaatcctgaaattcaccagagagaaaccaggtttatggttttgagccaaatttgaaccaaggtttaattaaatactgacaaggattctgttcaggtccactcttgggaatcccagcgagccacattttataggggcttttaaaagggtaaaaccacagggccacagtattcctcaagtggctttgttattttccaaaagccactgtttccagcattctaggaagttaccttgtccttaggcaggtggggcagatagatgactttgacactcacagaatctgtaaggtgagcgctcctagattcatagagtatttaagaaggaaaagatagtctcatgaacacacataccataccagaacttaaattacctctctctctctctctctctctctctctctctctctctctctctctctctctctctctctgtctttcatatatatatatacatgaccagctaataggggtacccctgagttacagctcagtccttggcctcaggcagttagagggtaagctaagcctgtcccctttgttttcctcactgtatctatcacataacatctggcagaatttgtgactccaaataatnnnnnnnnnnnnnnnnnnnnccctcccctcccctcccctgtagcacagcctgagggcaggggcagggatttcccacatgagttcacttagtgtttagtatagttttcactatcctgggtttttgttattccaaatgaatttgagaactgctctttctaactctatgaacaattgagttggaatttgatggggattgcattgaatctgtagattgcttttggtaagatggccatttttactatattaatcctgccaatccaggagcatgggagatctttccatcttctgaggtcttcaatttctttcttcagagacttgaagttcttctcctacagatctttcacttgtttggttagagtcataccaagatactttatattgcttgtgactattgtgaagggtgtcatttccctaatttctttctcagcctgtttttcctttgtgtataagaaggctactgatttgtttgagttaattttatatccagtcactttgctgaagttaattggtttaggagttctcttgtggaatttttggggtcacttaagtatactatcatatcatctgcaaatactgatattttgacttcttcctttctaatttgtatccttttgacctccttttgttgtttaattgctctggctagaacttcaagaatgcattgggagagagtgggcagccttatctagtccctgattttagtgagattacttcaagtttctctccatttaatttgtttttggctatcggtttgctgtatattgcttttattatgtttaggcatgtacctcgaatacctgatctttccaagacttttaacatgaaggggtgttgtgttttgtcaaaggctttttcagcatctaatgagatgatcatgtggttctaaggacccaacagaaatgacattagccaaaatacccaacacaggggagatagaacctggaaagaccatatccagtggataggcagaacccctggttgaagaatgtggccacccacccatctcaaaaaatttaacccagaatgttcctacctaaagaaaatactgggactaacagtggagaagagactgaaggaaaggtcaccagggagtgccccacctaggtatccatcccatctgcaaacaccaagcttagacactgttgctgatgccaagaagcgcttgctgacaggagcttagtcaggctctggcctgagcaatacagatgtggatgcttgcggccaaccattggactgaggacggggagcctaagggaagagttaggagaaggactaaaggagctgaaggggattgcagccccataggaagaacaataatatcaaccatacagaccctccaaagtctggagggactaaagcaccaagcaatgagcacacatggagggaaaccatggctccagctgcatatgtagcagaggattgccttatctggcaccaatgggaggcaaggcccttggtcctgtggaggcttgatacccagcatagggggatactagagcggtgaggtggggtttggtgggtgggtgggtaggaatactagagtgatgaggaacaccctcatagaggcagagggaggggataaggggcttgcagagaggaaactggggaaggggacaacatttgaaatgtaaacaaataaaataagcaataataataattttttaaaaaacaaaacaagtcactgcactcctctgtgcaattgctctccggaaagtggagtgggcttgccctcgtcctgcccactggtactgcccttttcatgtttgctctcagctcgcaaactaagttctggcaacatccccacatatacccgtaagcacactgtttggatgcatgtggagatttcccacactaaagtgagtgagtttgctatgtgaataaatgtaactttactttctgaaattctgttagttttgtcaaatctgccaatccatttttatatcttctgtcataatccctcaataggtctgttcctcagacttattccatagactcacttattttttgtttttaattactttaatatgaatacatttttttctattgcaaagcaagtgctctgttgatgagcttctcaatggaatctagagcagcatttctcaatcttggaggtccaactactctttccacagggttatatagccaatatttacattatgactcgaaacagtagcaaagttacagttatgaagtagcaatagaagtaattttatggttaggttcacaacaaaatgaaaggttctagcattagaaccgctgctcccgagtttcctgtgctgtgcatgaggcttcgtggggagtctacatgttttccccatgtggatgaggctttatcatggaagccagagattctctccttgtgaataggatttcagggagtatagagcttttgccctgaacacggggcttcatcgtggaccctagagtttttgttcttctgaatggagtttctgggcctagagatgctgtcctttgccttattgttttgtttgcatctagttgtcgtgtcctctctcaaccagcaagaacgacacgaccaccagtccttctaacagcagtttattcagtcttcatctttcttcttgtttatatctcccccaaaccctgggcctctcactcttatatactctcagttcccatccactcacagcaggccatgtcacctcaccaggcacgcaccttcagctaatcagggcagcaggggcatatctccaccaaaatggattcgccagtatcctggtacacctgcgtagctctcatgatggttgtggcttatagtcaggtgaggaagtcaggtgcaagtcataagacttagctgcagtccctggcgcctttgggactgccgccacacccgctcctcacatctagtattttcctttatatagcaatgtacactgacaattttttttatcctccatgaaatcacttttgagaatgtgtcactttaagttggtctttgtttacctaaggtggaagtaaaaaaaaaaaattagaaacttacttataatgggcttctatgaatgctggcctctgaacttaaaattgggaggatcatccctggctatatatcatattcacatggcttccagctagggcaatgtctcattgcttttgtcaacttggcataaacctagacatggctcagatggggaaatcttaagtgagacaatacctccatgacactggactgtaggcaaggctgtggactattttgttcattagtgattgacacagaaggttccattacacttagtatcatccctgtgcagatgattccaggttcaataggaaagctatgtcagccaagcaagacgtgagaagtagccattaggaatgtgcctccatgacctctcctcagtccctacctccaggttccagtcttgagttcctgccctgacttccatggtagacttacctggaagtgtaagatgaaataatacctttcctctccatgttgcatttggtcactgggttttatcacaatagtagtagccctgtctaagaatgaccttgatctttcgttggggtagtatgcatatctatgatttttgtgacttctcaatgagctttcactttatcgttcattctcaacactgtgtactgaaactctttccactgttgagcatccactcgggaagaggacagaaatgaggaaagatggcacgtggtctctggaggatagtcatctttatcagcttttcaaccacaatggctaggggtgcatgctaaaaaatatttttgtcaactgtgttttgtggctagtgatctaaatacttgcttgtacaaaatgaaaacaaagtttggcaagatgattcagagggcagaagcagctgctgctgctgcagagcctgacaatttaagttcagtcatcaggactaatatgatgagaggagacagtaacctcccacaagttgtcttctgaccttcacatgtgtgctagctcacacacacacacacacacacacacacatacatacatatacacacatacacacacacacatgccacacacttttaaaaaaaagtgtacttgaatccaacctcatttgcccttactcattattatgaaggtgactttagtagagttttgggaaagaagacaggaaccttcttgattctcaattagaaaataaatattctgctttttacaggtcctgccttctagtgcaggatgcctgtggcatgttcggggaagtgttcttgaacagcaccctctggaagagcagacagttagaagggaagtcctgcagcatgtcgggagtgaaggttctacagaaagctacaagaggaaggtaagaacatgctggaagatcatctactttatataataacaaataataagcaaactttttggcttttatctcagatttttattttttaagacagtaagccagtactgctcatacttggattctacagtaagactggcagttaagtgaccatacagtgtccctatagaaacataattgataaccaaaataattaaacaccattctgatttatattttgttaaattaaaagaaaacacttaataacagtatatcacatgtatgaagtgaaatgcctctagtaaaaatattgattgtggtggtttgaatatgcttggcccaggaagtcacactattagggggtgtggccttggtagagtaggtgtgtccttggtggaggaagtgtgtcactatgggagtgggctttgagaccctcctcctagctgccttcagatgaaaatgtagaactctcagctcttctagcaccctgcctgcctgaatgctgtcatacttcccaccttgatgatgatggtctgaacctgtgagtctgtaaaccagtctcaattaaatgtttgcctttataagagttgccatggtcatagtatatcttcacagcagtggaaacccaagtaagatcattgctgttactattatctaaatgtttaatttttttttaagtcctctcatttctagaaattagtacattctggtaataatatttttacctctttgaatactgtttcaagttaagatagtttaaggatagcaaaatttgcagcaataactgtttaggattagttttaactagagacctaggttaaaaggaaaggtttctatcagtccagatctttccactggtcctacctcattggctggccagaactttcagcatcttggaaccagctgatgaaatctgaccatttaagtcataataaagagaaacagaaaacaaaaacaaaaataaagatttttaaaagttgtatgtatattttacttcttgaccctgtaattgaagatttcttgtctgtagttttctaaagtatgactgtaaaaaaaatctcgttaatagtacatatacatgaaagtctaactcaaccaaaagacataaaacttttttttttcccttgagacgaggtctcactacgtagccctggctgacctagaactctcatatatgtaaaccaagctggcccaaaactcacagagatctacctgcctctgcttcctgagtgttgaaataagtgaaactgttttaaattgtcaagtattaatggtgttttctgtgtgtgatagcatacctctgtaattccagaacttaggaggtagagatgggaagatcagaacttcaaagccatcatcagttacatagtttgaggccagccgaggctacatgagatcttgttctgttgcaagtgccgtggcatctcaccttgaacagtttgagtagtgggagatgtcatggtgtacaggctgtccacaccatggttcttgcttcatcagtaatcattttattctgtacattggaaggaataaggaacacatcttttcttaagtatttttaaattattctttgtcgagttcatagatgtttacaatgttcctccatcatatgttcccctaactctccacgcccaccctcagacattcgcaacacttttccttcctatcctgagaacgccctccccccactgactccaactagtgctgccctctagagtgctcactcatcttcctactgacttatcttgttcaggtctgtgcagatagccatagctgctgtacgttcagaagtacaagggctatgtcatgtccggaaggcgacatttcacagcactcctccccaccccacaactcgtgtgtcccctcttccatgactcctgctggggtgatgtaaaagtccagtttagataagagcacaacacatctgcttagcaaaatgaaagcagtgagatccatggcaaggtttgcagcagtgggcatggatttcttctgtggagtatgccgcaagtccagtgtgataatagttgttgtcttagttggggttactgttgctatgatgaaacaccagtatccgaagcacctgggggtgggaaaggttctatgtaactgttcatcatcaaaagcagtgagggcagaaactcaagcaagataggaaccagaggcaggagcacatgcagaggccatggaagggtgctgcttactggcttgtttccatggcttcctcagtctgctttcttagagactccaggaccagcccacggattactgggccatcacccatcaatgccctatatgatgcctgtagcccatcttatggtagcattttttttcttttctctttctttttctttttctttttgaattcattttattatttgacagatacgagtattttgcctgtgtggatctgtgtgtactatgtgcctaaggaggtcaaaatcaggcatcggatcccctataactggagttacagacagttgtgaactgcattgtgagtgctaacccagtcctctgcaagaataacaactgctcttaactactgagctaactctccaaccctggaagcattttcttaattgaagctccctccctgcagatgactttagtctgtgtcaagttaacataaaactatccagcacaattggttacctctgagattcatgccactgtttcatcaatgagcatatctaggaagaaaccttttctaaaaaagtatcctataactaaataccataaacagtaaatctaaggttctcaaactcattgttgcctttcttcaagtcgcatagtactccttcattattgataattatttaattatagtagtacctgagcttctagtatcactccattaagtccgttacaagtcagttacattctgaatcgttcgttgacagcaacttttctcctttgtatgatgactacccaatatgaccattctaagtcatgaacatccattgctatttctcctggctggcctcgtctctgtcctggaagcccttcctgtaacaccttgcagatgagtgatggatctgtctgagagtttatggacctggaagaattatgttccataaatagatttgctataggataaacttggagcagatattagaacatcctatctgttatgcttatgtgtcttaatagcaattacctccttttttgtattcctacattatagtgtaattacactatacaattccggggtaaaagtgaagatttatttgctcaggcatttggaaagcgtatctagacataagacaagcttaattgggcatatgaaccccattcttactaaagtcgaccctgacttcaatccttactctaatatttttatgaacacttttcaaatcagaacactttgaaaactgagagtaggtagatcaaatatctacagttagactcactccagcaaggctgctctggtcagagtgcctcatgactcagtcttgagctgctacctggctcaggatagcccagagagcccctcaggctagagactgtgggaacacattgtggaaattctgatacagataggcatagccaggcctgagaccagggatctttgcctatgtagaattgatgttcttccaacatcatgttatacacgtactttagagttgacatagttcttatgtgttactctgggaggatcaataccatctttagcatttcaaaggaaatgggctttccatagggagtgtccaataatccagataatccatctacaagtgatcctcctaggcctcactcatgctcagtgagtgagtgctctctacctacataccaccttaccaaaaaatgtttgaatcctcttccatatttaacttactggcaaaatacttgatgcttttaggagttaggactcatttctttattttatgcatttcactttgcttcggcatgcagccatccaaataaatatttggagtatctttttgttcttttggaagctgtgtttcttcaaaacaaattactaaacacttttggaatgttggatgttataattgcctattagtgacatcatccactgtcggtcatccacccatagcccggaaaacaaggtagtgcgtcttttatgccccctattgtgtttgttagcaaccctcctgaactctaacaaaatgcactacttgtaaaccctaacaaaatatgactatttacaaaaatgtaggtcaaaataattacatgtccaattacgatatatagaaaacaactgtttttaaaacagttctaagatacttgtatggttaagctaaaacatactgtctttcagatctgctgtagcagatttcacgtgtctacagttttagtaacagaacacccgtcacccctcattgccacagacagaccggctgctgcacttgcataaggagctccccgtggctactgcctcacgcaggaaggtttactgagccacaaccagcatagttttctgacctttttttaactgaagtgtctatacttactggtaagagtaagatgagtccaataacctccatttaagttcagacaagtgtacggtgtccaaaggcatcctggcgagctgtgctacctgactggctgcagctctgcttgtgcttcctttacatgattcttgctgtgcttggtccaggtcccttttccaaagctcagcctctgacttttcttttcctgaatgacttacacatcaggttagcaagccaaacagagagctcacattacttttacatcatattctctatatgaacttggtctttattatcaactctttaattttaaattgcagggaatgttaaggaaatgggcaggaaatctggaacgtgtaacctgcaaaagtgataggcagcaaatgcaaattatttcatggagcaggagaatgggggaacttatttcagttcacagtcctctaagtgtttgggtcaggcatggtggtggcactgataagtccagcaccggggagtcaggaaagttgatcactgcaaatttgaggccagcctcatgtacacagtgagcttcaaaccagctacagatcctgcttgcttatttttggataaagcattaggttttgcctaaatatgattagtattttgaattgttatatagttgccaatgcaggaagtgttgtacaaacttcaaaatagcagaagtatgtttggtaccatttcagagatcacatgactattctgtcctaaacacaagccaaactttgtgtagtagatttttacaaaactcaagtgaacaattcaagcagcagttttaaaaatcaagcattctaacaacaaaatacagatactcttaatgtggtacttaagtgctgaaaaatgataggaagatattaaaaatgttttctacaactatatgtctctacatgttcagaattgtagcaaatctgaatgtttgtaagtgctgtaggacattgcagcatacagaatgtacatgtgtgttcagcatgaaggcttctctgaggttgagcaccctagcacaggaaagcactgccaggaacacctcattcatttttttgtatttgattcaaaactaactttgaatgttgaccactcagaaaccttttcctgctgtcctatctccataatactcagtcagttaggaaaagctgtgccatagggagaaggtgcaaacatcacgtagaaagggcctctgctccctgggtgggaacacatggatgggcagatacctggagccctcaccaacaaggtggacgattctaggtctgtgagaaacagtgtctcaaaaagcagggtagaccacacctgagaatcaacactggaggttggcctctaacttccacatgcacgtgcacataagtgttgcggtaaatctctaacccagataagctcaggcaatggaaacatcactcaattaatatgaatacatgctgtgcacctagattgggcagacataccactacactaccatcttccccttataacttgcagtttctctaggccaggtgcttctactccactttccttcttcctcctcctcagttgtgtcctctctctctctgtctctctctctgtctctctctctgtctctctctctcttctttttctcccaactctaggctttattttgtaaattaaggtgggaagaaggtttaccagaaatcacctgactgctgacaccttgttctcaacccctcacaggagaacagaattaacatcaaatataattagctccagggcctatctgcaacacataagcacctgcatacataaacacaaggacctgtaattaaccaattagttaaaatgcacttcctctttggtgaggtgctgctcacatcttgtgtgtgtgtgtgtgtgtgtgtgtgtgtgtgtgtgtgtgtgtgtctcccaggattactgggtatggctttgttgaagtaggtgtggtcttgttagaggaagtatgtcactgtgggtgggctttggggtttcaaaacaccagtcccagtgtctccacatctggatggagagctctcagctacatctccagcaccatgtctgcctgtgtgatgtcgtactcctcaccatgatgaaaatggataaaacctataaaactgtaggcaagctccaattaaatgttttcttttcttttataagagttgtcatggtcatggtgtctcttcaaaacaatagaacatactatacatgtagtgtgcataaacatgaaagtgcacatacatagtcacacacacataaaaatagagatatcttttttaaaacttttagtttggactggagagatggctcagtggttaagagcactgacagctcttacagaggtcttgagttaaattcccagcaaccacatggtggctcacaaccatctgtaatgtgatctgatgccctcttctggtgtgtttgaagacagctacaatgtacttgtatacacaaaataaataaataactcctttaaaaaaaaaaactaaaaaaataaaacatttaatttgtccaatttcctaagcttgacaacagtgctcaacagcagggtgacttgcttcccgtgtctgcaagtgtaaagtgtaagccaggtgtggtgctcatactgtaatcctaagcacttgggagctggggctagaggatgcctaccaatttcagaccaagctatctcagaccctccctccccaagtatcacttttctgaaggtgacctaatgatgaaagtgttccaattctgggcttagggtatcctttctagaaaatcctgtcttaaattagtgatcttttgttttattttgtcagaacacagggacttttacctgctctcctactggcatattctacctactgacacttttaaatagcagcttgatctagatacattttaccattttaaagtgaacagccccttatttttctgttcttcaccaagtggggcagccatcatcactgccttaattccagaatatgttttaacgcccctgcacagtgacagaaacaaatggacctaatcgatgattgttagagaggaggtgctggagggggtcactggtaagtttcccctgctcctgtaaatagaccttcacccatacttttataagttacccaacacagacacagaacatgaaagtagaggaagagggtagggaagagaagggtcatcaggaactggaggacaagagagggtaattggggtgaatatgatcaaaactgtcattataattaacgtgctaataaacagcttctaaaaagggaaagttatgctgattggcagtcactccctattccccaactctggtcaactctgccttgttctttgcttctgtggacttaagataacaggtcattcatcatagagcccagacttgccccaaactcactatgcagccagattgaccttgaatttgtaagacatctatttttcattctaggcaagtcagggccactcaaaaaaggaagttacatctctcttaaagctatgtccactctcaggagttctttcttgttttccttaataaatttacattctctgctccatatacacatgcacacacgtagacacacatgcacacacacgcaatagagagcaccgagttaattttcttttaaagacttattttattctatgtgtatgattgttctcccctaatgtgtatgtgtgcactgttctttcagggtgtcctcagaggccacaagagggtgtcatatcttgtggaactagagttacaaggaagcaaattaacaaaaagctattacccaataaatagtattctcattgtctttaccacctcccaaaccaatttctctttgaattttcctattctgggcttattaatttaaaagtatattatattaagaatatatatgtatatttttgcatgtaaactaatagttcattctgcatctctaaatttttggtgtggacaaggaaattttcattgaacatttttatgagtggaatcattcagtccatgggatttcatcatttgtttctttccattattataatgctaaggtccagctatatcacagcacacattaatactttttttttacaaggccaaaatatatctcaaggtaaagataatagacattttatatatcctgtcatcagtgtgtagacacttgggtgtttttacatttcatttttataaaaactgctgttataaaagaattttatgtaaatttgtgtgtgaatataaacttttcatttaattcttgagtattgatgagatgcccttataagtctcaagcaattgaatacttggtcctcaattgttggctgtttagagaattaggtttgaaagattgactttgcgttagtcctcccagtttcctgcttgcagttggagatgtgagcttcagcagtctgccttctgctgcatctgctctgcaggcatcatggattgttactcttctgaaatggtaagccccaaataaatcctttcttctataagttgcccttatcaaagcaatggaaaagtagctgagacagtatcctagcttggtttccattcatgtgataaacaccatgaacaaagcaagtgaaggaggaaagggtttgtttcccttcacaaattacatccatccagaaggaggtcaggacaggaagatgaaggagaactgaagcagagaccatggagaaatgctgcttactagctcgctcccctttctatgggtcagttttgttttgttttgttttgttttgttttgttttgttttgaatacaatttcagtccacctgacagggatggcatggcacacagtgggctgggcctttcacatcaaccatcaatcaggaaaagcctacaggcttgcctatagaccagtctaaacaaaggtgttttctcaattgacgtttccccttcccagatgactcggttttgtgtgtgtgtgtgtcaagttaacaacaacaacaaccaaaaaataaccggcagacttggttgttaatgtaagtatatgtttaattcttttaagaaacttaactaactttctagtgtgaccacacccaccattttacatccccaccagcaaaatgtgaaagaaggttttgcatcctaaccagcgtcaggagtgcgcatgtttccttttaggcattctaaagaagcacagggatatttcattaggagcttcacttgccctctctcctaaggatgagtgacagtgtttctcaatacctgcttatatgacatcacatagatcctctctgggaaaatcctctgcattttcttgccattgccctctccttattttttaactggatgctttgtttccccacctgcttttcattcttgagttttgagaattccttttataacagatatgaaatgtgaatattttctctttgtagcttgttttcactcttttaccaggatcttttcaatacaagactttaattgtgatacagtccaggagctggcgatgtggttcagttggtggagtgcttgtttagcatgcacaaaaccctgggggttcaatcccagcacatcataaaccgagcatgaaggcatatgcttataatcctagcacttaggaggagatgtcaaaagaatcagcagctcaaattaattcttgtttatgtagtaagttcaaagccaggcttggatacacagtgggatcagggcagtgaggagaaagatgaggggtgtggcacagcatgcatatggaagtcagaggccaactcttggttacttgtcaggggtaagaagatgagttattcacatcttcctgggagtagtgtcacatagaaaatattttcaatgaaataataataagaaaatttctggaatctaggggaaggagatggcctttcacacccaagaggcacacagtccaccaaaataacaagaccagaaaagaaacaacacatgctgtattatagctgaaacaatgactataggaacagagaaagagtactgaagcaggaagaaagataagagccacatagaaagatgggcccatcaaaatgagaattctgatttttcaatggagaattaaagggcttagataggcatatttcaagttcttaaagatcacaagtgccaatccagattgacatagttgtcaaaattatgtgtcataatcaaaagagaaagaactcttcataataaaaacagtaatttatgactagtaagccagccccacagaagagactggaagaaacacttcacactgaagggaaagattaataatctaataggctacagggaaaacatttaagccatgctaacacaggtgataagaaagagaggactaagggacagaaaggactaggaaattatcaaaatgacaagaaatacacactgttcagtaattaataccaatagcctcgactcctccatgaaaacattgctttagaagacaggatcatccttttaggtgcttctaaaaaatgcctccttatcaaaggtagatattatattaggatgtgagcttggaaaaagattttccacgcaaatggaacaaacaggctttaagattctaatatctgagataatagactttaaaccaaatacagtcagaagagattaagaaggtccctttatttgatcaggggaacaatctaccaacttcatcacaattctaaaagtgaataaaaactgaatataggtcaacccaatttcataaaatctattagatataaagccagaggttaatcccagcttcaatatccattcttaccattaggtgagaacatgtgtggcaaaaacaaaacaaaacaagcaaatattgtaattaaatgatctcaaagcttatctagcagatagtacagaacactctacctaaacactatataatatgcatttttctcattagcccatggactttctttaaaacagtacattcttggaaaaagcgaagtgtcaattaatataagaaaattgaaatactgcttgtattttatctaatgacaacaggataattgctggaaatcaacagcaggagaaactccatacaatgtgtagggtaaaaggcttgagcccacttctgggtttgagaaatctaccaaaccctaccaatccccaccccggggagctacccacccacaccagaaaccttataaagcctcctcctgctcagttctccactgcttctcccccaagcagagatggccaccttcttgcttctctcccaataaatctttagctgtgtagtgtgactttgaacggccaggatacttttcccttcagagccttgacacttacagtgcattgcggacccttccccctcagagctccaatatctctactgggaaagcctttcccatcagaactgtaacacttacaaaatgcataaacttataaggattaaataatgcactattgaatgacgagtgtgtctttaaagaaatcatgaaggaaattctaaaaagtcccagaactaaatgaaaatacaacatatcaacacatatgggatacaataaagggagtcagtcttaggaagggaatttatagtttctaagtgcatacttaaaaaacaatcagagagatcccaaaaaacttaatgatgcattttactacactgggacctctccctccaccccccaaagaaaatcccaaatcagtagtagatggagagaaataattaagacagaagagtatataagtatttttatttaaaattgtgaaaagaatgtgaaaggaaaaatatacttataaaacagcagagtcctttccttgtccacacaacttagcaaggaaacatgttctctactcagaaaggtcatagtagctttgacattacaaatcagaaaaatgtacacatcttaatttttaagcatagatgacttatgaactacatataattcaatcattattttaaaaagcacagattctacctttcagtgtcccatacttaatgcatttacacaatagggtcttatttaagtgctaatgtttgtgatggtttattatgtagtcatttaatggttaatatgttatgcaggatctaagttgtactgtgaatctattattaaagagtgtgttacatcccctgaaggtggagtacagtgtgttgttaatgacctgttgtgggtcctaggaattgaactctgatcctctgcaagagcagcacgagctttttacccaagacatctatgagcaaaaattaatgatgaaatacaaacaaacacaaaatagcaaatgacaagggtacaaagaatcaataaaacagagagctggttcctgaaaaagataaacaagattgacaaaccttaaccaaactaatcaaaagagagagaaaatcaaaattaataaaattagagataaaaagggagatactacaacagaagtagtatcttcaaagaaaatctattttaaaactcctttgctacaccaaattggaaaacataaaaagaacacgatgaagttctcgatgagtaagacccatggaggataaacaatgctgagagaataacgtagacagacctttaagaagcaggtgcaaattaaaccagtaataaataaaaattaccacacctaaaagaaacagactcactacaaagtttaaaggactaacaccaatattttttatttgttttgtagaagagcaaaagaggccgtgcagcctgaaaggggagagctgagtagtgtggtcaggaacagtatcaaagagaagcactagaaacacataaagacatgagaaatgaaacaggacttctccttcatggacaatgctaaacaagctttacagaatattatcatgaatttttattttgatagagggtcttgtgatgtagcccaggctaatctcaaactcatgtcttgccttctgtctaaacctcactaatactggaattatagggatgagccactatactcagtcagatttatttatttatttattttaattggatattttatttatttacatttcaaatgttatcccctttcctgatttcacactccccagaagccccctataccatcactctcctcctgcttctatgagggtatgcccccacccactcatccactctcgcctccctgccctcacattcccctacattggggcattgagccttcatcgaaccaaggacctcttctcccattgatgcccaacaaggccatcctctgctacatacacggctggagccatgggtccctccatgtgtactccttggttagtggtttagaccctgggagctctggttggttgatatagttgttcttcctatgggcttgcaaaccccttcagctccttcagtcctttctctaactcctccattggggaacccgtgatcagttcaatggttggctacaagcatctgcctctgtatttgtcagactctggcagagcctctcagaagacagctatatcaggctcctgccagcatgcacttcttggcacccacaatagtatcagagtttggtgactttatatgggagggatccccaggtggggcagtctctggatggcctttccttcagtctctgctccacactttatctccatatttgctcctgtgagtatattattaccctttataagaaggaccgaagtatccatactttggtgttctttctttttgagcttcatttggtctgtgaattgtatcttgggtattccgagcttttgagctaatatccacttatcagtgagtacataccatgtgtgctcttttgtgattgggttacctcactcaggatgatattttctagttctatccatttgcctaagaatttcatgaatccattgtttacaatagctgactagtactccattgtgtaaatgtaccacattttctgtatccattcctctgttgaaggacatctgggttctttccagcttctggctattataaataaggctatgatgagcatagtggagcatgtgtccttgttatatgttggaatatcttttgggtatatgcccagaagtcctcaggcagtactatgtccaattttctgaggaaccgccaaactgatttccagagtggttgtaccagcttgcaatcccgccagcaatggaggagtgttcctctttctctacatccttgccagcatctgctgtcacttgagtttttgatcttagccattctgactggtgtgaggtagaatctcagggttattttgatttgcatttccctcatgactaaggatgttgaacatttctttaggtgcttaatggccattggagtttccttaattgagaattctgtttagctctgttccccgttttttaatagggttatttggtgggatctgggtatagagagctgtggcacagggtcagttcaggggcacagatataaactggaagaatcccattcccagctgttctttggttcctgtgtcctgatggctctgggcaggtcactcttaggccaggcatttgagtagaagtgctggtctcacctgtgctctcaggtgtgtcagctctcttgggagaccagctcactccccgtgggacctgagtatggagatctgtcagatcttctttaactgtcggagaaaatcaacaatgaatccatttggactttgatgtcttttggttgggaactattactgcttcaatccagctctttgctatagattcgcttaaatcacttatctcttcttggtttaatttttgtgtgtctaggaaactattcacttcatccagtttgctgattcagtataacataaatctttaagatatagtctattatttttctgaatttcattactatctgttgtgataatacctgtttcatctataattttatgaaattggatcttgtctttcatttggctactttggcttagagtctgtaaactttatctactttttcaatgaactactttttttaattagatattttcatttacatttcaaatgctatccccaaagccccctgtatcccccccccccccgccctgctcccctacccacccactcccacttcttggccctggcattcccctgtactggggtgtataaagtttgcaagacctaggggcctctcttcccaatgatggccaactaggccatcttctgctacatatgcagctagagacacgagctctgggggtactagttagttcgaactactttgttttatagcttcttttattgtttattctttcttttcaattattatatgaacttagttatttctttgaatttaccaatttgaagtttgtcttgttttgtgaaagccccccagcatgactattaaggggcttttcttttttctttttttttagatatctcttattatttttaaaatatagttaacttctcctcagaactgccttcattgaatctcatgggtttggtagctgtgttctcattttcattttattctagaacttgtttttgatgaatccttcatccttcattagtgtctaattcaatctctaagagtttgtgtatattgtacagtttgtgatgttgcccaggctaatctcaaactcatgcctagtcttctgtccaagcctcactaatactgggattacagggatgagccactatacccagtcagatttaaaaaaaagaaagaaagaaagagaagagaagagaagagaagagaagagaagagaagagaagagaagagaagagaagaaaagaaaagaaaagaaaagaaaagaaaagaaaagaaaagaaagaaacaagtagcaatctctggcctcgtaaatacccactgtaatttacatagtctagcaggtgatggatgccattcagaaaaagaatcacccaaagtaggaacagccaagattcccacccactccaggccactggagggtgagaacaagtctatgttttctgtgtgctgaacaatcagctgaagtcacttactggcttgcctgcttagttattttaggatcagtgtctcaatctgagcctgctcatctgttagatctcctttaattactcttactcaggactcacagctctctccacagctctcacgagggccaagtttccctactactggaaaagtatctttctacatggaaagacctaaacagagacagaccaagaagctactattactttaagactcattgttcttgcagaaaacccttatctaggaatatcctcaggatctttaaaatggcctcttctgtcagaaaccagccaacccacccaccaaccaaccaatcaaccaccaacaccaccaccaaaacagaaacaaaaccaaaaaaacatgactttaaatctagttaggtgatgtcagctgatcttggtccactttcctctaggtatttctactcttatagggtacagaatctgctttctatagacctagttgccttgctggttaataaagacttttttcttctgtctgtcagatttttctctctcctggttcccccagcccccaaacctgatactaactacttgcaaatctcacagagcaatctaagcctttattttgaaggtggaatagagtagaatttgcttttagaaatttaaactacatcggcaacagaagacagaaaataacaagtagggaaatagcctggtctactgacctagttcatcctcagagagctcggtttttttcaaaccttgtgtatatttgggtgtaaactttccttaagagtctgttctgcagttgctcatttctctgggcccattactgtgcacatctagtgagcttatctaggaaatggagcattcagttaagaatgctggagtgttttctagtaagatcttttttattgtttttcattctcttatatataggagagtctttctgagatttgaaagtgataattcactgttttctattagaccagacaatatagagattgacaggactgctgagatgcctcagtgggtaaaagtacttaattagccctgagagtgacaacctgaattcagtttctgtgcctcatttgtgggaggggagaaacaactctcaagaactgccgtctgacctaagagagctgtgatatggatgttaataaacacacacacacacacacacacacacacacacacacacacacacacagaggagatctgcagggacaaagattaagcagagactaagggaatggacaagcaatcattggcccaaccttagacccatcccaccagcaagacccaattcctgacactattaatgataactgtggtatgcttgcaaacaggcgcctagcatgactgtcctctgagagacacaagataggaacaacttacagatacagagacctaaagccaaacattatatagagcttggggattcttgtggaagagttgaggggaggattgaaggacctggaagggatagggactccccaagaagaccaatagagtcaactaacctggaccctttgaggttcccagagacttaaccatcaacaaaagaacaagcatgggctagatgcgccctgcatatgtatcagatgtatagtttggtcttcatagaggctactcaacaactggagtaggggctatccctaactctgttgcctgtctgtggatcctgtccccctagctaggctgccttgtctggcttcagtgggcaaggatgtgcctagtcctgcagtgacttgatgtgtaccagagtgggatagtacgtgaagtggccttccccctctcaaaggagaagggaagtgggagaggagctgtgttaggagggaattgggaggagtatgtgtgtggctgtgataaggatgtaaattggatgaataaattaatgggaaaatctacaaaaacattaaaattcctcccttcatcaaaaaaaaaaatcttacttgtgagccaggcatagtagtgtacacttgtgatgacagtactcagaagtctgagaggagacaattttcttttaaaaaacatttatttattcttttatatggatgggatgtggtggagtgggagagtgtcagagtacaatctttgggggttgttctatctttttaccaggtgtgttacatgaattgaattcaggctatcaggcttggtagcaagctcctatactcactaattcatcctgccgccttggattgtgagtctcgagatcagctaaggctaccagataggatcgtgactgaagcaaaacaaaacatccctaaaacaaacactaagaccccaaacaacaaaaaataaaaacaaacaatagtaaaaaacaacttgaaatgaacttttgatttctaatatggtaaatattgagcaatagaaactaaatgtaccaatatatgttttggggaataaagctgctaaggttacttgctactctcacagagcatcacggattggttcctagcattcacatggaaagtttcaatcttctgtaactctaattccacaagatatgacatcctcttttggcctctgaggacaccctgaaagaacagtgcacacatacacattaggggagaacaatcatacacatagaataaaataagtctttaaaagaaaattaactcggtgctctctattgcgtgtgtgtgcatgtgtgtctacgtgtgtgcatgtgtatatggagcagagaatgtaaatttattaaggaaaacaagaaagaactcctgagagtggacatagctttaagagagatgtaacttccttttttgagtggccctgacttgcctagaatgaaaaatagatgtcttacaaattcaaggtcaatctggctgcatagtgagtttggggcaagtctgggctctatgatgaatgacctgttatcttaagtccacagaagcaaagaacaaggcagagttgacaagagttggggaatagggagtgactgccaatcagcataactttccctttttagaagctgtttattagcacatgttaattatgatgacattttttatcatattcaccccaattaccctctcttgtcctccagttcctgatgacccttctcttccctaccctcttcctctactttcatgttctgtgtctgtgttgggtaacttataaaagtatgggtgaaggtctatttacaggagcaggggaaacttaccagtgaccccctccagcacctcctctctaacaatcatcgattaggtccatttgtttctgtcactgtgcaggggcgttaaaacatattctggaattaaggcagtgatgatgattgccccacttggtgaagaacagaaaaataaggggctgttcactttaaaatggtaaaatgtatctagatcaagctgctatttaaaagtgtcagtaggtagaatatgccagtaggagagcaggtaaaagtccctgtgttctgacaaaataaaacaaaagatcactaatttaagacaggattttctagaaaggataccctaagcccagaattggaacactttcatcattaggtcaccttcagaaaagtgatacttggggagggagggtctgagatagcttggtctgaaattggtaggcatcctctagccccagctcccaagtgcttaggattacagtatgagcaccacacctggcttatactttacacttgcagtcacgggaagcaagtcaccctgctgttgatgtgtgcgccttcatgtttatgcacactacatatatagtatgttctattgttgtgaagaggcaccatgaccatgacaactcttataaaagaaaagaaagcatttaattggagcttgcctacagtttcataggtttcatccattttcatcatggtgaggagtagggcatcacacaggcagacatggtgctggagatgtagctgagagctctccatccaaatgaggaggcatcaggaagagagagacactgggactggtgttttgaaaccccaaagcccacccacagtgacatacttcctccaacaagaccacacctacttcaaaaaggcatactcagtaatcctgggacacataacacacttccatgtgtatccctagccgttctgaaagttacatagatttacctgcctctccctctctagtgttaggattaaaaatatatttcaccagcctaaattttttcaaaattcaaaaaccaatgatcagtgggtcaaagcacttgccactgttgtacatatacccacatagacatgtacggggacaatagtagtgataattatatttaaggcatacatgcttgtatattgtaactataaatgttttatcattttgtattagacaattatatatgtgtgtatatacatacatgcttacatacatacatacttacatacatatataccaaacaatccaaagggaaatacaaatgttgccccaaacccttctcagataaaccactcaaaacaattttaatctttagttactacttttcatttggcaagataactatgtctttatcctagaggttcttgtttttatcgttttggctgtttttatattgctttttattttatgtacattggtatattttctgcacatatgtttatgtgagcttgtcagatcctctggaactagagcacattagttgtgatctgccacatggttactggaaattgaaccctaatcctctgaaaaagcagccagttctcttaaccactgagccatctctctagccctgattttgttgttggtttggtttggttggtttttttgtttgtttgtttgtttggttggtttggtttggtttggtttgtctttgctaatggtagccgagatgtcttcaaactcttgatcttcctaccttaggctacatgtactggggtcgaggtgcacatgcctactcttcaggtgtttttttcatatccatttcagtgatgacatacacgtgcaggttcatcacagtataaagaactgtcttctttaagttcctgagtagcttgctgtcgggtcctttattggcaaatgtttgttgatgaattcctccaacagtgtctttttttgttccaggacaccagggctcttcagtttaattgacagtttgtggcccccagtgatatctctgactgagccttcctgtggccagcccagtggagaggtaagcccagccttggaaaaaatttttgtgcacagacacccgcccttctcaggaactgacttatgcactcccactgcagtcacacagcccatgtcatttcttgggcaacaagagctctgcatctagttcctttgtctggaatgatctatgaatgccatctagaaccgtgactgcagctcctttccagagccgacattctcatggttctttttcctgtctctctggtaaattcttgataaatttttgtttgtatttcagtttttgtgagaaatacatatttttgtatcttggcctcactctgaagcctacactgaccttaaactcaaaacagtccatatgcctcggcttctcaagtgctgtgactgcagctgtgtaccaccaaactcagtcatgatactggcattcaaactcttagcctcattctgaagcagacaccacagctttcccatttctttgcacttagttaccagttagaaagaacataaactagatccacagacagcagaaaactccctttcctcactacattgtgaagaaatgtgtgcacatgcatctaacaggcatatgtggaggaggccaaggcttgatgtcagaatatctttcttcaattgcttctccacgtcaggtgtttgatagaggatctctctcaaacctggaacccaccattttgattagattgcttggacagtgagcctttggggtccttctgtctccatacctcttatttgtgggttctggagaactgaactttgtagcaggaacttgccctaagagccatctccccagcttttnnnnnnnnnnnnnnnnnnnnnnnnnnnnnnnnnnnnnnnnnnnnnnnnnnnnnnnnnnnnnnntcgttttgttttgacactgggccttaggatgtatcttaggatgcccttaaagtcctgatgccccttcttctccctcccaagagttgaaattataggtttatgctactatgtctggtgtaaaggcgaaatctaaaacaaaatctttttttattttgttttattttattagatattttctttatttatatttcaaatgttatccccttttcctagtttccctccaaaagtgcactccctttatcccctaccctctccccctgctcacaaacccacccactcccacttcctggacctggcattcccctacactggggcatagagccttcacaggaccaagagcttctcctcccattgatgactgactaggccatcctcttctgcatatgtagctggagccatgagtcccaccatgtgtactctttggttggtagtttagtccccgggagctctgtgggtactggttcattcatattgttgttcctcctatggagctgtaaacgcctttatctccttgggtcttttctctagctccttcattggggaccctgtgcttcatccaatggatggctgtgagcatccacttctgtatttgttaggcactggcagagcccctcaggggacagcaatatcaggcttgtgccagcaaacacttgttggcatccacaatagtgtctgggattgtatatgagatggatccccaggtgggtcagtctctggctgttcattccttcagtctctgctccactttttgtctctgtaattccctccatgggtattttgttccccgttttagaaaggattgaagtatccacactttggtcttccttcttcttgagttttatgtagtttgtgaactgtatcttggggattccgagtttctgggctaatatccacttatcagtgagtgcatatcatgtgtgttcttttgtgattgggttacctcactcaggatgatatcctctagatctattcatttccctaagaattttataaattcattgttctaaaatgaaatcttaaatctacccaaattattcttatgcttagtctcccagatgcccgaactaacccatttcttatctagctttcccttgggaatatacatccaaaagcaaactgtgtgtgtgtgtgtgtgtgtgtgtgtgtgtgtgtgtgtgtgtgtgtgtgtgtccatgcatgtgtgttcactccagtctcaggaattaaagatagggtctccttcctactgggtaagtgtgttgccactgagttatataggtctcactaaatggagcaggctggccatgaaatctttgtgtagcccaggtaagccttgaacttgtgatccttgggtttttccctcccaagctgagatcacaggcctgcaccatcagccaagcataatcatgtgtatactgaagaacttatgttaatagtacttttcagtctttcaaaagacattcttactctgcagtttcctttctgttaaacagacaaagacttatctgcctcctcctatcttctgttatatcttctctgcacatccaacactgggacaaattgatgcaattgaagaccacatttccaagctttaccagcctccagttgtccgctgcttaaaagaaatcctccaggtaatggctgtgtttctaccaagttctttaaatacttttattgcttctatgtgctttgtgtgatatgttcagtcttctatgtctttccagactaatgagtgcagtacacgttgcagcttctatgccagagtgatttatcaaaaaccacaggtaatatcactgctctttgtcagtctgtctgtctcccctacccctctctctatcctatggaaaatctattggaaattaggatgacataataaaaaaaagtgcctctaaaatctagattaacccataatttaccctcctagtttggagtgatccttttctgtgtaaactatatggagcttgtcttagtcagggtttctattcctgcacaaacatcgtgaccaagaagcaagttggtgaggaaagggtttattcagcttacacttccatactgctgttgatcaccaaaggaagccaggactggaactcaagcaggtcagaaagcaggagctgatgcagaagccgtggagggatgttctttgctggcttgcttcccctggcttgctcagcctgctctcttatagaaacaagactaccagcccagagatggtcccacccacaaggggcccttcccccttgatcactaattgagaaaatgccttacagttgtatctcatggaggcatttcctcaactgaagctcctttctctgtgataactccagctatgtcaagttgacacaaaactagccagtacagagctcttttgggttttattgttgctgttgtatttaattttggtttcttttagagttgttttcattgcggagctattggagatgtttgttgttcgtttgtttgttttgtatttctctaatccatggtcaaaaagctataaaagtacccaaaaaatgcttcttaatttctaattgagttaatagaggattgcacatatataaataaaattcaaattgtctcatcatataaacatggtatattagcttcttcctaactataataaaggacaaacagggtttttttgtttgttcctttgtttttgttttgttttttaaggcagggtttgcctgtgtgacctggaactcaccatgtagactaggctggccttgaattctgagtgatcacaagtgcctctgcctcccaagtgctgggactgaaggcatgcatcactaacatccagttcctttaaagggccagatagttaatatgcaatggttcatggataatgcaatttctgtaaaaattagttgattttaatgtgcaaagaaagcagacatattaacattcataaatgagtaaacagatttaaaaagaaaagaaaagaaaagcacttcctctaaatctaaagcaaaaggaaggctgtctccgtgttttacataagtctacagaacacctggtgtatgatgacaccctgagctactgagacttcctgtcactccacattctaggcacaggactctgcaggccagtggtggtacaaatgccttttgcccttcaaggagaatctatagctcagaggctaagagtgagaaggacagggtcaaatgtcaatagcagatggagggaaacagagtggtagaagacatgttgagtcctccacctgatgacctcgtggggctgagtaggcatgctgacagccttatatgtaataagcagattccaaatatgcaagggcaatcggcttggctttcagtggggtgggggtggggtgtctgatgatcctatgttgaggaacaagttgggaacctagaactatcatccatgttcaaatactttttctaagttacatggagctataagaatgccttaacagattttatgtttttgagtagtttggggtatatataaaatcaaggataaggtaaaaaatgtcccacaaatgcctgcttcatagatatatagtcccctgttattgtcgtctcccactgctgacatggttgcctagagttcttagttaatgacacttaatctccattataacttgagacagaatcattactctccaagtcctctgtgctctgcctgttcatcccttcctcctgcagaccctttagcagaccgtgaaacccagagtgacagcatcttctaatcatagagtacacaccactctgggatttttttctttccataccaaacatttaggtacccatgtctcatcagtgacttgaaagctcatttcctgtaacactcagtaataagtatcctgttatctagatatatcaaagttaacttatctgtttacctactatgatggtcagtattgatctccaacctgacagaatcaaaaatcacctaggagacaaacctttgaacatgtttgagggagtttctagactaggtcaaaggaagtggaaaaaggttaaattggagtagtgccttccttgggctggatctctccagagtcagcctacaaagcagatgaaggtcactaaagctgtgctccaagtgggtagcagcacaactcaacagcgttgtccatgcagttcttggtttgtaggaaccctcacaggctcaggccatctgtaaagcaaatgcatgtggttccgtttctcccggaagtcttcagaagttttaacactgcacagaagtgtaagtgaggcacctcttctgatactcaggcagccccttaactgtgagtccctataacatacaaagtaagaccacacttccgactacactgaaacatttcagaaatggggagtggcatgcataacaagggacaatcagaccaaagcaagactgaaacccagcagggaaaaaaaacaaatcctgaaactctgtcactggcatctggagcttctgatggaatcttctgaaatccaaaaggctcgagtgggggctggagagatggctcagtggttaagagcactgactgctcttccaaaggtcctgagttcaaatcccagcaaccacatggtggctcacaaccacccgtaatgagatctgacgccctcttctggtgcatctgaagacagccacagtgtacttagaataataaataaatctttaaagaaaaaaaaaaaaaaaggctcgagtggtcctgcccctccagctctgcacctgcagcacagcaaacctcgcacatggcccagctccatctccagcacactagcactgtcatcgtttccgtgaataaacactgaataaacattagtgtgttgagcaccagcatctctttctgtgcttcctgactgctaacgcagtaagaccagctgccacagcgcccccacccgccctgccatgactgaccgtgctctagaactccaggtgctgaagcatcctgtatcctcaggtatcctgtcatagtaatgagaaaagatctgccaaagatcttgtttgctcccagttttagcaagtgtgaataggaaaagatttattttaaacaaagcttagatattggatattactagggttttttttcttattaaaaaatactcttttgtaggagggtttgtatgtgtgtgagagagacagacagacagacagacagacaggcaannnnnnnnnnnnnnnnnnnnnnnnnnnnnnnnnnnnnnnnnnnnnnnnnnnnnnnnnnnnnnnnnnnnnnnnnnnnnnnnnnnnnnnnnnnnnntagccctggctgtcctggaactcactctctgtaaaccaggctggcctggttattgattgagttatatcaatattcctgcttctcaggtactgtgattaaaggtgtgcaccaccacctcctggatataaaagatactcttaacaccaactttgtatatgccttagtactggaaatcatttaatagttaattaagagaaaaagaaggatccacaaagatagcttagcacgcagacctaataacctgagctcaattcctgggcccacatgaaggtggaagaagagaaactccataaggtattacctgacatcggcgagctatctctctctctctctcacacacacacacacaccagaacagtagtagcaataaaatttaaaattaattgaagaaaagaaactagaagatgtcggtccctcagtcatttgaaaaggagaccatagccaactcttgggtattgaaaaagaacattttcactctttaccctctgagatagttgtcagtttttcaaatggcagtcttacagtcattttggaaataaccttcctatctccagtgttcaacagcacatggcctcaccatgttgtttaccatagcacccttacttgtcctttcaaagctcctgggccagcatgcgaccatatggcatgtttacaaccgtatggcatgtttcgttgtcattcacttttcacctggagtacttcctattgcttctgctttgtgactttgggttttttaagagcatggaccgattacttagtataacgtctatattatctaaccagtgcaaattacacatatttgacagaaatgccgtgtggttatgctatgctttcattaaaagatgcacagctgattccttccagggctgtggtggcttcgcagttagtcagatgctttccaagtttgttttcatttgaagttgactaacaattatttcatacttattaactcttaatcatattttgaagagatactttgagactatataaatatccttttgtcgccgggcgtggtggcacacgcctttaatcccagcactcgggaggcagaggcaggtggatttctgagtttgaggccagcctggtctacaaagtgagttccaggacagccaaggctatacagagaaaccctgtcttgaaaaaacaaaaacaaaaatccttttgtcaaactttcacccactcattttaacattcattatgattcttgctgaattaattatactttgattgtagccaaatggtgatttttaacttagcatttcttctgcatttattaggtgtcattttgctacaattatcttttcacttgtccctttagttaggtcacttaattactgacttactatgacaaaatagattagtgaattatttttatttattatgtatttatgtaaatgtttttactggtttagtaaaccaataggtttattgaggttgggattagttatagaagtctatgaaactctcctgcagtccttgcttactgcatacataacactggggaggggctttctgaatcttcatgtttcgtgaacttcctaagtcttatgaacctccttccactctagcaaggagtcccaattctgatgaaaggctctacaattctctgtgccttcctatggctcatacagtccttctgccttctcttcagtgatagtctttttcccttagaaggagaaatatagatatctgggtagggatttttattttttgattttgttttttttttcatttcttgctgaacgttaagtcattgtaccataacagtagtctctgttttcaacagcttgacaagttatgagatacagtaactattgcccattggaaggagggagaaagagaatgagggagaaaaagagggaggaacagagggagggagagagaggggtgggggagggtttctcccttctctctcaaggctgacagtagtggtactgtgtgagttttggtgtgtgagttaggagcctctgctctcctggctcatctctgatgaacacgttggcctggtgaacctacactcctgctcagagggctcaggaattaaaagtgagccaacacagacattttaggatcctgcgtggctctgttacagctgcactacctcgaagttgctgcactgtgacctcctttttcattcagcgggtttatataatctgttactattgctcatttggtgttcttgtttttccagatttaatctatctctctagtcctttgaacatatttatatctgtggtaatttaaatgaatttcttccaaatgctcctatatgtgaatatttggtctccagttgctagtcctgtttgggagcttgtggaacgtttaggaaaggatagtttttctggggctgtgagatccctctctcctgctttttctccctttttgctttttgcagctgacatgtgatctctttgcttcctggttgataaccagccacacgctcctgttgtcatgccttccccatcattacacatggtgtcccctttggaactactactaactaaaataaaccttctcttccaagttgctgttgtttggggatttataacagcaaaagaaaagtacctgagcatcattctttgagttcttccctttttttttttttttttgatattttctttgtttatcttttaaatgttatcccctttcctggtttcctgttcccagaaaccccctatcccatcctccctccacctgcttctatgaggatgttcctccgcccgcccacccactccaatctccctgccctcagttcccctactctggggcatctatggagccttcataggaccaaggacttctcctcccattgatacatgacaaggccatcctctgctacatatgcagctggagccatgtgtactcctttgttggtggcttagtccctgggagctctggggggtctggttggttcatattgttgttcttcctatggggctgcaaatcccttcagctccttcagtcctttctctaactcctccattggggaccccacactcagtccagtggttggctgtgagcatctacctctgtatttgtcaggctctagcagagcctctcaggagacagctatatcaggcagcatgcacttcttggcatccacaatagcatctgaatttgctaactgtttatgggatgaatccccaggtcagacagtctctggatggcctttccttcagactctgctctatactttatctccatatttgctcctgtgagtattttgttctccttctaagaagaacagaagcacccacactttggtcttccttcttattgagcgtcatgtggtctgtgaattgtatcttgggtattccaaacttttgagctaatatccgcttattagtgagtgcatcctttctggcacagtaagaagttcccagctgacctttcattgtttgttatcattgtttttgcctttcagtgtgtgtccatgagcacatgtgtgtgtatatgcatgtgtgtgtgcgtgtgtgtgtgtgtgtgtgtgtgtgtgtgtgtgtgtctttgtgtgtgcacatgcccctgtggaagccagagggctactgatgggattcagatctcctccttcctcatggttcctgggggataaactcagattgtcaggcttggtagcaggctcctttatccactgaaactgtctttccagcctgcttttagggctttcaactttagaatcagccctctcttcaagtagcgctggtgaattataaagggaaagtgatatttagaagcccatatctggttcttggtagtcttgcttctattagaacttagttgctcttagccctctctgtgactagagaagggaggcagatgtgcatgtgtcacattgtgtgatggctaaagtcacgtcacacaccagtacttcctactgtagaccattaccacagaatttgctccagacttcccttgggtaatttcctctccaactgaatgtagtggcttgaagatgaaagcaggaagatcaggagttcaagatgatccttggttccataaagaatttgaggccaactctgtttatgttttcctcagtaatatttactttatgtagtctactctctaatgatataagaccaccccttcaccttaacccacatctcctaagcataccatctactccagacacaccaactgaactctcaaccagcttaggtcctgggcctacacattgcacttgacttgcattcgtatctacttatgtggtaagttctgatccactggtggagacagaatgccagcttactacaacttctaaaagtatcacaactcctgcaaatgaccccccccccaaaaaaaaaaaaaaaaaaaaaccaagccgggcgtggtggcgcacgcctttaatcccagcactcggaaggcagaggcaggagcatttctgagttcgaggccagcctggtctacaaaagtgagttccaggacagccagggctatacagagaaaccctgtctcgaaagaaaaaaaaacaaaacaacaacaacaaacttaataaaaatgaaacctactacacatgcaccataattgctgaacttgttttatatcaaagttgtctgcaagagcacacaaggtttgttcctgaccctcgggaaacaggtagggatccagagagcaggtatgcacagagcagaagacagcactgtgcctatagatagaggcctgggagggaaggaaacccgccctctcctctgtccctttagaggacctgtagcaggcacaaagtggatggaactctatcagtgggtactaagctaataaccttgatatgtgaactttattatatattttaaggtatttttagatgatatattaaattatgagtataaataaccactgagattgcttttacaaggagttggctatacagagttaataatttttgtttgtttgtctatgtgtcttttactttgaattgtagctaaagaatcttttggcgcaaaaggaaatctggctgctggtgactgacatcactctgcaaacacaggatgaaagggaccactctcttcccaaaaccctgcctgtctatatagccccctcgtgtgtgctgggcccagaggttgtagaagaacttgccttgctggtgtcttataacttactcttcagggacgcttttaaggacaacggtatgccagtgtgtcctgattgcttgggtggtgtgactgcttagtgcctaccctgagactctatcctctttcacaaagcccagcgcaggtctagccctgggatggagaagccatcttaccagccatgggctctcatcgctccttgccaaggccacctgataggagccagcatcctaagttgtagtaaacatggagacactgttgtccactccaggactcttaccagcacctgtgctttcctggagatgacctacagccaccgcctacatgtcccattttataaaacaaaagccagagaatatggtatatgtttaccctgtaacaaagacctataacccaaaacatgggatgctgaggtgggaatatcataagttaaaaaatagcctacatcgccgggcgtggtggcgcatgcctttaatcctaggacttgggaggcagaggcaagcgaatttctgagtttgaggccagcctggtctacagactgagttccaggacagccagggctacacagagaaaccctgtctcgaaaaaccaaaaaaccaaaaaacaaacaagcaaacaaaaaaatagcctacgtcacactgagatgctgtttcaaaataaattagtgaaataataataataataataataataataataataataataataataatacctaggctttagatcaatctatatcttttcttgggatcaaatacttaaacttctttttttcattttatgtaggtattaccttgaataccataaactttacttttttcaattttatctgaatattgtacccttgttctttttcaacttagttcactggggtctttaagatgtatttccttggagacacttacatactagacatgtctgacattagcaacagactagcccctatctatgcctttcttcctacaaagcttgcagtggcttatgaaggaggctggctggaaaatgcatgcttttcttaattgtttaaataatctgaaatgtctccgtggcaggtcagattgtttgtattgaacggacagtcatcctaccccagaaacctctcttgtgtgtaccttctgcttcctgtgacttgcccagcccagtgacactggatgaactgagtgccctcacacctgtcaactccatttgcagtgtgcaaggtaggtggccctctgattggaagcagaatttctaatgtcttacataccatgttattttaaatatactgctaagtttcattgtcggtgttctagatgttggatttagagagacagaataagaagatggccttttattctggacttggagtctatataaggaacatttaaatcaggtacatgcacactcaaacaggtctccagtgaggcagagtgaaatcgaggaaggctccataaaggctggatccttaggcatctgcagtggctcagcaaatgaaggtgtttgcccccaacaatgacctgagttcagtgtccatcatgggcacagtgtaaaaagagggccagttctcacaagctgttctctgtcctgtgcatgtgcgcaagtgcatgcttgtgtgtgtacacgcactatcacgcatgtgtgtgttttcacacacccacataccaaaaataaataaataattatttttaaacacctgaatggcacatcaatgattagggccaagaacaggacctataaagttagccgacaggagagagctggcaagccaatggagaagggtgggtaggcttggatagaaaaagctggagagatagccaactgtcaagagtatagcctgttgtgcacagaagtaggcagcttcggtattgacagagtcacagagataaccatgtatacacagagagagcaccctgtggtgataacatggggagtggttgaagaaactagctttgaagacttaggggtacagtctatattctaccctgaaggtagagagggggccaagagaaaataatgcagtgacagagaactaaatacagggcaagtggagaaccgggtttccctaggaagaacactggtgggttgggtaatgtgtcaggtcaagaggagcatgcatagaaaacaggtgcagccacatgcaagcttccacctcaggccaggaggcacccatggcttgtctgccctaatgaaacttagaatatgaggcgactctgagggcacgcctgtgtcttgcttgaaacgggctatctgcctgttgtgcttcccattgttatttagcatatattaattatacattatagtggatttcattatgacagtgtcatacatatacataaagcattttaatcctattcaccacttactgccttctcttcctccttcatgcccactgattcccttgtttggatgctgttttgtttagaggtagttagttatagttggggtttttttttttttttggtttttttttgttttgttttgttttgttttttaaaatattttttattacatattttcctcaattacatttccaatgctatcccaaaagtcccccataccctcccccccacttccctacccacccattcccatttttttggccctggcgttcccctgtactggggcatataaagtttgtgtgtccaatgggcctctcttttcagtgatggccgactaggccatcttttgatacatatgcagctagagtccagagctttaatatttattttatttttaattatgtgtacttgtatgtgactatggggtctgtgcacgagttgctctcaggagccagagtgttggccccccctgcagctggacctaaagacagttgtgagctgcccagcatgggtgctggaaactgcactcaggacctccccaaggacagtacacactctgaaccattgaaccatctctccagatcactcaattatatttttaataagcttataaagtgctgattttggtgcttttgaagcatgaaacagatgtttcagcagccgcttgtatatattaatccagagatgaaaatcgtatcagtacttctttaactctatgaaaattatttcataataaaagtaataatgtacattggagcagttctactgtatacttgtgctgctgtgcccctgccaccaccacatacagccgtggagggaatgaagtgttgtaggcagggcatctgtctggggagctagaggttcatacaggtgcaggcaggccttcatgggcaagctgctcctctgccagcatatcataggatgtcccagtcctttcttagctatcatttccagtttctgtaaagaagggtttaagggaccaggtctgtgttttgtagccttgagtcttctgacagtcaggagatggaacccagggtcttgctaatacttaccgtgtactggaccatgagctacatctccagccctcatgagcttcattaaaacctttacatgctttatggtttacttattcaaagtgttttaatatgctcacaaaactgtacaagcatcactataaccttggagcaaaaccaacaaaccgaaccgaacaggcttcctcccacacctttaacaagtcatctgtctgctttctgtttctatgaatttgcctgctctggactatttgccattgttggtttgagacaggatctcttgtagcccttgaagccctgaccctctggcctctgcactgggtgtgggtggcagttgcaggcatgcacctccatgctcactttgttttgttgttgtctgtcagacattctcttcagtgtgtctgtgtgagtgcctacacattctgtgtgtcccgcatgcacgcctgggcctgtgacggtgagaagagggtgatgagagtcctggaactggaattgtagcagttgtgagccacctgatactgttgctgagaaccaagcctaggtcttctgcaagatgagcaagtactcataaccagactcatctccccagccattagtcgctgcttttttgaatgaagtttcccactgtgacctaagctatcctgtacctcactgtgtaatccatgctagccttgaacttgaaatcctactggctcagccttctgattccaaaccagcatactcagctgtaaacttacttttattcttatcctcatgtgcatgtgtgtgtgcatttgtacatcatcattgtgatgtgtgcatgcgcatgtagggtgtacacatgtggagatcaattttgtgaagtcaagctctctcctttcgcccttgtgagtgtcgctgtaatggtactcaggtcatcagacttgcaaggcacttaactacattgaggcatctccctggcctgacttgtttttcagatgattaagtgtgttttatgagccaggatatggtcttttgatgtgatttttttctctctgaacataagaatgtattttcctgctcttgcatgaaaacatcagataatgtcagttcagtcctgttgatcagcagagctgtcagtgcagcaccactacctttcttctgctgtatttgtcacagtcaacaggcaggactgttggtttggagatcatactggtgaatttattcttcatacaagttccatctctttttacatgtattttcttaaattttgttttgtttttggtcttactgacctagaactctctaagtagacaattctagccttgagagctgcctgtgtctgcccctaggtgctgggattagagcacaccccttcctaggtgctggggttagagcacaccccttcctgcatgctgggattagagcacaccccttcctgcatgctgggattagagcacaccccttcctgcatgctgggattagagcacaccccttcctgcatgctgggattagagcacaccccttcctgcatgctgggattagagcacaccccttcctgcatgctgggattagagcacaccccttcctaggtgctgggattagagcacaccccttcctaggtgctgggattagagcacaccccttcccgggtgctgggattagagcacaccccttcctgggttctgggattagagcacaccccttcctgggtgctgggattagagcacaccccttcccgggtgctgggattagagcacaccccttcctgggttctgggattagagcacaccccttcctgggtgctgggattagagcacaccccttcccgggtgctgggattagagcacaccccttcctaggtgctgagattagagcacaccccttcctgggtgctgggattagagcacactcctggcttgacatgtattttgatacattgttgagtgcatacacattaatgaaatgaccttattgtttttacttaataattatttctagtcccaataattttcagtactctgaggtttgccctgtctgaaattaaaattatggcagcatcccctcacaatttagcattgtggctgctttgtttttaatttgtatagtaagatcagtcatattaagaattactgctataattgattgatacacattttttaagtgtattgctcttggatccttttatttattttttccactcgtttttatgtgtgctttgttttattttgttttgtttttatttgcattgagcgttcagtgtattctgatttccttcagtatttcaatttaagacttaaaatcttacatgaacatggtactgtatgtcaaattaagcacagagtgaaattcatcataaaaattaaagtaaaatattttagaagtgaactagtggttgccctggagtttctggtatatacttaacaaaactcacgtcagctctcaggtggcactgtggtcctgtttcctgtgagaatattactagccaagcatggtggttcatgcttagagtctgcatttgagaggcagacattaaaattgccctaatagagagcaacctggtccacattagctagttgcaagcttgtgagcacacccagttacatcactactatttgcttgtgagcacactcagttatatcactactatttgcttgtgagcacacccagttacttcactactgtttctttaacctgctcttaaggtgtaagtattgaatacatgattgttattgtcatttctttaaaaaactattaaatcaacagtagcttatttggcagtttagactttcactgatgatatttttcctacagacctacatttctgacatgttccttccatctcaacattctctactggcattcacaagtgggtttcctctgtttcctgttctattattacccaccttactcacttgagacagggtgtttactgaacctgaagccaagaagcccaagtggccctcctgtctctgtcgctgtaggtcacatgcatccatgcctgcctttttttaatgagtgctagagatttgctattactttctcctgtttgcacaatgaacacttttaccctccgagccatctctccagccctctaactacatgtactaatttatttgtttgtttgtttgtttgtttggttggttggttggttggttgttttttgagacaaggtttgtatagccctgactattctgcaactcattctgtagactaggatggctttgaactcaagaactcaaagatctgcctgtttctgcctcccaagtgctgggattaaatcagtgtgctaccatacccagctatatattcctaatgacaataacgaagtaaaccagaaaaaaatgatatttaataaaaggaattaaccaacagtatatctacttatctcttcctatgaaagaaatagcacaaagacaggcagtttcagaggccacgatactggtcagtgatgaatttggcctttcttcctactgggcttaggtactgtggttgatgtagatgagagcactgctttctcgtggcctgtgtgtgaccggtgtggcaatgggagactggaacagaagccagaagatgggtaaggatgcctgaaacccctggggccctaaggacacggcagtaacccagcgccaggtcctacaatcttgtaccctatatgtgggctccccaaacccggaagggaacccactctgctgagctgcagcatagaggctgtgatgctgctttgtgggttctcctaatggccgtaaaatgtagaattgtgatttgtccttagtgccttcattattagaagaaaaaaactgaataggtaagacaagctgcatggcatatcctaggactttcccaggggacagagcagtggcatggcatgttctaggagtcctgcagactttcccagcggacagtgagcagctttcagtagacacccctttctgtccacttatgttaccctcctgggctaagatcaaggctaaatagttgtcttcattatagcttctttgcttctgtaatgagacacagtgaccaaaaccaagttggggagaaaagggtttatttggcttatacataacactccatcattggaggaagtcaggacaggaactcaagcaggacaagaatgtggaggcaagaactgatgcagtgaccatggaggggtgctgcttactggcttaccctccatggtttgctcagcttgcctttttatagaacccagagcagggatggtaccattatcaatggacttggccctttctcatcaatcactaatgaagaaaatgccttactgcctacagctggatcttaggaggcattctccttgattgaggctctaacctttcagatgactctggtttttatcaagttgtcctaaaattctccagcagagtgttggtgccatttgtttcactggagtgactctctgcctcccagtggacgttgtcatatgacagaccaaaatgtgtcatcattacttgtttgtttcttagaatcaaagaacaaggactggagagatggctcagcagttacaagaactggctactcttccagagaacccacttggcagctcacaagttgtctatgactttacttccaagggatccaatgcccttttctggtttcttcaagtaccaggagtgtacatgatggacagaattcatacagacaaaatatccatatacgtaaatataagttttttaaaagaagcaaaaagtcaatatcttcctgatgcctagggttattgtccttgtgagtacacaagtgatttctggactatgtcaaagaagcaagggaacatgggtgtatgtgaaagcagtgtgggagtgaggacaccagggctgatgagcaagcctgacctgccagcagggtgggaaattcactcccctgacctccttgaagatttggccttcacttcctgggaggctaccttcccccatattcctcatgaataatgcctctgtgtacccaaggcccgccctcagcagcctccaactgctaagccatcagaagaatcccagttcctggctgcttttgactgattccaacaatctaattctgacagcaaaatttctctcactgaatgtttagagaacactctttgctgtagaactcttctgatacctatctccctggttgcttatatccctatgtgccttctcacaacagaggcaccttctcctgtggggactgttcccaactggtcctgtcacctcttcaagagaggcacctgcatgtctttctggactgtcccacgagacctgagagtactgtgaaggtcaaggtaggaaaaggagcctggagctcatgtttgtggtcaggaaagatgaggctgcagtggggctactggtgtgcttgttcttttgttcacctgtggcaaagtgtgtgagccagttagatgtggaaagagctccttggttcttgggagaagcagggggtcgcctaccccagtttgtctatacagtgtcctgcttaacttaagcctccaagacttgttctctacagaggaggccgacagcttagattcagtgttcgtcttcagataggaataccttaggtgagtacttgtcatttagtggaatatcactgagcccttctttcctgttgctgcagctattggagagcagtatttctttacttctgatgtctgctgcctctgaggatggggtgagtacagggcccagcctgagtgtgccctttgttcttgaatctgtgtgaggttgtccctgaaggaagaccccattgctgtatctgttcattaaaacagatcctatcataacaccacaagtcacttatgtgttaaaacatatccactttgacactgccactcacccatgtacaacagcagggccagagacgttcctctctggaaattaaagatgctgaaaatcttccttcttggcttctgatatagtcatacagcccggtggccagagtcctttctcatgcttcccagtcacaaaacaaaattgctaaagacatactttttattacatttatttatttgtttatttgtatatttattaatgagtgtgtgtgtgtgtgtgtgtgtgtgtgtgtgtgtgtgtgtgtgtgtatcagtatgtacatgccataatacacaagtagatgtttgagaacaacttgtaggaatcaggtctctcttgccctgtgggtcccagaggttgattggactcaggtcatcaggcctgatgaccagcaagcacctgtacacgccaagccatcttactggccctgtggcacactttttagtttttactgagggtctggactctgaatgcctgaattattattgttatttctcagagctttggtcttacataccttgaaaattactatagcaaaacttagtaaactgtggcatgtgtctccaagaaaagaattctgaaagttgatccttagagcagtacttctgtcctttgaaatggcacttacctggtaaaagtcacttaaggacactgcagggggctgggtgtgtagctcagtggatggagcacctgactaacatgcaccaggcctcagaccaaaagttcaagatcactcttaactacatagctggtttgaagctagcagcccttggctacatgagacgctgtctgtaaataaatgcactgtaggtagctcatggaatcaataaccccaaactaatgctaaggctgtcagagatgaagctggaaactgcataaataagctgtaagggttattggtctgagctgtggttctcagccctgacttcacacggtgccacagtttctgtccccctggtacaaagcacaccagctttaaagctctttggtggccttgacctctgacctggcactttcacctgagctgtggctgacactatcactgtttctgaatagaagagtcatgctttgacaccaagttagaagacacagaagttggtactttcttattatgtaaaagcctttagttaccatggcctaagaaccaagcccattgcattgctgacacatggtcctcactgtcgccatctccatgagggactcaacacaaaggcatctcaccaaggtagctttatctctgccgaaaggaacagttggtagttggaatcagggaattaaagaactcacagtatttaaaggcaggcagggagcagtgtctgttggctgacataagctaagagaacgggtgacgttggaccagacactggtgagccagagcttttcagtgtgacatatgtgctcaggtggatgctttaaaaaggtggatgggggtaggggggtggggagggggctggagatgggtaagagcaccgaatgctctttcaaaggctctgagttcaattcccagcaaccacatggtggctcacaaccatctgtaatgggatctgatgccctcttctgttgtgtttgaagagagcaatggtgtacttatttatatacataaaataaataaatctttaaaaaagaaaaaaaaaaaaggtgggtcgggttttctacgaacacatactctgtggagacagttgggggaaagcatggggagtcctgcttggatgaataacaaaatgaacccaacctccctacataagcaaacttaagactcacagccatcaacagccacactctgatccatgtgcatagaggctggtatctgccttctgactcagtggccaccacagcactgatggggcctctgtagataatgtctctatggggacctggacaccaggaacactggcagaaatcctccctcctttcattcctgttggctgaggtatcttgtttctgcaacacacttaacttcttcaaccagaatgctctggttactgaaaacctgttgatcgagctttaaaaaggcatgtgagcatgtattcctatgtgtagaagtacaggtgtgcatgtacccgtatatgagcctccttggacactggctgtactgtgtgtgtgtgtgtgtgtgtgtgtgtgtatgtatgcatgtgtgtgtctttgtgcaggagtgcatgcacttctatatgaggaatctacttggacactggctgtacatacatatacatttaccttacatacatgtgcacagatattaagtaaaatgacaaagggaggtcatagctgttggtgtcacctttgtaggtgctctagtttcctagtccacactagtgggacaaaggagccatccaagcttggagcacagtttagcaagctctttacactgcccttacctctgttaacagtaactacaagcaggactttccctctgacctggggtggagcctaacagaagatagcagtcaaaggcctatgtgcagacacagcagcaagtcacacactctggatctgtgggtcttctgggtgagaattcacatccacaaaatccagagaatcaaattaggggtctccataaaaaccatactccattcctggagcaaatatgctgtttctggttgagataacttggtattaaaatgtatgtgtttactttggccacactgtgaatgtaaaagcaatgggattaactgttgttcttgctgtttcttactggttacattacagtgatgtagggttgaaatctgttccttcaactttcagaaaaggcacacatatattgtatcaaaaaaaaaaaaaaagaaaagaaaagaaaaaagaaaaaaaggccaggcatggtggcacacgcctttaatcccagcacttgggaggcagaagcaggctgatttctgattttgaggccagcctggtctacagagtgagtttccaggacagccagggctatacagagaaacnnnnnnnnnnnnnnnnnnnnnnnnnnnnnnnnnnnnnnnnnnnnnnnnnnnnnnnnnnnnnnnnnnnnnnnnnnnnnnnnnnnnnnnnnnnnnnnnnnnnnnnnnnnnnnnnnnnnnnnnnnnnnnnnnnnnnnnnnnnnnnnnnnnnnnnnnnnnnnnnnnnnnnnnnnnnnnnnnnnnnnnnnngtgcatggattgctggtattgatgttttaaattcaccatgttgatttttttatttgtttgtttttgttttttggggttttttttgtttttggttttttgagacagggtttctctgtgtagccctggctgtcctggaactcactctgtagaccaggctggcctcgaactcagaaatccgcctgcctctgccgcctgagtgctgggattaaaggcgtgcgccaccatgcctggccacatgttgatttatgagtataaaacatccatatgatttatgagtataaaacatgggtttaaggtccactcctaggtgatagagctaaacctaacattttacaatgaaaggatttttcacagatgtttatgaaatcccaattacatacttttaagctgggtgtggtatctcacacctataaccccagcacctgaggggtaaggcaggagaatcaggaactcaaggttgtcctcagctatatagcaagctttaggttagcctgagctacatcccatgggagcttgactcaaaagaaacgaaaaaaatccatcctctttccagagaagaccatggggatgctgggatcatcgctttcgtgcttacacagcattggttaaggaaaatagtaagaggcactgaagttcttagctgtccctcctctgtcgttctcctgccaattctcctaatgatgacctggtcctagcactctctccagatctcactgtcaagcaaactgtgagcttgccattcacacagtgaacctgcagagaagcacctgcgaagtatccagtcttcctctctggaccagcagttctcatttttccatgaggctattgaaccacagtgtagaccttgtttatttgcaaagtattaagtaagctacgttggaaaatcgagtcagtatatgtcatgctcacatcccaactgatcctgacgatgactctgcaaaacaaagcacccagcacactccacacaggcattctctatacagtccactctgggcttcattggcatggttcatctctgccccactgggcatcaactggtaccctcaagacaaggctgtagccacagaagcctgcccagccagggctgttggcccaacttcctcacaggccctgactgggctggccaactttcctaactgagcttaagacatctctatgtcccttccactgcactatgtcccagacctaaatttgagaacatagtcggtacgtctagcccagacctgggatcaaactctggtcacgggtagataccctaggaacccaaagctgtgctagctacattctctgccctctccagctgtccagctccttggccgtagctgacctgagttccttgtcagctgccccgtccagaggacaggctatagtgcccattgcagtcctctctaggctggccatcacttctgcagtctcctcaaatttgcatttttatttttagccctacactcactgaaaatactctgcagttagatccataaaagcctagccagggcacagccacaccagggacagatgctgctgcccagtacctgtgtctgtgtctggaggtgaaaatctcccaagattaactatgtggataaaacctccagtcacattactagagcacaaacagaaatgtttaccccaatgtaactcaagaagaaatggaatctaattgaagagggaagtctggggcaagcaccaggaaatcctttggccacaagtgttgctagattggggaagtgtccccaaaggaagtgggagacatatgcaagccaaaagcccagcccccatggaagagcagtacttcctctgcatattgtcttccaaatcctgtcctaggccagtttatccaggcagccactaaaaactgccagactcaattatcataataaagtagtttattttgctctgataaaggggatttttataatccacataccccaactcccaccccaaagccttttccgttggaaggaaggctgcagcttatgaaaggaaggacctttgtcctggctgtggcatcgttgttgggaacaaaatgtccaggaacccagggctgtttgctttaaccagaatgcttctatcactgcagagttatgaagtggagagcgtccttgggaaggagatgggacctttactctgctttgtccagtccatcactacacagcagagcagctgtgtcgtcaccctggaagagattgagctgctgagtacagagggagccactgctgctcagcctcctccctgacatctgtgcgcttggcaaggggctgtgtgttaactcagtgtttctgtttttaaatttagtgggtttcttttctttcttttttctggtaaagagattaataggatagttttaaattaaaaatcaagatacctctaatacacatttttttaaactttaccttcctacaagtttgataacatgtttctttgagtgtttctcatgtcttctgtgtcttcattttgcagctacttgggcttaggaaatgtgctttgttgtagctttaaagtagttacaatttatcaatattatatatgttttttctttgcagtatctaatattctctgctagattgttctgtaaagcttcagccagtatctcatattgaaatattactgttctgttacaataaataaatgtccaacctaaacactttgtggttttagtgttctgggagctgccagaggtggcactgtcacccatacaatgttgggtgtgaggagagctgtataaaagagaaatttctgtaccttactccactgcccacctgtcagagaccctgaagaactgcagagggcaaagatcacagactcacagcagtccacaagcctgcactttgggcagggatttgaattacaaacaaagctatgtatttagaccctggagggtttgtgttttctgtacaacaggccgtgcagatcagggaaggggttggaacaaccagtatcttagtagaaaggcacatagctttggggggggggggggttaa

SEQ ID NO: 42 - DNA, 3586 bp, Mus musculus
cggatggggcggcgagcaggaagactgtgcacgtaggagatgtctggagcccgccgccccggcacgtccaagaggaaaaggaattggcatatagaacacccatcctttcgagaagagaggtcacagcagttgagacggggaaatttcaagacagtggaagcagctgactctctctctaaagcatggctcaagtgtggagaaggatttcaggacacctctgagatcctgtcattagcaagtgaaaagacaggtattactgaaaagcacctggaattatctccaaaaccaaagacagaaactacaagtaagaatgctagtgagcttccaaatataatatggagttccagtgaaagtgatttctccgatgaagataagacacttcctgcattacagagagatggtaggcatggccctagagccgacaggcttggtgacaggactatctcatgtcccgaagacgaagacattgaagatgaattacaggttattgactgggaggttaacagtgacaaagaagatcctggtgggcctagtgagtgtgaagatgataagggtaccctggacatctcagattgtgattcctgtgcaagtctgacaagtgatgacaggctatgtgagccttctgagccaatttctacagaaattttggagtattcatcagatagtgaaaaagaagaagacccagaacattccctgttcattgattcagaatcccctcacaaataccaggcggattttaaatctgatgcaagatggtgtttggttagtcagactgactcagaagcaaattcagctgagcctacattgacaccccagaaatatacggtcaagtttccgaagactccagaatattcagtaacaaagaagaagcttttaaggggcgggctagcagaaagactccaagaactgcagaatcgaaagagatctgccatttctttgtggagacatcgatgtgtttcttaccaaatgacaccattaggcagaaaatctggtgtattaactgtgaaaattctagaactgcatgaggaatgcagcatgcaagttgcagtatgtgagcagttagcagggcctccaatcaccagccctcccggaggactagctcctagaccaggagcctacctgaaggtactcttcaccagagagactgcagaccacttgatggggcatccccaggacatcatttacatcttccctccttggcaaaaacttcttatcccaaatggaagttgctccattattctgaatacttatttttgtcagaaagctattgcaaaagaaacagtgcgcgaagacctatacagtccggacatatctctttcaaggagaaatataactttggcccagacatttagaattaaggacataacagacaattcatccatcaatcagactacatatgatagcctggccacccctggcacaggctggacccacggacatgagaaggcagagcaacatcttatagttgctgctcccctgaggaattctcttctggacattgtggaaagccaaagagctggcctatggtctggagtcagggtccaagtagtagtgcagagggtgtactctcttctcagcagagatggtgccaggagccagcaagggcacacagtgggacatgcagatgcctctggagcatggtcctgccttctagtgcaggatgcctgtggcatgttcggggaagtgttcttgaacagcaccctctggaagagcagacagttagaagggaagtcctgcagcatgtcgggagtgaaggttctacagaaagctacaagaggaaggacaccagggctcttcagtttaattgacagtttgtggcccccagtgatatctctgactgagccttcctgtggccagcccagtggagagacaaagacttatctgcctcctcctatcttctgttatatcttctctgcacatccaacactgggacaaattgatgcaattgaagaccacatttccaagctttaccagcctccagttgtccgctgcttaaaagaaatcctccagactaatgagtgcagtacacgttgcagcttctatgccagagtgatttatcaaaaaccacagctaaagaatcttttggcgcaaaaggaaatctggctgctggtgactgacatcactctgcaaacacaggatgaaagggaccactctcttcccaaaaccctgcctgtctatatagccccctcgtgtgtgctgggcccagaggttgtagaagaacttgccttgctggtgtcttataacttactcttcagggacgcttttaaggacaacggtcagattgtttgtattgaacggacagtcatcctaccccagaaacctctcttgtgtgtaccttctgcttcctgtgacttgcccagcccagtgacactggatgaactgagtgccctcacacctgtcaactccatttgcagtgtgcaaggtactgtggttgatgtagatgagagcactgctttctcgtggcctgtgtgtgaccggtgtggcaatgggagactggaacagaagccagaagatggaggcaccttctcctgtggggactgttcccaactggtcctgtcacctcttcaagagaggcacctgcatgtctttctggactgtcccacgagacctgagagtactgtgaaggtcaagctattggagagcagtatttctttacttctgatgtctgctgcctctgaggatgggagttatgaagtggagagcgtccttgggaaggagatgggacctttactctgctttgtccagtccatcactacacagcagagcagctgtgtcgtcaccctggaagagattgagctgctgagtacagagggagccactgctgctcagcctcctccctgacatctgtgcgcttggcaaggggctgtgtgttaactcagtgtttctgtttttaaatttagtgggtttcttttctttcttttttctggtaaagagattaataggatagttttaaattaaaaatcaagatacctctaatacacatttttttaaactttaccttcctacaagtttgataacatgtttctttgagtgtttctcatgtcttctgtgtcttcattttgcagctacttgggcttaggaaatgtgctttgttgtagctttaaagtagttacaatttatcaatattatatatgttttttctttgcagtatctaatattctctgctagattgttctgtaaagcttcagccagtatctcatattgaaatattactgttctgttacaataaataaatgtccaacctaaacactttgtggttttagtgttctgggagctgccagaggtggcactgtcacccatacaatgttgggtgtgaggagagctgtataaaagagaaatttctgtaccttactccactgcccacctgtcagagaccctgaagaactgcagagggcaaagatcacagactcacagcagtccacaagcctgcactttgggcagggatttgaattacaaacaaagctatgtatttagaccctggagggtttgtgttttctgtacaacaggccgtgcagatcagggaaggggttggaacaaccagtatcttagtagaaaggcacatagctttggggggggggggggttaa

SEQ ID NO: 43 - protein, 923 aa, Mus musculus
MSGARRPGTSKRKRNWHIEHPSFREERSQQLRRGNFKTVEAADSLSKAWLKCGEGFQDTSEILSLASEKTGITEKHLELSPKPKTETTSKNASELPNIIWSSSESDFSDEDKTLPALQRDGRHGPRADRLGDRTISCPEDEDIEDELQVIDWEVNSDKEDPGGPSECEDDKGTLDISDCDSCASLTSDDRLCEPSEPISTEIYSSDSEKEEDPEHSLFIDSESPHKYQADFKSDARWCLVSQTDSEANSAEPTLTPQKYTVKFPKTPEYSVTKKKLLRGGLAERLQELQNRKRSAISLWRHRCVSYQMTPLGRKSGVLTVKILHEECSMQVAVCEQLAGPPITSPPGGLAPRPGAYLKVLFTRETADHLMGHPQDIIYIFPPWQKLLIPNGSCSIILNTYFCQKAIAKETVREDKPDISLSRRNITLAQTFRIKDITDNSSINQTTYDSLATPGTGWTHGHEKAEQHLIVAAPLRNSLLDIVESQRAGLWSGVRVQVVVQRVYSLLSRDGARSQQGHTVGHADASGAWSCLLVQDACGMFGEVFLNSTLWKSRQLEGKSCSMSGVKVLQKATRGRTPGLFSLIDSLWPPVISLTEPSCGQPSGETKTYLPPPIFCYIFSAHPTLGQIDAIEDHKLYQPPVVRCLKEILQTNECSTRCSFYARVIYQKPQLKNLLAQKEIWLLVTDITLQTQDERDHSLPKTLPVYIAPSCVLGPEVVEELALLVSYNLLFRDAFKDNGQIVCIERTVILPQKPLLCVPSASCDLPSPVTLDELSALTPVNSICSVQGTVVDVDESTAFSWPVCDRCGNGRLEQKPEDGGTFSCGDCSQLVLSPLQERHLHVFLDCPWESTVKVKLLESSISLLLMSAASEDGSYEVESVLGKEMGPLLCFVQSITTQQSSCVVTLEEIELLSTEGATAAQPPP

SEQ ID NO: 44 - DNA, 463207 bp, Homo sapiens
  misc_feature (1)...(463207): n = A,T,C or G
aaggtattcagtagaagcagatgaacagccagatgaagagatggatagagcaagacatggacattataaaggaattcaatagaagcacatgaacggccagatgaagagatggatagagtaagacatgaacaggttgagggcaggtggcgtgcttgaagcttccacgccctctctgggcgaaccaccctcccagtacctctgtatgttcagcaactgagaagctcatcgaatcttgttaaagagttgttttttttttttaattgttcatttttttttttgagatacagtcttgctctgtcacccaggctggagtgcagtagcttgaccttgacttaccgcagctttgacctcccaggctcaggttatcctcctaccgcagcctcctgagcagctgggaccacaggttcatgccaccacatctggctaatttttgtattttttgtagaaatgaggtcttgctgtgttgcacaggctggtctcaaattcaggctcaagagatcctccatcctcgacctccctaagtgttgggattaaaggagtaagccatggttctggctgttaaagtgtttttataaagcttgatctccagcctcctcctttctcagaggttactgagtggagctgaaaataccaacccactaatcctctaatcacttggcctttttgctaagtgaccccattctcaagttatctaggggccccaccctaagtgacctcagtaggataaacttaggagttatcaaaggaattctttataaataacaaaagatattcctatcacttaggaaattgcaagagttgtaggagttctatggcaggaacctgggataatgaccagatatatttcatgttatagcacagtatctttaccttccctatttaaaaatactgtattgtcaaatgattttacaattttttcttcaatcattgattatgatttatttataaagttcatgaggaacatttttgttgcaccagagtaaataattgctacatattttcctttgcattgttctccatctccctgtacttaaatttttaaattctatgttcattactagtcagataagatgtcttctttccttctcgttgagatacattctccagtatcttcctaataaaggaatcacgagaagtaaaattgtaaagttcctgcacgttttaaaaatatcttttattttttccccttgattgatagtttggccgggaatagaagtctagattggaattcagttttcctcagaattttttttttttttcccgagatggagtctcgctctatcacccatgctagagtccagttgcgcgattttggctcactgcaacctccgcctcctgggttcaagcaattttctgcctcagcctcctgagtagctgtgattacaggcaccgcgaccacacccggctaatttttgtatttttagtagagacgggttttcaccagattggccaggctggccttgaactcctgaccttgtgatccacccacctcagcctcccaaagtgctgggattacaggcatgagccaccgcgcccggcctagaacagttttaaacaattgttctcattactaatcataaaaataatacacagctattgtggagctgctagaaaataaagactacaatagaaaatacccccataggcccagcgcggnnnnnnnnnnnnnnnnnnnnnnnnnnnnnnnnnnnnnnnnnnnnnnnnnnnnnnnnnnnnnnnnnnnnnnnnnnnnnnnnnnnnnnnnnnnnnnnnnnnnnnnnnggtgaaacccggtctctactgaaatacaaaaaattagccgggcgtggtggggggcgcctgtagtcccagctacttgggaggctgaggcaggagaatggtgtgaacccgggaggtggagcttgcagtgagcccagattgcgccactgcactccagcctgggggagagagcgagactcagtctcaaaaaaaaaagaaaaaagaaaatatcccccataaatctataaaacctataatcagcataacataagcattttgataatataagcatttggatctgtttcctgcccgtttttatacaactgcttatatatatttaaaaatttgtacattattttttttaaatttaatgtcattagttttacatgggtgtgttgtttgaaaaataggtaagaataatattttccattctgataaaatcaaaagcagattatgtattcttatgtgtaaataagatttccattggcgttgcatatattttttagtttccattcttaaaatgagtggaacctctgtgtaaagaaaatattttattattttaaataaaagcagaatacaacactgtctattttacagttataactggaagataatgtctaatcagaagactctaatagggtaggaaaacattaaaatagttatgtcacgttggtagctgggtaccccatacgtaattttgtatttagtaaatatttttggaatgtggatgaatagaccatgatgacttttttctatttatttttttaaattttctgtgcgtgtgttttttgtttttgtttttgttttttgttggtttgtttgagactggaacttatttctgttgccccagctggagtgcagtggtgcgatcacagctcactgcagcctgggtctcctgtgctcaagcaatcctcttgcctcagacccctgagtagctgggactacaggaacacgccaccaggcctggctaatttttgtatttcttttttagacagatggagttttgccatgttccccaggctggtctcaaactccggggctcaagtgatctgcctgcgttggcctcccaaagtgctggggttacaggcatgagccaccatgccttgcctgttataatgttaagagaataaataaggtgtaatttctgtaaatatttagacacacatgaataatttatttgaaagttacctgtccagtttgtatagctctagatatattctgtacttgttaaatgctatgaccaaagaaaagcagtatacaatatcgcttgtccaagtgctagtttatttatggaaaaaagcgaaacctactttgtgcctgagttttgtatgtacttttaccaagatcttgaaaatatttctctttgtacattaccctgtaagaacttccttatttcaaaccagtttattgaatttcatgttcagttgtcatttacatattattaaaatgtaggtaacaaatatacttgtacatctataatgtggacaaatacagtaaccaaggggaaacaaaataaaaaactgaagaaaaaaataatcaaagggaaaacaattttgatggaaaggctagtaaagaatttgcagtggttggaaaaataaataagatattcaaatggataactctataaggctgctggagaagggagtgagcaagctagatggcgtcaaggtgagggagagatttttatggtgtgtagtgttagagacttgaacatgattgaatggtggacttaatgatagaactggttaaagtggaggggattggaatcctgattgctgtgtctcatgatcagcaccctcttcttctgttcaggatttcctttttacagcttcaaaccactggaatgtaaggcattatgagtttcttcctcagccttttttttttttttttttcgagacagagtttcactcttgtttcccaggctggagtgcaatggcacaatcttggctcaccgcaactgccgcctcccaggttcaagcgattctcctgcctcagcctcccgagtagctgggattacaggcatgcgccaccacgcctggctaattttgtatttttagtagagacggggtttctccatgttggtcaggctggtctcgaactcccgatctcaggtgatctgtccaccttggcctcccaaagtgctgggattacaggcgtgagccaccgcgcctggccctgttttagttttgggtatataccgagcagtggcattgctagatcttggtggttttattttattttattttaatttatgttatgtttgttatgttatgttatgttatgttatgttatgttatgttatgttattttagagacagagtcttgctgtgttgcccaggcttcagaactgtggcgtgattatagcttactgcagcctcaaactcctgggctcaagcgattgtctcgcttcagcctcctgagtagctgggaccacagatgaacattcccacccctgctaatttttttttttttagggacttgctatgtttcccagactggtcttgaactcctgggctcaagtagtcctcctgccttggtctcctaaagtgctgggattacaggtgtgacccattgtgccctaccctgtgtttaacctcttttttttttttttttttttttgagacagagtctcgccttgttgcccaggctggagtgcaagtggctcaaacttggctcactgcaacctccgcctcctgggttcaagcaattctcctgcctcagcctcccgagtagctgggactacaggcgcacaccaccattcccggctaattttttgcatttttggtagagataggttttcaccatgttggtcaggctggtcttaactcctgactttgtgattcgcccgccttggcctcccagagtgctgggattacaggcatgagccaccgtgcccagctgtgtttaacttttgaggctctaccaaataatttttaacaactgcaacgttttacttttccaccagccatgcacaaaagttataattgctacacatccttggcagtgcttgtcattttctttctcttttttttttttttttttattaatagccattctggtgggtgtgaagtggcatatcattgtagtttcttgctttttgttcttggagataggatctcactctgccactgaggctggaattcagtggcacaatcagtgatgcagccttgaccttccaggctcaagtgatcctcccaccccagcctcttgaatagctgggactataggcacatgccaccacacccagctattttttttttttttcaaagacaggatcttgctctgtcacccaggctggaatgcagtggtgcaatcatggctcactgcagccttgacctcctgggctcaagcaatcctcctaccacagcctcccaagttgctggaactacaggcacatgccaccatgcctggctaattctaaaaaaaatttgtagacatggggtctcacgacgttgcctaggctgctgactaatttttctaaggacagtaatcacatttgtggggcctctggtttcatgttctagtcacctccaaaggcctcatctctttttttttgagatagagtcttgctctgtcaccaggctggagtgcagtggcaggctctcggctcattgcaacctttgccttccggggtcaagcgattgtcctgccccagcttcctgagtagctaggactacaggtgcatgccaccacgcctagctaattgtttttccctaataataattatacggcatttagcttttataccttcctgttgcttatttttatgtctgtgtcttctgaaatgatagaaggaagcaggattcaggatagcttttatttttctttttttaaggacgtggcctctcactgtgttgcccggcttgaagtgcagtggtgcagtcagctcactgcagcctcaaactcctgggctcaagcgatcctcctggttcagcctcctgagtagctggaactacagtcgtgtgccaccatgcccagctcactaaaaagttttttttttttttttagaaatggggtcttgctatgttgcccaggctggtcttgaacctctgggctcatggaatcctcctgccttggcctcccaaagtgttgggattacaggtgtgagccatggcacccggcccagcatagcttttataccttgtgttgttttcatgggtcttgtaaaaatatggccacttgtgtatttgtcttgtagattctccctgactctgctcatctggaccttttctgtgtgtctgccacccctgtgctgctgagtggattccacttccagtactttctcagtgacgggtccagaagggagtccagggtgaccagtttcaggggcccaggnnnnnnnnnnnnnnnnnnnnnnnnnnnnnnnnnnnnnnnnnnnnnnnnnnnnnnnnnnnnnnnnnnnnnnnnnnnnnnnnnnnnnnnnnnnnnnnnnnnnnnnnnnnnnnnnnnnnnnnnnnnnnnnnnnnnnnnnnnnnnnnnnnnnnnnnnnnnnnnnnnnnnnnnnnnnnnnnnnnnnnnnnnnnnnnnnnnnnnnnnnnnnnnnnnnnnnnnnnnnnnnnnnnnnnnnnnnnnnnnnnnnnnnnnnnnnnnnnnnnnnnnnnnnnnnnnnnnnnnnnnnnnnnnnnnnnnnnnnnnnnnnnnnnnnnnnnnnnnnnnnnnnnnnnnnnnnnnnnnnnnnnnnnnnnnnnnnnnnnnnnnnnnnnnnnnnnnnnnnnnnnnnnnnnnnnnnnnnnnnnnnnnnnnnnnnnnnnnnnnnnnnnnnnnnnnnnnnnnnnnnnnnnnnnnnnnatggctcggtgtggagaagggtttcagaacacttctgggaatccggtaaagtatctgtagaattgttttccctgaatgccaaagaggaaatcctgagtgttcagaacattgtaattacatttcattgtaattccctttcttattctttcagaacactgtaactggtacactccttttcttgcctttcattccttgaattcctttaataattgtggcaagttagtaagttagtattcacctttttattttttattttttttttattttatttatttatttattttttttggagacagagtctcactttgttgcccaggctggagtacagtggcgcaatcatagctcatggcatccttcaggctatcttgcctcagcgtgtcaaatagctgggactacaggtatgtgccgccgtgcctggctaattttttttttttttttggagacggagtctcactttgtcacccaggctggagtgcagtgaggctatgttggctcgctgcaacctccgcctcccgggttcaagcaattctcctgcctcagcctctcgaatagcttggattacaggtgcgtgccaccacactcggctgatttttgtattttttgtagagactgggtttcaccatgttggccaggctggtttggaactcctgacctcaggtaatccacccaccttggcctccaaagtgctgggattacaggcgtgagccactgtgcccggctgcctggctaatttttaaaaatctttctgtagagacagggtcttgctgtgttgcctaggctggtctctaacccctggctgcaagtgatcctcccacctccgcctcccagagtgccgggattataggtgtgagcccccatgcccagctcacacctgaacctctttaatccatgcagaacctttctacttctttgtttgtaaatgaaggatatttactaagaatgttctcagaagatgaaaccattgagcatactactcttcacaagaaatgcatgtttactctggaggcgtactctggagatattgcaggtttggttcaggaccaacacaataaagtgaatattgcaataaagtgatcacatgaattctttggtttcccagtgcctataaaagttatgtttatattataatgtagtctgttaagtgcaatagtattatgtctaaaaaagcaatgtatataccctaatttaaaaatactttgttgctaaaaaaaatgctaacaatcataggagccttcaccaaggtataatctttttgctgggggagagtcttgccttgatgctgatggctgctgactgatcagatggttggtggttgaagattggggtggctgtggcagtttcctaaaataaggcaaaagtgaagtttaccacatctatttactattcctttcatgaaagattactgagtagcgtgtgatgctggtaacatttgaccagtaatagaacttctttcaaaattggactcaatccttccaaagcctgacactgctttatcaactaagtttataggatattctaaattacttgttatcacttcaacaatgttcacagcattttcaccaggagtagattttatctccagaaactactttatttgttcattggtaagaagtaactcttcatccattcaactcgtaggaaattgcagcaattcagtcatatcttcaggttctacttctaattctagttctcttgctgtttctatcacatcagtttttctgctgaagtcttgaacccctcagtcatgcacaagggttggaatcaacttcttccaaactcctgttaatgctgtattttgaccttctgtcatgaatcatgaatgttcctaatggcacatagaatggtgaatatttttctgaaagttttcagtttactttgcccagatccatcagaggagtcactatctgtggcagctacagccatatgacatgtatttctgaaataataagatttgaaagtcagaatcaccccatgatccatagtctgcagaatggaagtggtgttagcaggtatgaaaacagcattcatctccttgtacttctccatcatagctcttgggtgaccaggtgcattgtcaatcagcagtaatagtttgaaagaaatctttttcttctgagcagatctcaacagtgggcttaaagtattacagtaaagaatgctgtaaagagatgtgctgtcatccaggctttgttgttacatttatagagcacaggcagagtagatttatcataagggcgctaggattttcagaatgatacatgagcattggcttcaacttaatgttaccagttgcattagcccctaatatgagtatcagtctgttctttgaagctttgatgccaagcattgacttctctctagctacgaaagtcttaaagggcatcatcttctaatataaggctctttcatctatattgaaagtctgttttttagcgtagctaccttcatcagtgatcttaactagatcttctggatcacttcctgcattaccttgtacttttatgttatggagatgatttcttaaacttcatgaaccaacctctgctagcttcagacttttcttctccagcttcttcacctctctcagccttcatagaattgaagagagttaggaccttgctctggattctgctctggcttaagggaatgttatagctgattcaattttctatccagattgctaaaactttctattagcaataatgctgtcttactttcttatcatttgtgtattcactggagtagcactttcaatttcgttcaagagcttccctttgtattcacaactggcttaacggtttggctcaagaggtctagcttttagcctatcttagtttttgtcatgccttcctacctaagcttaatcatttccagcttcttttttctttttctttttttttttgagagggagtctgtctctgtcgctcggggtggagtgcaatggtgcgatattggctcactgcaacctccacctcccaggttcaggtgattctcctgcctcagcctcccgagtagctgggattacaggtgcccgccaccacgcccagctaatttttgtatttttggtagagatggggtttcaccatgtgggtcaggctggtctcgaactcctgatctcaggtgatttacttgcgtcggcctcccagagttctgggattacaggcgtgagccactgtgctcggccatttccagcttttgatttaaggtgtgagacattcagctcttcctttgcttgagcactttgaggcgattgtaaggttattaaattgacttaattttaatattggtgtgttgcagagaataggaggcctaaggagaaggcaagagatggaggaacagctggttggtggagcagtcagaacacacacagcatttattaattttgctctcttatattggttttgactgtggcaccccaaatcagttacagtagtaataccagagatcactgatcacagaccatcatagcagatttaataataatggtaaagtttgaaatcttggaataattatcaaaatatgacacagagacacaagtttataggtgagcagatgctgttggaaaaatggcatacagaattgcttgacacaggattgccagaaattttcaatttgtaaaaaaatgctttatctatgaagcacaataaaacaaggtatgcctttatattcagaatcttttggcaatgagatattctggataatttttgtgtttgtggtaacttacagagtaatgctattacaaattcaagataatttgggtatgagtagtaatgagtacctcataggcagttggagtcacatgtatgagcagatattacactgaatgttaatgggaaacgttttggtcagtcagatctctttagattcaggaaaaatagaatgaatttataaatatataaggagtacatgctttgggaatactgaaattggtgaattggtaaaggaaatcagagaagaatatgttaaggagagtgtagtttaagattttgaatattttataaaagtttttttttagcatttgtcacataaattccatgattattattttgcctacagtcattaacagctgaagagaagacgattacagaaaagcaccttgaattatgccctagacccaagcaaggtaactattttgttgatttcttgacagagaagatataagactaataaatccttctgtgattattttaaaaatttgctgttttaaaaaagtgacatggtttgggtagactatattcatagttaaaaaacatcaagataaggtaaaaagatatttttgagaactttgtctgtcatcgctgtcaccgtctaccccatttctcctgcctgcctacagataactaacattttttgtgtgtccttcctaagttcatttttatcacagagcccagtaggttagctcatgctcatagctccagggttttgtttgtttgtttgtttgtttgtttgtttttaatctgatttgggaaagaaatgtgacctatgccataagaactatactgcttcaggctctgaaattctttcttgatgaattagggaactttcaataagtagtagaaaactctgttcaaacactagagtatttgaataaatgaggttgaatttgtctcctgcagcaggacatccacagggctagattctttctgaattctgtagcctgagtgtggaattggttctcatggtcaggaggtgttggctgaattccacaggctgaattcttggaagagtgtaggtgctgaggattttcgccaagtcagctttgcctttcctttgggaaggaatgcgcttcccagtacctctacctttgactagaacctgttacaaacggtcacctccactaaagatactttagtgaaattaaggatttttagataggtatgttgctgctaaagaaaactggggttattagtaatgaagaaggggtggatatcaggtaggccgctggttctcctgccataggcagtcagccccgctgtgggtgtgtaggaagagtgagggcttgtgacttccgggatcttgctgtgtcctggctctctaatctttgaaaactaagctaaacattcgcagtctgttttgtatctggagaatgggcataatcattgggttatcatgaatattaagtgagctaaaaatagtagattaaatgcctaattaaaggtgcttcagtaggtacttgattgatgacagcagttgctcatatgtctgatgacagaaggagctatgtgaaagcctattcagagttctacagagtgaactaacttcctgtgacattctaaaccatgttactatttcaagtgacatggaagaggttctatgcaaatgaaaaataaaatttgccaaaatgtttctttaaaatttataaagtgttgctttatgaagtaaactagtacacatcttttaaattctataatcttctgatggaattgcagaagctgttggcagagacaagcctctgaccttaggcacacattacaaaagcatgttcctgattctgcttcccagctgtcataaaaatactacttcctcacccaaaatgtagtatagaatttttatcttggaatttttgttaataggatgtcttaaactaatacttcagtatctgttctagacctctctccttggcttgtagatgattgccttcttcctctctctcttccccaggtctcttcacattgtcttctctgtgcatgtctgtctttgtgtccagatttcaccttataaggatttcagtcatcttggattaaggcccaccctaatgaccttatttgaatttgattacctctttgaagaccatgtcttcaaataaagtcacattctgaggtacagaaggttaggacttcaacatttgaattttggtggggggggacacagttcagctcataacaccaggtgctaggacagtgcctagcacacagtgggcacccagaaatgttcagtgtggctaatatttatcctacggttccattggaatgagccttgatatcaaggacaccctctttacagcaagtgaaatgagttactaatcaattcctggtagtgattttaactacctagttgtgcagtcaggtgcctataattcatgggtttataaatctagagtcctggtctctgaggttttgaatgacataactaatgattatcctgtcttttaaattagatggtacagaagcaccagacagttacatattttcttagatactcacactaaactaatggtgaaagcaactgcaggtctctctgacttgagagctacgcataatggttaagaacatggactcagaagctcacctgcctgggtgtgcgtctcaggcaccacagctgctggctgaaaaaaggcattacatttgggaagtcctttccaatgaatgactcataacatagaaactgtatgaataaagctggtaaattcacctaaacataaagggaaaaacagcatggccaaaattacatatataagtctgatagggtggcatacgtctgtagtcccagttacttgggaggctgtggcaggaagatcacttgagcccaggagtttggggctgcagtgtgctgtgatcatgcctgtgtacagctgctgcagtccatcctgggtgacatagcaagaccacatcgcttacaaaaaattacatgtacatacacaaaatttaaaattcagaaaaaccagggaaaatactgtggctcatgtcacagaccaaggctgatctttctaataaagaaccatcagaacttaatctagggggaaaaagataactattgcaaaaataacgattatggaggaactgctttcaaaaaaggaaatataaatgattttcaaacctatgaaaagatgctcagcctcaaggcagtgagaggtcatttttttctgatcagatcatccagaatcttagtatatatctttctgtttgttctttcatgttcttttgaagtcttctaaaaacatgtactttggttttacatgtctcttaagtattgggggaacccgcccccaatatttcaacgtaggttctttgtattttccctaagtgtcggccagctgagaaataaagagaaagagtacaaggagaggaattttacagctgggcctccaggggtgacatcacataacagtaggaccgtgatgcccacctgagccacaaaaccagcaggtttttattaaggacttcaaaaggggagggggtgtacgaacagggagtaggtcacaaagatcacatgcttcaaagggcaaaaaggagaacaaagatcacatgcttctgaggccaataaagatcacaaggcaaagggcaaagcaaagatcacaaggcaaagggcaaagcaaagatcacaaggcaaagggcgaaatcaaaaactcctgataagggtctatgttcagctgtgcacatattgtcttgataaacatcttaaacaacagaaaacagggttggagagcagagaactggtctgacctcaaattcaccagggtggattttttttccccaccctaataaacctgagggtactgcaggagaccagggtgtatttcagttcttatcccaaccgcataagacagacactcccagagtggccgtttatagacctccccccaggaatgcattccttccccagggtattaattattaatattccttgctgggaaaagaatttagcaatatcttccctacttgcatgtccgtttataggctctctgcaagaagaaaaatatggctgtattctgcctgaccccaaaggccatcagaccttatggttgttttcccttgttccctgaaaatcgctgttattctgttctttttcaaggtgcactgatttcatattgttcaaacacacattttacaatcaatttgtacagtttaacacgatagtggtcctgaggtgatgtacattctcagtttatgaagataacaggattaagagagtaaagacaggcataagaaattataaaagtattatttggggaatgataaaggtccatattaaaatgaaatcttcacaatttatgttcagagattgaagtaaagaacttgtaaaagtattaattttgggaactgatatatgtccatattaaaatgaaatctacataatttatgttcctctgcggtggctccagctcgtccctctgttcggggtccctgacttcctgcaacacttaagtttcttgtaggtattttattggtttttgctactgctttaaatttgatttctgtattgtagtttgtaccttgccacctttattggacttccttattaacggtagtaatttttcagttggtttcttgacttttccatgaattcatttcataatttgcaaatagtgataacttccttcttttttttttttgagataatgtctcactctgtcacccaggctagagtacagtggtgtgatctctgctcactgcaacctctgcctcctgggttcaagcaattctctgcctcagtctcccgagtagctgggattacaggtgcccacaaccatgcctggctaattttttgtatttttagtagagatggggtttcaccatcttggccaggctggtcttgaacttctgacctcgtgatccacccacctcggcctcccgaagtctaggattacaggcgtgagccaccgctccctgctgataacttccttcttgacttatttttcagatgcataataatgatagagattgataatgtcttttgcaagtactcagtttattttattagctatttagatagatatagattcttagaatattctgaatagtttatttttccttttataacgtgaacaataggccacttcagtaattctagatgtttgtggcacaaagtagtaagtgttcagtaaatgttgactattccatgtttttgtgcctttgtaagtactgttttttcagacatcatcttgtcagtgaatcctcttttcctgatcgatgcaaagtggaacattccattttttttgtgccaccattattccatgacatacatctggtatattgttagtttttttcatgattagtgtttcttccagaccacacatattccttgtgggaaggagctttcttttcttttcttttttagagatgggatcttaccctgtcactcgggatggagtgctgtggtgcagtcatagctcactgcagcctcaaacatttgctcttaaactcgtcctcctgcttcagactcccaagtagctgggactacaggcatgtaccactgtgcccagctaattttttaactttttgtagagattgggtctcactgtgttgcctaggctggagttttttttgtttcctcatggtttactgtatcagaggggttctgtaaatatgtatctaatgaagcctaggtttattttttgtaaaacatgaattttataaatatctaatctcttaatttcatagtgtattaaaatgtgctttgaaatatatcaaataccatactgcataggataagatatatatgtacatatatatgttttagcattatatttacaattatgaatataaacagaataattgatttttattaggtatatattccttttctgaccaatatcagaaaagtttgctgttgacttttgattctgccaagatgaaatagccccattctgtcaggttttccacctatcagaatggctacaatgaaaaatagtgacaatacaaaatgctggtgaggttgtggagagactggatcaccagtacattgcaggtgtgtagtaaaatggtacagccactctggagaacagtctggcagtttcttaaagactaaacatgcaattaccatataacccagcaagtgcacccttaggcatttgtcccagagaatgaaaattaaattcacataacatcttatacacagatgttcataagcagctttgttcataatagccccaaactagaaacaacacagatgtctttcagtaggtgaatgattaaacaaactatggtgcatagtaccatggtgtactattcagtaataaaaagaaaataaatgttgatacacacaacttagatgaatatctaggaaattattctgagtgaaaaaagccaattctaaaaagttacatagtgattttatttatataacctttttgtgtgtgtgtgtgtgagatggagtttcactcttgttgcccaggctggagtgcagtggctcgatctcagctcactgcaacctctgcctcctgggttcaagcgattctcctgcctcagccccccctgagtagctgggattacaggcacccgcaaccacgcctggctaattttttgtatttttagtagagacagggtttcaccatgttggccaggctggtctcgattatataacatttttaaaatgacaaaattacagaaatgcaaaactgagtagtggttgacagagttcagggattggtatggggccaggagatggtgtagctataaaaaggtaataaaggcatcctgtggtgatagaattgatctgtatcttgactggatcagtgtcagtatcctggttgtgttatactacagttttgcaagatattaccattggagggactgggtgaaggatacaagagttttctcttatttcttacaactatatatgaatctaatattatctcaaaataaaaagtttaattaaatacaaggtttggtcttaagtgttttaagcaccctgctaccagagctcttagcatggcaaaggaagcacacagaagcattcctgttactcataagttttgactttgtgttttgcattttaaaaaattttttgttttcatcaaataccccagaaagttatacttttataaatgttatttcaagtcttatttttccggttttcatttgtgctctagtcactttcctttttttgtataacttaaccagttctacttctttttcttcttggaacttggcttcgaactcagagaatgttagtgagattgtacgtagaactttaggtaggaagatttgacatagacattgcttttcctatcacagagttttgtgtatttgtgactttggcaaaattacatgcataaaattgtattctgataaatgaccatataaggagatcatatttatgtgctttcttttccttcaacagaaaccaccacatctaaaagcaccagtgggcttacagacataacatggagctccagtggaagtgatttgtcggatgaagataagacactttctcagttacagagaggtaatggacattgctctagaatagacagattttgtaacaggaacatattgtgtccagaagatcagagtaatgaaggtaaattgataattttgttaggaatccagtttctgttaaatattggatttaatattggaagaaacttacattcctttctagtatttatcattaacattccacctatcagaatggctacaataaaaagtagtgacagtacaaaatgctggtgaggttgtggagaaactggatcaccagtacattgcaggtgtacagtaaaatggtatagccactctggaaaacagtctggcggtttcttaaagactaaacatgcaattaccatatagcccagcaactgcacctttaggcatttgtcccagagaatgaaaattaaattcctttctaatagttaggattttactgagtcccaccctctatgctaaacacttcagaaacattttcttgtttaatatttctcaaaacaactctaagaaactctaagagataggtattacagatattatttttacagttaacaacttaagcttggactgatgagaatggattgggattccattttaggtctctgctccatagccagttctttcaacgtctacacagtgccacacccacactgccttcttcccaacctgttcggtaaatactgtgacaaccagtgtgtggtagaggtgtaacgtactgacaaatttctattcagatggcgttttatattgtgtcatgttttagacaattgaaagcagagtttctcatccttgacactcttgacattttgggccagatgattctttgctatggggagtaacaccttcctatgcctgtaggatattctgccgtgtcccttgcctttacctgccgggtcacagtagaatcccagccacagtgatgataaccaaagatgtctccagatgttgtcaagggtcccatgaaggacaaaaatcacccctagttgataaccacagatgttgaattatggaaatcatgtccttttagaatttttaaaatatacaaatcatctatagagtatttcagtgtcttaatgttttcaaaataagcttatgacttttaactcttgacggttcatgttagttacctagggttcagtttgtacagacagcttctcgggagggtagttaaattcttttgaccactttgtatttcattttggtaactattaatatcattgaccttttagtagttaccaggtgaagtggtattttaagattgtatataagctgatagcagttctattattgattcaaccatattaaatgaaatttattgttacttggtttgtcttcatacatttcagaatacaaagtttataaaaatgggtaaatagtatggtttgtgcctcccaaagtgctgggattacacatgtgagctgtcgcgcccagcctcccttccatttggtttttaccaattgtctaaaagtttttataacttttggaaaatctcttaaattattgtagacccaatttcctcatctgtaaaatgcaaatttaagtgtaatagtagcagtcttcctgctttttaaaagttttgtgaccacaaaagttttgtgacgaaagccccagttatttcatagcatgcatcacattgcaatatgtattaatttgtgggctacttcaggctaggaatggtgctgttttctctattgtatttattttgtattgtgagtatctcgaatggtgtgatgggctctttttaggcatttgctttgtctaatgaatgaaggagtgaatgaatgaatgagtgctgcacagatgtgtgataccggcagcggctctgagggcacttgtgtttttcccttgtctctccctggcttcctgttgagaaggttcagcaacctggaaaatctctaatgtgttcccctgcctggcttccgtgactaaatttgatgttaatgtgggaagccgttgccattatgcatctgcttctctcagtggtggtctgaccttcggtctgttatgatcattatagtggctgttttttttaagagatgaggtcatgctctgtcacccaggctggagtgcagtggatcatagctcaccgcagtttcaaactcctgggctcgagcgatcctactacatcctcttaattatgtttagtgaaaaagtctagctgtgtaagaaaggaggaaaaaaataacaatacatagtttatttgcttaaacatgctggagaaactctacaaagatacagaaacacctaataaaagtagttaacttaaaattggggttgggataagatttgggagaaacagtgatttgagataagagtagaaatatacttttcactgtctaaattttttttgagacagagtctcgttctgttgcccaggctggagttcagtggcaagatctcggctcactacaacctccacctctcgggttcaagcgattctggtgcctcagccacctgagtagctgggactataggtgtgtgccaccgtgtccagctaattttttgtatttttaatagagacagcatttcatcttgttggccaggctagtcttgaactgctgagttttggcattctgcccaccctggcctcccaaagcgctaggattacaggcatgagctattgtgcctggccctaaatatattttttaaaattattgagtgacatggatatattaactgctaagaataaaagagatataaaagtgaaagattaaggagataattaagcaagttaaaaattatattttttagatgaattacagtttatcgactgggagattgacagtgacagggcagaggctagtgactgtgatgaatttgaagatgacgagggtgctgtggaaatctcagactgtgcttcttgtgcaagtaatcagtctttgacaagtgatgagaagctgtcggagcttcccaaggtaagaatgaagtatttcaaaacttttattcactttataacatttgctaatcatagttgtcatttttttttttgttttttttttcctgtccttcctcgagaacaaccacttttgactcttaggggattcttttgttctttactcacttatctctaaataacatgcttgtgctgtacttctcaacatggataaatattgatctcacttctctttcacttcccaccctcactgcacaccgaatgttttttatcctgctattcttccagtgcagatatatcaaagtgctggaattgcacatgtcagccaccatacctgggcaaaaagatacaaatttaaatcagctgtcttccacgagtcctctcccagtggagtcacacagtatatgcttaattcttccagcaaaatgtttagacaacatgtgtgaagtgttatgtaccagggaactcattagagactcagtgcccagggtttgtattaggggctagtaacataggcaccctctccctagaaggttcagcagtggactaggaggatacacaggacttagcatatagtcgtactcgtggccatcgtttattacactgaaaggatagaaatctatttttatttatttatttagagacagggtcttgctgtgtcacccaggctagaacgcaatggtgcgatcgtagctcactgtagccttgatctcctgggctcaagtgatcctctcacctcagcctccagagtagctggtcctacaggcatgtgccaccacgtctggctaattgttgtattttttgtatgttaactcttttctgcatgtatgtgagtttgtagttttcatcacatttggtaagtttttggcttttacttcttaattttttttctgactccccttttcgtttcctcctgtgactccaattacatgtatattaattaggctgcttagtgttgcgtcatgtctcatttttgctgtcattgttttttccccttcatttcattttgggtggtttctgttgctacatcttctagtttaataactttttaaaaattcttcagtatattctgcagctaatactatccagtgtattggtcatctctgacattgtatttttcatttctggaagtttgatgtgagtctttatattgtccatgtcttttcttaacatgacatactttcttctatattttgaacatacagagtatatttataatagctgtttttaatggctgttttggtaaatctgtctgtgtcatttctgtgtctatttgtcctccttatgagttgtatttttctgcttttttgcatgcctataaattttaaaaaattgtaaaatacaatgcactattattatagtcttcattctgtgtattagattactaaagcatattacttctgtctaaatgaaattttgtatcctttagtcagcatcttccctttctccatccacttttctctcccagcctctggtaatcaacattctaccacaattctgtgagttctacttttttagattccccatgtaagtaagatcatgctgtatttgtctttgtgtgcctggcttatctgagttaacgtaatgtcctccaggttcattcatgttgcaaatgatagaatttccttctttatcaagactggatagtattccattggtgtatatatactatatttactttatgcattcgtctagacacctagattgcttccaaatcttagctattgtgaatagcactgcagttaacatgggagtgcagatatttttttagcatactgatttcaatcctttggcccagaagtgggattactagattatatggtagttctatttttagttttttgagagaccttcatactgttctccataatagctgtgataatttacattcccaccaacaatgtacaagttccctttttgctacacactcaccaacgcttgttatctttcatctttttgatagtctttctaacaggtgtgaggtgatccctcattgtggctttaatctgcatttccctggtgagtggtgatgatgagcattttaatatatatctgttggccatttgtacatcttttgagcaatgtttaggtcctctgcacatttttaaattgggttctttgttttcttgctattgagttgagttctttgtctattttagatattagcgccttatcagatatgtagtttgtagatattttctctcaatccatggcacatcttttgctctgttgtttctttgctgtgtataatcttttcagttagatgcaatctcatatgtttttgcttttgttgtcagtgcttttagggtaatatttaagaaatctttgcccagaccagtgttatggagcattttccctatgttttatttcagtagctttacagtttcaggttttatgtttaagtcattagtccatttttagttgattttggtgtatggtgtgagataagggtctaatttctttcttttgcatgtggttaacctgttttcccagcacaatttattgaggattgtcctctttccattgtatattcttggcacgtttgttgtaaataattgaccacaaatgtgtgggtttacttctgggctctctaccctgtttgattggttagttggtcggtttttatgctgtgctgttttggttacattagctttgtaacaggttttaaaatcaagtactgtgatacctctaggtttgttcttttcgctttggccatttggggttttttgtggttccatatgagttttaggattgttttattctgtgaagaatgacattggaatttcgttaggcattgcattgaatctgaatatcactttgggaagtatgaatagtttaacaatattcttgcattccatgaatatggatagctttccatgtgtttgtgtcatctactatatctttcatcagtgttttgtattttctagtatatacatctattgcctccttaaatttacttctaagttgctttttctcgatgctactgtaaacgggattgagttcttaatttctttttcaggtacttcattcttagaatagagaaacactgtagattttgtatcctgcaactttactgaatttgtttatcagacttaatggttttttggtgaagttgttagcattttctatatgtgagaccatgacatcagcaaacagatgatttctcttcttcctctgatatggatgcctttatttctttctcttgcctaatcgctcttgccaggacatctaactctgttgaatagcagtggcaagagcgggcattcttatcttgtttttgatcatagaggaaaagcttttacctttttccagggagcatggcagctgtgggcttgttacatatggcctttattgtgtataaacacaatatattccttctatacctaatgtgttgacagtttttatcatgaaataattttgagttgtgtcacatgctttttccatatctatttttttttattattatactttaagttttagggtacatgtgcaaaacgtgcaggtttgttacatatgtatacatgtgccatgtcggtgtgctgcacccattaactcgtcatttaacatcaggtatatctcctaatgctatccctccccacctcccccaccccacgacaggcgccggtgtgtgatgttccccttcctgtgtccatctgttctcattgttcacttcccacctgtgagtgagaacatgcgctgtttggttttttgtccttgtgatagtttgctgagaatgatggtttccagcttcatccatgtccctacaaaggacatgaactcatcattttttatggctgcatagtattccatggtgaatatgtgccacattttcttaatccagtctatcattgttggacatttgggttgcttccaagtctttgctattgtgaatagtgccgcaataatcgtacgtgggcatgtgtcttcatagcagcatattttgtaatccttttggtatatacccagtaatgggatggctgggtcaaatggtatttctagttctagatccctgaggaatcgccacactgacttccacaatggttgaactagtttacactcccaccaacagtgtaaaagtgttcctgtttctccacatcctctccagtacctgttgtttcctgactttttaatgattgccattctaactggtgtgagatggtatctcaccgtggttttgatttgcatttctctgatggccagtgatgatgagcatcttttcacgtgtcttttggcggtataaatgtcttcttttgagaagtgtctgttcatatcctttgcccactttttgatggggttgtttttttcttgtaaatttgtttgagttcattgtagattctggatattagccctttgtcagatgagtagattgcaaaaattttctcccattctttaggttgctgttcactctgatggtagtttcttttgttgtgcagaagctctttagtttaattagatggcgtttgtcaattttggcttttgttgccattgcttttggtgttttagacatgaagtccttgcccatgcctgtgtcctgaatggtattgcctaggttttcttctagggtttttatggttttaggtctaacatgtaagtctttaatccatcttgaattaatttttgtataaggtgtaaggaagggatctggtttcagctttctacatatggctagccagttttcccagcaccatttgtaaaatagggaatcctttccccatttcttgtttttgtcaggtttgtcaaagatcagatagttgtagatatgcggcattatttctgagggctctgttctgttccattggtctatatctctgttttggtaccagtaccatggtgttttggttactgtagccttgtagtatagtttgaagtcaggtagcgtgatgcctccagctttgttcttatggcttaggattgacttggcaatgcaggctcctttttggttccatatgaactttaaagtagttttttccaattctgtgcagaaagtcattggtagcttgatggggatggcattgaatctataaattaccttgggcagtgtggccattttcacgatattgactcttcctacccatgagcatggaatgttcttccatttgtttgtatcctcttttatttcattgagcagtggtttgtagttctccttgaagaggtccttcacgtctcttgtaagttggaatcctaggtattttattctctttgaagcaattgtgaatgggagttcactcatgatttggctctctgtctgttattggtgtataagaatgcttgtgatttttgcacattgattttgtatcctgagactttgctgaagttgcctgtcagcttaaggagattttgggctgaggcaatggggttttctagatatacaatcatgtcatctgcaaacagggacaatttgacttcctcttttcctaattgaataccctttatttccttctcctgcctgattgccctggccagaacttccaacactatgttgaataggagtggtgagagagggcatccctgtcttgtgcccgttttcaaagggaatgcttccagtttttgcccattcagtatgatattggctgtgggtttgtcataaatagctcttattattttgagatacgtcccatcaatacctaatttattgagagtttttagcatgaagggttgttgaattttgtcaaaggccttttctgcatctattgagataattatgtggttttactcgttggttctgtttatatgatggattacatttattgatttctgtatgttgaaccagccttgcatcccagggatgaagcccacttgatcatggtggataagctttttgatgtgctgctggattcggtgtgccagtgttttattgaggatttttgcatcgatgttcatcagggatattggtctaaaattctcttttttggttgtgtctctgccaggctttggtatcaggatgatgctggcctcataaaatgcgttagggaggatttcctctttttctattcattggaatagtttcagaaggaatggtaccagctcctctttgtacctctggtagaatttggctgtgaatccgtctggtcctggactttttttgtttggtaagctattaattattgcctcaatttcagagcctgttattggtccattcagagattcagcttcttgctggtttagtcttgggagggtgtatgtgtccaggaatttacccgtttctcctagattttctaatttatttgtgtaaaggtgtttatagtattctctgatggtagtttgtatttctgtgggattggtggtgatatcccctttatcattttttattccgtctatctgattcttctctcttttcttctttattagtcttgctagcagtctatcagttttgttgatcttttcaaaaagccagctcctggattcattgatttttttgaagggttttttgtgtctctatttccttcagttctactctgatcttatttcttgcctctgctagcttttgaatgtgtttgctcttgcttctccagttcttttaattgggatgttagggtgtcaattttagatctttcctgctttctcttgtgggcatttagtgctacaaatttccctctacacactgctttgaatgtgtcccagagattctggtatgttgtgtctttgttcttgttggtttcaaagaacatctttatttctgccttcatttcgttatgtacccagcagtcattcaggagcagattgtccagtttccatgtagttgagcggttttgagtgagtttcttaatcctgagttctagtttgattgcactgtggtctgagagacagtttgttataatttctgttcttttacatatgctgaggagtgctttacttccaaatatgtggtcaatttggaataggtgtggtgtggtactgagaagaatgtgtattctgttgattgggggtggagagttctgtagatgtctattaggtccgcttggtccagagctgagttcagtgcctggatatccttgttaactttctgtctcactgatctgtctaatgttgatagtggggtgttaaagtctcccattattattgtgtgggagtctaagtatctttgtaggtctctaaggacttgctttatgaatctgggtgctcccgtattgggtgcatatatatttaggatagttagctcttcttgttgaatgatccctttaccattatgaaatggccttctttgtctcttctgatctttgttggcttaaagtctgttttatcagagactaggattgaaacccctgcctttttttgttttccatttccttgtagatcttccttcatcctttattttgagcctatgtgtgtctctgcacgtgagatgggtttcctgaataccgcacactgatgggtcttgactctttatccaatttgccagtctgtgtctttttattggagcatttagcccatttacatttaaggttactactgttatgtgtgaatttgatcctgtcattatgatgttagctggttattttgctcattagttgatgcagtttcttcctagccttgatggtctttgcagtttggcatgtttttgcagtggctggtactggttgttcctttccatgttcagtgcttccttcaggagctcttttagggcaggcctggtggtgaccaaatctctcagcatttgcttatctgtaaaggattttatttctccttcactcatgaagcttagtttggctggatatgaaattctgggttgaaaattcttgtctttaagaatgttgaatattggcccccactctcttctggcttgtagagtttctgccgagagatccgctgttagtctgatgggcttccctttgtgggtaacccgacctttctctctggctgcccttaacattttttccttcatttcaactttggtgaatctgagaattacgtgtcttggagttgctcttctcgacgagtatctttgtggcgttctctgtatttcctgaatttgaatgttggcctgccttgctagattggggaagttctcctggataatatcctgcagagtgttttccaacttggttccattctccctgtcactttcaggtacaccaatgagacgtagatttggtcttttcacatagtcctatatttcttggaggctttgttcgtttcttttaattcttttttctctaaacttctcttttcacttcagttcattcatttcatcttccatcactgataccctttcttccagttgatcgaatcggctactgaggcttgtgcattcgtcacgtagttctcgtgctgtggttttcagctccatgaggtcctttaaggacttctctgcattggttattctagttagccattcgtctaatttttttcaagatttttaacttctttgccatgggttcgaagttcctcctttagctcggagtagtttgatcgtctgaagccttcttctctcaactcatcaaagtcattctccgtccagctttgttccgttgctggtgaggagctgtgttcctttggaggaggagaggcactctgatttttagagtttccagtttttctgctctgttttttccccatctttgtagttttatgtacctttggtctttgatgatggtgacgtacagatggggttttggtgtgcatgtcctttgtgtttgttagttttccttctaacagtcaggaccctcagctgcaggtctgttggagtttggtggaggtccactccagaccttgtttgcctgggtatcagcagcggaggctgcagaacagccaatattggtttataccaaatgttgctgcctgatcattcctctggaagtttttgtctcagaggagtacctggccatgtgaggtgtcagtctgcccctactggggggtccctcccagttaggctactcgagggtcagggacccacttgaggaggcagtgtgtccgttctcagatctccagctgcatgctgggagaaccactactctcttcaaagctgtcagacaggtacatttaattctgcagagatttctgctgcgttttgtttggttatgccctgcccccagaggtgagtctacagaggcaggcaggcctccttgagctgtggtgcgctccacccagttccagcttccctgtggctttgtttacctactcaagccttggcaatggtggctgcccctcccgcagcctggctgctgccttgcagtttgatctcagactgctgtgctagcaatgagccaggctccgtgggcgtaggactctccgaaccagttgtgggatataatctcctggtgtgccatttgctaagaccgttagaaaagcgcagtattagggttggagtgacccgattttccaggtgctgtctgtcactcctttctgtgactaggaaagggaattccatgaccccttgcacttcccgggtgaggtgatgcctcgccctgcttcggcttacgctgggtgcactgcacccagtgtgctgcaccctctgtccaacactccccagtgagatgaacccaatacctcagttggaaatgcagaaatcacccgtcttctgcgtcactcacgctgggagctgtagactggagctgttcctgtttggccatcttggctccacccctttccatatctattcaggtgatcatatggattttgtcttccattctattaacgtggtgtatcacatttatttatttgcatatgttgaaccatctttgcatcccaagggtaaatcccacttgatcatgtgaatgatccttttaatgtgctgttgaattcagtttattagtatattggtgatttttgcatccttgttcatcaaagatgacatggtagcttggattacaggcgcccgtcaccatgcccaactaatttttgtatttttagtagagacagggtttcaccgtattggccaggctggtcttgaactcctgacctcagttgatccacccacctcggcctcccaaagtgctgagattacaggtgtgagccactgcacctggcctgcggtattttcttttaggacatttaacagatgtatttgattactgataagactttccatattaagttgatagtactttttattcttgtctgggtttttataatttattttattggtatcttccaagaagcatttgctatggtttgaatgtcctctccaaaactcttgttgaaatttaattaccatggtgacagtattaaaataggggactaatatagtttgagtctgtgtccccgcccaaatctcatgttgaattgtaatttccattgttggaaatggggcctggtggaaggtgactggattatgggagtggatttctcatgaatggtttagcaccaaaacccttggtactgtcctcacaatagtgagtgagttcttatgtgagctgataatttaaaagtgtgtagtggtcaggcactgtgtctcctgcctgtaaccccagcactttgggaggccaagatgggaggatcagttgagcccaggagtttgagaccgacctggccaacatagcaagacctcgtctctattaaaaaaaattaaaataaataaatacgtaaaagtgtgtagtactgcccactttgctctcttgctttcaccatgtgaagtgtctgcttcctcctccccctgctttcaccatgtgaagtgcctgcacccactttgcctcccaccatgagtgaaagctccctgaggtgtccccagaagcatatgccaccattcttcctgtacagcctgcagaactgtgagccagttaaacctcgtcttttataaattacccagtctcaggtatatctttataccaatgtgagaatggtatacattaaaagaatggtatatattaaaagaaccttttaatggttcctgtattaggattaggccatgagggccttgccctcatgaatagattaatatcattatcacagtagtgggtttgttaccacaagaatgtgttgttataaaaattttctgtcccttgctctcaccctcacttgtcgttctgctttctgccatgggaaggtgtaggacaaaggtcctcaccaggagccagcaccttgatattggaattttcagcctccataactatgagaaataaacttcttttctttgtaagttacctatcttgtggtattctgttaaagcaaagcaaagtggactaagacaccatacctacagagggcagcagagacatagcagtgaattctcataacctaatttttcaggaagtgtgaaggaaattggatttaggtgaactttgttatgtcattcttatatactttatgtagtgactcctatgcaaatacaggctaatagacataatcaatgtaaagtaatgtgagtgagactcaggcacatttgtgagaaggtaaacaacaagctggctggcacagataagagatctgaaagtagttcatgtagttttaaaggaaaagtaaatgtggctttcaaatttgaaatacggattcatttttatgaaacagatattttgtttgtattcttatcagtaagggtagaaaaaatgattcagtaactcatagaagatggaattacggaaaagtttaaaaaaacaggaataaacaaaattttgtactacatgggagtgtattataatcttgcagaaagtgatctgacaaacctttaaaaacatttctaaatttaatgtgcatatgtataattttctgtatttttacttatttatataaatttttgaaaatcagttttgcttttaatcggttttaatagtgagttagaataaaatgatatgactagatgtgtactaattgttaatgcctaagaactgcccattgttttcatcttttttcccaatgttttacattttaaaatacacataacataaaatttactattttgaccattttaaaatgtgcaattcagtggtattgagtatcttcataatgttgtgtaactaccatcaccaccttctatctccagaactcttttcatcttgtaaaattgaaattctgtactcattaaacagtaactcctccttctgtctttccctagctcctggcaaccaccattctactttgtgtatgattttgactactgtaattacctcatatgaatagaatcatacagtatttgtttttctgtgactggtttatttcacttagcataatatccttaaggttaatccatgttgttagaattttttatttttattttttgagatggagtctcactctgttggccaggctggagtgcagtggtgcgatcttgactcactgcaacctccgcctcctgggttcaagtgattgttgtgccttggcctcctagtatctgggattataggcgcacgccaccacgcctagctaatttttgtatttttactagagacagggcttcactatgttggccaggctggtcttgaactcttgacctcaagtgatccgcccacctcagcctcacaaagtgctggggttacaggcatgagccaccgagcccggctagaatttccttctttttaaaggctgaataatattccattgtatgtttataccacattttttacttaatttgtgacctaacatatggtctatcctggaaaatgttctatattcacttgagaagaatatgtatgctattgttgggtacagtgttgtgtatatgtctgtcagatctagttggttattgtctgaggtcctctgtttccttacttatcttcgatctggttattctatccactattgaaagtagggtattgatttaatcatctgttatttagaaaggtctgtttctcccttcagttgtctgtttttccttcatgtatttttgaggtcttttaattggtgcataaatgtttataatttttgtcttcttgttgtatcaaatcatgtattcatatataatgtcctttgtctcttgtaaccttttttgatttagactgttttctctgttgttagtatagccacctctactctgttctggttagtatttgcatggaatatctttttctgtcttttaattttcaaactgtgtctgtcagtctaaagtaagtctagtataggcaacatatggttgaatcctcctccattctgtcaatctctgtcttttgattggagagtttaatccatttgaatttaaattatttgtacagaaggatttctgtcattttgttgtttgttgtttacataacttactgctttttgtgggggccctcatttcctgcattactgtcttcttttgtgtttacttgatttttttcatgaaatgtttaaattcctttcttctttctttcttcttttttttttttaatggagtctctatcgcccaggctggagtgcagtggcatgatcttggctcactgcaacctctgcctcctgggttcaagcagttatcctgcctcagcctcctgaggctgggattacaggcatgtgccaccacgcctggctcatttttgtatgtttagtagagatggggttccacaatgttggcccagctggactcgaactcctgacctcaggtgatccacccaccttggcctcccaaaatgctgggattacaggtgtgagccaccgcacccagcctcttttctcatttcgtttttttttttttttttttttttgagacagagtctcactctgtcacccgagctggagtgcagtggcacagtctcaactcactacaacctctgcctcccgggttcaagcgattctcatgcctcagcctccctagtagctgagattacaggcgtgtgccaccatgcccggctaatttttgtatttttagtagagatggggttttgccatgttggccaggctggtctcaaactgccaacctcaggtgatcttcccgccttggccttccatagtgctgggattacagtcatgagccactgtgcccgccctagtactttgaacaactttaaaacagttgtcataaagtctttctctggaaggtctgccatcaggtctttttcaaggacagttgtgttgttttatttttttttcttttgaatgtgtcatactttcctgtatatcttgttatttttttgttgaaaacagggcatttgaatataatgatgtggtaagtctggaaattagattctccctcttccccagcatttgctgtttgttttgttttgttttgaggcagagtctcactctgttgcccaggctggagtgcagtggtgtgatctcggctcactgcaacctctacctcctgggttcagccgattctcctgcctcagcctcccaagtagctgggattacaggtgtgtgccaccatgcccagctaatttttgtgcttcttagtagagatggggtttcgccatgttgcccaggctcgtctcaaactcctgacctcaggtgatctgcccacctcagcctcccaaagtgctgagattataggcatgagctaccatgcccggcctgctgttttttttttttttttctaatgttactgtttttgtttatttttattgtttgaggcttgtctgtatgtgaaggatcagcctgaggtgtaagcttaagattctctgagtcttttctaagcctgagtttttctccaggaatgtgcaggaagtttctaatttttcccttatatacagttgctttcaaatgccgtagtctttaacatctgactcccaaaagggaaaaagagaaaaactaaatcctttaaatccccagcagttactttgtgggtgggggtggggatgggggtgggagagggcttgtaacagtgagtggagatgaagcaacaatgtgtgtccacctctttgtcccatttctgtgatcagaagtagcattcagtgatcagggcacacatgccctatatttggaagagagggtcctttttgcctgtccttggttcctgtaagctgcgcgcaagctgctccttggaatgcatgcacaactgcctgccttggggctgagggtggcaaatggatagctgctactgtgctagtgctaatacctgcaagtgattaaaattatattcaggccttcccctggacattaacaagccttcagtagattccagagtttcaaaatagttaaatagaacagattctgccagtgcaatgatcttctaggtggagcaacacatgcgtggtgcttcctactccaccatcttcccagaatcctctgattgcgtataagttacctatagttgaaagagtttaattctgatcatcatacattttagaaacctctcatatatgtttatataaaaactgataaaatttagtgcttgtaaagggaaatctggagttcttagtcaagctttttgtatgattatattttaaagatttaattatagaaacattgtactgaagtctatattccagtgtgttcttatggtaaaaagaaaaggttggagattttattgaggagtctgtatttttttactgttattttatattataactcatgtattatatactgtatctgttcattatcttagtatagcattttcgggcttttattctctttatgaaagtgagtaactgtaggtaccaatatcaattgttgcatctgtgccagaaattatattttatcttttcatcatctcccttcttgtatagctgaactttagcttaaaagatgccaggacaaggagtttgtcagattgttccttttctttgcatgaaccttcttcccctttcagtatcactgggtcatcttatttcccttcattcccctctttcttctccatcttttcatttcccaaatacttctgttttctgatataagaaggactataacagaaaatgattgctttaggaaatattgttacaactgtgtaatgttaaaaagtagtaagttggccaggcacagtggctcacgcctgtaatcccagcactttgggaggctgaagtgggcggatcacgaggtcaggaggtcaagaccattctggctaacacagtgaaaccctgtctctaaagaataccaaaaaaaattagccggacatggtggcgggcgcctgtagtcccagctactcaggaggctgaggcaggagaatggcgtgaacccgggaggcagagcttgctgtgagccgggattgcaccactgcactccagcctgggcgacagactctgtctcaaaaaacaaagtaataagtcggccagcgctgtggctcacgcctgtaatcccagcactttgggaggccgaggcaggcagatcacgaggtcaggagatttgagaccatcctggctaacacagtgaaaccccgtctctactaaaaatacaaaaaattagccgggcgtgttggtgggcgcctgtagtcccagctactcgggaggctgaggcagaagaatggtgtgaacccaggaggtggaggtcgcagtgagctgagatcgcgccgctgcactccagcctgggtgacagaacgagactccatctcaaaaaaaaaaaaaaaaaaaagtcactatggatgtcacttttgtagtcttctggtattataaacaattctttggagttgtgcttttaataattacagaggggcacatgtcggactacctttcctgaaaataacaatgacaacttttggacaaaatataaaaaaagtatgtgaaagcacagtaggaggacagaaagtaggaagaaactgaaggatgttgacatttggaagatagaatggtataagatgagcatttcattttttgtggatgtttcccagaggacagaactcggtcattggttgtgtaggtgacggaagcttgaataaaaaccacaagacagagttaggggtgactctagcagctagaaagttagtgagtataaagtagtctttcataaagaagggtgtcccaaattctgcataaaagtcttaggctaaaataactaaagatatttcatttgcacaagaaagagttcagaggtgtatagccaacttacctacctattaagcaaaaaaaaactaaatagtcttcagaagaacataatcaaatccagagtttctaaaaatgtactatgcacagtgtccagaatacaatccatattcagtagacacacacatacacaaacagaaaaatgtgacccatacttaagtgaaaagccaattaattgagactggccttgatatgactcctatgttagaattagcagctgttataactcttcttaaggttatataaagaaaatatgtacaccatgaataaacagataagaaacctcagctgaaaaatggaaactaggtaaaaggactaaatgaaaattctataggtaaaaaatacaatatttcaaatgaaaactgattagagattacagaagattaggaaaagaaaaggagtcattgaagttgttggattcatagaagttattctttcttaaaaagtgaaaaagagatttcaaaaaatgaagctagcctcagtggctggtaggacaatatcaaaaggtctaacacttggagtcctagaaatagaggccaggggaaattgggtcaaaaaattctggagaaattatggctggaaatttccctaaattggtaaaaaacatgaatttacatgttgaagaagttcagtgaattccaaacaagataaatacaataaaataacacttaagtacattatagtgaagctgttgaaaataatagacaaaaaatcctgcctagttgcagtggcttatgcctgtaatgccaacacttggggaggccaaagaggggtattgcttgagctaaggagtttgagaccagcctgggaaacgaagtgagacttcatctctacaaaaagaaaaaaatcttgaaagcaccctgagaaatgctaatgaatggtagctgacttctttttttttttatattattattatactttaagttttagggtacatgtgcacaatgtgcgggtttgttacatatgtatacatgtgccatgttggtgtgctgcacccattaactcatcatttaacattaggtatacctcctaatgctatccctccccacttcccccatcccacaacagtccccggagtgtgatgttccccttcctgtgtccaagtgttctcattgttcagttcccacctatgagtgagaacatgcggtgtttggttttttgtccttgcgatagtttgctgagaatgatggtttccagtttgatccatgtccctacaaaggacatgaactcttcattttttatggctgcatagtattccatggtggatatgtgccacattttcttaatccagtctatcattgttggacatttgggttggttccaagtctttgctattgtgaatagtgccgcagtaaacataggtgtgcgtgtgtctttatagcagcatgatttatagtcctttgggtatatacccagtaatgggatggctgggtcaaatggtatttctagttctagatccctgaggaatcgccacactgacttccacaatggttgaactagtttacactcccaccaacagtgtaaaagtgttcctgtttctccacatcctctccagcacctgttgtttcctgactttttaatgatcaccattctaactggtgtgagatggtatctcattatggttttgatttgcatttctctgatggccagtgatggtgagcattttttcatgtgttttttggctgcataaatgtcttcttttgagaagtgtctgttcatatccttcacccactttttgatggggttgtttgtttttttcttgtaaatttgtttgagttcattgtagattctggatattagccctttgtcagatgaggtaggttgcgaaaattttctcccattttgtaggttgcctgttcactctgatggtagtttcttgtgctgtgcagaagctctttagtttaattagatcccatttgtcaattttggcttttgttgccattgcttttggtgttgtagacatgaagtccttccccatgcctatgtcctgaatggtattgcctaggttttcttctagggtttttatggttttaggtctaacatttaagtctttaatccatcttgaattaatttgtgtataaggtgtaaggaagggatccagtttcagctttctacatatggctagccagttttcccagcaccatttattaaatagggaatcctttcccgaaaactggcacaagacagggatgccctctctcaccactcctattcaacatagtgttggaagttctggccagggcagtcaggcaggagaaggaaataaagggtattcaattaggaaaagaggaagtcaaattgtctctgtttgcagatgacatgattgcatatctagaaaacaccatcatctcagcccaaaatctccttaagctgataagcaacttcagcaaagtctcaggatacaaaatcaatttgcaaaaatcacaagcattcttctagaccaataacagacaaacagagagccaaatcatgagtgaactcccattcacaattgcttcaaagagaataaaatacctaggaatccaaacttacaagggacgtgaaggacctcttcaaggagaactacaaaccactgctcaatgaaataaaagaggatacaaacaaatggaagaacattccgtgctcatgggtagaaagaatcaatgtcgtgaaaatggccatactgcccaaggtaatttatagattcaatgccatccccatcaagctaccaatgactctcttcacagaattggaaaaaactactttaaagttcatatggaaccaaaaaagagcccgcattgccgagtcaatcctaagccaaaagaacaaagccggaggcatcacgctacctgacttcaaactatactacaaggctacagtaaccaaaactgcatggtactggtaccaaaacagagatatagatcagtggaacagaacagagccctcagaaataatgccacatatctacaaccatctgatctttgacagacctgacttcttatcagaaataatgcaggccagcaggctataaacacctttaaagtactgggaaaataaaaatcaactcagaattctgtagccaaataagaaaacatactttctagctaagaaaatctttatactacaagaaatgtttaaggagatacttcaagctgaaggaaagtgttaccagctgaaactcagaacttcaggaatgaagagcactgcaattggtaaaaatgtaagtcttccccactccattaagaaatatacagttgtgactgtttaaagcagaaattataatgttacaatatggcatttatatatgactgctgtgtataaaggatgagtctaggttgatggagctgtgtgcttactgtggtctttattttatgaaggggtagaattagctttaagtacactgcaaagttaaagatatacattataattcctagaacaaacactggaaaagaaaaaaatgcaaagaggtgataactaaaaaacaagagaagtcaaaatggaattctgaaatgtatttagagaaaatgaaaaaaggtataaaggaaggaacagcagaatataaaacaaatgagatgtgtgtcagtctgttctcatactgctaataaagacatactcgaaactgggtaatttatgaaggaaagaggtttaattgacccagttcagcatggctggggaggcctcaggaaacttacaatcatggaggaaggggaagcaaacatgtccttcacagggtggcagcaaggaacagaatgagagcaaagttgggggaaagccccttataaaaccatcagatctccttagaactcactcattatcacgagaatagcatgagggtaactgctccatgatgcagttacctcccaccaggtcccttccacgacgtgtgaggattatgggaactacaattcaagatgagatttgggtggagacacagccaaaccatatcaggatgtaaagaaaacaaatagcaaacttacaaacctaggtcaggtctatgaataattaccttaattgaaaatagattaagtgttttatttgaaggtagagattcatacattggatagaaaacaagacttcctgtattctgtctaccagagatgcattttaaaaataatgacacagatagattgaaagtaaatgtatgaggaaaggtgtagcatgcaaacagtaagtataagatggagttgttatattaatattagataagtagacttcaagacagtactggagataaagaagggcatttcatagtgataaaactcattagaaatacatagtaatcataaatttgtatatacctaataagatctacagtcataggtggaaattttaacactactctgtaacttatagaaaacctagacaaaaaatcagttagaatatagaagatctgtaaaaatacttcagccaccttgacctaactgacatttgtagaatatcatgggcaactaaaatagagtgtacattctattcaagtacacatgatatgcataccgagataaataatatatgggtcctaaaacatgtctcactacatttcaaaagtttgaaatcctaaagagtatactctgtaactacagtagaatttaaagtagaaaccaatagcaataagatattcaggaaaaatctgaatatttggaagttaaacagcacagttatccctagtcgatctatgaatttaatgtggttcaaatcattttcttagcaggacttttctcttttggtagaaattgacaagctgattataacgtttatatgaagatagaaaggacctatgttatacaaagcaatcctgatgatttacaaggtggaaaacttaaatttccttatttcaagatttactctaataatacagtaatgaagactgtgatatcagcataaggatataaaagcatataaatggagcagaacagataactgataaattatttttaacaaagacagctatccaatgagggaaaagaaaggcttttaaataaaaagtgctggaacaactagacatctgtatggatgaaagttcaccttgactccctacctcacatggtacccaaaagataaatcaagatgaatcatagatctatatgttgaagctaaagtataaagcttttagaataaacaaagaacaggcaaaggtttccttgataggatacagaaagcagcaactgttttaaagaaaacacctaacactctataaacttcttcaaaataaaaaacttctgctcattaagagacatgaagaaaataatagcaaaacctgtatctgtaaaggacttgtattaagactatgtaaagaaattctacaactgaacaatgaaaatacaacttgattaattggagaaggattagtacacacacttcataaatgatgctatattgaatggccagtgaacacatgaaaatgttactaaacatcgtcaattattaaggaaatacaaaagtaaactgcaaggaggtgctgctttacttgtcccattagcttaaagagtaatactaccatatatgtagagcaatgagaactcttataaaattaagagtttttctaccctaacccatgacttagcaattctactcctagttatttacttaatagaaaaagaaaacacatctacaagatttgttcaaaagtgtttataataggccgaaactggacacagctcatatacccaccagttggagactggatcaacaaataggtatagtcataaatggaatacaacttagcaatgataaggaacactgtcttggtacatcaacaacataatgaatttcaaatacatggtaggtgaaagaaaccttacacaaaagagtacattctgtattccatttacatcgagttctagaacaggcaaaattgatacataatggaagaaaaagcagtgctgtcttcgatagtggggtggggattaattgcgaaaagtcttagaggaacttgctgggtgataggaagtattttatttcttgtttggagtttgagttcagtgctatatgtatatgttaaaacttatcaaatggtgtgtcttttattgtatataaaacctactgaaaaaagtaaatacatattaatagaaatatacattgaattcttgttattgatgttcatgctgagatataatgggatgatgtgtactgtcatctgcaactttgaaatgcatcgaaaagtaagatggattggtggagccaagatggctgaatgggaacagctccagtctagagctcccagcttgagcgacgtagaagacgagtgatttctgcatttccaactaaggtactgggttcatctcactggggagtgtcggaaagttggtgcaggacagtgggtacagtgcacccagcgtgagccgaagcagggcgaggcatcacctcacccaggaagcgcaaggggtcagggaattccctttcctagatggagaaagggatgacagatggcacctggaaaattgggtcactcccaccctaatactgcgcttttccaatggtcttagcagatggcacaccaggagattgtatcccacgcctggctcggagggtcctacacctgcggagcctcgctcattgctagcacagcagtctgagatcaaactgcaaggcagcagcgaggctgggggaggggcgcccaccattgccaaggcttgagtaggtaaacaaagccacagggaagctggaactggatggagcccaccacagttcaaggaggcctgcctgcctctgtagactccacctctggaggcagggaataaccaagcaaaaggcagcagaatcctctgtagacttaaatgtctgcagcttcgaagagagtagtggttctcccagcacgcagctggaggtctgagaacagaaagactgcctcctcaagtgggtccctgacccccccgagtagcttaactgggaggcaccccctagtaggggcagactaacacctcacatggccgggtactcctctgagacaaaacttccagaggaacaatcaggcagcaacatttcctgctcaccggtatccgctgttctgcagcctccactgctgatactcagggaaacagggtgtggagtggacctccagcaaactccagcagacctgcaactgagggtcctgactgttagaaggaaaactaacagaaaggatatccactccaaaaccccatctgtacgtcactatcatcaaagacccaaaggtagataaaaccacaaagatggagaaaaaacagagcagaaaaactggaaactctaaaaatcagagtgcctctcctcctccaaaggaacacagctcctcaccagcaacggaacaaagctggacggagagtgactttgacgagttgagagaagaaggcttcagacgatcaaactactccgagctaaaggaggaagttcgaacccatggcaaagaagttaaaaaccttggaaaaaaacgagacaaatggctaactagaataaccaatgcagagaagtccttaaaggacctcatggagctgaaaaccacagcatgagaactacgtgacgaatgcacaagcctcagtagccgattcgatcaactggaagaaagggtatcagtgatggaagatgaaatgaatgaaatgaagtgagaagagaagtttagagaaaaaagaattaaaagaaacgaacaaagcctccaagaaatataggactatgtgaaaagaccaaatctacgtctcattggtgtacctgaaagtgacagggagaatggaaccaagttggaaaacactctgcaggatattatccaggagaacttccccaatctagcaaggcaggccaacattcaaattcaggaaatacagagaacgccacaaagatactcgtcgagaagagcaactccaagacacgtaattctcagattcaccaaagttgaaatgaaggaaaaaatgttaagggcagccagagagaaaggtcgggttacccacaaagggaagcccatcagactaacagcggatctctcggcagaaactctacaagccagaagagagtgggggccaatattcaacattcttaaagacaagaattttcaacccagaatttcatatccagccaaactaagcttcatgagtgaaggagaaataaaatcctttacagataagcaaatgctgagagatttggtcaccaccaggcctgccctaaaagagctcctgaaggaagcactgaacatggaaaggaacaaccagtaccagccactgcaaaaacatgccaaactgcaaagaccatcaaggctaggaagaaactgcatcaactaatgagcaaaataaccagctaacatcataatgacaggatcaaattcacacataacaatattaaccttaaatgtaaatgggctaaatgctccaataaaaagacacagactggcaaattggataaagagtcaagacccatcagtgtgcggtattcaggaaacccatctcatgtgcagaagacacacacaggctcaaaataaaggatggaggaagatctaccaaggaaatggaaaacaaaaaaaggcaggggtttcaatcctagtctctgataaaacagactttaaaccaacaaagatcaaaagagacaaagcaggccattatgtaatggtaaagggatcaattcaacaagaagagctagctagcctaaatatatatgcacccaatacgggagcacccagattcataaagcaagtccttagagacctacaaagatacttagactcccacacaataataatgggagactttaacaccccactatcaacattagacagatcagtgagacagaaagttaacaaggatatccaggtattgtactcaactctgcaccaagcggacctaatagacatctacagaaccctccaccccaaatgaacagaatatacattcttctcagcaccacaccgcacttattccaaaattgaccacatagttggaagtaaagcactcctcagcaaatgttaaaagaacagaaattataacaaactgtctctcagaccacagtgcaatcaaactagaactcaggattaagaaactcactcaaaactgctcaactacatggaaactgaacaacctgctcctgaatgactactgggtacataacgaaatgaaagcagaaataaagatgttcttggaaaccaacgagagcaaagacacaacataaccagaatctctgggacacattcaaagcagtgtgtagagggaaatttatagcactaaatgcccacaagagaaagcaggaaagatctaaaattgacaccctaacatcacaattaaaagaactagagaagcaagagcaaacacattcaaaagctagcagaaggcaagaaataactaagatcagagcagaactgaaggaaatagagacataaaaaacccttcaaaaaatcagtgaatccaggagctggtcttttgaaaagatcaacaaacttgataggctgctagaaagattactaaaagagaaaagagagaagaatcaaatagatgcaataaaaaatgataaaggagatatcaccactaatcccacagaaatacaaactaccatcagagaatactataaacacctctacgcaaataaactagaaaatctagaagaaatggatacattcctggacacatacaccctcccaagactaaaccagaaagaagttgaatctctgaacggaccaataacaggctctgaaattgaggcgataataatagcttaccaaacaaaaaaagtccaggactggatgaatttacagccgaattctaccagaggtacaaggaggagctggtaccattccttctgaaactattccaatcaatagaaaaagagggaatcctccctaactcattttatgaggccagcatcagcctgataccaaagcctggcagagacacagcaaaaaaagagaattttagaccaatatccctgatgaacatggatgcaaaaatcctcaataaaatactggcaaaccaaatccagcatcacatggaaaagcttatccaccatgatcaagtgggcttcatccctgggatgcaaggcaggttcaacatatgcaaatcaataaacataatccatcatataaacagaaccaacgagtaaaaccacatgattatctcaatagatgcagaaaaggcctttgacaaaatttaacaacccttcatgctaaaaactctcaataaattaggtattgatgggacgtatctcaaaatagtaagagatatctatgacaaacccacagccaatatcataatgggcaaaaactggaagcattccctttgaaaactggcacaagacagggatgccctctctcaccgctcctattcaacatggtgttggaagttctggccagggcaatcaggcaggagaaggaaataaagggtattcaattaggaaaagaggaagtcaaattgtccctgtttgcagatgatacgattgtatatttataaaaccccatcgtctcagcccaaaatctccttaagctgataggcaacttcagcaaagtctcaggatacaaaatcaatgtgcaaaaatcacaagcattcttatacaccaataacagagaaagagagagccaaatcatgagtgaactcccattcacaattgcttcaaagagaataaaacacctaggaatccaacttataagggatttgaaggacctcttcaaggagaactacaaaccactgctcaatgaaataaaagaggatacaaacaaacagaagaacattccatgctcatggacaggaagaatcagtatcatgaaaatggccatactgcccaaggtaatttatagattcagtgcgatccccatcaagctaccaatgactttctgcacagaattggaaaaaactactttaaagttcatatggaaccaaaaaagagccggtattgccaagtcaatcctaaggtgaaagaacaaagctggaggcatcgtgctacctgacttcaaactatactacaaggctgcagtaaccaaaactgcatggtactggtaccgaaacagagatatagagcaatggaacagaacagagccctcagaaataatgccacatatctacaaccatctgatctttgacaaacctgacaaaaacaagaaatgggaaaacgattccctatttaataaatggtgctgggaaaagtggctagccatatgtagaaaagtgaaactggatcccttccttacaccttatactaaaattaattcaagatggattaaagacttaaatgttagacctgaaaccataaaaacccaagaagaaaacctaggcaataccattcaggacatgggcatgggcaaggacttcgtgtctaaaacaccaaaagcaatggcaacgaaagccaaaattgacaactaggatctaattaaacgaaagagcttctgcacagcaaaagaaactaccatctgagtgaacagcaacctacagaatgggagaaaatttttacagtctgctcatctgacaaagggctaatatccagaatctacaatgagctccaacaaattttcaagaaaaaaacgccatcagaaagtggtcgaaggatatgagcagacacttctcaaaagaagacatttatgcagccaaaagacacttgaaaagatgctcatcatccctggccatcagagaaatgcaaatcgaaaccacaatgagataccatctcacaccagttagaatggcagtcattaagaagtcaggaaacaacaggtgctggagaggatgtggagaaataggaacacttttacaccgttggtgggactgtaaactagttcaactattgtggaagtcagtgtggcgattcctcagggatctagaactagaaataccatttgacccagccatcccattactgggtatatacccaaaggattataaatcatgctgctataaagacacatgcacacgtatgtttattgggggactattcacaatcgcagagacttggagccaagccagatgtccaacaatgatagactggattaagaaaatgtggcacatatacaccatggaatactatgcagccataaaaaaggatgagttcatgtcctttgtagggacatggatgaaggtggaaaccatcattctcagcaaactatcagaaggacaaaaaaccaaacagcgcatgttctcactcataggtgggaattgaaaagtgagaacacaggggcacaagaaggggaacatcatacgccggggcctgttgtcgggtgggggcagggtggagggatagcattaggaggtatacctaatgttaaatgacgagttactgtgtgcagcagaccaacatggcacatgtatacatatgtaactaacctgcacattgtgcgcatgtacccgaaaacgtaaagtataataaaaaaagaagaagaagagaaaaaaaaaagaaaagtaaggtggattaatggatagagaaatgtgataaactgtcatagctaaataataacaattgtaaagccttggtgatgtatatattggtttttgctagtatctctaaaaaatttctggtcgaaatttgcataatattctgtgtgaaaaatcttctcagggaacatagacctgtgttattgtatttatgtaagtagttgtcatataattcttttatcttagagaatctgaagtttccaatgtgagtgtacagtgtctcaccaccacctgagtttatttctggttgttgtaatgcagtacaattgataatgaaatttttttgatgtttttgccgtagacatggaatgtatagtgctctagcttttactttttgagagacagaaaaaggccctgagcattggtgttgtgtcagtcatcctaggctcagatctccattctacctctcactgaatgcttggccttaagcaggtatttaacttttttttagatccaattggtttgtctgttaaatgccttcagtaacgtattcctcacatagttgctttgaagattggtgagtcatggcacagcacacagctgaacatagaagacattcaagcaatgccagattcctttagggtgcaggtagacattcctagggtttgtaatagatttagaagtagaattagtcttctacttcttcagatctcctttgaggtctgagtgactacagaacccatggacacctttatttacgaaatgctgtgtttctggtgtctaaggcctgattgcatcttgattggaaactattagttaaacatttataagaaataatactgtaacttttgtttaagctaaaaattattttcttgaattttagtttattggtcttagttaatactataacctttacagtgctaaaaagttataatccaattgtgttctctggtgacattaactgaaatacatgttcttttctagagaccttattctgtaaatcataataaaaaatttcttatgaaattaagtctttatagatacctcatttaattcttaccattctattaataaaatacatttttatattacttatatgtattgagtatcttgtctgaaatcacacaactagaaagtagaaagttgtcatttgaacacaactctgtgtgattcttaaccttgttttcttagccattttgctgaatggcctttccttctttcccctatcccccatcccccatcccccatttccatgtatgtgtctgttgtcattctctactagctttttcttcttatgtacaaataggtcagatgtctacatttaaataaacagcatctttaaccctgctgctcccatactcaagacaaattgacaagtatgttattatctgtgctgtgaagtgaaattagatcttttgatttcaacatcaaaaccttataagatgttttatcttttttagaagtccttaatcacaagttagagcaattaacacctatattactaataatatttccagtagtatggatgctttggttatggttaaatggttctgaaatctacacctgagatgcttcccttaaaggggctctttggccagttcaccaattacttggaagaggaagaggaagtctaggttgattatattgctttgagttagaatatctgagaaagtggtacttatattagtttgctagtgctgcgatgataaagtactacatactggatggcttcaataacagaactttattttctcacagtcctagaggctggaagatcgtctgggacaagtccaggtgctggcagggttgatttctcctgaggcctctctctgtggcttgcaaggtggctgtgtcttgacatggcctcttctctgtgtgtccctcccccttcttataaggatgtcagtcagattggattagggcccaccctaacggcagcattttaacattcacttatttaaagaccttatctctaagaacattacattctgaggacctgagactttcagtgtataaatttgggaggacacaatttagcctataatagtgctataaagagaagttcaaaaatgaagatggagattttattttttaagcaaaaaaataagtttgcttttagagtgttaaattgggaatgtacactagatagttgatgttgtcacttgggatttggaagagaacacaaggttggttgcttgatttggaaagcatttgcttagaggtagtatattaaaattagagcaacataaggaaattgatttttctccacatttctgggacaagaggaaaaagtagtataagtaatcgtaaaaaattcttagaaagtatgaagaaaggagcccacaagagaaatttgaaggataagatttgtttctcatggacttatttcagttggtcagtctattttcctttttttaaatgccagaaaatttaaaacatcaattgtaatgaaaatgtttttcagattagaaatattttggaaggaatttacttaaaacaagttactgatctaaccaacttcttgagttccaaagccatggagacatcttatggtgctccagacaatctatccctttttctgtccctggcagctgtagcttcaacattcgagacagagttatgtgagatttgtgctctttctttgagagtggaggactcttctgggcatgggtgcctgatgtcctgaggtgggatcattgcctcctctttctgttttccccaaatgcctctgcaatgactaggttgttgaaattttcctggccctaagcactattttaggggatctaagaggaagaaagaagtcttccagcacacctaaaggtgacaggaagataatggcaacttgactgtcctttcttttgaccatctctatctttttccaaaataagcttcatccatgctttttttttcttttaagacagggtctggctttgtttctcacaatggactgcagtggtgtgatctcacagctcactgcagcctccacctccccagtctcaggtgatcctcccacctctgcctccgaagtagctaagactagtggtgcatgccaccacgtcctgctcgtttctgtatttatttatttattttatttttttctagagaggcaaggttttgccatgttgcccagactggtctgaaattcttgagctcaagccatctgcctgtctcagcctcccaaagtgctgggatttcaggcatgagccaccacacctaatttcttttatgtaataatggaaaatgcaactcttttctttaaagaatgtttgctttcagccttgccacgtacatacacatctttagcaacatccagtttgttaccaggtctctcagtttactttttaaaaattttactttattgaggtgaaattcacatagcatcaaattaacattcaaaagtgaataattcagtggcacttggtggattcacaaagttttgcaactaatacctgtatctcattctaaaacatttcatcactctgcaaggagacactatactattaagcatccattccgtattccccacctcatctcagtccttggtaacaccagtctgctttctgtctctgtagttttacctgttctgttatttcacataaatggaaatcatatagcatgtgaccttttgtgtctggcttcttaacaaaatgtttttgaggttcctccacattgtagcatgtatcagtacttcattcctttttatagctggataatgttccattgaatgtatatgccacacgttgtttagccattcatccactgatgtgtatttatttcctccctttggctactgtgaatagagctgctagaaccctggtttacacatttcggagtacctgttttcagttctcttggatatatatgaaggagtgaaattgctggactatatggtaattttatgttactctttgaaaaactacctgttttctgcaatgactgaaccattttacattcctgttagcaacgcacaaaggtttcagtttctccacatcccttgccagcacttacattatggtctcttctacccacttaaaaaaaaaatcctagtggctgtgaaatgataccttattaaggttttggtttgcaattctctaatagctaatgatgatgagcactgtttcatgtggtggttggtgatctgaatatcttcttggaaaaaatatctattcaagttttttgttgatttctttttctggttgtgttataagagaatgatctatatattctggatactagacccttgtcaaatatatgactggcaaatgttttctcatattcagtaggtggttttttcacttttttttttttttttttgagacagggttttaattttgttgcccagctagagtgcactggcacaatcatggctcactatagcactacagccccaacttccccaggctcaggtaattctcccacctcagcctctcgagtagctgggactacaggcacgcaccagcacacttggctaattttttccccctcgaggcagagtcctgttctgttgcccaggttggagtggagtggcgcaatcttggctcattacaacctccacctcctgtgtttaagtgattctcctgtctcagcctcccaagtagctgggattacaggcacgtgccaccatgcctggctaatttttgtatttttagtagacacggggtttcaccatgttggccaggctgatctcaaactccagacctcaggtgatccacttgtcttggcctcccaaagtgctgggattataggcataagccactacacctgacctgatttttgtatttttgtagagatagggtttcgccatgttgctcaggcttgtcttgaacccctgagctgaagcgatccacccaccttggccttcgaaagtgctgggattacaggcatgagccacgacccctggccgtgttttttttttggtttttttttttcacttttttgacaatattcttggatgcacaatagtttttagttttgaaaaaagttcagtttatctattatttcttctgttgctcataatcttggtgtcatatctaagaaacaattgccaaatccacgatcatgaagatctattatctatgttttcttaggtttttgctcttctatttaggccattgatgtatgttgaattaatttttgtgtatggtgtgaggcaggtggtccaactacatttttttttttaaagagataaagtcttgctctgtcactcaggctggagtgcagtggcattatcatagcttactgcagccttgaacctctgggcccaagtgatccgctcacctcgacctctcaaatagctaagacttcaccaagactggctaattattttttttttttttttcagagatggggtcttgctatgttatccaggttgttctcaaactcctggcttcaagtgatcctcccacctaagcctcccaaagtgttggtgataacaagcgtgagccaccacgttgggtaccaacttcatttttttgaatatggaaatccggttgtcccagcaccatttgttgaaaagattattctttccttactggcaggtcgtgacacccttgtttagtgtattgtatctcttatgcagagcatacagtggaatcttcacttttttatcctgcatgacagtctctacctttggctgggttaatttatgtacatttaatgttattgttgatatagttgcatctatgtacaccagtttactttttctttttctaaatgtttcagggttttttttctcaagtctttcctcatttcttttactttaaagcagtattttctttggcaatatttagttcttctaatgtcattttcacaattttttttttctttttggaaacagcatcttgctctgttgcacaggctagagtgcagtggcagaatgttggctcatggcaaactccacttcctgggttcaagcaattctcgtgcctcagtctcctgagtagctgggattacaggcatgcgccaccatgcctagctaatttttttttttttttgagatggagtctcactctgtcgcccaggctggagtgcagtggtgtaatctcagctcactgcaacctccgcctcctgggttcacgccattctcctgcctcagcctcccgagtagctgggactacaggcacccgccaccacgcccggctgatttttttgtatttttagtagagatggggtttcaccgtgttagccaggatggtctcgatctcctgacctcatgatccgcccgcctcagcctcccaaagtgctgggattacaggcgtgagccaccgcgcccgacccaatttttgtatttttttgtagagacagggtttcaccatgttggccaggctggtctctaactcctagcctcaagtggtctgtccaccttggcctcgcaacgtgttgtattacaggtgtgagccactgtacccagcctacaatatgtttttgagtgagatttcatgggttgctttagtgcttatcaggtacatctcaaccaaatcttccttagatttgttactagttttatgccagtcacgcatagaaacattaccactatatggctctactttctcttcctcctttttatgctattattgttatacatattgtatctgttataattattagtataattttgtcttttatagaagggaaaagaaaggagagcaagtatacgtttatagtgttagatgacccttcttatttaccattttttgttctcttcattggttcctatggaatcctgttaccatctggtggtgtttccttagtttggtaaagctttgttcccacccaccactcttctgttactcacagatatatgacatttctatatgttataggtacaatagtacaattacgtacatattttgtgcagttttttaaaatcagctaagaaaacaaatacgcacatatgctgagttttaattagataattacttttactgacacccagatttttcatgtggacttgtgtggattcttaggtcactttccttcagccttaagaaattctgtgtgtatattttatcaggtgggtctgcaagcaataatcagtttttgtttatctaaaaatgtatttatcatgccttcatttttttggtggtggtgcttttcttaaggtgctttttttttttaaagcatctttagttttacagaaaaactgaaaggaaggtacagaggtatcccataattccctcccccacatatgcatagctttcctattatcaacatatcccccaccagaatggtatatttgttacagttgatgaacccgtgtatacacatctttcttacgcaaagtcactagtttctatcagggttaattcttggcgttgtatattctgtgagtttgaacaaatgtataaaaatatatgtctaccattatgtcatacagagcagtgacactgcactaaaaatcctctgtgctctgcctagtaatcattctctccaccctaatctctcgaaaccactgatctttttaccatctctatagttttgccttatccagaatgtcatacagttggaatcatatagtatggcttttttggagtgccttctttcacttagtaatatgtattgaactttcctccatgtcttttcatagcttgataacttatttcttttcagcactgaattatgttccattgtctggatataacactttatccattcatctaccaagagacatctgggttgcttctaggttttggcaattatgattgaaggtgctataaacatacatttggaagtttccgtgtggagataaactttcaactcctttgagtagataccaagcagagcaactattggattgtattggtaagagtatttttagttttataagaaactgccaaactgtcttccaaagtggctgtaacattttgcattcccaccagcaaaagagttcctgttgctccatattcttgtcagcatttggtggtgtcagtgttaggaattttagccattctagtaagtatgtcatgatatctcagtgttgtttaaatttgcatttctctggtaatatatgatgtggagcatcttttcttgtacttatttgccatctgtatctgtatcttctttggagagatatctgttaaggcttttggccaattattagtttctaaggtaaagcttagattattgattttgatcatttttcttttttaaagcagtcagatgtcatttagtgatcagaatacatcctgaagaaatgtgtcattattaggtgattttgtccttgtgcgaacatcatagagtgttcttactcaaacctaggtggtttagtctactacacacctacactatatggttaagcctatatctaggctgcaaacctttatagcattttactgtactggatactgtagacaattggaacacaaaggtagttatttatgtatctaagcatagaaaaggtacattataatatggcataaaagataaacagtggtatacatgtatagggcacttaccatgaatggagcttgtagaactgaaaggtgctctgggtgagtcagtgagtgagtgttgagtgaatgtgaaggcctaggacattaccatacactactatcaactttataaacatagtacacttagactacactaaacttatttttaaaaattttctttcttcaataataaattaatcttagcttactgtaacgtttttacttcttcttcatttttttcactttttgactctttagtaataccactttgtaatagctcttttgtaataacacttagcttaaaacataaacatattgttcagctgtacagaagtatttttttttgagagagagtctctgttgtccaggctggagtgcagtggcgtgatctcagcttatatattctgtcagcttttttctatttaaaaaatttttttaaacttttttttttttttttttttttattatactctaagttttagggtacatgtgcacattgtgcaggttagttacatatgtatacatgtgccatgctggtgcgctgcacccactaatgtgtcatctagcattaggtatatctcccaatgctatccctcccccctcccccgaccccaccacagtccccagagtgtgatattccccttcctgtgtccatgtgatctcattgttcaattcccacctatgagtgagaatatgcggtgtttggttttttgttcttgcgatagtttactgagaatgatggtttccaatttcatccatgtccctacaaaggatatgaactcatcattttttatggctgcatagtattccatggtgtatatgtgccacattttcttaatccagtctatcattgttggacatttgggttggttccaagtctttgctattgtgaatagtgccgcaataaacatacgtgtgcatgtgtctttatagcagcatgatttatactcatttgggtatatacccagtaatgggatggctgggtcaaatggtatttctagttctagatccctgaggaatcgccacactgacttccacaatggttgaactagtttacagtcccaccaacagtgtaaaagtgttcctatttctccgcatcctctccagcacctgttgtttcctgactttttaatgattgccattctaaatggtgtgagatgatatctcatagtggttttgatttgcatttctctgatggccagtgatgatgagcatttcttcatgtgttttttggctgcataaatgtcttcttttgagaagtgtctgttcatgtccttcgcccactttttgatggggttgtttgtttttttcttgtaaatttgtttgagttcattgtagattctggatattagccctttgtcagatgagtaggttgcaaaaattttctcccatgttgtaggttgcctgttcactctgatggtagtttcttttgctgtgcagaagctctttagtttaattagatcccatttgtcaattttgtcttttgttgccattgcttttgttaaaaactaaggcacagacacacacattagcctaggtctacacagggtcaggatcatcagtatcactgtcttccacctccgtatcttattccactgaaaggtcttcaggggcagtaacactcatggagctgtcatcttgtatgatatcagtgccttcttctggaatacctcctgaagggatctgcttgaggatcttgaggatgttttacagttaacttaagaaaaataagtgaaaggagcatactttattattattgttattatttttttagatggagtcttgctctgtaacccagtctggaatgcagtggtgcaatcttggctcactgcaacctcggcctcctgggttcaagcaattctcctgtctcagcctcccgagtagctgggattacaggcatgcaccactacacctggctaatttttttgtatttttagtagagacagggtttcaccatgttggccaggctggtctcaaactcctgacctcaggtgatccccacctcagcctcccaaagttctgggattacaggcatgagccaccacacctggccatggaatatacttcaaaataatgataaaaagtatagtatagtaaatacatagattagtaccatagtcattatcaaacacatacataattatatgtgctatagttttatacagctggcagcatacagtaagtctgtttacaacagcttcaccatgaacatgtgaaaaatgcattgcactataaggttacaactgccatgacatcattaggtaataggaatttcagctccattgtaatcttacaagaccagcgttgtatatgaggtgtgttcattgacaaaaacatcattatgtggcatgtgactgtatatgcgtttagtgctataaatttctcctctaagcattgctttcactacatcccacaaattttggtaagttgtgtattattttcatatagttgaaaacgtttataaatttctcatcagatttcttctttgacccatgtgtatttagaagtattttgtttagttttcacatattttgggatgttccatgtatctttctgttaattgatctttattttgatcttagagaagatgttatataatttctgtttttaaaaatttgttaacatgtattttatggcctagaatgttatctgttttgatgaatgttccatgtaatctagaggatatgtattctgctattgttggatgaagtggtctataaatgtcaattatatccagttgataggtggtgttattgtgttcaaatatatctttatggattttctgcctgctaaatctgtccatttctgtgagagatcttgaagtctcggattatgatagtggactaatttatttcactttgcagtttgtttttactttatgttaacactctgttgataggtatatacatgtaaaggattgttgtgtcttcttggacaattgaatcctttatcattgggtaatgcccctctttatccttgataactttccttgctttaagtgtattctgcctgaaattaataggctactcctgcttttctttggttaatgttagcatgatatatctttcttcaatccatttacttttagtttatatgtatctttacatatgaagtgagtttcttgtagacaacatgcagttggctcttgttttttattgcattttgacaatttgtcttttaattggtgtgttgacttttaaaatcatcattggtataattggattaatatctaccatatttgttactggtttctatttgttgttcttgtcctttgttcttatttttattttccactctttgagcattttatatgattctatttttttctcattttcttagtatatcccttacacttctttcttagcttttaaaatggttgccttagagtttgcagtatacatttacaactaatgcaagccaactttccaataacactgttacacatttacagataatgtggagtataatagcaaaattatcctaatttctccttctgttcctggcattcattttacttacatgtaagcatacataaatacatataagagcatacataattgaatacatgttgctgttactattttgaccaaaccattatctgttaggtcaattaagaataaaaaaataaaattttactgtctaatttattccttcatcagctcttcctttctttatgtagaactgaatttccgacctatattattttctttcttctgtagaacttcttttaatacttcttgcaaggcagtttttttggcaacaaagtgactcaatttttgttcatctgacaagatatttttccttcagttttgaagtatgattttactcactacagaattctagattggtaattttttttctcacaacagttcattctttgtttatgtggttttttgtttgtttgttttggtttctttttgaaatgggagtctcgttctcttgcccaggctggagtgcagtggtgcaatctcagcttactgcaacctccacctcccaggttcaagtgattctcttgcctcagcctcccgagtagctaggattacaggtgtgcaccaccatatctggctaatttttatatttttagtaaagacggggttttgccatggtggccaggctggtcttgaactcctggcctcaagtgatacacccacgtcggcctcccaaagtggggattacaggcgtgagccaccatgcccaggcctctcacaacagtttaaacatttcagtctactcttgcttgcactgtttctgagaagaagttgttatctttgcttctctgtaaataaggtgttttcacccccttcaacttccttcagaaatttgtttttgttagatttttctgtagttgaaaaatgatatgcctaagtttttgcttttttttttttaattctgcatttgtctagcttgctgttcttagtttctcggatctgtgtgtggtttggtgtgtaacagtaatttggggagattctcagtcattgttgtttcaaatatttctaatgtccctttttctctgcttctggtattcccattaagtgtacattttattatagttttcccacacttcttagatactctatttttttcagtctcttccctgtttgcttttcggttttggaggttagtagtagtccattgtatagatgtagcacattttaaaaatctgttcaccacttgttttatgtttggtgtttttacactttttggctgttatgaatactgttgctctgaaattgatccacaagtttttctgtgaacatactgttactgaaacaccaggggtttggtctaggtcctgttgcttgccgcacagaaagccagtgactgagacaaagagtattgccaaagaagaaggctttaattgggtgctatggctggggagatgggagctcagtcttaaatccctctccctgaccaactaaaattaggggtttaggtagcaggaaaaaatgtaacaatgtgtaacaaaacaggagctagggaggggcaaggaagcaatcatgatgaagcttccagcatctcattgtttggatgtggtgatctggtgaatttcagttctttgatattttttgagagcagaaggtcatttcctgaggaagaaactcagagcagaaggttgttccctgaggaaggaactcagataaatataagttttaagcttaaaataatttctatgtttgtattaaaaaactgtgggactgttggagttggtttcaatatgtgtgcagttctcttgtatatatacctagaagtcaaattgttagatcatgttatctttgtatttcactttttaaggaactgacatttttctctgaagtggctgcactgttctgcattcccactagaaatgtttgagggtctgcagtttctccatattcttatcaacacagcccttcacctcacttttcattatagcattctaagtgggtgtggaatggtatcttttttgttttgatttgcatttctctaatggctaaggatattttcatgtgcttattggccatttgtatatgttctttggagaaacgtctatttaaattctttgcccatttttcaattggcttgtgtgtgtgtgttttgtttggttttgcttcttttttgagacagagtcttgctctatcacccaggctggagtgcaggggtctgatgataacttacgacagcctcgacctcctgggttcaacctgaccttccacctctgcctcctgagtaactgggactacagaggggcctaccaccacctctggctaattgtttaatttttttgtagagacaaggttctgctgtgttgcccaggcttgtcttgaacttctggactcaagtgatcttcctgcctcagcctcccaaagtgctgggattataagcatgagccaccacacctggcctttatttgtgtttttattattgacttgtcagagttccgtatgtattcggtgtacaagtctttttttttcccagatgtatgatttgtaaatattttttcccatcattgggttttattttcacctccttaataccatctttttttccataaaagtttttgtttttagtatgtttttggttgctgctgctttttgtgtcacatgtaagaaaccattgtttaaaaaaaaaaaaaaaggtcatgaagatttatacctgtgttttcttctaagatctttatagtttcagcttttcaattaggtgtatggtccgttttgaattaacttttttggtagtgtgttaggtaggtgtccagatttattactttgcatgtgaatattcagctgttgtagcaccatgttttaagcagagtgttcttttagtatttcaaggtcatggcacccttgtgaaaaattagtttactgtaggtgtataggtttatttctggattttctattcagttccattggtctatatgtctatcctcatgtcagtttcaccttaccttaattaatgtaattttataataggttttaaaattggaaagtgagagtcctataactttgatttctttttcaaggttgttttggttcttcttattcttttgtgtctctatatgaagtttagagtaagcttttccatttctgtactcttatccccagcctgtaggtctcttgcctgtccctttcctggtggtggtgtgtgggaggccacaggtgcattccaaatggaaagagattacattcttgtaatgatctagtggtaagcttggcctgaagatttcaagatgggacatggttaaaagatatgttgttctacttttatggtatgaaattccccatataaatttaacatgaccagaaagtttgaaattgtcaaatgaaacacaataactacctttgagagagtcattggaagtttgtattcgtatatattacagtggaagatgcagcatcattagtaatgattgaaccagcattaaataaatggcattaatgaactgcagcagatatatgttgtttcaatactaacatgtcatgggagccatggcattgtgagcaatactagtgttgttgcctttttcttgggtgaaagttaggaaatcagccaggaaaagcagatagaacaatgaagaacttagagatggtgcctggacactttgaagaaagttcttgtgcatgattgaacaataaataaatacttaagagtatctattttctatctaatgttctaaaactttattgaaaaatcattctagtgtccattggcccatcattttgtaatatactttaaaatcaaattatttatacataaagaggcctcacaaaaaattatttgcccagggcttccacgtatcctaagggtagtcctgctcaaatttatgttagtagataccatcccagctgttgtgggggggtcagccttgacgtctttcagcctaaatggcttaatgtaggtgagaatagggaattacttttaagagtaaaggacaaaatgaataaaatcaattgagcttgcattgttgtagtttagataaaagtactacttagagtgaaccttcatgagcaagaggtcactattaactagatctttgaatttgtcttagtacaactgctcagagggattttaaatatttaacatttccgttttaaatatcatctttcagaaatgattcaccattcaagaattaagatttaacacagaatcatgggattagatttttggaagtttagcgattttctgccttttttagaaaaaacaaactgaaaatgttctaggttgtgctttgataagattgccccttctgtttaatttactgtgtttctactgagaacgaatttactatgatcctactatttttctatggagaactaacctaacatgctcctattaaaaactaattccccatgtgtgtgtgattgtagccagagaaaaatatttgaagatgaaaatttatttaccattctttttatgtaattaacctatatcttaataatttccatgtttttttcgcttacctggagaagatcagtagatgagagtgaactaagtactggggcttgtgaaaatgggtatttatttaaaaaacccacaagataaggatattctttgcatttagaggactgtttagagtgaaaaggaaaactcacttttttatttaaaacaaaaactttaagctgaatacatgttgagcataacataactgtttacaatcttttttttttttttttttgaggtggagtctcgcactgtcgcctggactggagtgcaatggtgtgatctcggctcactgcaacctttgcctcccaggttcaagcaagtctcctgcctcagcctcccaagtagctgggattataggcacccaccaccacagctgcctaattttttgtatttttagtatagacggggtttcactatgttgggcaggctggtctggaactcatgacctcgtgatccacctgcctcggcctcccaaactgctgggattacaggcgtgagccaccgcgcctggactgtttacattcttctattgctgctttcatttctatccataagtgtaaatgtagtctttccataaatgtattatagatgtagtataattttgtggggcttttccagtttttcatgtttattatttttagtggctgttatgattttatattatgccttctttcttcaccttccaagtagatgaagtttctaacacaaaagaggttatgggctttatcaataaatgtgtgctttaggggcattttgtcctttatggctacgagttcccaaggggagatataaccgtgggactcgaagtttaagttcggtttctggctttttctcaacacgtacaataaacgtgaataggccaggtgcagtggctcatgcttgtaatcccagcactttgggaggccgaggtgggtagatcacttgaggtcaggagtttgagatgaggctggctaacatggcgaaaccccgtctctactaaaaatacaaaaactgtctggacatggtggcaccctgtagtctcagctactcaggagtctgaggtgggagaatcacttgaacccaggaggcgaaggttgcagtgagccgacattgcgccactgcactccagtctgggtgacagagtgagaccgtgtgtgaaaaaacaaaacaacaacaaccaaaaaaaccccaaaaatccttggagtgtctttgttgcgtaattaggtggagatctctgaaggttcatcactagaaataccaaacacatgtttagaaggctgggccttcagccacctgaactctagggaggtcactgatgtaatcaatcattcctgcataatgaaacttaaaattctggatactaaagctcagtggctcttcctggttagcaaacacatcagtgtctggagactgatgcatcctggctccacatcatggagttaggagaggttatggaagctctgtgtctgggaccttcccaaacctcaccctgtgtgtatcttttatagttaaactagttgtaagtgtagcacttttcctgagttctatgagttgtagtgaattattaaacctgaatggactgtgggagcccctctgtagccagtcagcttgggggggatgcccgttcctgagactgacatatcagaagtgagggcagccttgtggaggactttacccttcacctgtggggtctgtgctaactcaggtagttaatgtcagaattgaattgcagtacactcagttggcattagaaaaattggagttgaaacagtgtactgatagataacctttcctgacatatttgtctatgccatttaattttcacagcaaggctatgaggtagtatgatattccctttccatatgtaagaatatgttcttaaaaatgtctcatagcagaagaatttctgtgtaagtaacttaaaacctatgggaagaataataccagcaggactttggttgcaggtcagggcctttagagataaataaacatgcatggtttttgtttgtttaaaaaaaaaattgggaactaaaaagtattccacacatttaaattagtaataataggttagtaaatactaaattccattttctgttccattttcaattttttttctcagtttaatgttttactttgttgcagataattcttatgcaaaacagaacttttttttccctacacctggatctccacccctgtgtttgctgttgtctaagttttacattgttgatacccacttcctaagttttggtttccagagccactagtaacatttgtcgctcatggtggaaaaacatatgggaatattcctgtgtgcatccaggagcatttttcagattcctttgctagacctttattgccatctattataacttctcatcacagcacatagaaagcagcagcactatctggcttggcattctcagcagctcctacagaatcttcccctctgcagtccctgccaaaaccacacaggacgtgtttctcggagttgcgcatggagaataccaccaatgtatttgctgcagctctgccttctatcgggcttttttccattcttcacctttttattactatttctagcgatctcgaaaaagatattttatgtgaaattgtgtatttaaggaaactgttaaagaagtctaactatttgtactaagatttagtatgggaggaggattttgtctagtttgggagacatttccatttgtttatcgtcatatggaattgtctgaattttagagctgggaaagcagcctagggcaggcctgacctcctgcatgggctcccccatgccgccctacctgtttagttgtcatgggaacacaaggcagattctcttcctcatatttctcacccatcttctattgtactttcaaaggtctttttttttttttttttttttttttttgagatggagtcttgctctgtcacccaggctggagtgcagtggtgaggtcttggcccactgcagcctccgcctcccggattcaagtgattctcccacctcaggctcccgagtagctaggattagaagtgcacgccaccacacccggctaatttttgtatttttcatagagaagtggtttcaccatgttggccaggttggtttcgaactcttgacctcaggtgatccacctgcctcgtcctcccgaagttctgggattacaggtatgatcaagtgcacccggcctgaaatgtcttattttttatatttataaaggtagcttttagcacacattgtacactcctttcttattatttcctttcttatcgacgctggtgtttaaatatttatgtacctttagtgcagatacctctcttggctaccctttctttctgactttaggctgtactgtattaatagagtcactgggagcattttcccaacatgttcttaaaaccagactagtcatatttatgagcagatatttcagaatatgtacataatttataaaaacaaatctcccagtcgcatctagggttctgtttgattggaaattgttgagacacacactctccaagctcattatctagctgttctaactttattatactagtaaattaatattgtgtttaggtggatgtcatatcatccatgttaactcttaggagaagttttgaagattgtagccttgttttgtttattgatggtattttttcttttttaaatacccaataaaaattctagtgtttgagaatacagagtgcctttaatataaaacatttatttggaatataaaaatctgattgacagtattaaaattaagatgcaaaataggaaaacaaagattccctttatctgtaccatttttgacatcaggtatctgaaagctggacttttgtgttaggggagagactcgagtctcttctttaggttaatatttctcattcccagtacctagcatagaggttgacatgtgctagatactcactaaatgtttgctgaatcaatgaactaatgaagtggagggtgtgaaacagggtcactgtgcactggttaccaacttgtccaagttcagtgagacagaacttacgggaagctgctttattacttacagacaggtagtgagggccagaagaagcctgaggatttcttgtgcgccagtctctcaaagctgaggaaagctgcctggggtggatggagtctcatctgcgtgtgcttcactttcaacacagctgcaggacctcagaaagcagcgtgacatgggttttatactctaggggccacagaactgatgggctaaagtgtggaaggacatcctgtttcgggcagggatttaaacagaacctgggcttctcctgccagtccttccctttctcaggatgtttcattcccagaagtttctacagttaattcttaagaatacagggaggatcagggagaactgggtccatccaaggtcacctggagaattgtccttcgggggggaaaagaaaatgcttgtaggacattcttacgtatttaatcttctgtggcagactctactgggccattttatgtattttgttggctttttctttttttttttattattattatacgtcaagttctagggtacatgtgcacaacgtgaaggtttgttacatgtgtatacatgtgccatgttggtgtgctgcacccattaactcgtcatctacattaggtatttctccgaatgctatccctaccccctccccccaccccacgacaagtcccggtgtgtgatattccccacgctgtgtccaagtgttctcattgttcaattcccacctatgagtgagaacatgcggtgtttggttttctgtccttgcgatagtttgttcagaatgatggtttccaccttcatccatgtccctacaaaggacatgaactcatccttttttatggctgcatggtattccatggtgtatatgtgccacattttcttaatccagtctatcattgttggacatttgggttggttccaagtctttgctattgtgaatagtgccgcagtaaacatccgtgtgtatgtgtctttataatagcatgatttataatcctttgggtatatacccagtaatgggatggctgggtcaaatggtatttctagttctagatccttgaggaatcaccacactgtcttccacagtggttgaaccagtttacagtctcaccaacggtgtaaaagcattcctatctctccacatcctctccagcatctgttgtttcctgactttttaatgattgccattctcactggtgtgagatggtatctcattgtggttttgatttgtatttctctgatggccagtgatgatgagcattttttcatgtgtctgttgctgcataagtgtcttcttttgagaagtgtctgttcatgtcctttgcccactttttgatggggctgtttgattttttcttgtaaatttgtttaagctctttgtagattctggatattagccctttttcagatggatagattgcaaaaattttctcccattctataggttgcctgttcactctgatggtagtttcttttgctgtgcagagctctttaattagatcccatttgtcaattttggcttttgttgccattgcttttggtgttttagacatgaagtccttgcccatgcctatgtcctgaatggtattgcctaggttttcttctagggtttttatggtttcaggtctaacatttaagtctttaatccatcttgaaataatttttatataaggtgtaaggaagggatccagtttcagctttctacatatggctagccagttttcccagcaccatttattaaatagggaatcctttccccatttcttgtttttgtcagatttgtcaaagatcacatggttatagatgtgtggtattatttctgagggctctgttttgttccataggtctatatctctgttttggtaccagtaccatgctgttttggttactgtagccttgtagtatagtttgaagtcaggtagtgtgatgcctccagctttgttcttttggcttaggattgacttggcaatgcgggctctttttcggttccatatgaacgctaaaacactttttttcaattctgtgaagaaagtcattggtagcttgttggggatggcattgaatctataaattaccttgggcattatggccatttttacgatactgattcttcctatccatgagcatggaatgttcttgcatttgtttgtgtcctcttttatttcattgagcagtggtttgtagttctccttgaagaggtccttcaaatcccttgtaagttggattgctaggtattttattctctttgaagcaattgtgaatgggagttcactcatgatttggctgtctgtttgtctcttattggtgtataggaatgcttgtgatttttgcacattgattttgtatcccgagactttgctgaagttacttaccagtttaaggagatttggggttgagacgatggggttttctaaatatacaatgatgtcatctgcaaacagggacagtttgacttcctcttttcctaattgaaaaccctttatttctttctcttgcctgattgccgtggccagaatttctaacactatgttgaatacatgtggtgagagagggcatgcctgtcttgtgccagttttcaaagggaatgcttctagtttttgcccattcagcatgacattggctgtgggtttgtcataaatagctcttattattttgagatacagtccatcaatacctagtttattgagagtttttagcatgaagtactgttgaattttgtcaaaggccttttctgcatctattgagataatcatgtggtttttgtcgttggttctgtttatgtgatggattacgtttattgatttgcgtatattgaatgaagcagccttgcatcccagggatgaagccgacttgttcgtggtggatacgttttttcatgtgctgctgcattcagtttgccaatatttaattgtggatttttgcattgatgttcatcaggatgttggtctaaaactctctttttttgatgtgtctctgccaggctttggtatcacgatgatgctggcctcataaaatgaattagggaggattccctctttttctattgattgaaatagtttcagaaggaatggtgccagctcctctttgtacctctggtagaatttggttgtgaatctgtctggtcctggactttttttgcttggtaggctattgtctcaatttcagaacctgttattggtctattcagagatttaacttcttcctggtttagtcttgggagggtgtatgtttgcaggaatttacccatttcttctagattttctagtttatttgcgtagaggtgtttatagtattctctgatggtagtttgtatttctgtgggattggtggtgatatcccctttatcattttttattgcatctatttgattcttctctcttttcttcttagtctctctagtggtctattttgctgatcttttcaaaaaaacagcccctggattcattgattttttgaagggtttttttgtgtctctgtctccttcagttctgctctgatcttagttatttcttgccttctgctagcttttgaaggtgtttgctcttgctgctctagttctgttaattgtgatgttagggtgtcgattttagatctttcctcttgtgggcatttagagctataaatttccctctacacactgctttaaatgtgtcccagagattctggtatgttgtgtctttgttctcactggtttcaaagaacacctttatttttgccttcattttgttatttacccagtagtcattcaggagcaggttgttcagtttccatgtagttgagcagttttgagtgagtttcttaatcctgagatctaacttgattgcactgtggtctgagagacagtttgttatgatttctgttcttttacatttgctgcggagtgctttacttccgactatgtggtgaattttggaataagtgtgatgtggtgctgagaagaatgtattttctgttgattttgggtggagagttctgtagatgtctattaggtccactaggtgcagagctgagttcaattcctggatatccttgttaactttctgtctcgttgatctgtctaatattgacagtggggtgttaaagtctcccattattattgtgtagtaggagtctttaagtctctttgtagatctgtaaggacttgctttatgaatctgggtgcttctttattgggtgcatacatatttaggatagttagctcttcttgttgatccctttaccattatgtaatggccttctttgtctcttttgatctttgttggtttaaagtctgttttatcagactaggattgcaacccctgcttttttttgtttgttttccgtttgcttggtagatcttcctccgttcctttgttttgagcctatgtgtgtctttgcaggtgagttgggtctcctgaatacagcacactgatgggtcctggctctatccaatttgctcgtctgtgtcttttaattggggcatttagcccatttacatttaaatttaatattgttaggtgtgaatttgatcccgtcattatgatgttagctggttattttgctcgttatttgatgcagtttcttcctagcctcgatggtctttacaatttggcatgtttttgcagtggctggtactggttgttccttttcatgtttagtgcttccttcaggagttcttttagggcaggcctggtggtgacaaactctctcagcatttgcttttctataaaggattttatttctccttcacttttgaagcttagtttggctggatgtgaaattctgggttgaaaattcttttctttaagaatgttgaatattggcccccactctcttctgacttgcagagtgtctgccgagatatcctctgttagtctgatgggcttccctttgtgcgtaacctgacctttctctctggctgcccttaacattttttccttcatttcaaccttggtgaatctgacaattatgtgtcttggagttgctcttctcgaggagtatctttgtgtcgttctctgtattttctgattttgaatgttgacctgccttgcgaagttggggaagttttcctggataatggataatatgctgaagagtgttttccatcttggttccattctccctgtaactttcaggtacaccaatcaaacatagatttagtgttttcacatagtctcatatttcttggagggtttgttcgtttctttttactcttttttctctaaacttctcttttcgcttcatttcattcatttgatcttcagtcatctgtcttccacttcaatgaatcggctgctgaagcttgtgcatgcgtcacgtagttctcgtgccgtggctttcagctccatcagttcatttaaggtcttctctgcgctatttatcctagttagccatttgtctaatcttttttcaacgtttttagcttccttacgatgggtttaaacatcctcctttagctttgagaagtttgttattaccgatattctgaagcctacttctgtcaacttgtcaaagtcattctccgtccagctttatttgattgctggtgaggagctgcgatcctttggaggggaagaggccctctggtttttagaattttcagcttttctgctctggtttctccccaactttgtggttttatctacctttggtctttgatgatggtgacctacagatggggttttagtgtggatgtcctttttgttgatgttgatgctattcctgtctctttgttggttttccttctaacaggaccctcagctgcaggtctgttgaagtttgttggaggtccactccagaccctgtttgcctggggatcaccagtggaggctgcagaacagcaaatattgcagaacagcaaatgttgctgcctgatccttcctctgggagcttcgtctcagaggggcacccggctgtatgaggtgtcagtcagcccctactgggagatgtctcccagttaggctgcttgggggtcagggacccccttgaggaggcagtgtgtctgttctcagatctcaaactccattctaggagaaccactgctttcttcaaagctgtcagacagggatgtttaagtctgcagaagtttctgctgccttttgttcagctatgccctgcccccagaggtggaggctacagaggcaggcaggcttgttgagctgcagtgggctccagccagttcgagcttcctggccagtttgtttacctactgaagcctcagcaatggcagtcgcacctcccccagcatcgctgccacctcgcagttctatctcggactgctgtgctaccagtgagcaagggtccgtgggcgtgggacccactgagcccggcgcgggatgtaatgtcctggtgtgctgtttgctaagaccattggaaaagcgcagtattagggcgggagtgtcccgattttccagggaccatctgtcatggcttcccttggctaggaaagggaattccctgaccctttgtgcttcctgggtgaggcgatgccccgccctgcttcggctcacactccgtgggctgcacccactgtccaaccagtcccagtgagatgaacccggtacctcctttggaaatgcagaaatcacccgtcttctgcgtcgctcatgctgggagctttagactggagctgttcctattcagccatcttggaatgatcgggtttttcttaataatccaacaaatttgctgttattgtaatccccattttaatgaaatttgtatgaatggaattatgtaaattataacaaagaatatttgcagattcccaagaaaatgctctgagcagctctgagtgtgattgctaagattagcgattttaaacctttttttccttgacacgtgaaagatgacacttgttataatttatgtgtcataaataaaagatagagtctcgctctgtcacccatgctgaagtacagtggcgcaatctcggcccactgcaacctctacctcctgggttcaagcgattcttctgccttagcctcccacttagctgggattacaggcgtgtgccaccatgcctggctaacttttgtatttttagtagagatggggtttcaccatgttgtccaggttggtcttgaactcttgacattaagtgatctgcctgcctcggcctcccaaagtgctggggttacaggcgtgtgccactgtgcctggcctaatttcttaaataaaggagcaaatgtaaaccttatagtactttattattttgcgaccatatctaacatcttttcctagctgttgaccacagccctcatcatactatggtcaagaatggctggcttaaatgaaagtttaaatttgaaagcagtactataacatttgagaaacaacttctgtgtgatacacagtaatcccccctttatccacagtttggttttctgaggccttagttacttgtgatcagccataatctgaaagtattaaatggaaaattctaggagtgattaattttagagcacacccacaccattctcaactgcatgatgaaatctcttgtcaccccattctgtctcatctgggacatgaatcccctgttttgtcccacctgtccatcctgtagatgctcctgcctgttagtctcttcgtagctggtctgttatcagattgactatcacaacatctcagtgctgtgttcacgtcactcttactttacttaatagtgaccccaaaatgcaagaatagtaatgctggcatgttgttacaatcgttctattattatgttgttaatctctttactgtgtctgatttataaattaagcttcatcataggcatgtattcatgggaaaatctatggtgaatatagcgtttggtgctatccatgttttcagacatccactgggggtcttgaaacatatcctctcagaattgattattattttgaggtcccatgttttaaaagcagtgtgaagaaggtaggtgagttcagaaaggaaactgagttgggttttgaagaccgagtgggatttaccacatttaaagtagaaaatgtggtaaagagctgggatgaaacaggtgtgtttaatactcattgcaggctggagtatgggaccatagggtggggaagatgatacctagaacttaactttttgaacacaagttaaacaaaatgatgtcttaattttgaaagcataacttttaaagtacagttagccctccatatccatgggatatgtggattcaatcaaccatggaccaaaaatatttggaaagacaaattctacaaagttccaaaaaacaaaacttgattttgccacattgagtactacactgaatgaagtgatacgtaggcattgtgttaggcattataactagtctagagatgaattaaagtatacaggaggatgtatataatgttatattcaaatactacatcattttagatcaggaacttgagcatccttggattttcttgtcatcggagtgagcaggtcctagaagcaatcccctatgcttactgagggataactgtatattataattttgaaagaacagatgttcaggatcctttaaacattttactgtgttagaggataatttgggctgggcgcagtggctcacgcctgtaatcccagcactttgggaggccgagacaggtggatcacgaggtcaagagatcgagactatcctggccaacttgatgaaaccccgtctctactaaaaatacaaaaattatccgggcgtgatggtgcgtgcctgtaatcccagctactcgggaggctgaggcaggagaatcacttgaacccgggaggcggaggtcgcagtgagccaagatcgcgctactacactccagcctggtgacagagccagactccatctcaacaaaaaaaaaaaaaagaaagaaagaaaataatttgaccgtgtacttcttgttttcatctggagtctaggctgtaaaatataaacattacagttaaaggctttatatgtctatgtgtcttagcctagacattggatatgtgttgctatgggatgagagatctgatttattttagccactagcagtaaatgtggtgaaaaattaagactgaaaactacaatgttgaggggtgaaaggaagggctaaacatttttcattgtggtggattctgccagcgtagactgctaaatgtttgtggtttggatcttgttcactctgaacgctttaggccttgtgtaggttttccccagagtatgaggtggttgtgaactgcttttgctaatggtgagaatgaactatcatgatgttatataacaaggatggcattctgggagacgcaaaatttaaagtaggggaaaaggaggatggcaaaaactaagtaaagtaacttgaaaagttattctttctgccaggcgtggtggctcacgcctgtaatctcaatgctttggtaggccgagtcgatgaggttgagagatcgagaccatcctggccaacgtggtgaaaccccatctctactaaaaatacaaaaattagctgggcgtggtggcatgcacttgtagtcccagctacttgggaggctgaggcaggagaattgcttgaacccaggaggcaaaggttgcagtgagccaagatcatgccactgcactccagccaggcgacagagcgggactctatctcaaaaaaaaaaaaaaaaaaaaaaaagttattctttccaaatatgatacaattttgttcaacttaattttgttaaatttttattcaaaaagttaagttctaaatagcatcaaacatggtgggagtcaaaataattaaaatcgtattttttctgaaagtgtgtagactgcctgcatacttatatatacgccagattgtattttacttaccttctcatttgcatcttacccttgtggccgaattagcaggacctgtgtgagaatgacataacttcaccgcctcttacctgctccagctgcaacgcgtgagagtgctgaactgtggcctagatttttctctagggctttccacggaagtgagtcaacacattgtttctggcttttcttgctgtccctccctaatatgcaagcttaggttgctttggaattttccaggtacagtgttggagaagttgtaacacaggaggaggccagagcgtaggtttagtgtggtggggagagggttggagcaattgttcaagggaagattgaaagtgaccaaaatggcatgagggtaaaaatgttacctgaattaaatatgtaccaaacactgaaaatcccttattatattttagtatcttttatcattgtattttaaaattgatttaaatctatactgagattttttttttttttttagtgtggatttcaacacattttttgtgcttttgccaagaacacagtgttctgttaagtcattcagtgacgaagattgctggattgctgccagcccgggtcaagttcattcacataagtttcagtgtagattctgactgagtgaggaatgttcctcttgtctttgcatgttaggtgggtctgggaaatcagttgttttaaaacaagcttattaatacttttgtttttttcagggttatggggtttttttgcttttaaggcttcatatacagacaacgctttgatactagtatcacattcttgtctatttactgattttccatgcctgatttggtgaaataacagctctcctaaccataccagattagaatctaccgtataacgtattgactctgctgtatcattttaaggtattattttatatctttaaagaaaatatattcacaaagtgcctttctcaatcatatatgtgaattaaaaagttgggaaaggtgacttagaagctacaaaaatatagtgtttgataaggtgtatatacctatgaagatatattcatgtttatgtattttattccttcactcatagttcttcctcagtttctttatttcgtttgccatcttttttttttttcagccacagaagtgcatttttttgcattaaaaatgcaaccagtatacaaaaagctaaggattggagcttattgatcactcatttggcacttatcagttttgcctgagaattacgcatatttaaataattttttttaaaaaatttgatttctgagtgaacaaacatattctgccttacaactagcttacaagacgttcagatgctaatgttttttctgttcattgtagtatttaaccaaggtaataaatttatgtttatactgatgactgttttcatttatttattttaaattttttatttttttttagaaacagggtctcactctgttgcccaggctgaagtgcagtgatgcagtcatagcacactgcagtcttgaattcttgggctcaggtgatcctcctgcctcagcctcttgagtagctgggactgtaggcacgtaccaccatgcctggctaattttgaaattttttgtagagatggtggtcttgctgtgttgcccaggctgctctcaaactcctggactcaaatgatcctcctgcctcggcctcccagagtgttgggattacaggcatgagctaccacaccaagccctaatgaaggttttttgtttttcttttcttgagctggagtttcacttttgtcacccaggctggagtgcagtgaagcgatctcggctcactgcaacctctgcttccccagttcaagtgattctcctgcctcagcctcttgagtagctcggattacaggcacccgccaccacgcctaaataatttttgtattttaagtaaagacagggtttcagcacattggccagctggtcactaaactcctggcctcaggtggtccacccaccttggcctcccaaagtgctgggattacaggcgtgagccaccatgcctggccgatgaaggttttttgtaaaaaaaaaaaaaaaaaaaaatactgccttagtatctgttggaatgtgtgattttttttttttttgctcatgtctggtaattagcatttttgtgatcattcattatgtccgtattcattaatgcctttctagaatctgatagaatgcctagcctacagttgctcaccaggtacttaaaacctgaacagtgaatgcgtaacaaccacagctcagatttgcggtaacggagcatttatgtctgggaacctatttgatatcacacatacatgaaaaataagtgaagcaaataaatcacaagcatatgtttttacagacatagattaagtatttaaaaccaaacattatcagaaagctatattataaccattcctttgggacatttttctgcatgggttacattggctgggctactttaatcagagtccagtgaagttcgaatggaagttacatgttttcccattaaatcttcctttgacaaaaatatttattcattgttcttccaaggacctctaaacactattaaatattttttaaatgtagattgaatgtgcatagatttctcagaaaaccttttcctgttaaattccggaaggagtttactgcttcctcccacttccccgtggtggctcttttgcagttgttagtcaagagctgggcttgggtatcacatcacaatagtgccaagagccttggcatagctcttggtaatcattgccttatttacctctctccccaaataggctgcaggttccttgagggccaggatcatcatgaatgagtgagtgaatgaatgaatgtagcagacacaacacatgtggacaagtagtggcagggactaaaactggtggcaaagacttgtatgctcatgagctaatgattgaaatacctgtatctgtgataacagcgtaatagatacaactgtttaaacattaagtcctcgtgaaaatagaattggtgatattatactttttggtttatacttattcccttaaatttctctacttttatgaaacagttttactcctgaaatgaaggtgatgggataaagttaagggatcagagtcgctgtcttgggagcataatttctcattcagtgaaggccccctcagagtgctcatcaatatcgacgcattcctgtgggagctgagagtatttaaccaaatatgtctcctgatataatcaaaatttgcaaccatgggaagaattaagtggagaaagattctgcacttaattaggaaaaatagttaaagaaaggagtgtctaatgatcacatggcttggtcatttgaaaacctattaccaggattatatacgatagttaaattttaagtagactgctcattaacaaagctgaagtgtcccatgggttgactatgtggctatgattgtataacttatatttccagaagaaattttagtggaaaacatgattgcacagacagcacatttgcagtgggtggtagcaggggatagggggtggtttgcatctgttacctaaagtaagaccagtatgaacataaagtcctagaaaaatttggatactgaactttggtttttaaaatgcgtacagtaaatgaagctgctgttctgtgagcacctacctaccatgtggggtgctgcagaatctattttacacatattttctcactcagtttcctcaatgaccctgttgaaatggggtttattttgcatatggggtaacttggctgtgtctcaaataaattaaaaagttgcctagcattacttgccaggaaggggcagaatgagaacaaccaagggaatcttagaattagatcataagagaagaatcccattgtgttctactagtcagtttaagttgagtgcttgtgtaacatattttcttaaataggtaggaaattaggggaaagagtgtgaatttattggctaggcttataagagaacagataagatttctatgctagcctgcttcttgttcatcttttactaagagtctggcatccaaatttctggaccttggcacactttggtatttggtatgaagaaaggaaaatcattccacctggttcccatgtcccgacacccacgccataactacctgtcagaactcgctctgcttatctgtcctgcgtgggagatggcagcactctgccctgctcagtgtatgtctcgtggttacttgagacatccaccaggcttagctctaggatatctgcccgaagaaaagatggagtggaggggcttagatggccaagagaagaaattcgctcaaatcaaacttctttatttatcttatttttcgtccatcgttttactctggttatgggttacattctttctgtggtatgatggagcaaggtagcatttattttcctcaccatataatttttggttcttttgtttcaattgaattgaacttctaagaaggcaagcacaatgagcatagtactcatttccataaatatgtgcttttgttttgtttttcacttttaagaaagaaatttgaagtgtggaagttggagttctgaaaaaaaattagggaaggaaatggagaggatataaggagaaaggaaaggagatctcatacatgttaatcgtctagtgtttaaggccacatgaaggtcagtaaatgatactggagagcattaaataagaagtactcacctgtgatttcagcaggcttgcatgtagtcacgaatatatgtgtggtttacattcactctggcagtctttcctctccaacctggtgagaattagcatccttgttttccagacctgttaaccagtaaatgactgttcggcagactattttattttttatttttgtttgcatattcatttgttttaggtctcgctctgttgcccacagtggagtgcagtggctgttcacaggtgtgatcatggctcactgcagccttgaactcctcctgggctcaaggaatcctctagcctcagcctcctgattagctgggactacagacatggcacaccaccgtagctaatttttataaaaagttttatagagatagagtttcactatgttgccccagctggtctcaaactcctgggcacaagtgattctaccgcctcagcctcctgagttgctaggatcacagatgtgagcctccttgcctggtcatttattttttttaatttttaaagaaataaatattgagagattatcttatttttttctcaaataccttatgttagaaatgataaatttacaatgtatactcacttctgagtttggcctgttttcctgaggtgtcagaagacaggatctaacactagattttaagattaaggtttgaggctaagatctctctacagctttcccacaacaatcttgtgaagaagaaatgatgaactcaagccatgtcatttctccctgttgctatttctaaacatggcatggcattggcttggattgtctcattaaaatttgttttgcagttcaattgcattatctgatccctatattacttcagtagcagaattttaaacattttatgtccattttctgcttttatgggctttagtcctgcccattggtatttacatttaggaagttaggacgtaggatacatatatacagacatactcctcccacccattgcagcacaaataaatctcaattgatttttctctctattaataaaataacctgtgatcacataaatttctggtagtctctaggtggaggcaattggagttaacatttttgtacagtttgttttcatgttaagacactaactctagcatgactaggatttcagagacatctgtttataggattgagcacagagatctgattccctcccaccagttaaaaaaattgttaaaaaaaaaagtttttttttacgggcgcctgtagtcccagctactcgggaggctgaggcaggagaatggcgtgaacccgggaagcggagcttgcagtgagccgagattgcgccactgcagtccgcagtccggcctgggcgacagagcgagactccgtctcaaaaaaaaaaaaaaaagtttttttttaacaaattttgtatagtgttgttttataatatccaccttggcacattcgatgaaagtttcaaacttcgaacttctcttttttggaaagcaccatgggtcaagggccctgtttgtttaggagtcctgggtcccctttgtgtgtcagagcatgcaaaggaacctggaacagcctttcttctgggctgtcctcaaaggggcaaaaaggaaaaaagagttgatgaatgcaagatagtgattttatgagtcaccttttctgcagtgacatgcatgggtagaggatgaatttgtttaaattcttttttcccatatttctagaaaatcaattaactacaggtagatgttaaatgagattttgatcactcagcattgtgccctatagagtttgtgattattctatagcgggtagagagcatcctgtctctgaagaaagtatagtccttgtttctgtgtgttatgattgttttttgactcaagaatatatcataattagtggttttcattttggaatgtgctgccagcctctttctcttaaaaaatgggatacttcgtaagaacaagctatgatactgtgataagtattggcttccatgctgtattttctacatatgtatgcatgtatgtcaaagtgtttgaaagagcctggaacaatttatcactctctctcattgaaatagagggactgggctgggtgcagtggctcacgcctgtaatcccagtgctttgggaggccgaggcgggcggatcacaaggtcaggagattgagaccatcctggctaacatgatgaaagcccatctctactaaaaatacaaaaaattagctgggcgtggtggcgggcgcctgtagtcccagctactcgggaggctgaggcaggacaatggcatgaacccgggaggcggaggttgcagtgagcggagatcgcgccactgtgctccagcctgggcaacaacagaatgagactccatctcaaaaaaaaaaaaaaaaaaaaaaaaaaagaaatagagggactgcctttccctggagagaggcaacaagaatcaggctcttcgtctaattgctgtgtggttagtgaattttctactatttctcggtagtccctaagtagccaaactgtatcattcttctgttttaatttggtaagccaggagaaattaattttgctcaagttgtttgtcattgatctattttaactatattacagaataagctccagggcaggagcctatgactgcctgtggaccaggcaggtggtgaaaacccgtaggcttagagggctctgtttgactggagaggctgccatggctgagcaccggggctgttggtaaactccagccagctacgtgtgccttgaaaggatgtgattccagcgttgtcaggtcttctcagttttaagagagctggctgttgtccagataagtatgtgaaatctcccactttctacatgttggcagctagttcaaatgaaaaacaaaacaaaacaaaaaacagaagtgaaaaagtctgtggggcaaaaatttgtctactggtcaccagtttgtgtccagtgcttgaaggtatctggtggtgttttcagccttcttcttggacgtgctggaccacagacactgctttggtgctgtttgtgttcatggtaggataagactttgattcaaccagtacttctggagtgtatggtgagcattcacatattatttcacacttttaaaaaatgctcatgattttttaatattaaaaataaataagtgatgctgataaaagtgtaaaaaatgttcaactgataaatggattacatgaccacagttacttaaaagaaggtagcaaaagtcccagtgctgtgatctcaggtacctctgacctcagttttatcatctgtaaattggaaatggtaatacctacttctagaacttgtggtgatgttcatatggagcatcaggaggaggaaaactgcattgtcagccacaaggcagtgcatgaatttatcatgggaataaatcattaatttttataagaattcagttgagccttccatccatctgaccattggttaggaggagacaggatgagcactcagtgctgctggtttgtggatctgtggcacactgtggctcccaggaagggcctgggtggggatgggcatcccacttgtgaattgggcagtccacagtcccagagctaatgagcttaggttggatgaggctgggttaggcaggtaggaaccaaaaccaaatattcacatatgagtgctagttagagctgtgtttctcaaaggatgctcctccaaccactgactacagcagctgggaacttgtcagcaatgcacattctcagacgcttctgccacctctgaatcaaactctggggtggggctccaccctccttgttttaacagctctataggtggattcgctggtttgagagtcactgagatctcagagggccatgctgagcagcaggcttgcaggtcggagaactacagtttaggggagatgaggaatgtaagacagatgagggcaggcaaggacaggagcaccagcctgaggccaggctttattttagttggctccatatggtttgagagaacaggcccttcatgatgaaagttagggatgcagggacccttagttgtgagggacagcacatgtgctcccagactgccttttggtataattgtccagaccagaggctccacgtgctacacatttttttcagcccttgatagtcagaggtagacctcgaagtatccacagtgagcccagcacagcgtactggtggccagaagtgtgatcacaggtgccgaagcttggcaggtgtggaactgggtgctgcagcagtgggtgtgccacctgtgtatttgcatgcaaatgtggtacactcatttgaggtcagctcagtggaggccagctgtgctgtcctagacgtggcctatggtgccacagcctgagagattctgctgagagtgtgactgccttttatagtgctgacagaatccattgtatcgcttttaaagacctgtaatgattgtgattagccgcagagttgaaaactccctaagtgctattgcttactactgggagtcaggactaatgagtcctcctatgcatcctgtggctcggaaggctgccttgaacacatctcccctggtatgaagggcccggacccagtgtcatctccagcatttcctccccttgctctttgaccacacatcactacacattggtatgccagatctctgccagttttagaatgtatattgattgtgtcttcctctgtctttgttttaaatgaaatagatcaggcacacaaaagtgtaaagagaaaaaacaaaaaaatgtaaagagaaggaatgaacactcatatatggtgttttttgttggtttgttttgttttgtttttcaagacggagtctgactctgtcacccaggctggagtgcagtggcacaatctcagcttactgcaacctccacctcccaggttcaagcaattctgcttcagcctcccgagtagctgggactacaggcatgtgccaccatgcccggctaattttttttgtatttttagtagaaacagagtttcaccatgttggccatgctggtcttgaactcctaacttcaagtgattcacccgctttggcttctcaaagtgctgggattacaggcgtgagctaccacgcccagccagtgttcttttttctggccaacatcgcccattagacaacatacctgttctcaccaaatcctattccgcctgcagatggtcagcacagatgtgtcgtctctacctggtaaattgacagggcagtaagtttctcagggctcacattacagtaagctccacagagtcccctagacgagttcatgtagcaaaagcatctctgagggaattaaaaggtatagaaattaaagctgtttttttctttatctctcttttttttttttttttttttttttgagacagagtcttgctctgtcacccaggctggagtgcagtggtgcaatctcagcttgctgcaagctgtgcctcccgggttcacaccattctcctgcctcagcctcccaagtagctgggactacaggcgcccgccactactcccggctaatttttttgtatttttagtagagatggggtttcactgtgttagccagaatggtctcgatctcctgacctctagatccacccacctcagcctgagattacaggcgtgagctaccacgcccaaccttttttaaaaaaaaaaaaaaaaattaggtcaaagagtatttcagactcttcactctcctagtttcccttcttcccgccccaggctctggcagtgatctctggggaggaagcttgttggatagctactttccacaatgcttatgtttggaaccgtagtgaacagttatttatgttatcgaaatgatattttaaaaaaaatactccctttctgattttgccatccatagaactgaactgtgctctatactacagttcagtttggggacccctgagctcacgttctagttaggagggtgtggtggccagctaccagagtggtatctaggtggtttttctgttctgtaggttttttttttttttctctctctgtctctctctctttcattttggtggtaggtaaggaaaatcacatcactctcttctagcaaggtctatgagctattttggggacatgaaggaacgtggtagatacccctgtagagggtctacactcatttgaaggtaggattctttgttctaaatacacttggatcattgtttcaggagagaacatggagaatgggaaaataagctttttgtgctcactcattgcttctgtaaaagtattaattcttcagctaaataggaaataaaacgtttggttcttgatgaaagtattttgtacattttgcctagaacagtaactggtcacatttaatcctgtataggcttgaaactgacctcagcctcttctagactctcacagggcttctgccttcttggacagcaagccagggttactatgagtcgatgttcctttggtcccttctgtgtccttgacctgtattctgcagctggagcctcctggtagctcccagctgaagttcacctggagagttactgccatcgtgttggcctaatttgggtcaaaagtaatcaaaagaaccctggctcttgttccaagaagtgtttttgatgcagagcttcaatgcaagttttgtttttcagtatgtaaggtgtgacgaacctaccccagaaggagggagtcattccactagttggttcggggtgcgcagttgtttaattatcagtttggcaggccccagtttttcttcagttcacaaatagaattctcatttggaatatatccaatgttcatttggtttctttcagttgcagcaaatcttactatgatttgaggtttttaaatactatgtttttcaggaagtcttttcggtggcattttctgataatgccagcctgataatccaaaaaaaagtctgttaaaaagcagatttgcctgtaatcattaccttttttctgagtttgtaatcagaccttgtcttgaatctgtaaatcctgtggagtctcaggtgattttcctgactttccctgcatgcatggaggcaggtagcagatggatgggcctttatgccccgtcatgtgtgggtgccctggcagaaccctgctgctgccctccgtcttccccacagcaagcctgtggccattacaacttgtgcttctctgtgcatgtacagcacagcatctgtagcaaaaggagtctgcaagtattttggagagtaagacctgcatggcttgtttccttctgccagagaacctagaacaggcaaagacatacatgtgtttttcctttggaggcatcaagctccttcctggacattgaactttataacaatctgtgggtgaatccgccctattcctggacttgcagagagggtctccctggccaccttccacattcacgtggtccaagtggcatgagaaaggatggaagcctcctcacacctgtccccatttacctttccctatcggcaaacatcattattgtgttcttccagagacttaaataaatgtttttgaagatatgttgcctgccctttatagacacatggcagcaagttccacaactgctcaggagacccatgcacatcttagcatgcctcgggtctttccgagcaacatgggaaggtttcttttttaacccccatggtgtgcagccttgcattgcatggcagtaccctcatctgtttagctgtcctctctaggcggactttcagattgtttcccatcttttgcatgtgaaaatgcacattttccaagttctgttccttttcctgcattaaagcttcttgacctttttcctagaattttttgtttactcctgttttaagagttttaaattttatttaattgaaacatgaaataaatgtacttttctatgcctctgggctgttatttatgctgttaattcattcatgcagaggcaagggtggatgacctattttattaacctctattctaaagacttcttccaggcaagtaaagataaagagattataaaaataggtgaaaggtcaggacaggaagtgcagattggattgtgagaaaaaagaaaagcaaaatgcatttaatttcttgtgtgtgctgcataaatgctatgggataagaaaaaatatgtatgtttacacatacatgcacaagcacacacacacacacacacacaaacacacagagttcctgatacagtgggaaaggtaaaatgtacctattaaaaaaaagacatgaagccaaagcaaggtaaagataaaaccaggtggtataggtcagaggacagcaagtaagttgcagatgagagtgatgagacgtctttttggagctgaccgttccctgcttgggtgtgtctgcctgagagagcagctgaacagaggctgaaggtggggtcagaaggtgaggcgtcccagggactgagggtgtggtgtggcattggatgacggggtttggagtatgactttggggtccaggggacactgttagccttaagtgctgggatgaggagcttggatagctgtgattagattgtgggggctgtggttcctgaagaggagagcatggagcacagtgttagggactttcttgggagatatgtgtaggatagggcaaggctgtgcacagacagaaagaacaggaaagagaagggaggtcagtgcaggagaccagtgtttctaatgattctgctctaggtacgaagtgtgtttcagagtggcgaggaagggcaagttgttaagattggttgttgaattagtttctgtttgatgttaaagagaacatagagtaaatgataatccctcgaaagtggagatcttggcaggctggcgcctggtggtatagtagaaatctgagaaagggggaggatattaagtcagttttatcaggtaaagttgaatgaaataatcaagtttaagtgcgtcttgggtatttgcaaagatgtatagattaaggctaaaagggttggagaaatagatttgggagttacctatgattttttttggttattctgctctcaggattgaaaactaaagaatctcagaactgcatttctaattagtgccataaaattctttattgatgccaagtttttgttttttccttgtaaattgtggtaggtagaattctaaatgacctccagtagacccactaccagtatatattgcataatccatgggactgtgtgactagggtggcttatactcctgtgattatgtttaatatatggcacagttgacttcgagaagggaatttattgtcagtgggcttgacccatttgccagagccctttaaacctgtatttagaggtcagaagctgaggaggtaagagattcgaagcaggagaggggtttatgtgctgttgctggcttggagatggagaggactacctggcaaggaatgcagcagtatccaggagcccagagcaaaccccagttgatagccaacaaggaaacagggacctcagtcctatcactgcaggagctgaattctgctagtacaaagaatgagcttggaattggatttttctccagagctcccagaggagaactaagctccaccaccaccttgatttcatctttgtgacactctgagcaggggacccagttaaaacatggccagacttctgacttctggagctgggagctaataaatgagtgttgctttaagccactaagtttgcggtaatttgttacacagcaataggaaactaacaaagtttttgaacaacagttgaaagttacaggtagtatagaccattatataaactcacaaatttaagacagtgggaatatgggactagaaagaagttaaatggttggtaagaaattctaccacttagcccacattgccacccttcccatggccagcccactccactcctttcatagcacttagtggagtgtgtccataacccgcccaagtcttgctcagtgttgtagcagcagcattgtagcagatacttggttttcagcctgaatgtattcagtgaacgaacgtaggaaggaattgtgaaatgctagttggagaaaataagcagctggaggaaagaaggcaagctggagattataggaacagtgattcaaagccaaattagaaattgtaggacgatgcttgttatcctagtccactggggctgctgtaccaaagtaccacagatcgagtggcgtataaacaatggaaatgcatttctcacagttctggaggctgggaagtccaaggtcagggtgtcagcagatttggtgtctggtgagggcagcttcctggttcataggtagccatctttttggtgtaacctcacatggtggaagggacaaggcagctctctgggacctttttaataagggcactaatcccattcctgagagttccacccccttaacctgattacctcccaaaagtcccaccttctcataccaccacattggtgattagtttcaatgtacaagttttggggaggacacaacattcagtccatagcatatgtcagtggttgttaacagagtcagaaggagttgagaagtcaaaaaaaaaaaaaaaaaaaaaaaaaaaaaaaaaaaaaaaagggattttgctagggagatcccactgctgagtgcagatggctttctgtgaaatactgaaaactaagataagatttcagtaattagaattaaaaagcagatccttggatcctggtgtcatcttgccagccatcttggtaaacatgctgtggtcttgatgagacaagaaaattgccatgtatgggcatgtttttcatgcttgccttcaatgcgcatgtcttttctgcgcagaagtggttaacatatgactaacctatggaaaagaagatcatgtgtgatcttttatgaaaaatgatcaatagtctccttgttaatatcactaataactttatacagcctattgagtgtaaaacatacatgcaatattcagtttcctgtttagtgatggaaaaggtctgttctgtgaatgtttattagcatcaaagaattctgggcacgatttttaaaaactgaaaagggaaataaataggtgagatacgaagtccccatatggttgaaatgtctagagatgaaagggctggaaacagcttctatcagaggtttgttagaacttatgaaagttgtagtaaactgctgtgatgccagataaatgactggtaatgtgtctctgtgtccagtatgtgtttcataggcacgtgagaacgaacaaactttagaaggtagccatttattacatagaaactagaagcttattggggagtgggtttgtatatgaagaggacattgcaggatatcataaaatgaagagaaatgtgactaagattctcacattgtgcaggaacaggtgagtgagagtgttcttcccctctgtccctttcagttggtatcattatcaggtattttttcagaaaaggtttctgcaaggagtaagagaggcagcttctaacaacaaaggttacacagacatgatttaccttttgtggactagctttaccccaaattgcattgttaaagttttgaatttataattaatgacagcgtggactacttagtattttaactgtatttgagaccacaagtagtttcttcaatattttctcaagcccttgagacacttaattctccctcttgacttcctcttcatcttagaaactgcaatttcctttgtaggaacaacttcctgctgggtactgccctctttggccacttctgtcttgggtgcctatgtttttatctaaagccataagtgcattgcaacactagccatttcatcatcatgtgaattgagaaagtctagcaggaagtcacaagttgattgtccccaatacaagcccaaatgtttcttggttgctgtgtcataataggcagttggtgttctgaatggcagttatgaagaggatactttgtagaaaggacttcttttctagagatatatttaagagcctgatcattggagaacaaaatgcatgcggaaaggaaatattttaaccacagtctaaaaaagatcttatggtccagtgctgttttcccttatagtcctattaaattcattaatttccaatggtgactttcttggtttgtctggatttttttttgttttttaagggttccctaccccccattttaagggagagtcttttcctttaacacaatgtaaagaaatctcttttttttttttcatcttccattttctttattttctgcactgtaagtctcttctgttagtttcatctttcttttcaggacctggcttcatgattgtctccgaaaaagatggtcttgtaggcacaacgataggtcagcagtaattaacctatgaagtgagtggtgattacaaatgtggtcgtggactctggagtgtcttttcctgtgtgtaacatcttatggagaaagaaatctgtctccttagaaggcagaagggacctctttagttgccttctgtatcaactgcataggaggcgcaatgttgattttctctgtgttgctattcatatagagcagttgtctctagggctcccaacacataagaaacagtatatcacacacaaaaatatttttctgctgttgttatttagagatcagataagcagaagctttcagtaagtgaagaggtcaagattttttttttttttttttttttttttgagacggagttttgcgctgtcgcccaggctggaatgcaatggtgcgatctgggctcactgcaacctctgcctcctgggttcaagcgattctcctgcctcagcctcccgagcatcagggattacaggtgcgcgccatcatgtctggctaattttttttttatctttaatagagacagggtttcaccatgttggtgaaaggctggtctcaaactcctgaccttgggatccacccacctcagcctcccaaagtgctgtgattacaggcatgagccaccgtgcctggccaacatttatttattttatattctctcgcatagtagatttttaaaaatctagtaactggccactgaatatgaaaaaaaaattttaagttaaaaaaataacctcacctttttcaaccacagttccctgtagcccctgccacatttcctgctcctgcttaacaaaccctgttgagatagttgtctaggtttgctgtctctagtgtctcctctcccatccccccatgctaactgcagtccagcttctgcctctgacctccactgtgctggtcaccaaggacctacacaaggtagaatccaaaggcagactgtctagcctacatggcttacaagcagcagtgggactgttgatcacttgtgcctccttggataacacaagcaggtttttttttttttttttaaggaaaaaaaaaagaaaaccattaaagtatagatgccactacatgaaactgttgtttcaattactgacacttctgtctttccaggtgaaatgtgtgttgtggtccaaagaagtttgaaaaaaaattgaaaacccttatgtagatcacagggattaagagcatggacaacctgggctcagacagccaggttggagcccactggtcactaactgtgcctggagcaacttacttaacctttttgagtctcagcttcttaggtggcttataaacaacagaaatttctcagttttaggggctggaagtcagagctcagggtgccagcatggtctggttctggtgagggcccttttccaggttgcagtctgccaacttctcatatgctcacatggcagaaagaacaagctagctctttgaactctgcttataaagctccactctcatgacctactcacctcccaaaggcctcacctccacgttttggattagatttcaacataggaatcttggggggagacacattcagtgtaatggtttacttctctgtaaaatgggtataataatttctatctcatagggctgtagtaagaatcaaaagaggtcatgaaataaagcctctgtcacatagtgcattgcttcaaaaaattaataggaagtaactggctagattccaccaggtaagacagaaatcttctgcttggagctttctgtgatgtgttaatctcctttcagcctaaccgctcatattatttgtcccctggttctgccgtattgactacatggtgactctccaaacatggtggactattcaagtgttcattcctccatctctgttctcctgctattgctttgcaggagcacccttctcttcccagtcttggccccagcctatgaaacatttactcattttcaagtcacctcttctgggaagacttccccatcaacttccatgcctagaaactcaagtccacccatgtccctgatctattacagcacctgtgactctgatgtttttgatgtatttgcctttctgatccttcttctgtactttgagtttctgaggtcaagaaaaatgttttatttatcgtttgtccccagcctaggacattgtcaggctcatagtaaacatgtaattagtgtttgatgggtgagtaacgataggaaggcttatctttgcatagccggtgctaggcattagggagacaagctactatccctgtccttaagaattttaactttgggagtctgaggtgggcggatcacctgaggtgaggagttcgagaccagcctgaccaacatggtgaaaccccatctctactaaaaatacaaaaaattagccaggtgtggtggtgcatgcctgtaatcccagctacttgggaagctgaggcaggagaatcgcttgaacctgggagggggaagttgcaatgagcctagattgtgccactgcactccagcctgggtgacagagcgagactccgtctcaaaaataatgataataataataataatataataattttataatgtctttcatttaatcctcatgatgattttgtggaataggtattattcttttacaactttttaaatttttagattcatagggtacatgtgcatgtttgttacatgggtatattgcatactaatggtgattgggcttctagtgtacccattacccaaataatgaacattgtacctgataggtatttattattctttctctgaagttggagacagtaaggctcagagactttgcaaaaccaggttacacccctaacagaacactatgcctgaaattcttagcaggggttaggtactgtgctagtcgtgagggcaatgaaaaggaagagatgataaggctaggattaggatctccaagaatgtatttcttaattatgaaccttgtgatctaactggaaattggagatacacctgaaaatattcagtacactactgtggaatgtattcctggaatgatagtataaaattattaaaaatcttcagttcaccagagaagtagtatttcagataggagtctcctatttcctaattgaaaagcataaatttaaaaaaatcacatttgttaaaaattccatagactaatttcctaacttgccaatttttatttcaaaagaattagagactatcattgtgtcactcttatttagggtatattaaacatttctgatccaagcaaagttttacttatagtgtggagaaaattgggcatatggttggtacacattagtactttgtgtggtgtttggcaatttgagggagatgtgcattcaaagtacttgaaatttcaaggtttaaaatgtggcagtagtttaggtgggattttttttcttttttttttaatttttatttttgttattatactttaagttctggggtacatgtgcagaacatgcagttttgttacgtaggtataaaagtcagtgcttttcattatgtgggtgtgaagtatatgctctagccatattgcttcggtgattttcagtagattaagtcatccatcgtctttgcaaatcaaggagggtgttagtggtaggcccaaactgctattatttaaaacttctgtagaactcacattaatatttgattgtgttgaaatgcagttttctggcttaaaatcaattttttaaaattccaaattaaaaagataaatcaaatgtgaatggtaatgattttcagttattaataaatatacaagggcacaggcctaggagaaataagttgtggtaagtacttacccctgaggtttactttttaaagtgctacatacagtcagccctggtaggcatgtgtttctgttttatttgttcttgtaaagaaagttgagctgtttttgacctgttggtgtgtgctgttttaggttcgtttgttttattcattctaggtgtggtgatggtttctactgagacgtctttttttctcttattcatctggaaaatttaaaagctaggattagggacagatttggagaaagtctatcaaaagggattttagaagaaaataaatagataaacctgacatttctctagaagttaaaacaggataatagtaagcagttccattaaaactttttttgctggccaggcatggtggctcatgcctgtaatcctaacactttgggaggctgagatagaaggatcacttgagccgaggagttcgagaccagcctgggcaacatagtgagaccctgtctcttagggaaaaagaaattatttgctttatatcctgagttactcatttaaacttgtaaaataaagactgtatctattcaaaagtaattaaactttattgcctagaaatataaattgtcccattttggttatattttcaaattatttaggctaaattattttgtcttgcatatgtagttttaagtctaaatatccagtcaggtggacttttggtttacttcatgtctgtcagaagagaatatcttcctgtttgtctccatcccagggctcttcatgaatttagttttagatgttttcttcatttttagctaagttttaatcttctaatttgttatggacagcttggctttcagttatacctaatttaatcaaggagacaaagccttctgtttcaagaatgtgattttaaaacacacgtttaggtggggcattgtgtctcatgcctgtaatcccagcactttgagaggccaagatgggcagatcacttgaagttaggaagtttgagaccagcctggccaacatggtgaaaccctgtttctactaaaaataaaaaattagccaagtgtggtggcggagacctgtagtcccagctactcaggaggctgaggcaggagatcacttgaacccgggcagtggaggttgcagtgagccgagatcgcaccactgcactccagcctgggcaacagagcaagacttggtccacctcttcccccaaaaaaccccagacatttaattataacagacaaggccagagagatgtgtagccaaggttgatggacagttttcaagggataagattttcttactttgctttgtctagtttaaaagttttattcttttgaggggcagtggggaatagattgagttaagagttaataggcttttttttttttttttttttttttttgagccagagtcgcactctgttgcccaggctggagtgcagtggttcaatcgtggctcaccacaacctccacctcccagcttcaagcagttctcctgcttcaaccttccaagtagctggaattacaggcgcacaccaccgtgcccagctaatttttgtatttttagtagagacggggtttcactatgttggccaagctggtctcgaactcctgacctcatgatctgcccgcctcggcctcccaaagtgctggcattacaggcatgagccactgcgccggctgttaatagctattaagaaaacaaaaataacaattgttttctaaagcacggccttcaaagaaataggtttaattgttccatgttctcaagctactagaaaaatttttttaaagaggcagtgtctggctgtgttgcataggctggcctcgaattcctgggctcaggggatctccctgagtagctgagactacaggtgcgcaccactgtgcccagaaatgtcttgttttgttcagtttcttttaatacagttgtcattaaatcagtaagttgtagatgttgaagaaaggaatttgaatacatttggggctcttagaagcattattaagaatctagcacaatagaaaagctttttaagtttgacttaattcaaagttctacattacctgaatgcttaagattatgttaatgctgagacagtgttcccaggaagtttgttattaatcccaggaaatccatcattttacatgaccttaggatagaattatttctaagaaaaaaatcatttcaaaatcatctctcactgtgcctttttagggactttgattgtgttagacacactttgaggtctctgagcaacactgaatctaggtaaattaaacctttttgttgtaagagccagttacaggaactgagcaggaattgaagagcaaaaagattatttatttctggctagctttaaacatggatgagatcacgtgccaagtaatgtgagcagccttttgaagttgagagcagcctcaattgcttgcaaggaaacagggaccccagtgtggaaggaactgaatcacaccccaagcaggtgtgattggaagaggatcctgagctccagatgacaagggaccccagccaggaccttgcttttggccttgggaagccctgtatatagaacccggtcatgtcatgcccagccttctgtttacccagataaagtttgaacagagctgtgagctgataaatgggtcgtgttttaagttgctaagtttgtggtgatttgttgtgaagcattagaaaacccatacagggcaacattaaccagtctggaatatcccagtgccagtggcaggatcccatacatcaatgtctcttcagaacatttgatgttgtactaaggtcatagtaggttccaataaatagtaagttgaattttcaaaatcactatacttgtagtgtaggtcatctgaattttagagttttgtagcatatcaaggtacattgagtgatgaggaaaaacatcttgagattttccttaaaaaaaaaaattttttttaacctagtaaagaaattgagaaacatcatttttattgaagtgcatttgttctggattggggttggcaaactatagcttacaggccaaatctggcctatcacctgtctccataaataaagttttattggagtacaaccacactcactagttcatgtgttatctctggctgccgtcgcattacagtggcaaggttgggtatttgtgacagacactgcatggcccacaaaacctaaaatatttaccatatagtcctttatagaaaagcttgctgacccctgttctggatggtgatttgctttctagccacagccacattcatttaaccctaaatggcttccatctctggggactggtatttcttttaagtcctttaagttactatttttaatgtatttagctatacctgattaccaccagggttgtatagactggtttttacatctcactgtactgaaatgataggaaatgtgataaaattaatacaatccgataaactttgtgtgtttggggtccctaagattatctccaagttcagtgctttgctagaaggagtcctaggacttagaagtaggtatactcatgactgcagtttattacagcaaaggaagcaagtgggaaagatgtgttgggagcagtctagaggagaccaggcacaagcctccaagtgtccagttccatgggagttgcacaggacacacttagttcctctagcaatgaattatggcagttcattatgtgcaaatattgtcacttggtcctaacagttgaggatttttattctgattcagttttgtagattcacagggcctgtgtgactgaccacagctactgaaactgcagtccctcaggaggaaacagcaggtttcaccataaagtatgttgtttgcacagactgtgtagacagagtggtcaaggtttcaagcatgcaaacatttctatcagaatattccaagaactcagttcccaagtggccgcgtcaagggccagtcacctgaacaggttggagcaactcagcctgctaattcattcccaagctctccataataagaatctctagtagcatatatttcagaaacacaacatgttctgctagttgtacttatattacaaaatgtccttttagtgccttgattatttttattcagcagtatcttatcttcatttaagaaacacttatatgattctataaatcaagcccaggataactttatagtacttaaagttatgggtaaagttacaccaagataaacattgttttgtttgaattcataacttaaaccaagtgtcttcccaagagtggggtttccagcactacctttgacatttctagtttttcttagggactgagagtacctggcactttttcccatagttcatgttcttgcatgaatatcaaagagtaattattttcagagatgacttatgtctataatattgttttagctcattgtggccaataaaattcccaacagtatattaaagactatcttttcactattgaaataatgatgaaacaagcattatgaaacatgacacctttcaaattccttaatactaaagtccttgggaaatcacacttgttgaatgtcatggttatggaaaaatacataggacaaatttgttctttaaagagaattcattttgcctttctttgtaattgcagctatcaaagttaaatgttatctacatacatatagattttactctcttattcttctggcttccattattttctagacagagcctggtacattgtgtataagatactgtgtggatagtggtggttcctgagatttttctgttaacttgtgtgactgtgaacaactgcatataattcatttaatcttgtgtcagtttacctcatttgtcttctttcaccccaaagtaatctcatgaggattattttgctcaagtttgattatttcaaagaaggatcattatgtacacctaagatggcaagatggcaaggtggcacttgccaaaagtccagccggtgcctttggagctaaccttggatcttgaagggggccctgggactctgaaataattgctagtagatttgctttacagttgagtgttttgagctctcagtggctcagcttaattgtgaaaaagtagccagatgtaaatctctaaagagcagaacctatattttattcatctttatagtcctcctagtgtccacattgagtcttgctgttatctggcccctaaacccaaggcaaactggaaggggctggtggctttggcatcagccagaaaaggctgttagggcagtatccggcaccctaggagtggggccagcgagcagagcagcctacatgtagccagagggaaggaagcccagccgggaagcagaactgcactacctcagagtccaaaataatggctttccacaggaatgcctgtgggctgtcatgagattattcgcctatattcaacatataataagaagttagaagaggctgggcttggtggctcacgcctgtaatcctagcactttaggagtgggcggatggcttgagtccaggagtttgggaccagcctgggcagcatgatgaaaccccatctccacaaaaaatacaaaaattagccaggtgtggtggtgcacacctgcagttccagctactcgggaggctgtggtacacctgggaggcggaggttgtagtgagccaagatagcatcactgccctccagcctgggtgaattgggtgaaagaagaaatcatggaaaacttcacttgcaagagcttttcattaaaatgattaaaatataagattttagagaattcagctccatgaggtacagtgaaacactggttaaattgtggctaaaggagtttaggaaagactacttactgcagactcctcgtagagggcacagtgcacacaagcatattcaaggtttctggggcctatgacaaggcctgtttaactttattcacctgagtgtattcaagcccatgtgcctgcggagctctgtgtccccttgatccctgttgcctttgctccttgtggagcttctgggtgaggagcaccccctgggcccacagctcagggctgtccactcactggttactgcttttgcttttctttattgcttttgttatcctagaacactcacctggcttgattcctctgaaatttgctaccttctcaggacttctctctcaatttcttccattttccccacccattgtgtagcattttaattctttgccttgaataaaaataaagcttggctcataaccagaagcaacctgtcttgccttgggtccaggggcataagtgaacagatttatttttaaaacatgccatcgtgtttgtttctactaattttgaggcccaggttttgagtgtaggtctgagtcgatgacctctcagcctgcaccacagcaacgcgtgctgcccctgcctgggcctggcagaaggctcccttgcagcagctcaggactcacactcactgagcaggttttaaaacacacagaatggccagacaggtcgtatcacagtttgtgtcagaattccacaggtgtacactatttttttttggagaagggggtacttttcatctgtgatcactgcagacaaggtgcgtcaggacctcggaggaccgtgttgctgggcggggcctgctgtttgctgtggagccccctggccctggtcactgccgccttctccaccctccactcctgcttggtgaactttgacccggcaggtgcctttcttgagcctcgtgattcccctcccctcttgccccgctgtctgtcatttctccttgggctcctcagagcaggtgccaggctgacgataggtggagggggcttctgtaagccagtccataggtttgagttaagttctctccttctcactgagctgcagctgaggttggaaacatgtatctagtttaaggaaggcaagccaggtggttttcagaggtgtaactatgggtgtagcttgttaaacctgtttacctcagaaaatatttttttccttgaatgtatgagaaaacctgtagcttttgttttgcctctcactagctggctgattttcacggataaagtttcagtcacaaaaagcacaccatgtaaacagtgaaaggagatctcttattggtggcttaagcctttctattgtctggaattggtgttgctttattggttttaattcaatagaaaataaaattttgttagcaactgggagtccaatatactctttattttgtgttgttttgctgttcttttccacacaaccagtgaagttcttaacgcgtaaacagagagcattctacatgaattaatgtgtgtatgtgtgccatggctgcactggggtaatagacctgtggataaagactttgggtccctccctccttccctccctctgtacccattgtacccagaatgattcctgatacacaggcactcagttaatgtgttacatgaataaatttcattttagaagtgagagtggaaacgcaggcatatgataaccaaatctattgacctgtcagccaccagtactctttcattcccctcagtgtgaagagcagtcttggttttgattattttacttgccatggtgtatcttctgtagcatttttgttgttgctcttaccatccaacctccttaaaacagtggtttgtatgggatttaaaagcttctaggcagccagggccttctgactctttgttctttccttatggtgctactgactgtgctcgtttgtagtgtgactttaagaaagggaggctgaactcaggataggcagggtgaacttggcataacactgctctgggtgttctcagaagatcctattcgggcaggtctgggcctggtcagtaattgggtgggaggcctcagagagcagaaaccagcgattggcaggaagtggcatgggcagctcacctggcctgcgagtctgggctcagctggacctgccccacgtggcaccaggcgcacaaggtgtcctcacagagccgccccgtggcacgcctttgcatgttggccaagaccaaagacttgagacttttgtttttgcatgaaatatgagtcaagtgaagttttatttcttatgattggttatctcaaataatgatattagtttagttaccatcctccctttgttctaccagctgggtagcatttagctacaaaggtgtaattttaaaataaggatgtgataatttattagtgatattccattattgctcttggtgtgacctttctataaattttagaatcaagagctttaatttctgaacattaaagaatggtgtttcatctggctaatttgtttcataccaaagaggcactgcttcatcttgaaattagacttcaatgtcttcctgacttgatagcagacacaggttttcatctaggaggaccctacacgtgtagactgtcatacatggacttagattaagatttgattgataggaactgggacactgcagttcaagggtagcacttcaggtattcagggcaatcacaagaagtttttctgaacatttcataaagaaatgtgtaggtaagattacaggaagtaacattagcttaaagagtagcaattgaattatataaagcattgtgctaattaatttttaaatttaaagttttttctctttttttgagatggaatctcgctctgttgccaggctggagtacagtgatgcaatcttaactcactgcaacctctgcctcctgggttcaaacgattctcctgcctcagcctctggagtagctgggactacaggagtgcaccaccacacccagccaatttttgtatttttagtagagacgtggtttcaccatgtcggctaggatggtctcgatctcttgacttcgtgatccacccacctcggcctcccaaagtgctgggattaacaggcatgagccaccaggcccagcctgaagtttgttattttttttaaagaaaaagtgatactgttgaatatccacctctttagagaattgtagcattttaaaattgttttttctggtcagctcctataagtatatgcccgcatttctccttttatgcaccacttccccccattgcatacattaccaaaaaactggaagatttcaagttagagaagcaataggtctttttcttatcgttttgactgcccagtattacagattgtcaaaataaagaatccccaaaagaaacggaattgtggagtcattttaactcctagtatacagcctgtgggaggctgtctgtggtgaggcaaagctgtagaaatgcccccgaactgttggaagcccaggagttagggcactgctgcatcctcaccctacccaccacaggggcatctcactgggatcttttcttctccatggtctctttgccaaacagctgcttttccagcctcctgccaggtgctctgtgtctttgtgctggtcctcttgagcatttaaaactccaaatagtattttatttcttctttctttgctccctaatattttatctgtttcaattaataccattatcctggctggcatgaactttggcctcttctagtatatcacttgaaccaactgactctttctctgaagtgttttcattggtactatttggttactgaactgttttagaataatagttattaaagtaatgggccggaaatgaatcagcacttgccagtgtgctgaattactacattaaaatgctgtattaacttaatttgccagagcatttcatcagtggagttggaggtggagacaagtcagaatgcacagactttaccactgacccccagactccagtgtctcaaagccctatttaatgagtgtgggtgaatttgcccaagttcatcatcattctaagaaaatagatttagagcgttgtcgccactgctgatggttctgttgatttatttgcctttgtgcaagaggacctgtgtgctctctttctatacatccacctgcaggcacacacttgtatttaatttatgctttagaaaattatttttataagtaaaactatatatttgtgttttttaactataatctttataattagtagaaaggaggcttgggcttgccattttgattatttgcttttatctttttgactcaaggacagaaattccaggtagtctgttcaccttttgcagtgcagggtttcagtgaacttgttaggcctgaataccaccaggtattattagtataaaatgttcatgttttgatatatggtatttaattctcgcaacttactgttttggtaatgcattcacaaaactctaaaactggaaagagaattcacctgaacaaaaatgacaacagtttatgaaggattccatttttccctactgaattcttagggctacattagcatgtattggtttgttgaattaattagtgaatgagagtttaccactcatttttaagcccacccagccccctcagtaaagcaaaacatcaatgtttctggtgaaactactctcaaatctttgttcttgtgtagttgtatatgtacgtttttgttagcctttgaaaaagtatagctttactgatacttctggttttctatttactttgaaactactaaaataaagcttttgtgttacgtaagactgatgaaacctagcattgaagaaaagttggaaatattattagaaattactttttcttttttttagtacttcagcgtaatttgtatagaaactggtatccgcaggctgtagtgcccttataccatgtttaaaaacattttgttttttcagttagtggcaaacattttacaattaggaaaattcacttaggtttcagatttctttatcttcccttgaagaaactctgctagttattgggcagattgcctgtattgcgggaggcggttcgctctgagcagcagctgccagtttagacagatgcggggcttccctcacacccctgccgtcctctcctcctcctccctctcaccctctgggctggaggccatgaactcagatcctctgctaaaaaattccattgccgactcaagtcagtggccactgatatatttttgtttatctagatggcctaagaaatatttatttatttcttgttctgctcattttgaagggagaacaaacatccctagttacttaacagattgaaataatgtgtcctctcctacccatgagatcacttcttgccagtctctctcttttgttccttctccctccattttgttttgttttgtttcctcttttgtcacctgagtgtctggatcctctaggtccttttatactctctacttttaatttactaaattttaaatatttttaaataaaaaatacatacttatggaaaaaatttcaattagaacagtagttaaagcaaagaataataacctcagctcccagaattaatcattgttgtttcttgtgtagtcttcaagaactgttctgtgtatataagaatatctgtatgtgttcttctgtatttttttgtttttctcacccgtaaggtcttcctatatatacattagttttgtaattttctgtattcttatcaagacttatggatctgtcacattgtttctaatggctgcatgatattttcttgtataaataccataaccagcacttgattaatggatgattccagttttttggttttgggtgttctttacatataaagtatgctacgctatgccttcatgtacatatgagtctggacagttgaatgaatagaccctgtaagagaattgataggttaaaagtatttacattttaagttttaacataccttgcttttagtctcccagcacagtcacaggaattcactctttctgtcagtggccaagtgcttctgccggcctgtggttcccagggagactgatcatcttgtattggtagtttgtatcacgtttccttggaatgcctttttgcatattttgctcattttttccattgggttggcttcccatttcttattgattcatgggagttttttgtacatcaaagaaaacaaactgcttgttaattgtggcagattttttcttttttgtcctcttttgttgttgttgttttaccagtttgctctcttttaaatgtttctacttggggaaatttttggacacagttaaatttttatgtggtctgtcatttcttctatggactttgtgtcatactagaaaaacctttctccagtttacaattatttttaaaatgtatccatattttgttttagttctttataaaaatattttgattttttgatcctttggaaattgattttggtgtaaatagagagggatccagctttttttttctctctggataggtagttattcccaagtaagtttcttttgcactcttatttttattatttttatatgcaatcttatttctatgtaggtatacttaaggaatatcaatttgggtatacttcaggaatatcaatcattggatagtctattcctgtgttggtaccaagcttttaataactatagttctacagtatgatttattatttggtaagtgtagttgcccttcatttattttcttttttagaattttccttgcttgaatgaaaaaagcttgagggaaattctttaaatttaatggggtaattctacttgacgtaagtattcatatactttatatatgtatattttaaaattttttggttacactgaggctcctagttattaactgttgctttgagattcactgaggaaatcaggtgtgtatgcctggagaggtggaacagcattttggaagagtggagtcaggagtggtaggaagtgggctgcttcctacctctgttactggattgctgtgggggctcgagcaagccactgaagtgtcatccctcatgtgttcccatgtataggacagcctctcccagtacagttactgatatttagatataatgagtagttttccatcactgtttttcattcagttgtgagaaataaatgagttaatacatttataaatatttcaaaactggtggagcctagtataagaacttgatgatgatgatattgttgtggttattttttctgttttactatagttgaagggagcctaattttctcatgttccagaaaataaggaggaagtggggggacgaggggagagagagagagaaagagagagagagatatagatatagatatagatatagatatagatatagatatagatatagatatagatacagatatagattgaacttactgctgttgccccagccccagcactcaccaatttctgctagggtgctgaaggcagacctgtgtgatgaggggatatttaagctgaaaccttgaaacatgagaaagacttagggaaagatttggggtgggaatgaggaagcatattctagggcagaaagggctatggcatccacaggcagggaagaatatagtgtagaaacctgaaagcacgtcagaagcgctggggagcagcgaggaggcagacagctatgaatggaggcctggtgggagcaggggccacctgagggcttagagaccacagggcaggtggggggcattgaatggcatcctaggtgtactgggaagttgtttataggatcttaagagcatggaatgctctgacttaggttgttctgattgtggtgtgtagggcagaccctggcaggagggcaggagtggagcaagagaccagctatgagtcacagccattgtggtgccaggtgggaatgggtggagagaagggggcacatccttgttagttttagaggtaaaacttagtcatgaattgaatatcaagggacttctgacttgcacataggtggcatgtggtattattgatccaggtgatactgaggcaaacaactggttttgaggaacatatcaggagtttgattttgaacttgttgtattgagatatttgtgaatatgtgaattgaaccctttaagggaagatgggcagctctgaaatggagagaagttggccgggatatttacagtaactcactgcatgagcatttcccttcttcaaatacatcccatttgcagtctccacaacagtcttctcaacgtgtcttccaagttcatgctccttgcctacttggaaatcttcaaaagctttctgctttcttcagtgatatctaaactgttaaacctgacattcaagatcctccacagcttgctcctcacccaatccataggattatgtttttcacatcactgtctcttgcctcccagtatgaactctaaactctcagttgtctagactcgtctgtaggtcatgaaggtcattgtactttcctgccttaggtgctttcttctctctttctgtatctttatcggttgagaattttctaatcctctgagacccagtataggttttacctcttccactatgtctgctggttttagatcaaccagaaataagggctccattttttgtccatttggagcactagtgtgagccatacttatatctgctttattttatttcaagctctttatggaagtgtgtctcatcatattttctctattccataataccttgtacatggtgtgtactgaataaatatttatttaatattttctctatttggagatatttttcaggtaaatatccttttggttgcaaataacaggaaccaaatgtagctggttttaaaagaagagaaaattcactagaacagtactgcaaatcttgagtaacttaagatgaagttgaaggatgaactgaaccttggggcagccctgggaacctcaccagcatgagctcatggacttttcgtctagaggtttgtcattagtgtagcttaacttccacttcccagactctacgtcagttcaaaatctggaggaaaaaaatctgattggcttagcattggtcagttgtctacctgaggccaatcagctctgacccctgacagaagtcttatcctagacacatggccactgagatgtgagatgtccataaccccatggctgccagaggttgaagggtttccttctgtggacagagacatatttgttctctgaaaagaggagtcagaaataaattgcaacagatgtgtactacagcagtattgctaactttggaaacggagccagtattgaatactttatggttttgagaaattgtagatggcttcaaccaaggtcatgttagtatattgcaatggaaataggaccagactgttgtctttgttgactggcttcataaaaactactccttgcctcatgccagtgttgttgtttgtgatatttactcactaaatcagaagactcctcctcccaaacttgcttacatcaaggaggaaaaaaagtcctgatgataataactttattgtatttaaacattagcagattatgataatagctacatagtcattctttgctctgtgcatttgaccattgcagatgttttaatgctataaaagatcctgacttactcatctgtattatttctgtaactgggctatatatctgaaggaagtaatctgtgaaagtttcaagagggcatcagttggttacctttgcaaaaataggaaaaatatggaaaatgtaagtgttttaaaagaaaaacaaatttaaatctttgttcttgaaattcatcatttgcgcaaagtaattttttttgtaaggatgatttggtaaaggataaaagtttccggccgggcacggtggctcacacctgtaatcccagcactttgggaggccgaggcgggcagatcacgaggtcaggagatcaagaccatcctggctaacacggtgaaaccccgtctgtactaaaaatacaaaaaattagctgggcgtggtggtgggcacctgtagtcccagctattcaggaggctgaggcaggagaatggcgtgaacccggaaggcagagcttgcagtgagctgagatggtgccactgcattccagcctgggcgacagagcaagactccatctcaaaaaaaaaaaaaaaaaaaaaaagtttccatggaacaaaaatttcgcccaagtacattgggtcaccatgtggcagcagtaggcaacctatcaggaataactgtggttaagaaatgtggttgatgtttttaaggtactgggaaagatgtcagtggtgtataccgggtctttcttctgtcactttaaaattttaataacaattttctgaccaccttctctctatggaacacatagatccagatgattgaaaaattcattttctctcctactggagaaatggttaaaggatatgaacacacaggaagaaatgtgaagagccaattaacaagtgcaaagaggctcaaccctgtgaatgatctgggatgtgcacacttaagtaggagagataaaacatttcacacccatcagatatgtatacatttaaaagtttaaaattactcagtgatgctgataatgtgccacagctttcaaacactgctgatgggcatttctgtcagcacagggtctctacagagccatctcccagttgccagtgtagttgagaatggactgtccaagaatccactgggctagtgtataccactgagaagctagcatgtatgtgcccagtgaaacaagtatagtacacacatgttacagttttgttttaatgtgaaaatttacaaaactcttaagtgtctaccaacagtgaaatagataagtaaaaagtggtatagtcagaatactttatagcaatgaaaattaatgatctacagctgctgtgtccttgcaaaatagttcatttgtatgtgtgctattaaaaaaaaaaagcagataataatgaaatgccaaattcaggagagagttgcctctaaggagaacaggcatagaaagagaaatataggacatatcaaccataccattaaaaaaaaaaaaaactaaagaaaaacttgcatcgtgttaaaatttgacagaaggtgatgggtacatctacttgttatttttttttcctacctttctgtgccgttaaatatttcataataaatagtcattatctgtatcttaaaatatttctcaaagaatttttccatttttggatgattaagctgggaatgggggagtcaacttgttcaaagtaacaaagtaattaaacagttgagctgtgatcaaaaacaaatctgtcttgttccaaaacttatggccctcctttctcgttagtctgattctacaatgtagaaaggaaatataagcttgaacctatgaacctgcagttgcctttgacctatttctgactattccctctctcttccaccctctctggcacacacttgtctgtgcacacatgcacacctgtacatatcctttctgaaagatcgtgtgtttctcacagtcgggcttaggccaagacagctggtgtccggtgagccagtaggtcctctctgtccgtggtatgagagttcctccgtgttcatctggggttatggacgtgggggatattctaaaataccatatgctaaaatgatggcttctagttatcctttcctaaaggtgttccttctgccttggttcctgttagaaatgactacatgggccgggtgcagcagctcacacctgtaatcccagcactttgggaggctgaggtgggaggatggcttgagctcaggaatttgagaccatcctgggcaacaaagtgagaccttgtctctacaaaaaaaaatttaaaaatagccaggtatggtggcacacatctgtagcttcagctacttgagaggctgaggtgggaggatcactcaatcccaggagagtcaaggctgcagtgagctgtgttcacgccaccacacttcagcctgggcaacggagtgagatcctgtcttaaaaaaacaaaaaacaaacaaagtaaataattaattaaaaaatgactacacgaagaatccaggatttgctctgtgggttaagacagtatttgtctttttggttgtctacagaagacattcttggtgttcctcattgtcttttgtatagaaatcttcttagaaaccaagaaaaaaggccgggcgtggtggctcacgcctgtaatcccagcactttgggaggccaaggcgggcggatcacgaggtcaggagatcgagaccatcctggctaacatggtgaaaccccgtctctactaaaaatacaaaaaattagctgggcgtagtggcgggcgcctgtagtcccagctactcgggaggctgaggcaggagaacggcgtgaacctgggaggcggagcttgcagtgagccgagattgcgccactgcactccagcctcggcgacagagccagactccgtctcaaaaaaaaaaaaaaaaaagaaagaaaagaaaagaaaccaagaaaaaagttttaacagaaaaataagtacaaattttaaaatattaaatttaaaaccaaacgacatgtaaactatatgggctaaaaagcatagctaacatttgctaaatgcttatatgttagcatttattactgcatctccaatttgaagatggggaaacaacctcatcaaagaaactaccttagggaagttaaataaattccctaaggtagcccactagtagggagtagggctgagaccacaacagtgttcgagtcagacaccacctttatggggaaggaccttctaggctactaccactccaagtggtcttctccatttctacatctgctgtatgcagggtatgtttgctttgtatttttagtttagtttttccttcagtttttaaattgggtataaggatgcaagagcaaggatggacttgaaaatttctttatactgctgtagcagctaacatagcatgtgggtagttggcattcagtatattcttagatattagctaattctcactgaggaagcaatagcttaagccaaaggtacctaaaatttgttatgggttgatgctgagaattttgaagtactacctgagctgctaagtcttaccagtcttactgatgttaaattcttcactgaggaaattcatttggacttcatggttttcatgattttaacttaagcatcgtcgtaccaggttgttcacagctgagcacatgtacctttttatgccatcctttctgggaaagaaaattaaatatgcctatccaaactttctaaaacaaattatcaggtctgctgttttcattttatcttccgtttattctttaaggcacattcttaccaaggtcccatggatttattgtatctgtacaatttctcttttgtcaaatgcagaacacttttcagtctcttgtcacctgaagacagcatgaatgttgttgctatttccaaggttccaatttggaccttctcttcttcctttcacataattttccatagatagtcttctccagccctcgtgccttcacatcctgattctcatgatttctgaagttgtgtttccatcccacatcactcttagaactccagacctgcagagccactgcctgttgaccagtttttccccaggtatcccataggcacacaacattcacacatcaaaactagcttgaatattagcaactcctgcctgaatgtatttcctgctgttgaatttggtcctcaagtgttattgcatccttttcctcattttcttttcagtccacctctctattcccactacctctcagatcctctcaatgtcttgcttagactatggaaaagccttctagctagctgccctcccccacaccagcgtagtttcctccctctctgtatcaccattcaaatgttgttcgaatggtcaattccacattaccatctgaggttgttggctcctgcgtcaagctgtcagtggctctctcctgcctcagaatcttggtcctcctctttcttctccctggaatgtccttccctcctctctctgcctaattaatccacacttagcattgaacttcaggtgccagattctgggaagcaaacctcttttcttttctttttttttcttttcttttctcttttctcttttcttttccctttcctttttcctttcctttcctttcctttcctttcctttcctttcctttccttcctttcattctttcgttctctttctttctgtctttcttttcttttccttcccttccccttctcccttcttttccatcctttctttgtttctctctctctctccctttcccttccttccttccttccgtccttccgtcctttgtcctttgtcctgtctttcgtcctcccctcccctcccatcccctgcttcctttcttctcactctgtcacccaggctggagtgcagtggtgtgatcttagctcactgcaacctccacctcccagggtctaaagccattctcctgcctcagcttgcccaatagctgggactacaggtgtgtgccaccacaccgggctaatttttgtatttttagtagagacagagcttcgccatgttggccaggctgctttcaaactcctggcctcaagtgatctgcctgccttagccttccaaagtgctgggattacacccacccagccagaaacagaccttttctgacacttaactcttctctttccctgtgcccctcttggctttgttgcccttcttatgtgttctccttggagccccagcagtacctccatggcagcattcctaccagtgtttcataactatctgggtctggcctcccccatcctcacaagcagcatgaatcctcttcatggttgcacgtgagtccccagcccaagccgcctgtggttggttatttgttgacttatttctaggatagtggttctcaactgggggtgattttgcccccaggggacatttggcaacttccggagacctttttgattgtcctgactggtggggcagtgctcctgtcatctagcggggagaggcgagggtgctgccaagcaccccattgcacacacgtcggcccacctcatggtccagtcccaaatgtcaagagtgccaaggttgagagacagtgctgtaggacaaagggcaaaattttatggtacttaagacatctcataacagaaaagatgaagttaattaaatatggagttcttaagtaatacgtaaagggttttagtgtcagcttcattttcattctgaactgctctggatctcttggtggcccaatttgattgtttattcacaatctctcttgtgaggcagatctgtgccccaatggttactaatgggttaacaagtacctggagtgagttaggcacaaaactaaaatggtgaggacagtagaactaagctctgcatttattttagaaatttagacatttactttttcttattttcagtgtgcctgatagaaggtgactacccaagcagtttttttgacgaggtatggagatggatggttcctttttttgactcttaaaaagagtttggctggggttggtggttcatgcctgttatcccagcactttgggaggctgagatgggtggatcacttgaggtcaggagttcgagactagcctggccaacatggtgaaaccccgtctctactaaatgtacaaaaattagctgggcatcgtgctgggcacctgtaatcccagctacttgggaggctgaggcaggagaatcacttctacccgagaagcagaagtagcaatgagccgagatcatgccactgcactccagcctgggtgacagagtgagactccatctcaaagaaaaaagaagaaagaatttaaccatataatcctcagaaaaaaaggccttttgttttatgtagatttgctaatgatgtaaattctagtgccacctccaatatttaggtagtgaattagatgggacttttagtgcactggaagttagaatattgaaggatgaattgttgctgacacagaataacatgggattgacctatacaatcaagtaacaggaaaataaaatcctattgtgctttaaatttggcatgtgtcttggcaaagacagaaaacatcagaaaaggttttgatttttccctccagaattagccatataattttttttcttttttattggccatacgatatgaattcttgttttataattatacagttttcaaaaaattattattttgaaagtttagaaatctgagttggagaaagaaacattttaggaaatcttaggaaaaggagacaatgactcatattcttaaatagttcctgttggtatttgcaatttcaaactagtctctggaaaataattatataattgtatggagagagtcaagtctttatctttacccttggggacttcttttggcaaattaaatgatttatacctgaagagacaatttagcttcatgttaaatttcaaaatccaagaaatactttctttccagtagctgtcagattgtagtgacgatcatcagcctttcagatgagtgttattagttcagttttggagattgcctctatgtgtggtactgtcttgtagtttcctgaaagaagattgaagtatttgtacttatttttgtgggttctgtgagataaagtctggcttacagttgatttaaccccttcttatctttgtcttggttacttttggattttgtcagaacagaagttaaagctgcagatactgtattcaaaaaggtccttcaagagctgtaactgtaagggaatggaatgatagatgtatataaatgtggacttgaataaagtatcctttgtatttaaaaatatgcctttcttttaattttttttcagccaagttctatagaaattttagagtattcatcagatagtgaaaaagaagatgatttggaaaatgtcctactcattgattcagaatcccctcacaaataccacgtgcagtttgcatcggatgcaagacagattatggagagactgatagatccaaggacaaaatcaacagagaccattttgcatacacctcagaaacccacagctaagtttcccaggactccagaaaattcagcaaagaagaagcttttaaggttaaattatacccttttaaatactctttttaaatttttctctttctttaaaaacccaaatatctaaaatgttaattttaagatacttgtatatgaagtcctaaattctggagctgattaatggaatgttcatcgaagttgagggtcatggctttactcatgcccagcagatgtgactgcctttcttaatggagatttatttgggttatcaaatgttattgagagtcagtgttctaggtgctgtggagacaagtgtgtaattgttctgttcttgagtaacttataatgtaaaaagggaaatggaagtatgtgtaaatcgtgtcagattacttttatgagagagatctgccagggcaacacttgcaagtgcaaaaaagtatgagagagcagaacccacagacgagacgtatctggtgtgccatgaactacagtgtcagtcaggggctgggctgtggccatggtgagcaaagcaggaaagataacgtgaaggagcctgtagggaccttccccaaccccgtgtaatacaaggtgctctttgttgtttgaccaaacaatgccaagcaaagactcaatgaaggtaagaaagagaggccgggcgcggtggctcacgcctgtaatcccagcactttgggaagccgaggtgggtggatcacaaggtcaggagttcgagaccagcctggccaacatggtgaaaccccatctctactaaaaatacaaaaattagctgggcgtggaggtgcgcacctgtaatcccagctacacaggaggccgaggcaggagaattgcttgaatctgggaggcggaggttgcagtgagctgagatcgtgccattgcactccagcctgggcaacagggcaagactccgtctctaaaaacaacaacaaaaaaaagaaagaaagagaacctgtaggaagcattgccacaaaagcaaaagtaatagagcatttcaaagcaaaggagtttcagtagaaagagtaaatatgatcatgaagagcgtaggtgttggatccacggatgatattgttacatcataagaagaccagcctggcatgcactgaggggagcccagggtctgtggctgaagtagcacacggttcaaggagtgacgacagggtcatggctcttatgtgggaactgggacccaggcaggagggtttcgattactctcttccgtattgccagtcaccttgaaaagatccagcctctagagagggtgcagggaataggagagacagattttgaaaacagtgggggtccgaataaacagagttcgcaccatggctacatcagcatcctggagaagaggtagggaaggaaggtggagaggagagccccagcttgaagacaccagtggaggaaagagcttgaggatgtggccgagtttagtgggatggtcagggcacagagatccatttgtgcctactcaccacgagacaggaggccttatgcccaaagcgaagaagttgtggcctcaaaaaaagaatgtaatttgtaatagtagtagaatgtaatttgtaatagaaggtggtttgtaatagtctctgggaagaaagggagggaagcccattaaaggaattagcatgtttttgttggtgaaggtgatgccatgcgattacagaaagtcatgtccccagccctgctgagggccgaccacttgccaagcactgttcatgcacaggagcaagcaaagtggaatggttgctcataacagagagcaaaggtgaatggagccccgcttgtgtcgagggaagggcaataaggagccaagaagtaaaatagatgtcaactcagagagagaaattttatggagaaaaagcagaaaagggggacagaaaagggtccagaggtgggggaggacatttcagtttgaaacagactcagggaagccctgaggagatgcctcattgagcagctggaagaatggagtgtgcagtggagcaggtgcttttggttttgtatctttggttgacaatcatgaggcttttggccattttcagttagacattatacatcttagtgggactatgggtctgcagtccacgggcaggcctggcgttggagatgtgaatgcgtagactgcagtgtccagatcttttgaagcatgagctaggtcaggtcacaggagatccagtgctgggcgagaggagaacctgtccaaggcctgagtcctgggtgctctgccaaagttggggtgtggagggagagactgctgagggaggagccaaagcaaagggagcatggtgtgctgaggcaagtgaggagagagggtgacccactgtgacagatgctgccagggctgacctctgtgattccacggtgaaaggcagggtgtgcagccgtctcagcggcgtgaccaggcaaagcagactgccatggactcgagagaatggaaagagagaaactgaagacagcacgatggaactctggagaagttttgctttaaggagagcagatcaaagtgtgttagttgaaagtgaatgtgagggtcaaggtttcttattttaaaggtgatagaaatttcatcatgtttgtatgttgataggaaagtccaggagaaaacaggaaactgctgaggcaggggagggagggcacaactgatggagttgtctctgtcgtggtgaagggaggcacaaatgggggtgaccttgtcaggagttcagagtgtgcacccatggccagggcgggcagcacccatgcaggtgccaggatggacctggtgaggagcagacaggccatcctcggacagctgggaaggcagagtccctgctgttacaggcacgatgtatgtggcttgggaactagttctttccgatcaattctattccagtaaatagggcagtccttcattagctgacagggagtatgagaacggagttgtggaggtctgaggagagagaatctgtcacacgggcgtgtagtgggcacagatgaactggagaagggctccagggctgtctgacaggatcaggccctgttgggaagtcgtggtcatggactgagtttgagacctatcagccagtgtggattcgacccttgggctgcccatgtgggcagagcacaaggatggtccaggggcacactaaaaggggttgacaggagttccgagagtagcaataataatgacccgtgaagcctaagctgggtaaagtgagaatgagaatgtgcagtatgtggagcatggtgagttggggtagaactcactgattgaggactggggaaaaggttggtcaaacacttacagagtaacgctactagaggtgatgagctggggcagtaacgatgacgggcgcccagagttgagccgctggagggaggcagttcgggacttcaagattagagtggctgaggcgagtggaggacaccatcttggagctgggcgggcactgacatcagcaagaatggtggccataacccaggagataaggcctctaagggtggcaggtcagtgccagttgccttccctggcattgggcaggctgagttggagctggaacgtaagggaggctaccagatggtcttgaagctgcagtgaagagcaaggccatccttcctggcctttcaggcccagtgagagggtaggggagacaacacagtgctgtttaaggtcaggtcactgtcagggagtcctcaacagaaggtggaggggacgttcctagaagtggctgaagctgctcaaacagcatgcaattgatcattttcttcttgtgatttctaggaacaactaaatgaggatgtctgttttgaagttactatgcttaaatactaaaaatgagattgatgtgcttagggttgttagtctcaggtcttcaaactggaagacttcctgttttactgagctgactagaaaggcctgtgactgccttgtctgcttttgatgaagggatggtggtttgtggtgattaaaaagaacttttttacctgataaagaccaggtagcaaggattgagagaggtagttgacatttgaaggatggagcacattggcccttctctttctggtttgccctgcaggaaatgtcactcagtctctttggacttctttttctttctttctttttttttttttttttaaatttgtggaactattcaaagcataagtaacaaacaccaatgcaaaattgttagatatttaagtgtgttggtaataataaagctatatatatctccccagtttgatggtcaagttgtttttcacagtgcttattatatcttgaaaagacaaaatctacgtctgattggtgtacctgaaagttacagggagaatggaaccatgttggaaaacactcttcaggatattatccaggagaactgccccaatctagcgaggcaggccaacattcaaattcaggaaatacagagaatgccaccaagatactcctcgagaagagcaactccaagacacataattgtcacattcatcaaggttgaaatggaggaagaaatgttaagggcagccagagagaaaggtcgggttactcacaaagagaagcccatcagactaacagagaatctctcggcagacactctagaagccagaatagagtggggggccaatattcaacattcttaaagaaaagaattttcaacccagaatttcatatccagccaaactacgcttcataagtgaaggagaaataaaatcctttgaaacaaatgctgagagattttgtcaccaccagacctgccttacaagagctcctgaagaaagcactaaacatggaaaggagcaactggtaccagccactgcaaaaacatgccaaattgtaaagaccattgaggctaggaagaaactgcatcaactaacgagcaaaataaccagctaacatcataatgacaggatcaaattcacacataacaatataaaccttaaatataaatgggccaaactctccaattaaaagacagagactagcaaactggataaagagtccagacccatcagtgtgctgtattcaggaaacccatctcacgtgcagagacacacataggctcaaaatgaagggatggagaaagatctaccaagcaaatggaaaacaaaaaaaaagcaggggttgcaatccttgtctctgataaaacagactttaagccaacaaagatcaaaagagacaaagaaggccattacataatggtaaagggatcaattcaacaagaagagctaactatcctaaatatatgtgcacacaatacaagagcacccagattcataaagcaagtccttagagacctacaaagagacttagactcccacacagtaataatgggagacttgtacaccccactgtcaacattagacagatcaatgagacagaaagttaacaaggatatccaggaattgaactcagctctgcacctagcagacctaatagacatctacagaactctccaccccaaatcaagagaatatacattcttctcagcaccacatcgcacttattccaaaattcaccacatagttggaagtaaagcattcctcagcaaatgtaaaagaacagaaattataacaaaatgtctctgagaccacagtgcaatcaaatggtactggtgtcccactacgagaatctctgggacacatttaaagcagtgtgtagagggaaatttatagcactaaatgcccacaagagaaagcaggaaagatctaaaattaacaccctaacatcacaattaacagaactagagaagcaagagccaacacattcaaaagctagcagaaggcaagaaataactaagatcagagcagaactgaaggagatagagacaaaaaacccttcaaaaaatcagtgaatccaggagctggttttttgaaaagatgaacgaaattgatagactgctagcaggactaataaagaagaaaagagagaagaatcaaatagacacaataaaaaatgataaagggaatatcaccaccagtcccacagaaacacaaactaccatcagagaatgctataaacacctctacgcaaataaactagaaaatctagaagaaatggataaattccagcacacatacaccctcaccagactaaaccaggaagaagctgaatccctgaatagaccaataacaggttctgaaaatgaggcaataattaatagcctaccaacaaaaaaaagtccaggaccagacggattcacagccgaattctaccagaagtacaaagaggagctggtaccattacttctgaaactattccaatcaatagaaaaagagagaatgctctctaattcattttatgaggccagcatcatcctgataccaaagcctggcagagacacaacaaaaaaagacaattttagaccaatatctctgatgaacatcaatgcaaaaatcctcaataaaatactggcaaactgaatgcagcagcacatgaaaaagcttatccaccacaatcaagttggcttcatccctgggatgcaagggtggttcagcatacgcaaatcagtaaacgtaatccattatataaacagaacaaaagacaaaaaccacatgaatatctcaatagatgcagaaaaggcctttgacaaaattgcaacagcccttcatgctaaaaactctcaataaattaggtatatatcggacatatctcaaaataataagaggtatttatgacaaacccacagccaatatcatactgaatgagcaaaaactggaagcatttcctttgaaaactggcacaagacagggatgccctctctcaccactcctattcaacatagcgttggaagttctggccagggcaatcaggcaagagaaagaaataaagggtgttcagttaggaaaagaggaagtcaaattgtccctgtttgcagatgacaggattgtacatttagaaaaccccatcgtctcagcccaaaatctccttaagctgataagcaaattcagcaaagtcttgggatacaaaatcaatgtgcaaaaatcacaagcattcttatacaccaataacagacaaaacagccaaattatgagtgaactcccattcacaattgcttcaaaaagaataaaatacctaggaatccaacttacaagggatgtgaaggacctcttcaaggagaactataaaccactcctcaacgaaataaaagaggaaacaaataaatggaagaacatttcatgctcttggataggaagaatcaatattgggaaaatggccatattacccaaggtaatttatagattcaatgccatccccatcaagctaccaatgactttcttcacagaattggaaaaaaatacttcaaagttcatatggaaccaaaaagagccgcattgccaagacaatcctaagccaaaagaacaaagctggaggcatcacgctacctgacttcaaactatactacaaagctacagtaagcaaagcagcatgatactggtaccaaaacagagatacagaccaatggaacaaaacagagcctttgaaaataataccacacatctaaaaccatctgatccttgacaaacctgacagaaagaagaaatggggaaaggattccctatttaataaatggtgctgggaaaactggccagccatatgtagaaagctgaaactggatcccttccttacaccttatacaaaaattaattcaagatggattaaagcattaaatgttaaacctaaatcttaaaaaccctagaagaaaacctaggcaataccattcaggccataggcaagggcaaggactttatgtctaaaacaccaaaagcaatggcaacaaaagccaaaattgacaagtgggatctaattaaactaaagagcttctgcacagcaaaagaaactaccatcagagtgaacaggcaacctacaaaatgggagaaaatttttgcagtctacccatctgacaaagggctaatatccagaatctataaagaacttaaacaaatttacaagaaagaatcaaacaacccaatcaaaaagtgggcaagggatatgaacagacagttctcaagggaggacatttatgcagccaatagacacatgaaaaaatgctcatcatcactggccatcagagaaatgcaaatcaaaaccacaatgagataccatgtcacaccagttagaatggcgatcattaaaaagtcaggaaacaacgggtgctggagaggatgtggagagaaataggaacacttttacactgttggtgggactgtaaactggttcaaccattgtggaagacagtgtggcgattcctcaaggatctagaactagaaataccatttgacccagcaatcctattactggatatatacccaaaagattataaatcatgctgctataaagacacattgacacgtatgtttattgtggcactattcacaatagccaagacttggaaccagcccaaatgtccttcagtgatagagtggattaagaaaatgtggcacatatactccatggagtgctatgcagctgtaagaaaggatgagttcatgtcctttgttagggacatggatgaagctggaaaccatcattctgaggaaactgtcgcagggaaggagaaccagacaccgcatgttctcactcatatgtaggagttgaacggtgagatcacttggacacaggaaggggaacatcacacaccggggcctgtcatgtggtggggggatgggggagggatagcattaggagaaatacctaatgtagatgacgagttaacgggtgcagcacaccaacatggcacgtgtgtgtgtgtgtgtgtgtgtgtgtgtgtgtatatatgtgtgtgtgtatatatatatgtatatttaacaaacctgcacattgtgcacatgtattccagaacttaaagtataataaaaataaaccaaaattttaaaatattgtatttacagtcattttaattgtttattctttacctggttgtatagcttattaaaaatattttgactgtaaatcagttggaatatttttgaatctttatccttctttacttctccatattgtttttatagaaatgtttaccaatgtcaaattgataccagtcatcttttgagataggttaccagtctgttaattttatagaaaagataattaggatatcttaacttgctgagtgaattcatcatatttttattccatcggagtttggcctttataaataacttatctggctacgttcaaaagagttaatttggatatagatggcagggccttcctgaacttttggtatgacttaattttttttaacatgagatatgtttttactagaaataggattgttgattagaggacatggtgtttcctaagctcaagttcttaagttcaagtgcatgtgactggaattccctgcataacaggccctaatggccaaactcaggtgagatgcagattttttctgagggctccagatactgctgtgtgtagagagcgcctgtgcatgtttactgttgcttttacctttcatcctgtaatctgcacagttttcttacgaggttctaggcttgactttaaccagatagttttttcagagttcattttgcctttttttttttttttctgtaaggtcacagcattgaaaagcaacatttggcaaataatgttctagatagttgggcaaagaatacagcatttgcttcttgtatttattgtgcatatcattttaaataatactgtttaagaggtgctaggtatattatcaagactaagagtttgaactctggaaccagactgcctaggcgtgcatccagctacaccactcattagacatttcaccttggacagatgtttaacatcttggtgcctcagtttgtcatctataaagtggaataataatagtacctacttcacggtgttgtgtaaaggggaagcataaacgagttacttcatgtaaacagaatgatatgaagaagggcttaataggaagtagaggttgacatgtagaggtgctatggcatatttctgagcataagaggttttaactttttttctgttacatgtactacacgcaagtatattcagaaatagtaacctataggaaaacatactaggtgtctctataggtattaatactagcaatattatgtatttattaaaatatttccatcataatggaaagatctgtatataggctgcaagtgaaaaacataacaaaaacagttacaccaatcatgggcattttttgaaggtttactaaatgccacgtgctgcactaagtccattctggttttaacagctagttcctcatctggttagttacgtaatgctggagaagtttcttaacctctctctaaattctggttttatcatctgtgcagtgggtactgatatctgttctttcagtctcaaagggatattatttgaataaaggtaatgtagtgaaatgattaatgaattggtaacaagataataaacttatgagataatacattgatacccgatatagcatgtagctatagtggtaattaacaactgatcttaatttttcttgaaattatagttatgttagtagttgataacttctctttctctctacatatgcatgtatttatttacttataatttacatacacctatatatttataagcataaatatatctcagtaagtatatgtgttcattgataggttaatgctcttctgcagtgcctgcatgtctgtcgttataaattgtctttctgctatacatggaagttttcttttttataacattggtatctttgctgtgtgtttgtgattgatactcaaatatctctggagtccaaataagggacccatacccaagtgctcttatttgagtgttctatcaacagttggcaaagttattcttgactggaactctgagcccactttacatttctttgctcctatgtgctgagctcattgggagctttcccacctccatggcagcactcatagctgtccttgtgtccctggtacctaacgaagtgctaggtgccagcatatagcaggtggtaagtaagcagtgcttgttttaggattgaataaatgaactaagaaagaatagaaaaataggtaagctgatatttagctgtcatatttccaagaatgtgatgtttttggacataatattagcccatatttctaagaatcagaaaaccaagcttctaagaaaacaaaaaactgacttatgaggatatggcctctgggaagataatgtggtaacaaatatacgttaaaattttgcatgttttatctgtttgtctctggttggggggtatacaatataaatgttccagtgattctgaagttttccttttaactaaacttaatacattataattcattaaacagaggtggactagcagaaagactaaatggactgcagaatcgagagagatctgctatttctttgtggagacatcaatgtatttcttaccaaaagacactttcaggtaaggcttgtgcaggaatctgagacaatgtgtaaaaaaatattttagttaaaagaattcttacattaaaatatatgaagttaattgttaatattttcatgactttttaaaaattttttccaacattctaattttaacatataaaaactatatatagtaaatatatttaacttgatgagtttaaaaataagcatactcttatgaaaacatcaccacaatctgtgctataaatctacccttgacctccaaaaattttgttctattcttatcattaagagcactctaccctcttagcaaaatttattttgttttatttcattatttagagacagggtctcaccgttgcccaggctggagtgtagtgacataatcatgtagcctcaaactcttgggctcaagcaaattctctcacttcagcctcccgactggctaagaccacaggctttttccaccgtgcccagctcctcttagcaaaattttaagaatacaatacagtatgttaactataggcatgattctgtactgcagatctctaggactggtttagcttatataatcaaaacgttgtaccctttgacaaatacctctctattggcagccaccattgcagtctctgcttctgtagccagagcactattagtcaagaaaaagagataaaagatatccaagttggaaagcaagaggtaaagctgtctccgtttgcagataacatgatcttatatctagaaaaccctataagacaccctgcccctgccaaaaaaaagttagaactaataaatgaattcaacatagtagcaggattaaaaatcaacataccaaaatcaattgcatttccatatagtaacaatgaaatttctgtatattaacaacgagatattttcttttctcttggaaattaagaaagcagtctcatttacaataacatcaaaaagaatgaaattcgggaccgggcatgatggctcacgcctgtaatcccagcactttaggaggctgaggcgggcagatcatgaggtcaagagatcgagaccatcctggccaacatggtgaaaccccatctctactaaaaatataaaaattagctgggcgtggtggtgcacgcctgtagtcccagctacacgggaggctgaggcaagagaatcgcttgaacccaggaggcggagtcttcagtgagccaaggttgtgccactgcactccagcctggcgacagagtgagactctgtctcaaaaagaaaagaaaaagaatgaaatacttaggaataaacttaatcatggatgtcaaggacttgtactctgaaaactgactttttttttttcaggtgtcatataggtctcagaaattattccaacaaatgagtttattcctccaaggtctaatgactgaaaactcttgtttttcaacaaattgcttgatattgaaaagattccacatgtctagaaaagcctcctctcctcctaaacagtgctgatttggtagttttttcctgtgtgttccctccatctagagtaggggatgggtaggtgtgggcccagtcatgtattccaaaccaactattattagtctttcctgagggatcattgggatatacattttaataggttcccaggtggtttctgcacatgctagaatttaagaaacattattcttagagttgatctccccgttcccaataatatattcttctaaatagatcactcaactgttatgttctcaactattatattacacatttctttagaagacttttcaattcttatctcatttattccttttaaaatcctttccgaggccaggtgtggtggctcatgcctgtaatctccatcctttgggaggccaagacgggaggatcacttgaggccaagagttcaaggccagcctgagcaatgtagtgaaacccattcgctgcaaaaatttaaaaattaactgtacgtggtggcacacgtctatagtcctaactactcgagaggctgagatgtgagaattgcttgagcctaggagttctaggttacagtgagctatgatcgcacctctgcacaccagcctgtgtgacacagcaagaccctgtctctaaaaaaatacaaaaaactcctttcccagctgtcgcttagcaattgccttctctcacattcttgcattaaagtactataatatgaaatacatatatatgtatcaggatgacctaatatatatgacccaagaatactttttctttttttattttattttacctttttttttttgagacagcatctcgctctgtcacccaggctggagtgtagtggcaagatcctgactcactgcaacctccgtatcctgagttcaagcgattctcctcctcaacccccggagtagctgggactataggtgcctgccatcacgcctggctaatttttgtatttttagttgagatggggtttcgccatgctgggcaagctgatctcgaactcctgacctcaggtgacgcacccacctcagcctcccaaagtgctgggattacaggtgtgagccatcatgcccagtcactttttcttctatacatatctgtgggtcaatccattgttatacttacgactttgtttcttggcgtttttttatattaatgattatgacattaaataataatctttacaactcatttgaccaccctgaaggccaggcaaacataaagtttgcctggtcttattatttagagaagtcttttttattattattattatattttaagttttagggtacatgtgcacaacgtgcaggtttcttacatatgtatatatgtgccatgttggtgtgctgcacccattaactcgtcatttagcattacatatatctcctaatgttatccctccccgctcccccaaccccacaacaggcctcagtgtgtgatgttccccttcctgtgtccatgtgttctcattgttcatttcccacctatgagtgagaacacgtggtgttcggttttttgtccttgcgatagtttgctgagaataatggcttccagcttcatccatgtccctacaaaggacatgaactcatccttttttatggctgcatagtatttcatggtgtatatatgccacattttcttaatccagtctatcattattggacatttgggttggttccaagtctttgctattgtgaatagtgccacagtaaacatacgtgtgcatgtgtctttataacagcatgatttataatcctttgggtatatacccagtaatgggatggctgggtcaaatggtaattctagatctagatccctgaggaatcgccacactgacttccacaatgattgaactagtttacagtcccaccaacagtgtaaaagtgttcctatttcttcacatcctctccagcacccgttgtttcctgactttttaatgatcaccattctaactggtgtgacatggtatctcattgtggtttcgatttgcatttctctgatggccagtgatggtgagcattttttcatgtgtctcttggctgcataaatgtcttcttgtgagaagtgtctgttcatatcctttgcccacttgttgatggggttgtttttttcttgtaaatttgtttgagttcattgtagattctggatattagctttgtcagatgagtagattgcgaaagttttctcccattctgtaggttgcctgttcactctgatggtagtttcttttgctgtgcagaagctctttagtttaattagatcccatttgtcaattttggcttttgttgccattgcttttggtgttttagacatgaagtccttgcccatgcccatgtcctgaatggtattgcctaggttttcttctagggtttttatggttttaggtctaacatttaagtctttaattcatcttgaattaatttttgtataaggtgtaaggaagggatccagtttcagctttctacatatcgctacctagttttcccagcaccatttattaaataaggattcctttccccatttcttgtttttgtcagctttgtcaaagatcagatagttgtagatatgcagcattatttctgaggcctctgttctgttccattggtctatatctctgttttggtaccagtaccatggtgtttttgttactgtagccttgtagcatagtttgaagtcaggtagtgtgatgcctccagctttgttcttttggcttaggattgacttggcaatgcgggctcttttttggttccatatgaactttcaagtagttttttccagttctgtgaagaaagtcattggtagcttgatggggatggcattgaatctataaattaccttggacagtatggccattttcacaatattgattcttcctacccatgagcatttaatgttcttccatttgttatttagaatttagggaagtcttaatagcacattggcttagacacaaaaaaagaatttaatgggacttgtaattgaatgccacagggaccatgcttcaggcatattggttggaaaggctggcggtcattctctgtgtggtaactctcctcttcaagtccgataaaaagaatgctttctttccaatattttaccagaagtgcccaaaatgactttcattggtctggtagagacaggaatccctgcttgaaatcatcctaatcactctggccaacatgggctacagtcagtaacacactaccatccatatccttaacttgtgattattttatttccagagttatttaataaaaatcagcaggaactatttgtaattctacagtatgttatctcattttagtctttcagtgattcttcatgttctcctatttataagtatttgcatgtgtatatttaacctctcaaatgtgaatgacctggaactggagtgaccactgtttcttataatctacttccctccatctctaaatagtttctgtttaatttgtgtgtcactcattgctttcaatttagtttgtggttctatgcattataaacttcttttgttctgcttgaaccagaaaaatatttccttgccacttaaattctcaaatggctcctccttcttttgactcccttcttttgaagtaatgatatgagagaatggcaagcttgaatttctttcaactggatataaatatttgcattattgggtttcaggaaggccactttgagttcttagttacaacattagctttgtgttgggttgtggtggatggtgaactatcagatggaaaagaggagcatggcacacaggactctggctactggcggcctaaaaggccagaacctgaagatatcatttgcatactgcgttgacattcatgcagcgcttttgtttcctttttccacatgaggagatggaatgctaattctgtgaggactcttagagacattccagtccaagctcctctttggcagattgcctagaggagggaggtgacttgctctgattatctagccaaggaagagacagggccaaagccaggcctcctggttcccagtgccatgctctttcaaaccctgccactcttctgccatatgaaaataatcattttaatcctctgccagtttcctcttgatcttgctagtggagaataaccaaatagtccaaattggactttgcatgtttagttcaggtagctgtcttgaattttgctgatgttattatagcattgacaaattgtaaatatcttccaagtaggagcaaaacatgggcgaactttgaattggatcataaattcttaaatagtttgggttctgtctgtcctgtttcccccttcaacatgatcctcattgttgtatcacatttggaggtttgatgttggtgggtacaatgctgaaggcttactacgtattaaatcatttcatatgcaaactaatcttctagaagagtttgctttccttattttccagataaaaaaaactgtaggttgagtatatgctatagatgactaaggccagatttgaactgtcaagtcgaagtttgttaatctctacagaccttcattagttactctgtttgggctggagaaagttaggcttaagaagacaagggattgaggagttagcaaaattagaagtattaatacaaatgtttttcttttgaaaaaaatcttacaaaatgtaggtctgtatcacattcttgagacagcactaattggtgaagcataggacataggtttgaaggttgcagagactgtgtaaattgtggaactgtataggatgtcctaaagtcttatgattttgatgggaagtggcagattgtcttcttaattattgatattaatacacatagaattcactaggcgttgtcatcccggttactcactatagtgaattgatcaaattgtcaagtatgtagttgacagagtgtcttctgcttctctggatagaaaaataccaagttaaacatgtatgactggtggtccagaatgaagggagaaaaaggtgattttttttgtttggctcaaaacaaaaacataacttacttgaaatgttccttacaatatcacttcttaaattttgttctagatattaagtgtagcatgtcaaactaagattctccttatttatctgcttcagagatgagaaattatggcttacaaaattgatctgtcgattataatgatttagcttgagatctttctttccacgtgtcttccatttggggagtatttaattaccccacagttgagaggtctgtttttgtctgtatatttattcaagttgttgtgtatgtcagtatcccactcccttatattgctgggtactattgcatggtacgaatgtgccacagtttgtttaactgttcgttgactgaagggcctttgggtcgtttccatatttgagtcattacaaataaaacgtgctgtgaacatttgtataccagtttttgagtgaacatatgtttttatttttctgggataaatgatcaaatgatttaaaatgttggaatgtctctaacacattattctgcccgtttttgttttgttttgttttgttttttttctttgaggcagagtctcgctctgttgcccaggctggagtgcagtggcaccatctcagctcactgcaagctccgcctcctgggttcacaccattctcctgcctcagcctcccgagtagctgggactacaggcacccgccaccacgcctggctaattttttgtatttttagtacagatagggtttcaccgtgttagccaggatggtcttgatctcctgacctcgtgatcctcccgcctcggcctcccagagtgctgggattacaggtatgagccaccatgcccggcctattctgcccttttaaaacactttgtatttaaaaataattgtagattgacatgcagttagaaataatactgagagatcccttgtaccatgcccccagtttcccccggtaatgacatcttttataactgtagaatgacaggacagccaggatgatgatctccaatacagtccattgaccctgctcagatttcaccaattttacatgcatttatttctgtgtgtattttttgttttatgtaatcttatcacctgttactgtggtctgaatttttgtatgctcccaaaattcatgttgaaacctaatcaccagtttgttggtattaggaggtaagtaaggcttttggaaagtgattaggtcatgaggtggagccctcatgaagggaattagaagagaccgtagagagctagctcatccttccactgtgtgaggaggatacagcaagaagaatccaactgtgagaatgtaggctctcactaggcacagagtctgccagagcgttgatcttggacttcccagcctgcagaactgtgagaaacaaatttctgttgcttcgaagccacacagctctggtttttttgttgtaacagccaagatggactaagatacttgtttagattcatgtgactatcacatagtccagacacagaagggtccatcaccccaaggattctcatgccaccctttatagccacagtcatctctttcccactctcctccctgatgccttgcagccactaatctgttaaacatttccatagtttgttatctaaaaatgctcacacctgtaattccagcactttgggagaccaaggccggcagatcacaaggtcaggagtttgagaccagcctggccaacatggtgaaaccctgcctctactaaaaatacaaaaattagccaggtgtggtggcaggcgcctgtaatctcagctacgcaggaggctgaggcagagaattacttgaaccccggaggcagagtttgcagtgagccgagatggcgccactgcactccagcctgggtgacagagcaagactctgtttcaaaaaataaaataagttatagaaatggaataatatagtttataaccttttgggattgagatttttcacttagtttaattccccggagatttatccaagttgttgtgtatgtcaataacccactccatattgctcggtagtattccatggtacaaatgtgccacagtttgttgaactatttgttgatgaagggcctttgggttgtttccatatttgagtcattaaaaataaaaggtgctgtgaacatttgtgtaccagtttttgagtgaacatgtttttatttttctgggataaatgatcaagattgcgattgtcaggtgttatggtaagggcatgttttgtttcattaaaaaaggcataagaataccaaatatttcaatgaattctttttttttatactttaagttttagggtacatgtgcacaacatgcaggtttcttacatatgtatatatgtgccatgttggtgtgctgcacccattaactcgtcatttaacattaggtatatctcctaatgctatccctccaccctgcccccaccccacccacaacaggccctggtgtgtgatgttccccttcctgtgtccatgtgttctcattgttcagttcccacctatgagtgagaacacgcggtgtttggttttttgtccttgcgataatttgctgagagtgatggtttccagcttcatccatgtccctacaaaggacatgaactcatcctttttttatggctgcatagtattccatggtgtatatgtgccacattttcttaatccagtctatgatttttggacatttgggttggttccaagtctttgctattgtgaatagtgccacaataaacatacatgtgcatgtgtatttatagcagcatgatttataatcctttgggtatatacccagtaatgggatggctgggtcaaatggtatttctagttctagatccctgaggaatcgccacactgacttccacaatgattgaactagtttacagtcccaccaacagcgtaaaagtgttcctatttcttcacatcctctccagcacctgttgtttcctgactttttaatgatcgccattctaactggtgtgacatggtatctcattgtggtttcgatttgcatttctctgatggccagtgatggtgagcattttttcatgtgtctcttggctgcataaatgtcttcttgtgagaagtgtctgttcatatcctttgcccacttgttgatggggttgtttttttcttgtaaatttgtttgagttcattgtagattctggatattagccctttgtcagatgggtagactgcaaaaattgtctcccattctataggttgcctgttcactctgatggtagtttcttttgctctgcagaagctctttagtttaattagatcccatttgtcaattttggcttttgttgccattgcttttggtgttttagacgtgaagtccttgcccatacctatgtcctgaatggtattgcctaggttttcttctagggtttttatggttttaggtctaacatgtaagtctttaatccatcttgaattaatttttgtataaggtgtaaggaagggatccagtttcagctttctacatatggctagccagttttcccagcaccatttattaaatagggaatcctttccccatttcttgtttttgtcagctttgtcaaagatcagatagttgtagatatgtggcattatttccgagggctctgttttgttccattggtctatgtctctgttttggcaccagtaccatggtgtttttgttactgtagccttgtagtatagtttgaagtcaggtagcgtgatgcctccagctttgttcttttggcttaggattgacctggcaatgcgggctctttttggttccatatgaactttaaagtatttttttccaattctgtgatgaaagtcattggtagcttgatggggatagcactgaatccataaattaccttggacagtatgcccattttcccaatattgattcttcctatccatgagcatggaatgttcttccatttgtttgtatcctcttttattttgttgagcagtggtttgtagttctccttgaagaggtccttcccatcccttgtaagttggattcctaggtattttattctctttgaagcaattgtgtatgggaattcactcaggatgtggctctctgtttgttattggtatataagaatgcttgtgatttttgcaaattgattttgtatcctgagactttgctgaagttgcctgtcagcttaaggagattttgggctgagacgatgggtttttctagatatacaatcatgtcatctgcaaacagggacaatttgacttcctgttttcctagttgaataccctttatttccttctcctgcctgattgccctggccagaacttccaacactatgttgaataggagtggtgagagagggcatccctgtcttgtgcagttttcaaagggaatgcttccagtttttgcccattcagcacgatactggctgtgggtttgtcatagataggtcttactgttttgagatacgtcccatcaatacctaatttgttgagagtttctagcatgaaggttgttgaattttgtcaaagggcttttctacatctattgagatattcatgtggtttttgtcgttggttttgtttatatgctgggttacgtttattgatttgcatatgttgaaccagccttgcatcccatggatgaagcccacttgatcatggtagataagctttttgatgtgctgctggattcggtgtgccagtgttttattgaggatttttgcatcgatgttcctcagggatattggtctaaaattctcttttttggttgtgtctctgccaggctttggtatcaggatgatgctggcctgataaaatgagtgagggaggattccctctttttctgttgattggaatagtttcagaaggaaagataccagctcctccttgtatctctggtagaattcggctgtgaatccatctggtcctggactttttttgtttggtaagctattaattattgcctcaatttcagagcctgttattggtctattcagggattcaacttcttcctggtttagtcttggaagggtgtatgtgtccaggaatttatccatttcttctagattttctagtttatttgcgtagaggtgtctatattattctctgatggtagtttgtatttctgtgggatcggtggtgatatcccctttatcaatttttattgcgtctatttgattcttctctcttttcttctttattagtcttgctagtagtctatcaattttgttgatcttttcaaaaaaccagctcctggattcattgatttttttgaagggtttttgtgtctctatttccttcagttctgctctgatcttagttatttcttgccttctgctagctgttgagtgtgtttgctcttgcttttctagttcttttaattgtgatgttagggtgttaattttagatctttcctgctttctcttgtgggcatttagtgctataaatttccctctacacactgctttgaatatgtcccagagattccggtatgttgcgtctttgttctcgttggtttcaaagaacatctttatttctgccttcatttcgttatgtacccagtagtcattcaggagcaggttgttcagtttccatgtagttgagcagttttgagtgagtttcttaatcctgagttctagtttgaactgtggtctgagagacagtttgttataatttctgttcttttacatttcctgaggagtgctttatttccaactatgtggtcagttttggaataggtgtggtgtggtgctgagaagaatgtatattctgttgatttggggtggagagttctgtagatgtctattaggtccacttggtgcagagctgagttcaattcctgggtatccttgttaactttgtgtctcgttgatctgtctaatgttgacagtggggttttaaagcctcccattattattgtgtgggagtctaagtctctttttaggtctctaaggacttgctttatgagtctgggtgctcctgtattaggtgcatatatatttaggatagttagctcttcttgttgaattgatccctttaccattatgtaatggccttctttgtctcttttgatctttgttggtttaaagtctgttttatcagagactaggattgcaacccctgcctttttttgttttccatttgcttttagatcttcctccatccttttattttgagcctatgtgtgtctctgcaaatgagatgggtttcctgaatgcagcacactgatgggtcttgactctttatccaatttgccagtctgtgtcttttaattggcacatttagcccatttacatttaaagttaatattgttaggtgtgaatttgatcccgtcattatgatgttacctggttattttgctcattagttgatgcagtttcttcttagcctcgatggtctttacaatttgtcatgtttttgcaatgcctggtaccagttattccttttcatgtttagtgcttccttcaggagctcttttagggcaggcctggtggtgacaaaatctcccaacatttgtttgaaacaattttatttctccttcacttatgaagcttagtttggctggatatgaaattctgggttgaaaattattttctttaagaatgttgaatattggcccccattatcttctggcttgcagagtttctgcaaagatgtcagctgttagtctgatgggcttcactttgtgggtaaccccacctttctctctggctgcccttaacattttttcctccatttcaactttggtgaatctgacaattatgtgtcttggagttgctcttcttgaacagtatctttgtgctgttctctgtatttgctgaatctgaattttggcctgccttgctagattggggaagttctcctggataatatcctgcagagtgttttccaacttggttccattctccctgtcactttcgggtacaccaatcagacgtagatttggtcttttcacatagtcctatatttcttggaggctttgttcatttcttttaattcttttttctctaaacttctcttctcacttcatttcattcattttatcttccatcactgataccctttcttccagttgattgaattggccactgaggcttgtgggttcgtcctgtcgttctcttgttgtggtttttagctccatgaggtcctgaaatgacttctctgcattggttattctagttagccattcgtctaatcttttttcaaggtttttaacttctttgccatgggtttgaacttcctgctttagctcggagtagtttgatcatctgtagccttcttctctcaacttgtgaaagtcattctccatccagctttgttccgttcctggtgaggagttgcgttcctttggaggaggagaggctctctgctttttagaatttttagtttttctgctctgttttttccccatctttgtggttttatctacctttggtctttgacgatggtgacgtacagatggggttttggtgtggatttccttttctgtttgttaattttccttctaacagtcaggaccctcagctgcaggtctgttggagtttgctggaggtccactccagaccctgattgcctgggtatcagcagcggaggctgcagaacagccaatattggtgaacagcaaatgttgcagcctgattgtttctggaagttttgtctcagaggagtacctggctgtgtgaggtgtcagtctgcccctactcaggggtgcctcacagttgggctactcggaggtcagggccccacttgaggaggcagtgtgtccgttctcagatctccagctgcgtgctgggagaaccactactctcttcaaagctgtcagacagggacttttgagtcagcagaggtttctgctgccttttgtttggctatgtcctgcccccagaggtggagtctacagaggcaggcaggcctccttgagctccagtgggctccaccccgtttgagcttcctggctgctttgtttacctactcaagcctcagcaatggcgggctcccctcccccagcctcacttcccccttgcagtttgatttcagactgctgtgctagcaatgagcgaggctctgtgggcgtaggaccctccgagccacgtgcgggatacaatctcctggtgtgccatttgctaagaccattggaaaagcgcagtattagggtgggagtgacccgattttccaggtgccatctgtcacccctttccttagctaggaaagggaattccctgaccccttgtgcttcccgggtgaggcgatgtctcgccctgcttcggctcacgctctttgtgctgcagccactgtcctgcacccactgtctgaccatccccagtgaggtgaacccggtacctcagttggaaatgcagaaatcatatgtcttttgtgtcgctcacgctgggagatgtagactggagctgttcctgttgggccatcttggctccacccctctgcagtgaattctaatacatctttctaggcttaagaaatttttttttaacatctttggtatgtggatgtcagtttttcctttgttccctcctgagtagctgactttgctgggctgttttataactcctacttgtaacttttaagaatcaatgttatcttccttgttggtggcttctagtacatttcagtataaaagacatatatctcaagattctttgtgatacactgagaaggtattgagtttgactttaaaagaacagccaaaggccgggtgtggtgtctcatgcttataatcccagcaatttgggaagccgaagtgggtggatcacaaggtcaggagttcgagaccagcctggccaacatggtgaaaccccgtctcttctaaaaatgcaaaaattggcatgttgtgggctcctgtaatcccagctactcgggaggctgttacaggagaatcgcttgaactgggaggtggaagtttcagtgagccgagattacgccaccacactccagactaggtaacagagcgagactctgtctcaaaaaaaaaaaaaaatagagcagcaagagccaggcacagtggctcatgtctgtaatcccagcactttgggaggctgaggcaggtgatcacttgaggccaggagtttgagaccagtctcaccaatatggcgaaaaagtactaaaaatacagaaaaactagccaggtgtggtggttcacgcctacaatcccagctattctggaagctgaggcatgagaatcacttgaacctgggaggcagaggtttttgtgagccgagatcacgccactgcactgctatctgggcaacagagcaagaccctgtctgaaaaaaaaataaaaataaaaaaataaaagagcagcaaaaagcacagatgttgcacccaaaggccttgcagagaatgcagtttgatgaaatggcatggggtgggcaggggagcccagatcatgcagggcctggaggccttggctgggtttcacttccaaggtagtgccttggaaacctgcactttaaaatgtagctgtggcatagagaatggacagctatagaggcaaggggaaaatacgttctatttatcttcacgaatcattgtatttttctttttttaaaagaggaaacagtttccaacattgctttgctcattatctgcatgatggtgaacagtgattactaagtgatactcaaagcattttgcatgtatattaatcacaattacccttccagttaggtcctgctctccttattttagagatgaggacaatgcagacacaggagaatatggatgggtacagccttgtgtgcctgccagtgggtagcagagccagatttacattgggcagcctaacttggtggcccatgttcatagcctacttgttttaggggcaggtctgggcagaactgagttcaggagatgtgagtgcagcagtggttgcaccctggctccgttgtttgatctctgtttagtaacagggtgacaatttttttcacaatatgtttgatatcatagtttttaaaactaaaagtagttacaaatgttcttttatttttttgagtagggtctccctctgttgcccaggcatgagtacagtggcaccatcacaattcactgcagccttaaccgcctgggctcaagggctcctgctacctcaacctccagagtggctgggactacagtcacatgccaccacacccagctgtttaaaaaaaaatttcttttttttctctacagaaatggagtcttcctatgttttccaggctggtctcgaactcttggcctcaagggaacctcccttctcagtctcccaatgaattggaattacaggcgttagccaccatacccggacccttagatgttcttaaatgcaaaaaaccttctttgttatacaggaagagagtaaagaaaaaagaagaaccagtgataacaaagaaattgatgggcttcagataaattatttttcatgatgaaattttttgggggaaagggaaaggtcttgctctgttgtgcaggctggagtgcagtggcgcagccttggctcactgtaacctccgcctcctgggtccagacaatttttgtgccttctgagtatgctgggattacaggcgcctgccaccacccctgggtaatttttgtatttttagtagagcctgcctcggcctcccaaagtgctagaattacagacattaaccaccttgcccagactttaactgcctattcttaagcaagatactttatttttgaaatttaagatcacttccgttagctaatttaaaaaaatgattcttatttaaattgtattatagagggtaagcaaccaagtaatattctcagtgtttttcaatcatccagatgaaaattttatatatgctcatatttctgtgtttattcttgttgtgtgaagtaaatgctttactggtcactatatctggtggtggagatgggatagtgggaagtgagggtcacaggtaccaagctggcaggtcacattcatttactcagcagttgctcagcaggggcctccagtgtgccaggctccttgctgggctctaaagatacactgtgaataagcaagatctggtcactgcacccttagaccttctcttttagtggactagatggatgacaagcagagagagaaaatcgggacaggttagtaaagtgcagggtctgcatgggcatggtaggagctgtgcaggacaggctatggaagcgagcttcatatttacagtgggtaaatacaacctctgtctagtttctcagccagaatatcaatgtgaggtgcctaaacagttttgggatggtggaagttttgctatctatttgttcttgctagaaaaattatattttgtgtaatagattttaaatgttccatattttaaatattttttcttgtataaaattattatatttgaaagatttctttaggttattattgaagttcagtaagaagcagtttatttagtatacattatattcacacagtaaaaagtgagtacaacttaaacctttggaaaattgagggtgggacaaaattttggtttaggagtacctttgtcatgttaatatttgcttttattgaattatcattttgtattgaaatataagaaactacagaaaacacagatacacagcttaacaagtgttatatagaaggtacccgtattactaccagtacttaaagaatagaaataggctgggcacggtgactcacgcctgtaatcccagcactttgggaggctgaggcaggcagatcacgaggtcaggagttcaagaccagcctggccaacatggtgaaaccctgcctctactacgatacaaaaaaaaaaaaaaattaaccagccatgggggcacacactcctgtaatcccagctacttgggaggctgaggcaggagagtcacttaaacccgggaggcggagtttgcagtgagctgagatcatgccattgcactacagcctgggcaacagggcgagacacagtctcaaaaaaaacaaagcaaaacaaaacaaaaaaccatagaatagaaatagatggttttctattcagtattttttaactcactacagcaatattgtaaattgatgccttatgcctttttattctttcttgccaaatggctataatattttggcttatcttttttttttttactttgttccttactactttcattcaacatttattaagcaacaagtagattatcatcattgatagaactgtctgattccatcataacattataattcatttttccttgcttccttttgtaagatattaaagttttattctttagaaggaaacaaaaccatattttacacttgaagatgttttaataactgtcttagtctgttttgttttgccataatagaacaccacagactggataattgataaagaaatttatttctcacctgcctggaggctgggaagcctaatatccgcctcaccagaagggaaaagaagtgtgagagagggagaggaaggtggtagaactcatcctttaatgaggaaccaactcccatgataatgacattaatccatagagggcagagcctcaggatctagtcacctcttaaagatcacctttcaacactgctgtgttggagattaagcttccagcacattaactttgggggacacattcagaccatagcaataatctgtaactttccatttattgaagtacgttttgaagaattagaagagagaaagaaacaaagcctaagagaataaagtattatttcttaggatttgtaaaggagaaaaactctgatgacttattccttgaataatattgtatttatacaatttcaagagaaactgaaatcatatactatttccatattctgatgattatgattaaatactcaggataacactcctggacacttctaatgcttttagactttcttcacattatataatgggttggaaacattcataaatattataaatactttataaatattataaatataaaataaattgtcagaagcagttaacaaggattaccattggaaaagggttgggacagggttttttttttttaaatatgccttttacaaaaaaagaaatttgtcaaaatcaaatattgtttttaccattatagggagatagatgtgaagtgatagaaaactccaccctgaattttacttatgaagtactaaaaaattaatacttctatgtcaggaagtgaaaaattcaataacaagactggtttttatagtgcggtagttttccagaatgaggagtgtagtgatcctttttccttggacaagattatctgccaacagcctgacaggcttggtatgtaatctccaatacttctgcaccctccttgttacctgtgtgaaccttaggtgagcgtctctgtgcaccagatgcaggggaacggggaggctggggcgtccctgaccgtcaggctacctcaggagcagtggatgtggtgccccacagtgcagcccacagagtggggtttcctcggtcttgtcgcaagcgtgtagccagaaatctggtcccccacctatttcttactgcttccaggaactcctctgaggctgggggcccctgagatggggttgtggtccagggtcaccacttgagtggctgggagaagaagaatgaaagttggggtcggcgatttcttttttctttttttctttttgttttgagacacagtctcactctgtcaccccaggctggaatgcagtggcacaatctcagctcactgtaacctctgcctcccgtgttcaagtgattctcccgtctcagcctcctgagtagttgggattacagacgtgcgccacgacgcctggctaatttttgtatttttttgtagagacgtggtttcaccacattggccaggctggtctcgaacttctgacctcaagtgatctatctgccttggcctcccaaagtgctgggattataggcatgaactaccatgcccagcctgggatcagcaatttctatacagaaagtggtgtgagcaggagggtgaacaaagaatcctgtgtagatacgtgggtgtctacaagatttcactaatttctttgatgcggtattttccaataattaaagcctaacttggggtagaaaatggtagactggtcattcctaccaaagcaagtcagttggtaaaataagatccctttatttaattaaaaaataagtgttagaaaatacatatgatctaatctaagtctcctagtattatgtatttaaacccagaaaaggtaggtgtatggtgagctgcttatttagccaattcttggcaatattttttgcctttaaaatctttagtttctctggggatttttttatgtaacatgaaacattattaaaaacaatttgtttttttagatttaagaaatgcgaataacacggattaaagaagggttgttaattttgtaggtcagcatcttttaaaaagtcatttaaaatttgtccttaaacttctttgctatgttgtcttctccctccctgtgtttcagttgaagggatactgccagtgcccactcagcgtgggtcagctctgatttggccagagaggttttgcttctgttccttttcttatatcccctttcctctggggtcaggggagctgactctggattatctccagcttccctctgaccaataaaaccacaaagccaactagtgttcagactttatttttccctctgttatatccttacccacgtttcagtgcagcaatgatatttagtattgttctttgtagtcgtgagccagaagattttgcgtgaatactgaggctgaactattcaagtcaggaaacaaactgtgatactagtttgttcactgttagaggtaggattccatgtcagaaaatatcataatttccagtgaccattttaagtttgtattaacggaacagtaaagagttcttactagaatttaataatgccaagttatttgataattttattaaaaataatggtgggacctagaaatagaggaaggggtacttaataccataccatacctgtaaactcttttgtgtgacattctttgtcacacactcagcccagctgccttggactcatttctcactgccccctttctgtggccccccacctccgtgtgcacagcacgcaatatctccatgggtcaaagccgtggctttcatgggataagctgggcaccaggcctaagacatgcacttttatctcttaatggtttgtttgtaactatacttccagtatcctgtagttaatacagttaattccccaaaatataagcaaataagaactgcacaaagagctacaaagatgtatagggcatccctgagccatgcccagtaatttaaaaatgttacaacatggcatcacagagtgcaggaatagccctcatcaggcagtgttggttctggtccaaacttggccagggctgaagacctatgtgggttacttcatctgcgctgcagtttttttactgacaaagggtgactttgttaaaccttgggttatttccactttttttttttttctggtctgtacttttctgcagcttatatatattttttttattttattttattattattatactttaagttttaggatacatgtgcacaatgtgcaggttagttacatatgtatacatgtgccatgctggtgtgctgcacccattaactcgtcatttagcattaggtatatctcctaaagctatccctcctatttccactttttaaatttggtattgctgttttcccctgccttgtctgttattcccatgtgaaagtctctctcagagtgctttttactttgtgtcttttaacttttgtgtcttttgtgtctgacactggtgagccttcccagcactggtgctccctggtcttctgcacacctttcaggagaggcacttcacggtaatggtcgctctgtgtttttgttactacattacctattttaatccttaagctaatttctcttctcctttttcttctcttccctacccatttgttgaaatgccatgggaagatggcagcaagacacaaacacctccttgtatctaggggttatgaatttgccatgctccatttggacatgccttattctggctcatcataggttttgcctgtttccacccaacttaggatgaattagaagttgttcattagaatgtcctttatcgatagtcattatggcaggggccggattgatgttggagtttaagaatcaaggataaagtgacagtggggacgcgctggactctgtcagttcattagtaagcatattttcaactctctgtgctacagagattcagtgtgttggcctcatggtagagaggccggatgcccacgtgctcctggcattccacaggatggtttaaaggtgggtttaggaagattatagtgaccacccataattagtaacttgctattttaacattggattcttgcagtttttcccaacacatttgtttctcagttgatgccacatttataaaaatagaaatacttaaatatctaattctgtactttgtcattagccatatgaccttttaaaagttgttttcagtgtgattactggacaccattttaatcctattttctgagccaaaattatcatctatagttgtatgaaataaggtgttttaaatgaagaagttttcaagaaagaagaactcgtattctcgatactcagagtggaaggcatggctggtcatcagtgtcagtgtgtgtgttgggcggtcctgtatgtatcgcattgtcccatctcagctcaggctgccatcacaaaatcccacagactgtgacgtaaagagcagacagttctttctcacagtgctggaggctggtagccagggtgcagcatggtggagtcctggtgagagcccttttactggttttaggcagtcgccttcttgctgtgtgctcacagagcctttcccgtgtgtgtgcatggaaagaacaagtcctccagtctcttacaaggagactaagcctgtcagatcaggctacccttatgacctcatttaacctcaattacttccttggagcccccatctccaaatacaaccagactgaaggttaggacttcaacataggaattttgaggggacaccaacattcaatctgtaacacacccctgttgtttggcttaacttcgcttagggatctgttgcttttctagagcctttgtatgctttattctcacgtggaatttcttttaaaattggacatttcattgcccactcaccttccgaacaagctattcctacggaatgagtcacagcgacatgcctagtgggaggtggggtcactgtgacactgtgaccctggaggcggaggtgctcagctaggctttgactgctctcgtcactggggattgtgaaaactttttgatcgcctggtcagtcttgtctacttttttgtttttgggttttttttaagagttgggtttcagatttctgtttcatgcttagaataattgtggcttttggagaagaatattttaaactggtgaaaaggcaaaaaatgtggaatcaagaagtgaaagcacaattgtttacagtttagtaagcagttgtggtaaagaaatgtgtctattcatcattgccagatgacttaaaattttatgggggagcataaattttaaacaaaaatgaattgtgctcttcataggataaatgtgtgaatttctccagaatttgtttttttagatattataatcaggatctcctgcttacagctttatgaattttatcctgaagttatctgtgaaatgaatcgatggcatcttataagatttactcagaattaaaattttgatttaccaatcattaataacacaatcaatactttaacaggtatttacttactgaatacttatgggagcatatcagtgctatgtgtttgagaatcactggtaaaattaggtgtagttgtaacttctcaaaagaaaaaacaatataaacaagtaaatacaattaagtttttagtgcatgttaatgaaaaaatggtacaatacagtgaatagataaaacgtcatttggatttgattttggaatgttttatttgtttttctctttggagcatcatttgagtcatagtttaatttgtattctctgggtacacgcaaagtgcagttgagatgaaggggagatgggtcaggagcatcatggttagcagtgaaatcaagactggaaacagagtcccccacatgctttacatcagtttgtattaggagtcattcatttcttacatatttattggtactgatccaggtgcaacacagagttcatggtttaatagatgaaattgtttactttttaaaatcagaggtataaacaagaagtacagtgataacataaagagaaatgataaactgcagagtggaaaggagagtcatgcccagggagaaactcaccagggagacagtgatggaactgtcttaatgcacaattgcttatttttcaccttgtcatagaaataattttaaattgcttgaaggaagctacgggatttgaggctagagcagtaagaagtaacaggtaacaaaggactttccatacaatgggaagtagtttggatttaatccagtcagggtggctatcattacatctacatttaagaataccattcaggtgggccttatgaagagtaggttggaagaatcaggtactagactggggaggtcagttagtgccagactattgtagtaactaagaggcatctcagtcttaatgtattaaaaatttatgtcttgataccagtattctcatactacctgcacctcccagaaaagaaatatttgtctagaaatctttactgtctcagtaaatgttaattctgttcttattcttgctcaggccaaacccactggagtcattcttgtactctgtctcatattcactcctagtccattaacaagttctattggctctaccttcaaagaatatctagaatctgagcatttcttacctctcctgtcactccctagatcccagacaccatcatccatcctggattgctgcagaccctcctaactagcttccctacttaatcccttgtcctcttcagtctggtctcaacacggctcatcatttgacttccctgctggcttcccatcacacccagaggaaacaccctggttcacacatctgaagatagaagacctgtttcttccctgcttcatcattctgaactgattcgatcttctttttccctgcccaggctccagccgaccacatttagtcctaggcagaacatgaatgggctgttctctaaaaagctgtagtgaacttttggggaaagctaagactactaatgggtatgctggggccgccagaatgatagtcctttttcttttggcatttggaaggcctaaatgatcgtaagaattattacagtcaaatcatttgacctaagtctgagatattctcatttaaatgcaatcctaagaccctggtcagatattgaattttgtttatataattgtgctaatgtaaatttgttgattatttgttaactcttggagtcagactatggctggagcatggagatttggcataggttatagggtatactgtgaacattaaccttgacaatgaaagtggaattatgtttaattaaaattgtgtagcatgttggggaggaaaaacgtagagcagggtatacacccttcttcattttacaatgctaggagccccaaaatgctatgagaagtcagtaaaatagggcatagagttcgttaaagatactaaacttcacaagtaactaacagaaacaccccaaataaaaccattgtagtaatggatacatgtattatttttgggggaaagctataaaatactatttcaaaaatagtaaaatgtacactgaatatatagcatggtagtttggagtgagtgcagcaagatgaattattatcatcacagctggtggtaaccagtgttagagtgtttattaaagacagaggtcctgtccacatgggaagcagatggactttaaaaccccctgatgtccattcctgacccctgctgcttgctcatgattctctgtgtgtgtatgtgtgtgtgtctgcacactcacatgcatgctgggtgagagagagagggaaaaggaacggtggacacttgatgaattgacctgaagaagacaaaagtaccaatttcagggaatactagaacatatgttttagagcaagataactgggcaggctagccttttgggatatctctgaagataaagagagacagagcgataatgtaggaggaaaattccaaattaccatggggtcagtgtttggaaaatggacaacttaacattagtggcaacaattatgttatgaaaagtatttctgttagaaagacttacagatgttcctgccctctattggagaataatttcagtatctctcccctcatactaacttgcttcacggagaataatttcagtatctctcccctcatactaacttgcttcacggagaatagtttcagtatctctcccctcatactaacttgcttcactttgtcctttcttgtatagttatttgttatactcatatattaattcaatataacctacttaggaagacttgagttgacgtgagtataattggaccctgactacctgtatatttcaacaacaacaaaaaaggcatttaactcagtagtcacagacatattttgttattctatcatttgctcaatttattgttttgtgtttctttttttcattttttttcttttttttgagagacagggtctcactctgtgagtcaggtacttgactagggaggccagttagtgcagtgttgtgatcatagctgactataacctcaaattcctgggctcaagataacctcctgcctcagcctctcaagtagctgaaactacagtatactccactgtgcctgactcatttttatatttttatttttgtaaagctggggggtctcactgtgctgctcaggctggtcttgaactcctggcctcgagctcctggcctcaagctgtcctcccgccctggcttcccaaagtgccggggttacaggtgtgagccaccatgctcagtcatttgctcagatctgtgtgtgtgtgtgtgtgtgtgtgtgtggcctcttggttgtttaaaacaaaagacttttcaaagagcagttagctgattaaataacgaattcatgcagttattcagcaaatgttgttattcttgaagttgaatactgtccatttttaactaagaattatgtttcatctgctaggcatatgcatggatagaaattactagatctcttggtgtatcttcttcattgaatctttctgttcctgtttcttaatcgtttaacatctttgctattgtatattagtatttgtggtctccatttgatctttgtggcactttctctttgatgattagcacttgacaagttatcttctttttcagtgcaagttctgttgaaaccctcactgtgtccagccacagcaataggcctcagagtccgtttctcaacctgaaacattgtctgtctgtgcattttaaacaagccctatgtcttagcataatgaagtaggggggaaacaccccatcactcacaatttcctattcttaactggcatttatctgagagacattttggtccttggcttgtaaggatatttgattactgggattagacctgccagtcatcctctctgttcttgagaaagtcacatgagcagctagctttatttttcagttttctcatctgccacaaagggagattaatatgttccttacctatttcgtagggttgttgtgaatcgagtatgagaatggccttgaaaatgccttgaagagctgatggcagtgacagtggctgccatccttgcatggccaggcacttcgtggtacatttgctgtgtttgcacctgtgattgtagtgctcttggggtagccgctactgtgtccatttaaaacggaggacactcttacaagagagttaaagtatttggggattttcaagggaaggaatagttgcttctggctgggattcagaaaacacttcctggacaaggtgatattttggctgtcttgtagcagttatggaaaatgttgcctggtagcactaaaatggccttttatgtactagtcatctaattgcaaaacattgtcctttgtttgtaaaatgagtatatcccctgcttggattaaaagcttgcttctgccaggcatggtggctcacacctgtaatcccagcactttgagaggctgaggcaggaagatcacttgagcccaggacttcaagaccagcctgggcaataaagtgagaccctgtctctacaaaaaaataagaaaattagctggatgttatggtggtgcgagcctgtcatcccagctacttgagaggctgaggtgggaggatcccttgagcccaggttatcgaggctgcagtaagccaaggtcataccattgtactcccgcctgggcgacagagcaagaccctgtctctaaaaataaaataaaagcttgcctcaagcacatttttggtataagtcgtcccttgcttttttctctctcagacaaggaggagcttaccctgcttttttttctcctgggaaggaaggccctggaggatgttttgtagaaagagctttagaatgctcagtgtaaagggtagccctgtccctgacctagtgtcacagccatgggagcgccgctcagtattgcttccaaggcctatttagtcaccacatgagctgctgtgtgcagcactgcagtgatagccaacatcataaaatgttattttacaagttatttggtgctatagatcttgatcaaaattcatagttactggaatactgtcaagatttatcatagaaatcttttttttttatactttaagttttagggtacatgtgcacattgtgcaggttagttacatatgtatacatgtgccatgctggtgcgctgcacccgctaactcgtcatctagcattaggtatatttcccaatgctatccctccccctccccccaccccaccacagtccccagagtgtgatattccccttcctgtgtccatgtgatctcatcgttcaattcccacctgtgagtgagaatatgtggtgtttggttttttgttcttgcgatagtttactgagaatgatgctttccaatttcatccatgtccctacaaaggacatgaactcatcattttttatggctgcatagtattccatggtgtatatgtgccacattttcttaatccagtctatcattgttggacatttgggttggttccaagtctttgctattgtgaataatgccgcaataaaaaacaaccccatcaaaaagtgggcaaaggacatgaacagacacttctcaaaagaagacatttatgcagccaaaaaacacatgaaaaaatgctcatcatcactggccatcagagaaatgcaaatcaaaaccacaatgagataccatctcacaccagttagaatggcagtcattaaaaagtcaggaaacaacaggtgctggagaggatgtggagaaataggaacacttttacactgttggtgggactgtaaactagttcaaccattgtggaagtcagtgtggtgattcctcagggatctagaactagaaataccatttgacccagccatcccattactggatgtatacccaaagaactctaaatcatgctgctataaagtaatctttgaagaaactgtagtcaggcagtatgatgcatcttaggtacataagtatttcttctgtaatactatttatgtatttctgtaatagcctgcatttataaaatctgtcagggtctatggggacttgagctgcccaagacaagaattagtttctgaagagagcttgtgctgcttgggcaggcagctgagcatggctgggggctgccacagtgcgcagaaccaagagcctgtgctcagctggcacacttgaacttgagcagacccctgggtgcttgagagcagaagtggccatggagccctgacagctgctgctgtcagtgggagacaggggaggtttcaggcctgtgcattgctgggaatgagccctgagttgagtataggtacaagttttaaaaattcttaaattatgtctcaaaatgctcctgtggccgctgtagctcctcaatctagggcttttccctttgcttctgaagactctaattctgtacacactgctctggctgccctgctgaggaaaaaaagctttgtggactgaagtgacttccacattatcctgatttcttttccagtttaccaattgaagatgagctacttttcattaacaaaatgcctgttgtggcgaagcatctgtgtgttcacttcttagtgcctttctttacaagttggtttcattcctctgttcccttccctagagtgaccagcagaagctcgttatatgctgcttgtacattgtgcttattcatatccttcccccattctgttttcttgccttaagaaatagttgtccaagacagtgcccagaaatagttgccttaagaaatagttgtccaagacagtgcttaggggaggcaaggtggcccagggcccagtatatggacatgtgtcatggacacctacataaaggaagggatgaaaaatttggggttgaatgggaaatgaatgaaaaaaaagtgagagggagaaagaaatagatgattaaaatcttagcaccgtctaaatattaatttttactattcactattaacctagttggctgaagtggtaaagaaactcatattagtgagtatctgttattaacaaggcagtatgttgtacccttcatttttgttgttctcagtttatgtatttttttattttttttaattaaaaagcacagagaataatagaaacacataagcatgctcactgcctagaattagtaacacatgtcaatcctttgtctttttttagtttcccatagttttataatagaaacaatatgacacataaatttgaaaccctctgggttcccctcctgagtcatactcctctttctctctccttagagacagtggctttcatgacttttctgtgaatccttctatttatgtttttatactcatcttgtattcataaactattgtattgatttctgtgttttttaaaattacattataggtgtcatactctgtatatcctgtttatcccctttcatttcttgagacctctccatctgattcttagacgtctacttcacctcattttaagtgccgtacagtgttctgttgtatgaacacaccatggtttacccatctttctgatttatgctgggtgcagttttctactcttataaacaacgctgagatgtgtatccttgtttaggtatattggtgcatctgacagtttctgggtacctacctaagatttctggggtataggctatgcacactatcaacttcagttatctcatttaatctgaacaaatgtttcctggggcaggtggcaggatctccattttacacataagacaatttaacagttgaatgccatggaacttggccaacttaataaggaaaccagcacttgaatccagatcaaattccacccatttcaatctagagctctaatacccagcagtccacataactcttcaactgttagcctttctgatcattggaacagctgcagccagctagtaacatacatgatttcaaagcagagaatcaaaacagataataaagaggagggtccatccttaagaagaatccacagtggccatattctccttgtggtcatcaaaggatttcagacttggagtaaaacgcatgctccttaaaatgacgggtctaaggtttctatttgtacaggactatttcttcatgacagaagactttattttatgctgcttaaaatccatgtattaaatgcaacatgcaggcctattttgattaaagaaaagtgttatagtgagcatcgtagtgtctctgttttactttgcaaaatgtggagaccattttctccaggtgaagagtgctatctgcatgtggatctttttttcatgacactttattcacgcttgaaccatctgtcttttgatttcatttttgctttgttcttttcttcaacttctaggtagaaaatctggtgtattaactgtgaaaattttagagctgcatgaggaatgtgccatgcaagttgccatgtgtgagcagttattggggtcaccagccaccagctcctcccaaagtgtggctcccaggcctggagctggcctgaaagttctcttcaccaaggagactgcaggctacctcaggggccgtccccaggacactgtccggatcttccctccctggtgagtgcgcagaacttaatccagcagtcaccaactgtgagtcagcctcgtaagaaaagacatttttatcagttacatttttgtcactttatcatagagcaatgcgagaggaagagagccaggattggacgtgggttttctgtcagagaagcattggattgtctctgatagctcatttctagttctgtcagcatatttctgataatttggggtgagagggttgaggaaacaaccatattaagactcttgcccaagtgatgtgttataagatctggctgtttttgtttttatatttcttagaaaaataattttgttaacaggcattatgtgacagtaggataacacacattaattaaatatttcttagtcacttgggaggataaaaagcatgaattaagatatactagtgtttgaattgcaggagcaaaaatggtcattattggatcagaaattattttaaaggatactatgtgtgctgtcttttgcagtgggatattgatttttaccatgaatagaagaaaatcatactacttttgaggaaaagtttgagcagccttgttttaagagctaattattaattttttcgtaattttttataagttttcattttgtatgtatgaggaagggctataggataaatttttataaatattattgctggatcagtgcttctttaattttagcagactttgtcaaatggcaccattttacgttcccactggcaatgcctgaagtgcctttttcttctcctttacaaacctactttgttgatctagaccaagttaaaaattggaaatatgatgtttatcattttaattcatatttctcttatataaaatgggcttaggcatttttctacatgtttttaagaaccacttgaatttcattttatgtccattgatagcttttgacctttcttctctttggtcactttggtcctggtgatttctaccatctttttataaatgattaaaaaaaaaagtagtgccttgtcagtcatatacattgcagttagttcgttccccatttaccatttgactttttacgtttttagggggcaggggtttgttttgttgctttgtttttgatgagcagaacttttctgtttttctgtggttgattttagccatcttttatagcttctgggttttgtatcatagatagaaaggttttccttactatgaggtgtaaaagttattctatgttttattctaagactttcatcgatttaaaaatttttacatttaaatcttttgacactcctggaatttatctttatgggtaatatgtgaggtagtgaatgcaattttatttttttccaaatggccacgaggagtcccaacattatttattgaacattctgttttttcttcatacaattttaatgctgcctttatcatgtactaaatacctacatatattttgggctatttactcttttaatgtaactgtatttgcacatgctagtattatactatttcagttactatagttttatatggtgttttaataactgctaggactactcacatctcattaagcttaatttttagaactttcctcctaataattgcttcctttcttttttactttaaatatttgccttaaacatttattttcaagtatgcattgtaaaagttaaaacaattcagaaatatataacttagaaagtgaatcctcttaccctcacctcttcaattaatcacactcattctagatgactgctgttaataatttggagtataatcttccaggatttttaaattcttaaatattcaattatgtatttaacacatcccagtgactatacacaatctatatgtaagttatgtaatcctgcctatttttctataataagtttaggtttaacttactagattaaaaacagattgataggttttttagggtaggttaatctctgcattcacggagtagggctttaaaggtagtgtctggcagggttctgatgtgatgctcccctctccgtgttcatggagtgcacagcagcacaggacttctgtcagcatctcttaccttgaacctgtcttccctccttcagaaatctgtcctcatttggatcttctttgttcaccccttagttttactcccttgtggaatttagctctttcattagtgtctaagttcatttgtggtggcagagtcttttattgttattattttttaaaaaactcctccctcctcagctttttaaattctttttttctttttctattttttgtagagacagagtcttgctatgttgcctaggctggtctcaaacgcctggcctcaagcagtcctcccacattggcctcccaaagttctgggattataggcctgagccaccaggcctgttcccttctcaacttctcatttttttggcacacctttatatgttttaaaatgcatttattaaatgaccttgtttttttaatatctaaatatgattatttttcttcagggaagatgttttagaggctttaaatgtaggacattttcttgggcttatgagaagtaaaattagatcaagattatctacaaagatttatatgaccaagaatttctaaatcccactgactccttagactttacaagtaaatgagttattatcattagactttggaatgtttgtaggtctggatcttaccaaacaatccctgggtgttactctccacaggaatgcctgtgggctgtcaagagattatttgcctatattcagcatataatgcttaagaaaatagaagaggccgggcgcattagttcacgcctataatcccagcagtttaggaggccaaggcaggtgggtcatttgaggtcaggagttcgagaccagcctggccaacatggcgaaaccccatctctactaaaaatacaaaaattagctgggtatgggtggtgcgtgcctgtggtcccagctactcgggaggcaaaggtgaaagaatcgcttgagcccaggaggtgggggttgcagggagccgagattgcaccactgcattccagcctgggcgacagagcaagaccctgtcgccaaaaaaaaaaaaaaaaaaaacacctcatacttaacaaaacaaaaccaaaataattttttaaaggactagtcttttttttttttatggaaacttgagaaataatagtgaatatatttttccttgtggactggctgtccttttcccactagcacccttctgtgttcatttaaactgttttttttttttaacatgggcacagttttttaaaagaatcaatagactttagatactcctgttggtcctgtagtaataaatatgagtttaggtacaatggctgcttaccccgaggagctcagagccctctgtagatattacctggtaaactctcattggattccagtgaggtgtaatgcagctttgcctctggcaatctgaaaataaagatagaagtaaaatgtcttgcctccaattaattgcattatgaaatagtcatagaattatataagtcaccaacttacaaaaaaatgcattaatctatataatttcagacatgtaaaaataaaatagtataatgaatctcatgtcccatagtttcaacatttattaactaatgaataaacagcttttactactcaagcaaactgaaagctttataatgattccaaagaaacatctcaccacttgaacacagatatactagaaaaaacaaatgaaggaatttactttaatgatactggggagagaggaaggtagaaaccatctgcctgattacatcctgccatgaaatctaactccagaatgagggcaggtgagaggttaagtgtgtgagagtgtatccagagacaaccaggacacctctcattcattcagaagtatttattggtatcccctgtgccagatactttgcttctcctcagaatacacatcccagtatgctggaagagcgaagtctgactttccctattgtcatgagtatacccttccatcggtccattcatatcgtcatctttttagtcactacttagtattccactatatggacatgtggtaatttaaacatcctcttatttagaattgttaaggttgctttctatttttagctgttttaaacactgcttgggtgaaatatttatcattatacctcccttctgatttggttcttagactatttctagaagtagaaattattggtcatagaataccagtgggttttgagccttttgatatatgatttccatagtaacctgtaaaggttgaagctgtctcagctgctgccagtttctcatcacaccacactcaacattttttatggctgcacagtgtgatatagtttttaaaacactttccatattctcaggatgtggtacatattggttcttttactatcataaacagctatgtagtagatattgttatatatgtagtttggtatgtacttcagatattgtttcaaagtcgcttttaggaactgttttagtatagtaaagggtatgtgtttcgtttttgctgttgctgctttgactccttgatattgttaagtcatctgtaaacctcatagtagagtctctgcagctggtcacatcgaatatagcccaccttattttactatgcttttttgcttgtatagcactaaacacatgttgcactttttacaaattgaaggtttgtcaaccctgaatccaacaagtctaccagtgccatttttctaacagcatgtgctcacctgtctctatatcacatttgaataattatcccagtatttcagagttttcataattattatctattatggtgatccgtgataagtgatctttgatatcactgttgtaattatttcgagatgccatgaaccgtggccatataggatggcaaacttaattgataaatactgtgtgtgctctaactgctccattgaccggatgttcccccatcttactttctctcctcagacctccctattccatgagacacaacagtattgaaatctggccaattaatcgccctaatatgccctctaagtgttcacatgaaaggaagaattgcacatcttttactttaaaccaaaagctagaaatgattaagcttagtgaggaaagcatgtcaaaaggcaaggtaggctaaaagctaggcctcttgtgccagttaggcttcttgtgccagttagacaagttatgaatgaaaaggaaaagttcttgaaggaaataaaaagtgctattccagtgagcacacaaatattgagaaagcaaagctgccttattgctaatatggagaaagtttgagttgtctggataggagctcaaacaagccatgacattcccttaaaccaagcctaatccagagcgaaaccctaaccttctacaattctttgaagtctgagagaggtgaggaagcttcagaagaaaaatttgaagctagcagaagttgattcatgagatttaagaaactcccccataacataaaattacaagatgaagtagcaagtgctgacagagaaactgcagcaaattatccagaagatatagctaagatcattaatgaaggtggctacactaaacaacagattttcagtgtaggtgaaacagccttatatttgaagaagatatcacctaggactttcatagctggcgaggaaaagtcaatgcctggcttcaaagcttccaaggacaggctgactcttttattaaggtctaatacagctggtgactttaaattgaatccagtgttcatttaccattttgaaaattctagggtctttaagaattatgctaaatctactcgcttgtgctctataaatggaacaataaaacctggataacagcacatctgtttacagaatggcttagtgaatactttaagccaaacttttgagacctactactgagaaaaaaaattttcttttaaaatactacccctcattgacaatgcacctagtcagccaagagctctagatgtacaaggagatgaacgttgttttcatgactgctaacacaacatccattctgtaacctgtggatcaaggggtaattttgacttttcaagtcttgcttttaactgccatagataatgattccttttttttttttttttttaaatgagatggagtctcagtctgttgcccaggctggagtgcagtggtgcaatctcagcttactgcaacctccgcctcccaggttcaagtgattctcctgcctcagcctcctgagtagctgggattacaggtgtgcgccaccacgcctggctaatttttgtatttttagtagagacagggtttcaccatattggtcaggctggtctggaactcgtgacctcgtgatccacccacttcggcttcccaaagtgctgggattacaggtgtgaactaccatgtccagccacctttcaagggtctgggcaaagtaaactgaaaaccttcctgaaaggactcaccattctacctcccattaagaacattcatgattcatgggaggaggtcaaaatatcaacattatcaggagtatggaaagagttgattccaaccctcttcagtgacttcaggggtttaaaacttcagtggaggaaataactgcacatgcggtggaaaaagcaagagaactcaaattagaagtaaagcctgaagatgggactgaattgctaaaatctcctaactttaatggatgaggagttggttcttatgaatgagcaaagaaactgtttttctgttttgttttgttttgtttttttgagacagagtcttgctctgtcagccaggctgaagcgcagtggcacagtctcggctcactgcaacctccgcctcccgggctcaagcatttcttctgcctcagcctccctagtagctgggattacaggcgtgtgccaccacacgcggctaatttttgtatttttagtagagatggggtttcaccatgttggccaggctggtgtcgaactcctgacctcaggtaatccgcctgcctcagactcccaaagtgctgggactacaggcgtgagccaccgcgcctggccagaaacgggtttctttagatggaatataatcctggtgaagatgctgtgaacattgttgagaggacaacaaagaatttagagtattccataaacttgattgataaagcagcatcaggtttgagaggatttactgcaattctgaaagaagttccagtaatgccatcaaacagtatctcatgctacagagaaatctttctagaaaggaagagtcagttgatgcagcaaactttattgttctctaagaaattgccacagccactccagccttcacacaccaccaccccaatcagtcagtagcaatcaccatcaaggcaagaccctctctcagcaaaaagattatgacttactgaaggctgcattttttaccaataaagtgtttttgactaaggtatgcactttttttagatacaatgctgttgcacaccttataggctataatatagtgtaaacataacttttatatgcaatgggaaacaaaaattcatgtgacttgctttattgtgataataactttattggagtggtctgcagctatacttccagtatctccaagatatgactgtactttttcttgtatttatttactggtgacagcttttctttttatagttatatcacttagaataataattttgttatttccttcccaatactcatgcttctttatctgcttaatgtcttattgctttggctaaaacattcaattcaaaaatttttttactactgtattcccgttgcctagaataatgcttgaaacatagtaggcactcagtaactatatgattaatattgtattaaatcatcatgaagatgttgtcagccttgtttatcctccctaattgaatgagactttgttgatttgtacattcatttaaaaagatttactgaatgtttacttacttactctttaataagccttgtactagaattcctgggaatacaacattcaacatgaatgtcaaattgtttctgcccttaaggagctcacagtgtggtggaagagaaaagtaatataaacaagttataaaagaccactgtaggcgtagtaatagatatctgtacagaggttgcaagaggattgaggaggtaagcacagccagtaggtaggtcagtagggtgggtggttatgtatgtgagagtatgtgtgtgtacctgtgtttatgtgtgtgtgtgtgcttggggagactacagaccgagagatagggtgtcaggggtagcttcctgaagttggtgatgccctatctgagctaaaagggctatgttagaaagaagcaggggagggactatgagggcatttggagtagaggagaccacatgagtaaagaccaaaaagtcagaatggcctagtgtaagacgtatgcaggggtatatgtagtgctttgtgtacgaagtagaaattccaaggcagtagcagcagaaagtgaatctggagaacctccctgtgtgcagtgttaacaagctgagatttacaggagagacattatgatctgattcaccctttaaagtctgtggaggatgactgggggtggaagggcagaataaatgcatctcggaggctgtgggagtagctcaagtgtggaaaaaggtggtgctttggactatgatggtgaatagtggatttggaatatattttggagttagaggcaacagggtttgctgatgggtttgatgtggtatttaagtaaagataggaaacaaggaagacaactaagtctttggcttgagcaaacaagtgaatgatcatgccatgtactgaaatgggagacttgggattgatttgtggggcccagtcaatggtagttttttggtgtcagcagtaattagagcctagagtaaaaacacaagagaggttatgattccaaaagagaaactctgtcagctcgtctgggtttttagtataacccatgtgtggtaattggtagaggacagaggtggagcccatgggcctattcacaactgctttggttcctgttttatatttgccacatgagattctttgaaataaataaattgctggctcctattgaagagaccaaagcagtactaacgatgaaaactttgtttactgggtgagattatcttctgttgggacaacaaggaatttagtcttttccgtcaaaattacagggtgtcttgagaggaaataactaggaaagaaaattaatgcagtatgaaaagggaaaagatatagactatgaggataatctggataatctgaaaaactggaaggaagataaggaaggcagtcatttattctacatgaggaggaagtgaagttagatgacgcttttcaatggggtgtatcttagtctgttttgtgatgctataacagaaaacctgagactgcataatttataagcaatagaaatttgtcagcccagtgcagtgaattatgtctataatgccaacactttgggaggccgaggcaggcagtggattgcttgagtccaggagttcgtgagcagcctgggcaaaccccatctctacaaaaaatacaaaaattagccaggcacgatggtgcatgcatgtagtcccagctccttgggaggctgaggtgggagaatcacctgagcccaaggaggtcaaggctgcattgagccatgatcccactactgcacttcagcctgggtaacagagtaagactctgtctcaaaaaaagaaaaaaattcatttgtcttatggttctagaagctgggaagtccaagagcatagcaccactatttgttgagggccttcgtttttcatcttcccatggcagaaggtgaaagggcaagagagcacaaaagcaagagggagccaaacttgcttttataacaaggccattcttgtgatagctagcccactcctatggtaatgacataaatccattcaggaaggtagcaccctcataatttattaggtcccacctcccaatactgctgcattggaaattaggtttccaatgcatgaacttcaggaaacacattcagactatagcagggtgttcatagaaatatgattaaagtgttttgtgctcaaataagtttggaaaaggctcctcaaatgtgtaccagttgttgtattgtaggactgctcagagtctctcatatgcaaatgtatattgttgtttccagtagagggaagcagaaatggcaacatttgaacaaaatattagcaaacaaattaccatgctcttcctaatctaagatactgagtaaagagagcaactgagaagagtgatgtcatgaaaatggtgtagagtaggaagttccagaaatccatccctctatcgaaataactaccaacctggaaggaaccacatgaagtgcctgttgtggaattctacagtccagttgaacacttacagcaaatattaaagtataatttggaaaaatcacagatggacaattccagtcttcagcaggtaagattctgcgatccctgaggagtgggataattagattcccagagtttttataaagtactactcaaatgtccaattctcaacaaaaaattacaaaacacacaaacaggaaaatatggcccaatacaggaaaaacataattttacatagccatccttgaggaaattgagatattggaattattagtcaaaaatgtgaaatcagttgtcttaaatatgttcaaggagttaaagggaacccatagataaataactaagggaaatcaggaaaatggtatcaaaacaaaatgaaaatatcagtaaagatactgaaattatttaaaaaccaaagagaaattctggagctgaaagtacaataatttaaatttcaaaaacacactagagattgggtgtggtgacttaacgcctgtaatcccagcaatttgggaggctgaggtgagtggattgcttgagtccaggagttcaagaccagcctgcgcaccatgaagaaaccccatctctataaaaaatgcaaaaattacctggatatggtggtgcactcctgcagtccagctacttgggaggctgaggcacaagaatggtttgaacctgggaggcgcaggttgcagtgagttgagatcacaccactgcactccagcctaggcgacattgtgaaaccctgccaaaacacacacacacacacacacacacacactagaaagattccacagaagatttgaggaggcagaacacaggctcattgaacttgaagaaaagaaaattgaactccttctgtctgagaagcagaatgaaaaaaatgaacagagcccgaagcacctgtgggacactatcaaatgtagaaccctgtgtattataggagtaccagaaggagaagagaagagagggaggaaacaccagaaaaaatatttgaagaataatggctgaggaacaatgtctgccagcttttgtgccagcccctcagtgatcaagcgcagcaattagcaatcaaaacacataatcagccctggtcccagcaatctgaaccaggattgtggagctagggaatgtggcatggtaattgctaccacttgaaaggctaatttgaaattcttgaagaataacataactcctcaaatttgatgaaaatctttaatgtacatacccaagaaggccaatgtacttcaagcataataaagtcaaagaggtccacaccaaggcacatagtagtgaagttgatgaaacccaaagacaaagatggtgtattgaaagcagcaagagagaggcaacttgctacgtataagggatcctcaataatattaacagcttatttcttatcagaaactgtgaggtccaaaatcgatcaatcaatgagaaaacgaaacaagcaaaaaaaagaaactatgggggccagaaagcactgggatgatgtatttaaagacctgaaagaatcttccctaactcattttatgaggccagcatcatcctgataccaaagcctggcagagacacaacaaaaaaagacaattttagaccaatatccctgatgaacatcaatgcagaaatcctgaatcaaatactggcaaaccgaatccagcagcacatcaaaaagcttatccaccatgatcaagtgggcttcatccctgggatgcaaggctggttcaacatatgcaaatcaataaacgtaatccagcatataaacagaaccaaagacaaaaaccacatcattatctcaatagatgcagaaaaggcctttgacaaaattcaacaaccttcatgctaaaaactctcaataaattaggtattgatgggacgtatctcaaaataataagagctatttatgacagacccacagccaatatcatactgaatgggcagaaactggaagcattccctttgaaaactggcacaagacagggatgccctctctcaccactcctattcaacatagtgttggaagttctggccagggtagtcaggcaggagaaagaaataaagggtattcaattaggaaaagaggaagtcaaattgtccctgtttgtagatgacatgaatatatagttagagggccccatcatcgcagcccaagatctcctcaagctgataagcagcttcagcaaagtctcaggatacaaaatcaatgtacaaaaatcacaagcattcttatacaccaataacagacaaacagagagccaaatcatgagtgaactcccactcacagttgcttcaaagagaatgaaatacctgggaatccaacttagaagggatgtgaaggacctcttcaaggagaactacaaaccactgctcaatgaaataaaagaggatacagacaaatggaggaacaaacattccatgctcatggataggaagaatcagtgttgtgaaaatggccatactgcccagggtaatttatggatttaatgccaccctcatcgagctatgaatgactttcttcacagagttggagagggctgctttgcagttcatatggaaccagaggggagcccgcattgccaagagaattttaagccaaaagagcaaagctggaggcatcacgctgcctgacttcaaactatactacaaggctacagtaacaaaaacaccatggtactggtaccaaaacagagatacagaccaatggaacagaacagagccctcagaaataataccacacatctacaaccatctgatctttgacaaaaacaagaaatggggaaaggattccctatttaataaatggtgctggaaaaactggctagccatatgtagaaagctgaaactggatcccttccttacaccttatacaaaaataaattcaagatggattaaagccttaaatgttagatctaaaagcataaaaaccctagaagaaaacctaggtttcttgtaagaaaaaaacagacagccccatcaaaaactgggcaaagggtatgaacagacacttctcaaaggaagacatttatgcagccaacagacacatgaaaaaatgctcattatcactagctatcagagaaatgcaaatcaaaaccacagtgagataccatcttacaccagttagaatggtgatcattaaaaagtcaggaaacaacaggtgctggaggatgtggagaaataggaacacttttacagcattggtgggactgtaaactggttcaaccattgtggaagacagtgcagcaattcctcaaggatctagaactagaattaccatttgacccagccatcccattactgggtatatacccaaaggattataaatcatgctgctataaagacacatgcgcatgtacgtttactgtggcactattcacaatagcaaagacttggaaccaacccaaatgtccatcaataatatactggattaagaaaatgtggcacatacacaccatggaataccatgcagccataaaataggatgagttcatgtcctttgtagggatatgaatgaagctggaagccatcattctcagcaaactatcacagggacaaaaaaccaaacaccgcatgttctcactcttaggtgggaagtggaaaatgagaacacttggacacaggaagggaaacatcacacaccagggcctgtggtggggtgcgggggtggggaagcggggaagggataggattaggagatatacctaatgtaaacagtgagttaatgggttcagcacaccaacatggcacatgtgtacatatgtaacaaacctgcacatggtatacatgtaccctagaacttaaagtataataaaaataaaaataaaagacctgaaagaaactgtcaaccaagattgtatatctgaaaacaatatctttaagaataaaggagatgaagctgggcatggtggcttgcatctatagcctcaatgacttgggagactgagggaggaagattgctggaacccaggaacttgaggctacagtgtgctatgagcatgtgtgtgaacagccactgcattccctccagcccagacaacacatcaaactgctgtctcaaaaaaaaataataataataaataagaataaaggagaaattaacacatttccaaatattataaaaccctaagtagttcattactgatagacaaaaaatgctacagcaagtccttcaggctgaaaggaagaaatactaaacagcaatttgaagccaaaagaaaaaaataaagagtattggtcaaggtagttgcataggtaaatgtaaaagccaatgttactgtgcttttggtattgtttgttatttctctttttcctatataattttatgggcaagtgcatttaataatacttacaaatctatattaggatgcatataacgtataaagatatagtctgtgacaatcagaataaaaagggagggggtagagatgtagaggagcagagtgcttgtagaccattgaaacttagttagtattattcaaaggatgttgttatttaagatattgattgtaatttcccagaaaattattaagaaaataactaatatagagaatgggagaaaagaagcaaattaaaatgaaacacacacacagacacacaaaaaaaacagaaaaatatctagtaatgaagtaattgaaaagcaaaaagtatgtaaggcataagaaaaaagtgtataaggcataaggaaaaagtgaatttcttctctattgataatcatgtaaatgaatgaaatgcagttcttaaaaggtagcaattggtagaaaagataaaacaaaacaagaatccacctataagccatctacaagagaatcaaattaaacataaggatacaaaatggttgatagcgaaagaatgaaaatgctaaaaaagaacaggggtgactatattattatcagacaaaattgacttgttaaatctaaaaaagtttacaagggatgcagaggacattataaattgataaaaggtttaacacagcaaaaacataaaataattttaaatatatacacacttaacaaaggagccccaaaatatatgaagtaaaaatggacagaattgaaaggagaaatagatctacgttaattgttgaagactttaatacccactttcaataatggacagaacaaacatgcaggagagccgtaaggaaataaaggattcaacagctgtataaaccaattagacctaacatgtgtaaaacattccattcaaaaatataatacccattcttgagtgcacgcattacattgtctgggttagaccatatgttaagccacaaaacaaagtgttatgaattgaattttgttcccctgcaatttatatgctacagtcctaactcccattacacctcaggctatatggagatagagcctttaaagaggtaattaaggttagagtgggtcctaatttaatatgactggtgtgcttataacaaggagatgtatgcacctagagaaagtgccatgtggggacacagtgagagagacaagccaaggagagaggcctcagaataaaccaggcctacttaacatcttgatcttgtacctccagcatccagaaatgtgagacaatacattttggctaagtcactcagactgatattttgttacgatagctctagcaaactaatacattttaaaactttcaaattaccgaatatcttttctgttcacaatggaatgaaccctagaaatcactaacagaaggaaactgtaaaattaataaacatgtggaaattaaacaacacagccttatataaccatttggtccaaggttttattttctcttttttaaattaatttatttccataggtttttgggaaacaggtggcatttggttacatgagtaagttctttagtggcaatttgtgagactttggtgcacccatcacccaagcagtatacactgaacccaatttgtagtcttttcctcacccacttcccacccttccccaacccccaaagtccactgtatcattcttacgcctttgcatcctcatagcttagctcccacttatgagtgagaacatacgatgtttgtttttccatacctgagttatttcacttagaataaaaatctccaatcccatctaagttgctgcgaatgacattaattcattcctttttatggctgagtagtattccatggtgtgtatatacaccacagtttctttattgactcgttgattggtgggcatttggactggttccacatttttgcaattgcaaattgtgccactataaacatgcatgtgccagtatttttttcctgtaacaacttcttttcctctgggtcaatacccagtagtgggattgctaggtcaaatggtagttctacttttagttctttaaggaatctccacactgttttccatagtggttgtactcatttacattctcaccagcagtgtattagtgttcccttttcaccgcatccacatcaacatctattattttttgatgttttgattatggccattcttgcaggaagtaaggtggtaccgcattgtggtgttgacttccatttccgtgatcattggtgatgttgagcattttttcatatgttcattggccatttgtatatcttcttttgagaattgtctgttcatatccttaaccccctttttgtttggattgttgctaatttgtttgagttccttgtagattctggatattagtactttgtcagatatatagattgtgaagattttctcccgctctgtgagttgtctgttactttgctgactgttgcttttgccatgcaaaagctctttagtttaattaagttccacctctttgtttttgttgcatttgcttttgggttcttggtcatgaaaactttgtctaagcccatgtctactagggtttttccgatgttatcttctggaaattttacagtttcaggtcttagattgaagtccttgatccatcttgagttgatttttgtataaggtgacagctgaggatccagtttctcattgtcttacatttggcttgccagtttccccagcaccatttgtgctgaatagggtgtcctttccccactttatgtttttgtttactttgtcaaagatcagtggctgtaagtatttgggtttatttctgggttctctattctgttccagtgttctctgtgcctatttttataccagcaccatgctgttttggtggctatggccttatagtctagtttgaaatcaggtaatgtcatgcctccagatttattcttttggcttagtcttgctttggctatgtgggctctttggtaaattttaggattgtgttttctagttctgtgaagaatgatggtggtattttgatgggaattgcattgcatttgtagattgcttttggcagtatggtcattttcacaatattgattctacccatccatgagcatgggatgtgtttacatttgtttgtgtcatctctgacttctttcagcagtgttttttagttttccttgcagaggccttttacctctttggttaagcatattcctaagtattttattttattttattttattttattttattttattttattttattttattttattttattgcagctattataaaaggggttgagttttttatttgattctcagcttggtcattgatgctgtgtagcagagctcctgatttgtgtacattaattttgtatcctaaaactttgctgaattcgtttatccattctaggagcttttcggaggagtctttagggttttctaggtatgcaatcatatcatcagcaaacagtgacagtctgacttcctctttactgatctagatgccttttacttctttctcttgtctgatggctctggctaggacttctagtactatgttgaatagaaatggtgaaagtggacatccttgtcgtattccagttctctgagggaatgctttcaacttttccccattcagtattatgttggctgtgggtttattacattgaggtacatccttgtatgctgattttgctgaggattttaatcaaaaagggatgccagattttgagggatgccagcttttgtgaaatgctttatttaaactgtgtctgttgaggtggtcatgtgatttttgtttttaattctttttatgtggtgtatcacatttattgatttgcatatgttaaattgtccctgcatccctggtatgaaacacacttgatcatggtggattgtctttttgatagttggatgcggttagctagtattttgttaagggtttttgcttctgttttcatcagggttattggtctgtagtttttttgcatgtcttatgtgctttcctggttttgttattagggtgatcctggcttcatagaatgatttagggaggattgcctctttctctatcttgtgtaatagtgtcaataggattggtaccagttctttgaatgtctggtagaattcagctgtgaatctgtctggtcctggaagttttttttcttggtaattcttttattaccgtttcaacctcgctgctttttattggtctgttcagggtttctaattcttcctgatttaagcttcctgtatctttccaggaatttattcagcatcctctaggttttctagttgatgtgcataaaggtgtttatagtagccttagataatcttttgtatttctgtggtgtcagtcttgatatctcccatttcttttctaattgagcttatttggatcttctctctccttttcttggttaatcttgctaatgatctgtcagtttatcttttcaaagaaccagctttttgtttcatttatcgtttgtattttttttgtttcaatttcatttagttctgttttgatcttggttatttcctttcttctgctggtttgggtttggtttgttgttgtttctctagttccttgaggtgtttctctagttccttagattgtctgtttgtactgtttcagactttttgttgtgggcatttaaggctatgaagtttcctcttaccaccacctttgccgtctcccagggcttttgataggttgtgtcactattatctttcagtttgaataattttttaatttccatcttgatttcactgttgacccagtaatcattcaggagcaggttatttaatttccatgtatttgcatggttttgaaggttccttttggagttgatttccatttttattccactgtggtctgaaagagtacttgatataatttcagttttcttaaattgattgtgacttgttttgtggcctatcatatggtctatcttggagaaagttccatacactgatgaatagaatgtatattctgtgtttgttgggtagaatattttgtaaatatgttaagtccatttgttccagggcatagtttaaatccattgtttgtttgttgactttctgtcttgatgacctgtctagtcctatcagtggagtgttgaagtcctccactattatttttgttgctgtctatctcgttacttatgtctagtagtaattgttttataaatttaggagctccagtgttaggtgcatagaatatttaggattgtgatattttcgttttggacaaggccttttatattaggttggtgcaaaagtaattgtggtttttgctatttttttctgtcctttttaactgctgttgctttaaagtttgttttgtctgttataaaaatagctactcctgctcagttttggtgttcatttgcgtgggctgtctttttacacccctttaccttaagtttatctgagtccttatgtgttaggtaagtctcttgaaagcagcagatacttcttatccattctgctattctgtttcttttaagtggagcatttaagccatttacactcaacattagtattgagatgtgaggtactgtttcattcatcatgctatttgttggctgtataccttggtggcttttttaattattatatttttgttttataggtcctgtgagacttatgctttaaagaggttctgctttcatgtgtttccaggatttgtttcaagatttagacctccatttagcagttctcatagtgctggcttggtagtggcgaattctctcagcatttgtttttctgataaagactgtatctttccttcatttatgaagcttagtttcacttgatacaaaattcttggctgataattgttttgtttaaggaggctgaagatagggccccaatcccttctaacttgtagggtgtctgctgagaaatctgctgttaatctgatcagtttttctttttaggttacctggtgcttttgcctcacagctcttaagattcttcattttgacttagataacctgatgacagtatgcctaggcaatgatcttttgtgatgaatttcccagatgttcgttcttgtatttggatgtctagatctctagcaaggccagggaagtttttctcaattatttccccaaatatgttttacaaatgtttagatttttcttcttcctcaggaacaccagttattcttaggtttggtcatttaacagaatcccaaacttcttggaggctttgttctttgttttagatggagtctcgctctgtcaccaggctggagtgcagtggcacaatctcggctcactcccggattcaagcaattctcctgcctcagcctcccaggtatctgggactacaggcacctgccaccaggtccagctaatttttgtatttctagtagagatgggttttcaccatgttgaccaagatggtctcgatctcttgacctcgtgatctgcccaccttcacctcccaaagtgctgggattataggtgtgagccactgcgcccagcctgtttgttttttaattattttttctttctctttgatggattgagttaattcaaaaaccttgtctttgagctctgaggttgtttcttctgcttgttcagttttattgctgagacttcccagaacattttgcatttcactgttttatttcctgaagttgtgatttttttttaatttatgctatttcactgaagatttctcccctcatttcttgtatctttttttttatttccttaaattggactttatctttctctgatgcctccttgattcgcataataattggtattatgaattcttttttaggtaaatcagagatttcttcttggtttggatcccttcctggtgagctggtgtgatttttggggggtgttaaagcaccttgttttgtcatattaccggaattgtttttctggtttcttcttctttgcgtaggctatgtcagagggaagatctggcactcagggctagtgttcagattcttttgtcccacaggatgttcccttgatgtagtactctctgccttttcctagggatgtggcttcctgagagccaagctgtagtgattattatttctcttctggatctagccattcagcagggctgccaagccctcgactagtaccgagggttgtctgcacagagtcctgtaatgtgaaccgtcttgaggtttctctgccaacgataccaacacagtatttagggtgtctcttgggtcctgaaggagcaatctgcttccttcagagggtctgtggattctcttggctttcctggtatattcctgcagtagttctggagccaaagttcatgatgcgagtctctgtgagctgctgtctgtccgggtgagggctgcaatctagtcctgcctcctgtctatcattttccccccaaatctccaagaagaaactattgagatgaatgaaaacgaaaacataatgtactaaaacttacgggatgacatgaaagcattatgaagttggaaatttatggatgtaagtacatatattgaagaagagaaagatattaaatcaataacctatctgtacatgttaaggtactagaaaaaaagaagagcaaactaaatgcaatgctagcagaaggatggaaaaaataaagattagagtggagatgaaagagtacaaacattagagaaaatcagagagcatttctaaagacatcacatctttgcagaagtcagcaaaatagaccaaactttagctagattgaccacgaaaaaactggtcaaattactagaatcaaaactgaagagactattactgattttacagaaatgaaaaggattatatgagaatcctatgaacaactgaacaccaacaaattgggtaacctagatgaaatgtacaattttctacaaaaacagtgtgcaagaactgactcatgaagaaataaaaaatctgaatagacctataactggtaaggatattaaatcggtaataaaaaccttccaatggccgggcgcggtgactcacgcctgtaatcccagcactttgggaggctgaggcaagcggatcatgaggtcaggagatcaagaccatcctggctaacatggtgaaaccccatctctactaaaaaatacaaaaaaaattagctgggcatggtggtgggcgcccgtagtttcagctactcgggaggctgaggcaggagaatgccatgaacctgggaggtggagcttgcagtgagccgagatcacaccactacactccagcctgggtgacagagcaagactccgtctcaaaaaaaaaaaaggaaaagaaaaaaccttccaatgaagaaagactcgctatcagatggattcatgagtaaattctaccaaacatttaaagaagaattaacaccagttgttctcaaattcctcccaaaaattgaagggaaaggaccacttcctaactcattccctgaggctagcattaccctgttaaaaaaaaaatagacaaagattttacaagaaaactggagaccagtatccctgatgaatattgatgaaaaaatcctcaacaacattctagcaaattgtattgagcagcagattaaaagagttataccccatttccaaaagggatttcccagaatacaagaatagttcacaaaaaccaattcatgtaatataccacattaatggagtgaaggagaaaaaccatacaattgttttaattgatgcaggaaaagcatttgacagaatccagcactttgtgataaaaacactcaacaaactgggaacataagattacttcctcagcctaacatacagcagttatgaaaaacccatagctaacataccaaatgatgacaacttagaagctttccctctaaaatcagaaacaaggcaaagatggttgctttcacccttccatttaagatagtattagaagttctgaccaaagcacttaggcaagaaaaagaaaagaatctagattggaaagaaagaaagaaaattatctctattcagagatggcatgaccttatatgtagaaaaccctaaagattatacacacacacacacacacacacacacacacacacacacacagagcacgttagtaaattgaggaaagttgcacaatgcagattaatatacaaaaattagttggatttttatcaatagcagtgcataatctaaaaaatgaatttaagtaaacagtatcgactacaatagtattttttaaaaaccacttaggaaaataagtagatgccagactcttacaataaaaactacaaaacaaatttgggcaagatggccagctagatgcagttaaggtggaacagctgtcaccaaggaaccgggaagacctggtgcattcctaacagatcttcagagggaaggtactgacagtggatggaaggaataaacagaagctgggctgaagggataggaagctgggaacccggcacagggctactgcatactgggactccttcctagcccctggtgactctgggggaatggctgagttgaactgacaagcagcaacctgctctcaccacaagcctctggaatcccaggaggcaaagaacccttttgtcttgtctagtcctgtcctgtcctgtcctgtcctgtcctctcccctcccctcccctcctgtcccatcccatcccgtccttgcctcgcctcaccttgcctcatttttcttttgtttttttctattttgaggaggaatcttgctctgttgctctctctgtcacccaggcaggagtgtcttggcaaagttttgcctcactgcaacctcagcctcccgggttcaagtgattctcctgcctcagcctcccaagtagctgggactagaggcatgcaccaccacacctggctaatttttgtatttttagatgacgtttcaccatgttggccaggctggtcttgaactcctgacctcaggtgatccacctgcctcggcctcccaaagtgctaggattatgggcatgagccaccgggcctgaccactcaacattcttaaagaaagaaattccaaccaagaatgtcatatccagccaaactaagcctcataagtgaaggcaaataggatccttttcagacaagcaaatgctgagggaatttgttactacctgacctgacttacgcaagcttctgaggcaagcactaagtatctaaaggaaagaccattatcagccactaccataagttacttaagtacacagagcagtgacactataaagcaaccagacaagtctacataataaccaactaccatcatgatgacaggatcagatccacacatatcaatacgaaccttgaatggaaataggctaagtgcccaaattaaaaggcacagcgtggcaagctggataaagattcaaggcccaatagacggctgggcacgtggctcaagcctgtaatcccagcactttgggaggtcaaggcgggcagatcatttgagatcaggagtttgagaccagcctggccaacatggtgaaaccccatctctactaaaaatacaaaaaaattagctgggcgtggtgacatatgtctgtaatcccagctactgagggaggctgaggcaggagaatcacttgaacctgggagatggaggttgcgctgagccaggatcacaccactgcactcctgcctgggcaacagagcaagactccatcaaaaaaaatacataacagacccagtagtatgttgtcttcaagagacccatctcacatgcagtgacacccataggctcaaaataaagggatgaaaagaaaaatctaccaagcaaatggaaaacaaaaaggcaggggttgcagtcctcatttcagacaaaatgactaaaccgacgaagatcaaaaaagacaaagaatcacattacataatggtaaagggttcaattcaacaagaagacataactcccctaaatatatatacacccaacacaggagcacctagatccgtaaagcaagttcttggaaaccttcaaagagacttaaactcccacacaatagtagtgggagatttcaacaccccactgacaatattaaacagatcatcaaggcagaaaattaacaaagatgttcaggacctaaactcagcactgggtcagatggacctgataaacatatacagaactctacccaaaagctacagaatatacattcttctcattattacatagcacatactctaagattgaccacataattggacataaaacactcttctgcaaatgcaaaagaagtgaaatcataacagccattctgtcagaccacggcacaatcaaattagaaatcagggctaagaaatttgatcaaaaccgtacaattacatggaaattgagtaatctgctcctgaatgatttctgggtaaataataaaattagagctgaaatcaagaagttctttgaaactagtgagaactaagatacagcataccagaatctctggaacatagctaaggcagtgttaagacggaaatttgtggcactaaacactcacatcaaaaagttagaaagattggctaggtgcagtggctcacgcctgtaatcccagcactttgggaggccaaggcaggcggatcacttgaggtcaggagttcaagaccagcctggtcaacatggtgaaaccccgtctctacgaaaaatacaaaaaaaaaaaagttagattccaatttaacaacctggcatcacaactaaaagaactagaaaaccaaaagcaaaccaactcagaagctagcagaacataagaaataaccaaagtcagagctggactgaaggtaatcaagacatgaaaaacctttcaaaagatctaggagttagttttttttgaaaaaaaaaaaaaatatatatatatatatatagatagatagatagatagatagatagatagatataaaaaatagactgctagctagactaaacagaagaaaagagaagatccaaataaacacaattagaaatcacaaaggtgatatcaccactgaccccacagaaatacaaataaccatcagagaatattatgaacatctctatgcaaacaaactagaaaatgtagagggaatggataaattcctggatgcatgcaccctcccaggattgaactaggaagaaattgaatttttgaacagaccagtaatgagctccaaaatcgagtcagtaataaataccctgccaaccaaaaaaagcccaggaccagacagattcacagctgaattctaccagatgtacaaagaagagctggtatcattcctactgaaactattccgaaaaattgaggaggagggattcaccccatctcattctatgaggccagcatcatgctaatatcaaaacctggcacagacacaacaaaaaagaaaactttaggccaatatttttgataaacatcaatgcaaaaatcctaaacaaaatactgacaaactgagtccgcaacacatcaaaaagcttatccaccacgatcaagttggctttatccctgggatgcaagattggttcaacatatgcaaatcaataaatgtgatccattacataaacagaactaaagacaaaaaccacatgattatctcaatagatgcagaaaacgctcttgataaaattcaaaaccctttcatgttaaaactctgaattacatattgaaggaacatacctcaaaataagaagagccatgtataaaaaacccacagccaacatcatactgaatggacaaaaatgggaagcattccccttgaaaaccagcccaagacaaggatgccctctctcaccactcctattcaacattgtattggaagccctggccaggacagtcaggcaatagaaataaataaaaggcatctaaataggaatagaggaaatcaaattattcctgtttgcagaagacatgatcctctatctagaaaaccccatagtcttgggcccaaaagctccttaagctgataaacagcttcaacaaagtctcaggatgcaaaatcagtgcgcaaaattcactagcatttctatacaccagccatcaagctgagagccaaatcaggaatgcaatcccaatcacacttgccacaaaaagaataaaatacctagtaatagaactgaccaaggaggtgaaagatctctacgagtactacaaaacactgcttaaagaaatcggagatgacacaaataaatggaaaaatattccatgctcattaataggaagaatcaatagcattaacatgaccatactgccaaaagtaatttacagatttcaatactattcctatcaaactaccaatgacatttttcacttaactaataaaaactattttcaaattcacatgtatccaaaaatgagcccaaatagccaaggcagtcctgagcaaaaagaacaaagctggaggtgttatgctacctgacttcaatctatacaacagggctgcagtaacaaagacagtatagtactggtacaaaaacagacacatagaccaatggaacagaataaacaacccaaaaataaggccgcacacctacagtcatctgatccttgacagtgctgacaaaaacaagcaataggaaaaggactccattcaataaatggtgttgggatagctggctagccacatgcagaagattgagccttggaccctttgcttatataaaaataactcaagatggatcaaaaatgtaaaacttaaaactaaaaatgctgcaagacaacccaggcagtaccgctctggacataaaatttaggcaaagatttcattatgaagacaccagcagcaattgcaacaaaaggaaaaattgacatatgggatctaattaaatcaaagagcctctgcacggcaaaagaaactatcaacagagacaactatcgacagcctacagaaagggagaaaaattttgcagactacacatctgacaaaggtctaatatccagcatttataaggaacttaaacatatttacaaggaaaaaacaaaaagcctctttaaaaagtaagcaaatgacatgaacagacacttttcaaaagaagacattcatatggccaacaagcacatgaaaaaaagctgaacatcacttatcattagagaaatgcaaatcagaaccacaatgagataccatctcacaccaattagaatggctattattaaaaagtcaaaaaaataacagctgctggcaaggttgtggagaaaaaggaatgtttgtacactgttggtgggagtataaattccttcaaccattgtggaaaacagtattgccattcctgtggaaaacagcattgccattcctcaaagagctcaaatcagaactctcatttgactcagaaatcccattactgggtatatatacccaaaggaatataaatcattctaccataaagacgcaggcaagcatatgtttgttgcagcattgttgacaatagcaaaaaaatggaatcaacctaaatgcccatcaacggtagactgaacaaagaaaatgtggtgtgtatatactacagaataccatgcagccataaaaaaaaaaatgaggtcgtgattttacagaaacatgaatggagctagagactattatcctaaacaaactaatgtgtgaacaggaaaccaaataccacatgttctcacttataagtgggcactaaattatgagaacacattgacacacagagaggaacaacagacatgggggcctactggagggtgggcggaaggagggagaggatcaggaaaaataactaatgagtactaggcttaatacctgggtgatgaaataatccgtacaacaaatttctattatatgttacctatataacaaacctgtacatgtacccctgaacttaaaaggtaaagaagaaaactacaaaacattgctgaaataaattaaggaagacataaataaatataaggacatcccgtgttcatgaatttcaggctttaatattgttaagatgacaatatcctaccaagcaatctacagattcagtgcaatccctatcaaaattccaacagcatttttgtagaaaatctattcgaatattcatatggactatcagcagacctcaagtagccaaaaaattttgaaaaggaagagcaaatatgtaggactcacaattcctgatttcaaatcttaatataaatctacagcaattaaaacagtagggtactagtataaggagagagatagagatcaatggcatagaatagagggcccacaaataagaactcttacatatatggtgaagtgagttttgtttttcgtttttgtttttgttttttgttttttgagatggaatcttgctctgccgtccagcctggagtgcagcgacacgatctcggctcaccgcaacctccacctcccagatttaagcaattctcctacctcagcctcccaagtagctggaattacaggcgcccaccaccacgcccagctaatttttgtctttttggtagagacagggtttcaccacgttgcccaggctcgaactcctaacctcaggtgatctgcccacctcagcctcccaaactgctggtcagttacgagctaccacgcctgaccatgaagtgagttttgacaagggcactatgatcattcaatatgaagaacagtctttttcaacaaatgggaaaattggaaatccctgtgcaaattaatgacattgagcccttgttttacaccatatacaaaaatcaacttaaaatacattaaaagactaaaactcttttttttttgagacggagtctggctctgtagcccaggctggagtgcagtggcgtgatctcggctcactgcaagctctgcctcctgggttcccgccattctcctgcctcagcctcccaagcagctgggactacaggtgcccgccaccacgcccagctaattttttgtatttttagtagagacggggtttcaccgtgttagccaggatggtctcgatctcctgaccttgtgatccgcccgccttggcctcccaaagtgctgggattacaggcttgagccaccatgcccggccgactgaaactcttaagagccaaaactataaaaccattagatgaaaatataggggaatgtcttgatgacactgcgtttggcagtgatttcttggatatgacaccaaaagcacaggcaacaaaggaaaaaaatagttaagttgaactctatcaaaatttggaagtttcctgcatcaaagaacactgtcaaaagagtgaaaagtcaacccatacagtgtgaaaagattttcaaattgtatatctgctaatggattactatccagaatatatagggaattcctataattcaatgtcaaaaaaaaaaaaaaaaacagcccagttcaaaaatgagcaaaggactataatggacatttatccaaaaaagatatactaattgccaataaacacatgaaaaacactccacatcattagtctttagggtaatgcaaatcaaagccgcaatgaaataccactttttgatcaaagaccactgagaataacaattgttggcaaagatgcaaagaaattggaatgcttttgcacttctgctggaaatataagaaggcacaattactaaggaaaacagttcgggaaatgaaagtgttctggaagtagataatgttgaaggttatataacatcatgtatatacttaatgcctcagaatagtccacttaaaatggtcaaaatgataatatgttttatgacaataaaaatggatataaaaagaagggagcaattaaaagttattattggctacttcttctctggtgtttgtttcagttcataaattagttttctaacccaaattcatacttgtgtagtaaatttacaatttataataaaatatttagtaaaacttagttctcatattaggaatgggtatattgaattaagggcaataattcctttattgtaatgtctgtgagctcacaagtttccaaaattccagttatgccccaactgattaatcattagacttataaatagtataagagtggtgattgcagacttttacattcatgttcactgtatgccggtacattgcccaattcctgaatctcctttaaccttgcagtaaccctcagagtttttctgtatcttccccattttctatacagtctccctgaaagtagtaaatgctgcacaggaaggctgcagtcaaggccttgctgtgttgaacaaagctgtagcttgttgcagacgtccctgtgctagtctgctgctctggggctaacccctccttcacattgtctcctaggagagattgggatgatggctgtcaccctgcaaggtctgatcatgtaactcaagaagtcttggtagagagcttgtgtctgactgacctgaagggtggacactctgttgagaccactgatgaggtggccacagagggagaagtgatgaccagcgttccaggagagtgttctgggttaaggggccagtgggtcacaggagaaattcttcagagaattgtaacataatattttgcaaagtattacaggtgttcaagggtcaagtaaaacactgctgatatcacacatgtagtgtaaactaagtgaagtcatagaggtgagatgtgctattttgtttctgaaagaatgtgagttattgagaggatactgtactttttctatctagagcacagtttatttacttcagagaagctagacatcactgacctcaaaataagtaattttcatgcaacaacccaagtaattacctgtcagagatataagatagttttgatctagctttgaagccctggttaaggactttatagttagagcaataaacttatggttaaatattaaacattattgaatgaatggaatgcttcatatctaatgcagcctctcaatgggtccatttttattctttatcacaaaggtaaagactggaaaagcaaacaatttcactgcttaagaaaatctttcctttctggccgtggtcttctgggggtcgggtgttaaccagcacacccatgagtttactggcctcagtacaacctgcgattgcctggatggtcaggctgtgccagcccctgcactctctccagggctgccgcctggaagaacacaccacttagcacactcatgcttttggacacataacacacccgtcaggttaattatatacatgaacaaaatattttataatttaatacagatttattctagcttacagggtcttggaagcaagcatattctctgtcttctgtgagttcacagcttagaagcataacgtgttatacccacacatgtcccagctagaatgaagaaggttttccttactttttccagcttgttttcttttttcaacataatctataagctaaaggcaaaggattaggatagagatggcctttgacttggcttgttctcaaaatgataggggcttattgtgatcactgagggttcccattgtgtctccccgctttgtgggctctgtgaattcttcctggagtaacctttcccacccctggtctgcctgaaaagctcataattctcctgctgctttcctttgtaccttcactgccatctttttcccaacgctggacatacttggtccctctattgtgcatgacaccatggtgccttccacacgcgtctattttagcacattcaataggatctgtggttgtatttctgccttcttttctacactatgagcttctggagtgcaggcaagtatgatttgtggcttaaatggaaatcttggctttgcaagaccagtgtagccatatagtcttcatgttttctcacaggatctggaaattagatcccaactgatttgtgaggaaccaggaggaggatgggaatttgtatgctagtatttgcagctatgaaaatacatggttcagtgaatcatcctaccccagctaagatacaaatggttggaaagtttttattctcatccacaccttataggccagagggcttacagtaggagaggtaggtggtgttcacccaacaatagtgctttcttgctaaattggtgccaagcagacaaggagaacacgagcaggcatgattgctgggcttccagttgttctcacgtaggcgagttctctttccaacctgtgtgatcatgctatctagaatcccttcagcattccttattgagtgaaaaaaactgaccaaaaggaaaaatatcaaacctgtctgatgaatgattgctaagtggaggtcctgtctttctatatatttgaccgtgaatcctcagcatattgtggagtatagttctcataaaataggtcttttaattctgtgtcgaatacccatgtgtattctgaaaattcagaagtagtattttgaaaatgtcttatttattgtaggcttaataatttttctcaataaatatgctgtctttagctgtttgagagatacaatcttgtgggaataatgcaaagggtataaatgtgggaatgccagtgcctattattctagccccagtcacaacatctcactcccaggagtaattctgagtgttggttctctttctggtgggagtgacgggcagctctttgcctttaggagatctgtgaactggtcaggctgccgtctggcatattttctccttcagacaaatcagtaatgtgaaaatggagttctcaatctcttcccttttcaaagttggcttcagatatttttctgtgtcaacaaaaaagataaaacacctgtttgatttattctgacatctagaatcctaagggttttttaaagaattgatttaagaaatgagaattcagtccaacacagagttaatttattacctgttctcttttgtagaatgtcagtagaatttgttattttcatgttgcagagaagagtacagtttttaactgtaattgatttgctgaaagcagttacatctgtggctaagccataagtaacatttaattctttggcttttaggtcagcttggattttatctattgtcatttttcccagtagtttcaaaaacacaaagttatggaaagccaattctgttatgttgctttaagctcctttagacctctggtgaagcagcttgatgttcctggaagtgtttcatagattttcttcaactactaacatgacagtggacaaataagagagtgtgttgggaaaggaagctttttatttgtaccacttgaaacagcaatattgtcctcacatgcagctcagaagatgaatgtagctgagttcgtatacctgctggtcccttctctcctgggttagccgatctgctaggaagacaggctgttagcacaccctgccctcaattcacatttctcccagggcatgccctgccgggcccagagcatgctcggattggagtgcagtcatgaaagatagcaaagatgtctggtctgttgtctcatacttactttatttttaacttctttcctacctgtcatgtaaagaaacagatactgaggaatagttgtgtgtcagaccattattttgtaattaaaataatccgaagatcatgcagtgatctttaaagccatgcactaacttaaagagtaatttctattacaataaaattgcaagtaaaatatcactttgataatctttaggtaatgggtagccttgtatgtacctaagcatttgaatgtaactcttttctgtgaaagaaaaattataataaaaggctacatgtttcttgccttttatgtcacttggagaatgcagtgctgaggagaggaaataataagtgtattggtactagagccaagaagacacatataaaatgatccaaaaagataagaagtaaatggttaaggtttctttatctaaaccaatacagtatccgccccccgcacccctttttgtaaagccagtcaaatttagcagtggaagagttgtgggaggtttgatacaatattataactggaaaaagaaaagtctatttttttggttattggtttctttttaataaaagacatagcatttaagaaatgtttatagatcatttaagaggaaatacagttgttagatttacctctttgaggtttttcttacagaaattgtttctagccttctgtgatgtgtgaatatcaggcaggaccaatttaagggtagccattgtaacacaaaagttaaagcttttgtgtattcattaagttgggtagccattgtgttacagtgtcgaagtgtgacagtgttcttggagctgtgagtttaggcattgcttgacggatggtctgttgtgtctacgctccaggggactgccatgaaataacagggttcagctactggagggcagagttataagagcactggcattggagtgatggctcttgagtttgtgatcgagattggacaggctccttgattgccacgaattcccttttccacagctgtgacacagcatttacagctacttcattagggtgatgaggagatatgaaaataccatgtgaaagcacccagcatgcggccaataagcagcagcagttcaataaatgatagtccagtttgattgcagttaagttgcaagacacagtcgtgccattgtgagtcacacagttccccgcaggtggccttctgttcctcctgagacacaccttgcccctttctcacctcaccacctccgagactcccttcacccctgcctggaccaccccaacccagtccttctgattcttcaccgaactaagggtgtgtctaagtcaccagttctcatttatttgcttgtttatttttcatcctatcttgtttaaaaattgattttaattggcttagaaaaataccaggattcacagaatgcacaaatctgtatgcaagagaagcagcaggctgcgttaaagtaggagactcggtcaacaccaaggctcagggctctgcccaaaaacagatctgttaacaagaaaaacagcaatatctggtagtgacaccttagaaaaatttccttatgaggaggaagctataatacagaaataaaataatacaggagaacaaatataacctgtttaaatgagaacaatttctgttaatatctgttagtacaagctgccagagtaacagctcagtgaaattgtatattctgtagtatttattggccctcttatcatgggaaagttttaagcatctctgagcatagtttcctaatgagtaaaatggagattaaaaacacttcagggcctatgaaacacttaatgaaacgtggagtctggtaccagagtctgtatatagaagatgcgcaatatattttttttttttgagacagagtctcgctctgttgcccaggttggagtgcagtggtgctatctcagctcactgcaacctctgcctccagggtccaagcagttcttcctcagccccctgagtaactgggattacaggcgcttggcgaccacgcccagctaatttttgtattttgtagagacagagttttgccatgttgcccaggctggtcttgaactcctggcctcaagtgatctgcctgccttggcctcccaaagtgctgagattacaggcgtgagccactgtacctggccaatgctcaattaattttaactattttatcattcatagtaatttgtaatatttcatatagtagaggtaattttagaaatctagtcctggaatattccttaagctatctagaggagagagtaaaagagccaaacttttaagctactgctcaataaatgatggcttcttgcagattgtccctcaataagtattaaagtggcagtgagtttaaagttatactgctggcatactttcatcctttgtttcattcagtgaatatctttagtgtggagtgctgaggatgcagccatttcagggtcttggtagaaatgaccatcctgtaagtagacagttgccacacagggtgcagggggagcctgccagggctcagaggggagcatggggaggcagagccctaggggaggcacccccaggaaagacagctgcgcttagctgggaaggaggaattggaggggctggctgcaggattaggggcagcaaggggcagggtaacttgcccaagtggaacatgtgaaggggaagtggtatggttgaagctagagttgaaggttgaagctagagtgctagcagcacccagggcgtgaagggctgacacttcgtgtgaggaaaagatgcagtatggaaggcacaaggagtaccagaggacacgcatcaggtctgtgttttagaaaacccgacagaaataatgtgaagaatgaattgagggtgggctgggcatccagcctgacgacaaacacacctctgaggaagcaaaaagcagtgagaggaggagcaaccagcggggtggtgacagcgtggtggggaggattaaccagcagcaagaagggacagacttctgagagtgccaaggatgaggattggggttgtgcgtgacagtttcatcttggaagttttaggctgccatgactgggagatggtggcaccttcacagagacagaagaagcaggaaggacagacctcggttatgtttcatttcttggttgagtgcagatgaactaactgctttaaaagtcagctgaggttgcagaaagtgaggagcctaagatcagcatgtgccggaacacagcactggggagcccctgctgcagagccacattcatcctagcaaggacagtttgggttcatatgaacacacagtcactgtggtttaagtcttcaagattcttctccaaaaagtggcagcatttctcagtgttcacagatactcatctctccatcaaaaaggagatcccagtaaaatgctcataaagtgtaattgctgtgagacatcaggtggaccttcctaaattggctatgaagtgtgtaactgaatgctttacctacaattatagctctaaacctgttgaatgtagggaaatattcaccacagaagataactttgatttctgaggaattaattggaagccgtgtttaattagcagaggcacttactcatccaagccgttcttagcttgttgtaataatacatgatttgcttttgagttgtttttttccatttgttctttgttttggttaggaaggtattcatctcatccaaaagtgatataaaatcagtgaaaaaaaaaatttaaagaaagggatgtggggcggggtgcagtggctcacgcctgtaattccaacactgagagactgaggcaggcagatcacttgaggccaggagttcgagatcagcctggccaacatggtaaaaccctgtctctactaaaaatacagaaaattagctggagtggtggtgggcgcctgtaatcccagctactcaggaggctgaagcaggagaattgcttgaacctgggaggcggaggctgcagtgagccgagattgcaccagtgcactccagcctgggcaacagagtgagactctctcaaaaaaaaaaaaaaagaaagaaaggaaagaaaagaaagacatgtggagcacaattctgtcttactttgctggaaagtatcttataagagaaggtttcccctgctctgactcccatagcaggtacaacttctgtctcaaggtcataaacaggctcctgtggtgagcttagcagcacagcccacagcggaattccactccccaagtaaagtggggcagtaggggggaatgcagggagagctgcacctgatcctgtggctgaggttctccttcaggtggtaaagcagccatgagcaggggctggggagtggcctgaagccagcctgctcttttcagaccaggaagggaggggctcagggcaacttgtcagaaaggaatttgctacacattctagtggaaagttcttgtagactaatagaactgtaagtttggggaagtaaggcttatcagttttagaaagcagaatagcttgtgcccaagaactgaacagcagctaggaacactaacagttcaagtccatagtgctgtgagaactacaatagcttcttcagtgtttagcatccagtttctcttagtttgtgcctcatgatgttttgagctttaaatgaatcacagtaaaaagatttgaccaccagccaaaaaaggtgaattcatctcatttgaggctcagggtgaaagaaaaagtaaaataatatcttggagaacttcttcacctattttaccagtattttcctgtttaaagtctacctaatgaagaaaaatgtatccatccactactcatgagagcctgcctaagttcgagaccagcctggccacagttgaatactgtgctgggcactgaagatttagaggtgaatataaagaaaaggcaagatggatttaatgtctaaagtagaagattaggaggaaagcaattaagcagttacctgatttaaaatgttaccctacagtgttcatggaattgtttaaaagctatatcttagatacaaacatgtttgtctcttaatgtgtgggttaagtatttgattagatgagtatgtcctaattgagtaatccaggaggaaaggtcctaaatccctgaaagtaatagcatgtactattttgttaaaatgtaaggtctgtacttgaaactttccagctcttaaaaatgaggaaattccaagcattctgcactaatagatagtgttagtgggtagttggtggatgacgtcaaatgtcagaatggtgaacagcttcgttcatataaactgaaagtgtacaatctgggatcaagtgttctcgctgctctcagggatcggcgcacagcctgtgtgctcccatgtggcctgacttggatttcagagtttatatgaggcacagctgagagtctggaaaaggcacagcatcttctccttcctgtccagatgagccaagtgagcaggaagggtctcagcatctattcctgaggccctatgagaggtttcttcattcctttataatgattaagccctacattgggaatgggtttgatttgtcattgtacaaacttcagaggctttaatggtaattttattaaccttgctggaccttatggaatgttgataaaagcaaccactctttgttatgaaagcaaaaagagacattgaaaagttagttcaagataattggcaaagccagctgccatgatgagattgttgaatagtgatggtggtaatggcagaaaaggtgaaggctctttcttgaaagacagcacaggaatcaccgctctaatgctatctttgtgatgttactgttgaatatatgtgaggtgctgctgtcttctgactgacttcttggtcactatcacagtgttatgactgctataaggtgtaatggtcttttctcgtcattacattctgtttaggttttgtattgtatgagagagatctggggaaagagatatataattggacatttgtatatataatgttaagtgaaaaactgagagttgtaatgcagctctaagttccaagattgatggttggccagatgcgttggctcatgcctgtaattccagcacattgggaggccgaggtgggcagatcacttgaggccaggagttcgagaccagcctggccaacatggagaaactccgtctctactaaaaaaagatagaaaaattagcaaggcagggtggcacatgcctgtaatcccagctactctggagtctgaggcaggagaatcgcctgaacctgggaggctccatcagggcactgcctgttttgcttaccactgtatttctggccacttcagtgtttgtgttcaatgtgtatttaatgactatggacagaatgaatacaaaggaaaaaaaagaacttggaggtaggaaaacaattgtgggagaccagcccatgtgagtgaccaagctgattatatgattgacaaggttgactctacataattgagttttaaaaaagactagaaaggaccacttgaagtcattgaagggaactctctggagatagtggagttcttagtctctgccctttgttcttaaaatattcagctgcattttaggtaaggtagtgatctgccttcaattgcaaatagttgataatatcacttttaatgtagactaaagccaacatttttcatgtattgttctatttggagtaaataacacattttggcatggttcttcatgtcttagcatctgtcagttttcatgtgaggactcagtttacaggttatatacagcacatgttgagcgtggtcagtgggtatttgtacctgaagtacgtacttcccttctgttgctgatattgtcatgagcagttccaccctcagtgtttacctctatgctttgaaatcttctctcaaacgcatattcattcctattttttgtaccctttgggattcctcaatctcatatacatctttccatttctgacctaatcccagcactttgggaggctgagccgagcatagtggggtgtgcctatagtcccagctactcaggaggctgaggtgggaagatcacctgagcccgggagctggaggtttcagtgagctcagatgtgccactgcattccagcctgggctacagagcgaggccctgtctcaaaaaaaaaagtctcatgacttcgtctcctagatgagaccatctctagctgatgcctttgcttgcattctcatgtgcagggccagcagatactgatggagcagatgttctctgaggctgtaggtgctggggcacagatcttttcctcatcctactacctagtgaaggggagaaatgacaagcgaggcaactgcaggtgaaaagtgtttggagagaggtttctatagggctccagtctatgcactgagcccaggcatagacttcagagatgcttcctgaaaagaagttggcaagatatgagggaggagggcgcagctcctgattcctctgacctttctattgtgggtttgatgccccctccccacctgagtcctcatgggcagctgtgttttgtttttttttgttttgttttgttttgtttgagacagagtctcgcactgtcgcccaagctggagtgcagtggtgcgatctcagcagctgtgtttttaagaagtgtttctactcctttccttactcaatcctgaccctgtaaaattcccacttgctggctgccccctccccaaggaaaggccgcccctctgcccctccacagtgggtggtgcccagagtcaggggacaggtctgggctttcctattcttgctgacccagctatagagaccgtgctctttcccattcagagagtcatagctacttggtttttttttgtttgttttgttttgttttgttttgttttgtttgtgtgtgtgtcttttattttacgcttggggttgtctttttaaaactttcttttattcttttatcttgggataattacttattttaaagtaagccttgtttgtttttgtctgttaaaaatctttacagccatccagcttatatcaacttttttatttcctgccaggcaaaaagaattaatagaaaatggcagcccaagaggtaagatacgcagtctgtccacaccccaaacagggcaggataaatgcctttcttggttctaataagccctgaagagatactccctgtagcaccaagtcatttccctctgctgcccctttgaggtgactgtattcccaaaagtagtcagtgtagaggaatggatggcccgtttaggataggtagttgcacagattatctctgagggaggtgactaagaagctgaactccaaagacaagacaaaggaattgatgaacagtatcattctcttaactctgggatagggattctgtgaaggttaatgtatgctcttttttctagggagaagatccctttatatttgattgtcatggggatctgtggcccagagtaaaatcagcagtcccagctgtatagactttcaggttcattatggttgtgatctgaaaaccttggtcacctctgtggtatgtgtcattggattctagctacttgagtgaagtggctcctgtgcattcttagaagcgagtatgagagaggatggggtggagttccagttttactagagaaagctctcaaaagagaattttgatacccaacttgaaacctggaaaattaccaagtacagcttcgtgttaaaaaaaaaaaaatgtcgatgcatctttatcaagttagcaaacgatttctatgattgtctatttccagagtaatttgattgaacgggttctcaggtttccatagctggggttgtaggagtattctccacaagcgaagatagaccaagtgcttgacacgtgacctcaccgaaagaagtcacttaataaagtgcggaatgagtgaagggaagttgcaggtgtaattttcttcaccaaagtcaggaacccaatagaagcaatcatagcaatgaaaatagtaacttttgatgagcgttcacttgtcttttaagggctttatacatatcaaccctttgagagcagatcccactgctcttcgcatctgctgtgaatttgttggtaaagcctaacaaggtgggccatctcacctagggtgggctcagctgtcctgggccaggtcctcctcctgaggtcctggtgaacctcatagtcctgtatgcagcacctccttgaaggtaaatccatcctccagagcagaacatggtggcagaggcacagtgacactggtcccttatcctcctcatgcagtggctcatgctgttaggtttcctgaggctcagttactgcagatgggtgtatttgggggagatggtctcgtagttctgggcatataaaagcaacagtaaaaaccaggcatcaaaaagctgataccagacacaattgtgatcctggattagaaaagaattgttataaaagacatcattgggaccagtagtaatatttgaacatggattgcgtcttggattacagtattgtatcaatgtcacatttcctgaatgtgtttaccacattgtggcgttcaaagggaatggctgtgttcttagaaacagatccagacccggacggcagttccaagacagctgaataggaacagctccagtctacagctcccagcataagcgacacagaagatgggtgatatctgcatttccaactgaggttccgggttcatctcacttgggcttgtcggacactgggtacaggacagtgggtgcagcccaccaagcgtgagctgaagcagggcgaggcatggcctcacccgggaagtgcaaggggtcagggaattccctttcctagccaagggaagctgtgatagacgacgcctggaaaatcgggtcactcccaccctaacacagtggttttccaatggtcttagcaaatggcacaccaggagattatatcccgtgcaaggctcggagggtcccacgcgcacggagcctcgctcattgctaatacagctagtacagtctgagatcaaactgcaaggcggcagcgaggctgggggaggggcgcctgccattgctgaggcttgagtaggtaaacaaagcagccaggaagctcgaactgggtggagcccacgacagctcaaggaggcttgcctgcctctgtaaactccacctctgcgggcagggcatagccaaacaaaaggcagcagaaacctctgcagacttaaatgtccctgtctgacagcttcgagagagcagtggttctcccagcacagagtctgagatctgagaacggacagactgcctcctcaagtgggtccttgacccccgagtagcctaactgggaggcaccccccagtagggggagactgacacctaacacctgacacttcacccctctgagacaaagcttccagaggaacgatcaggcagcagcatttgccgttctgcaatattgtctgttctgcagcctccgctgctgatacccaggcaaacagggtctggagtggacctccagcaaactccaacagacctgcagcagagggtcctgttacaaggaaaactaacaaacagcaaggacatccacaccaaaaccccatctatacatcatcatcatcaaagaccaaaggtagatacagccacaaagatggggaaaaaacagagcagaaaagctgaaaattctacaaatcagagcgcctgtccccctctaaaggaatgcagctcctcgccagcaacggaacaaagctggacagagaatgacgactttgacgagttgagagatgaaggcttcagatgatcaaacttctctgagctaaaggaagaagtttgaacccatcgcaaagcagctaaaaaccttgaaaaaagattagacgaatggctaactagaataaccagtgtagagaagtccttaaatgacctgattgagctgaaaaccacggcacaagaactatgtgacaaatgcacaagcttcagaagcctatttgatcaactgaaagaaaaggtatcagagactggagatcaaatgaatgaaatgaagcaacaaaagaagtttagagaaaaaagagcaaaaagaagcaaacaaagcctccaagaaatatgggactatgtgaaaagaccaaatctacgtctgattggtgtacctgaaagtgacggggagaatggaaccaacctggaaaacactctgcggatattatccaggagaacttccccaacctagtgaggcagaccaacattcaaattcaggaaatagagaacgccacaaagatactcctcgagaagagcaactccaagacacataattgtcacattcaccaaggttgaaatggaggaaaaaatgttaagagcacccagagagaaaggtcgggttacccacaaagggaagcccatcagactaacagcggatctctcggcagacactccgcaagccagaagagagtgggggccgatattcaacattcttaaagaaaagaattttcaacccagaatttcatatccagccaaactacgcttcataagtgaaggagaaataaaatcctttacagacaagcaaatgctgagagattttgtcaccaccaggcctgccctaaaagagctcctgaaggaagcactaaacgcggaaaggaacaactggtagcagccactgcaaaaacatgccaaattgtaaagaccatcaatgctaggaagaaactgcattaactaacgagcaaaataaccagctaacatcataatgacaggatcaaattcacatataacaatattaaccttaaatgtaaatgggctaaatgctccaattaaaagacacagactggcaaattggataaacagtgaagatccatcagtgtgctgtattcaggagacccatctgatgtgcagagacacacataggctcaaaacaaagggatggaggaagatctaccaagcaaatggaaaacaaaacaaaacaaaaagcaggggttgcaatcctagtctctcatgaaacagactttaaaccaacaaagatgaaaagagacaaagttggccattacataatggtgaagggatcaattcaacaagaagagctaactaacctaaatatatatgcacccagtacaggagcacccagactcataaagcaagtccttagagacctacaaagagacttagactcccacacaataataatgggagactttaacaccccactgtcaacattagacagatcaacgagacagaaagttaaaaaggatatccaggaattgaactcagctctgcacctagaggacctaatagacatctacagaactctccacccaaaatcaacagaatatacattcttcccagcaccacttcgtacttactccaaaattgaccacatagttggaagtaaagcactcctcagcaaatgtataagaacagaaattataacaaactgtctctcagaccacagtgcactcaaactagaactcaggattaagaaactcactcaaaaccactcaactacatggaaactgcacaacgtgctcctgaatgactactgggtacataacgaaatgaaggctgaaataaagatgttctttgaaaccaacgagaacaaagacacaacatgccagaatctctgggacacattcaaagcagtgtgtagagggaaatttatcgcactaaatgcccacaagagaaagcaggaaagatctaaaattgacaccctaacatcacaattaaaagaactagataagcaagagcgaacacattcaaaagctagcagaaggcaagaaataactaagatcagagcagaactgaagaagacagagacacaaaaaacccttcaaaaaatcaatgaatccacgagctggttttttgaaaggatcaacaaattgatagaccactagcaagacctaataagaaaagagagaagaatcagatagacacaataaaaaatgataaaggggatatcaccaccggtcccacagaaatgcaaactaccatcagagaatactataaacacctctacgcaaataaactagaaaatctagaagaaatggataaattcctggacacatacacccttccaagactaaaccaggaagaagttgaatgcctgaatagaccaataacaggctctgaaattgaggcaataattaatagcctaccaaccaaagaaagtccatgaccagaaggattcacagctgaattctaccagaggtacaaggaggagctggtaccattccttctgaaactattccaatcaacagaaaaagagggaatcctccttaacttattttatgagaccagtatcatcctgataccaaagcctggcagagacacacaaaaaaagacaattttagaccaatatccctgatgaacattgattcaaaaatcctcagtaaaatactggcaaaccgaatgcagcagcccatcaaaaagcttatccaccatgatcaagtgggcttcatcccggggatgcaaggcaggttcaacatacgcaaatcaataaatgtaatccagcatataaacggaaccaaagacaaaaaccacatgattatcttaatagatgcagaaaagacctttgacaaaattcaacagcccttcatgctaaaaactctcaataaattaggtattgatgggacgtatctcaaaataataagagctatctatgacaaacccacagccaatatcatactgaatgggcaaaaactggaagcattccctttgaaaactcgcacaagacagggatgccctctctcaccactcctattcaacatagtgttggaagttctggccagggcagtcaggcaggagaaagaaataaagggtattcaattaggaaaagaggaagtcaaattgtccctgtttgcagatgacatgattgtatatttagaaaaccccatcgtctcaccccaaaatctccttaagctgataagcaacttcagcaaagtctcaagatacaaaatcaatgtgcaaaaatcacaagcattcttatacaccaataacagacaaacagagagccaaatcatgagtgaactcccattcacagttgcttcaaaaagaataaaatacctgggaatccaacttacaagggatgtgaaggacctcttcaaggagaactacaaaccactgctcaatgaaataaaagaggacacaaacaaatggaagaacattccatcctcgtggataggaagaatcaatattgggaaaatggccatactgcccaaggtaatttatagattcagtgccatccccatcaagctaccaatgactttcttcacagaattggaaaaaaattctttaaagttcctatggaaccaaaaaagagccacattgccaagacaatcttaagccaaaagaacaaagctggaagcatcacactatttgactttaaactatactacaaggctacagtaaccaaaacagcatggtactggtaccaaaacagagatacagaccaatggaacagaacagagccgtcagaaataataccacacatctacaaccatctgatctttggcaaacctgacaaaaacaagcaatggggaaaggattccctatttaataaatggtgctgggaaaactggctagccatatgtagaaagctgaaactggatcccttccttacaccttatacaccaattaattcaagatggattaaagacttaaatgttagacctaaaaccataaaaaccctagaagaaaacctaggcaataccattcaggacataggcatgggcaaggactccatgactaaaacacccaaagcaatggcaacaaaagccaaaattgacaaatggggtctaattaaactaaagagcttctgcacagcaaaagaaactaccatcagagtgaacaggcaacctacagaatgggagaacatttttgcaatctactcatctgaaaaagggctaatatccagaatctacaaagaactcaaacaaatttacaggaaaaaacaaccccatcaaaaagtgggcgaaggatatgaatagacactttgcaggggaagacatttatgcagtcaacagacacatgaaaaattgctcatcatcactggccatcagagaaatgcaaatcaaaaccacaatgagataccatgtcacaccagttagaatggcgatcattaaaaagtcaggaaacaacaggtgctggagaggatgtggagaaacaggaacacttttacagtgttggtgggactaaactggttcaaccattgtggaagacagtgtggcgattcctcaaggatctagaactagaaataccatttgacccagccatcccattactgggtatataccgaaaggattatgaatcatgctgctgtaaagacacatgcacatgtacgtttattgtggcactattcacagtagcaaagacttggaaccaacccaaatgtccaacaatgatagactggattaagaaaatgtggcacatatacaccatggaatactatgtagccataaaaaaggatgagttcatgtcctttgtagggacatgggtgaagctggaaaccatcattctcagcaaactatcgcaaggacaaaaaaccaaacaccacatgttctcactcataggtgagaattggaaaatgagaacacttggacacaggaaggggaacatcacataccagggcctgtgctagggtgcggggagaggggagggatagcattatgagatatacctaatgtaaatgacggtgaatgggtgcagcacaccaatgtggcacatgtatacatatgtaacaaacctgcacgttgtgtacgtgtaccctagaacttaaagtataataataaaataaaatataatcactgaaaaagactttctacacgtgtcaaaaacatttttagccaaaacttgtaactacaaaaagcatgcctcacatttcgtggtacttcaaactttaaaaagacgtattcagaaataaatcaacatgaatacagaagttgttaaaacagtattataatcataaatgggtcgtttaagttttttactgaagcaatagttttcactaaattttacctaaattgaaaaaatagaataaacactgtcagaatatatattgaattaaaaatgactaaatatttttatgtttctgtcagtatatggaatttttcttaaaggcggtcaataaataaaattctgtttatttaaaagaaaaaaagaaacagatccagacctatttagaattaaacggccatgatatctgcagtttattatctgtggttcagcaatataataatatcagtagccacagtgaccacaactatatatatatatatatagttcatgaatctggcatgttttctataagtctgaaagaatttcaaaaaaaaaatgttgaggcagagcagctacctgaggtagccaccaaacctacgtgcagagatcagaagaacacaaatacagtaaacgtgctgagggccaggggcagctgttcagagttgctgttctctgctgtctgctttggtgttccagaagggtgtggccccagtattagcttggcatggtggcgtacacctgtagtcccagctgctccaagaggctgaggcaggaagatagtttgagcccatgagttcaaggctgtagtgaagtatgatcctgcactccactccagcctgggcaacatagtgagaccctgtctcttaaaaaaaagaaaaagaaaaccagccaatattgaaccttttgtttttacagtgatcctatgccgaggtctctaaccacacagcaacctacaatgatgtgagaaggagccaggccccagaaggccaggcagtacaggaggaacgaggtgacgctgtcttatggttaaccatgtgacactacctgtggatagtgcccaggtctctcactccccaacctgaaaagagaagcctgcataactagacccctgtgcatcagattcaccccttccctgtgctacatgtgaaaaagctgggtggacatgatgtgccaagaatggcccaggctgttctctagtagcaaactcccaacctacataccatgtctttagtgcatggtatgactctcccctgatttccatctgccagacacagacgtggcctggactgcacctacacataattttattcttcccaaggtataagaccagtatctggcaagcaggcaggcttctcacaaaggccatttcctctacggaggggttggttttgaaaatcagccaggtctctcatccccaagaaacagataaaccatggtgcattttagccctaatgaattcacttcttgcaccctgctgattgtaaatcagtgattagcatggaataccaaattattagtgacaaatgagtgccttgtcatagacttcctccagaatgactctttggttccttttcttttccattttcactgctgcccttttacctcttctctgaatcattgcaatggcctttagctggttacctgcctacttctgggcccttcttttctcaagccatttttggtcctcctttgtgtgttgtcacagctattatgtaaatttaggaagcatacgtctggccgtattgctcgtctgttcagaaatcttagatggttccttgagatgtatgttagagcccgcttctcagtatacaagttttccttcatgcagcttctccaagtgcattttctgttgttctgccattcattctttggcccaattaatgaactaactcaatattcctggtatttccaccctcattgtgcctggagtatcttgactgttcatttaagacatctcaaattctacttcccaatgaagtctctactgataccttccagctggatgggctttctctagtgtttgagccattggagagagagagagagagagagtgagtgtgtgtgtgtgtgtgtgtgtgtgtgtgtgtgtgtttaaatagaacttcgcagatagcacctgtcatattctgctaatgcaagggttatacataggtttgttctatctttctgctttggagactgctagctccttaagagcagaaacaatgaatatggtatggtgccatacacaggacagatttccagtaatagaatttgttataatttggaatgacattgtggaaaaactcatatattccatataggtttgatgttattatcgttaaacctgctaccaataagaaacccagagttaatgccacaaataccattattattttaatatattaaacaggttttaaaatttattttccagaaaacatttaagaaaggaaattaatgctgtgggactccaaaaataggatgtctttcaagtattgtgctttgttttttaacacttcaggatcaaatatgaaaatgttaaatgtagatttttaaatttttaaagcctacttatttttcagtaacaccctgaaagaagaattgcaaaccctgatggctgctgttgtcctggtgatcagagcagaggtctggagcctgggagaggcccagcagcctggagtggtagcagcagggcttagatgatgagaaaatcttactgttttttctcgttctgtcataggacttgaaaatgttccatctagtgacaattctttaagaatacttttgcatccaggagttgatagattttgaaggttttgggttttttatattattattatagtaagactctggtcccttaggagctggatatttactatctagaatgaataaacgcttcccccatcccaagttaacacaaagctttattttttattaaatagagcatccctttaaaacaattttatgttcccttcaaaaagcataagggggagagcaaattatggaaggtttcattgcctccttccctccctccttccttcttttctccttcccctcacctccccaggctggaatgcagtggcacagttatacctcactgcagcctccaactcctgggcttaagcgatcctcctgcctcagcctcttttgtagctgggactccacccatgtgccaccatgcctggctagtttttaaatttttcatggaaatgggggtgtctatgttgcccaggctggtcttgaactcctgggctcaagtaatcctcctgcctcagcctcctaattagctgggactacaagtgtaagccaccatgcctggcctagaattttttttttttttaaagacagggtctcactctgttgcccaggctggagtacagtggcaccatcacagctcactgcagccttgacctccccaggctcagacaatcctcccacctcatttttgagaaataacatttttcaaatacagtgtcaatgaaaatagaaataaatattagtgtaaataaatattttaaaaattacactgaatgaacggtttgtttatactttcagatttcatattgattgaatttacaggatttataaatcacaatgtagtctctgatttgatcagaaacaatacggcttaggatactagattttacaaggcttttgtgaggatcaaatgagattatatatctgaaagtctttcacaaactgtgaagtacaagtgtttctagtaagtggcatgccactttgtattgcttttactatggctattaggatgtgagattgagaccttcctcctcccctcttgaaagcaagggagacttcccatctctaaggatttctttcactctcactcagcttgccctgctagttcttaggagtgaagtgagatacttcttatttttcaatccatctatgaaaaatttatgcatcttttagtagggtgttcatttgcatgatttatttatgttttcaccccagtgaaggggaagtggtatagggctacaggtgacttttgtaatgttctccattcataagacagggccaccccagtgagtcttttgagttgtaaccaactctatttcagtgacagtatttttgtaaagttactgtttggaaacttatcttgttatcttgtatgtgtattgcatagaccaagaatctgattgaaataacatggcaacaatattgccaccaagaacatgcattttaaccacagcacccttctattgcatagtgcacatgtccaggaattgagctggcttttactaaatgaatattttgttcacttgtatccagatcacttgggactgtgggcacattgggaatttcacctcagtctttgtctccttgtcctctgagatggtacaagtatcatctaaaaggatgtataaaacaggtatatgagagctgctttaccccctcccacccaaaaaaaaaaaaagatataattaacatagtatacaattcttcattttaaaatgtatagttaagtggttttttatatactcacagagttgtacaaccatgagaatgttttcattaccccgaatagaaaccctgtacccattagctactacttttcattccagcttatctatttttttatttttgtcacgtgtccttttggtatcatatctaaggagccattgcctggtccgaggtttcaaatatttgctccaattttttctttcaagactttcatagttttagctcttccttttagatctgtaatctattttgagttaatttttgtgtatgatgtaaaaaggggttcaaaatcattcttttgcctgagaatatccagttctagcaccatttttgaaaatataactttcttcttcttcaattttcttggcactcttgttgaaaatcaattcactgtaagttcaaggatcaattctttcccattgatttatatttctgtccttatgccactattgactttaggtctatgtaccatcccgtcaagtgttttttgatactattgtaaatgaaatttttgtttttaatttcattttcatattgtctgatcatatagaaatacaatttaaatttaagataaatacaattaatttttgtatattgatcttgtatcatataaacttgttaaactcatttattactcataacagtttttttaagattctttattatatacaagattacgtcatctgctaatagggagttttacttcttgcttttcaatcaggatgcctttatttattccccccttgcctcatttccctgactggaacctctagtacaatgtcgaatagaagtgtcagagcagacatctttgtccttttgtggatcttagggggaaagtgttcagggaaagcattcaccattaagtctgatgttagttgtagggcttttgtggatgctgtttgtcagtttgaggaagttgtcttgtatttctgaagttcttgagtgttttcatcatgaacatgtattaaatttagtaaaatgctttttctgtgtctatttagatgattatgtcactttttttctttagtgagatgattctgttacattaattgagtttcaagtggtaaagcaacctatgattcgtggtataaatctcatttagttgtggtatataatccgttttatgtgttgctggatttggtttgctcacattttgtgagagtttttgcatatatactcataagagatatgggtctggaattttcttgtgatgtcttttattttggtgtgagagtaatactattgacctcatagaatgaattccctactctttttttttttttttttgagtttgtaaaagattgttatgaatttctctttaaacatttggtagaattcaccactgaaactatctgggcctatgtttgtttgtttgtttgtttgtttgtttgtttgtcagaagttttaagttactgacttaatttctttatttgtaatagatttattcagatttttaatttctacctgtcagttttgggagtttgtgcctttctagaagtttgtccattttacttccattttctcatttgttggcttacggttgctcagtttatttccttttagtgtgctatagaatccctttgctttctgtaagcttggtagtgcttcctctctttcgattctgattttcacaatttgagccttctctcattttttcttggtcaccctagctaatagtttgttgattttgttggtcttttcaaacaaccatcttttggtttcattggtttcctttattgttttctattctctatttcatgtatttctgcttaatctttgttattttcttcctgtgcgtgctttgggttttgttttttcttatttttctggtttcttaagatgaaagtttttgttgatttgaggtctgtcttttttaatacagtcattcacaaatataaatactcttctaagcactgctttagcttgatgtcataagttgtgctttgttgtattttccttttcattaatctcaaagtattttctaatgtccctgtgattgcttcattggcctattggttatttaggggtgtgtcatttaagttccacatctttgtgaattttccaaatttcttagtgctgttgatttcaaatttcatttcgccgtggtcaaataagataccttgcatgacttccatcattttgaatttactgagcatatggtctgtttgggagaatgtctatgtgcacttaaaaggaataagctttttacaacttttcatttagcataaccatagcttttaattttgcttgattttttttggtaaggcttgatggaattattagttctacaagggtaaagggtttagtttaaattgacattgcatgtaaatatagtgttttagagggcttggagtatctgtctacagtccatctggtctttcgacagctgttgtcaggcatcactctaaagacaggctagcaaggaaactacctaaggcagagtcttcatgtggagagcctgttcattatgttagtttaacaaagggaattgtggcagttacatacagtgcttcgttgctgaaagaaggcatgcatttgcacagcagagttatttagaggtacccaaagaggagcgggtaagcaaggtgagcactgctttcttttctgaattgactataacatcaatacaaacataatgtcaagaattaactgtaactttcaatgttgaaacaaagaaaaagaccgatgtgtgttttcttataagactggaggacagatgatgcctctctctctctgtctctctttctctcccttgttttggcagtgataggccaaagggaagcacattgttggccagttgatctaaaagttcctttgcatcattctggtaatgagcaacaaaggcacttattggcaaacgttccatcttgaataactgaggtcagcagtttctttatcaaagcaacccaggttaaatatgctcttttatgatctaacacactgtaataatcaaatcaccatttttaaaagcaacccagaacattattgaaaaatagcttttttgttttaaaataaagcagtaatacaaaacaatgcttaagttatgagttacaatgaatgctttcagtgtttatgaccttcccagatagtctctaggaagattgtctgtattctgactataaaaataggaccaggatgaagtttttttgactgttactgctggtatatcctagatactctgtgctattttctgggcttttcctttgctgcctaagggagagaatatcacatctatcaggtcaagacttgtacatttgccacaccaacttagacctaacatgtttgcatttatgttcaaccagtccatagtgtatgatatactccattgtctttgctataaaagaaaggcataatgttaagaatatcttttatatctatattgagtaattgccgtgcccttacttagctggttcattttgatcccaaattcagtgtttcttcatttagctttttgatgacgtactgaataaacagtgtcgcaatatgtacctattttgctcatttaagaaaatatttgtaatcactaccacgagggtttttcattaccatctagaagcaaagacctctgttttccttcagttaactttcagtatcagaaattctaactgtttagcaaaagaaaccataaaaaccatttatgtggatcagtgagcctttactgctgtctgcccaggaggaactcaataaatgcctcttgactgatggaaaattgctttggtaatactaagcagagaaaatatgaagagtacgtaacacattgcttgatgcatggttcttggctgtactgcactgacatgtaactaatgacagaagttcatgcaaagtctatgactgtcagacttttagaatatagactggtatcatccaaatgacggatgtatgtttgcaccagtgttggctcagacagtttcttagagctttggggtttcctctaaaatatagttccaccccaggctctctcctgtcaagcagacttgaatccctggaatggctctagaaccactttggcttcattaaaacatttgaactacttgtggacaattgagcaccatgactttcagaagtagagaccatcaaatgatacggcagcatttctttttttttttttttacccttgatttttgttgttttattttgtttactagactcatttagccatctgtggaaaatttttccaggaacacagccataattttttttattatacttttaagttttagggtacatgtgcacaacgtgcaggttagttacatatgtatacatgtgccatgtcggtatgctacacccagtaactcgtcatttaacattaggtatatctcctaatgctatccctccaccctgcccccaccccacccacaacaggccctggtgtgtgatgttccccttcctgtgtccatgtgttctcattgttcagttctcacctatgagtgagaacatgcagtgtttggttttttgtccttgcgatagtttgctgagattgatggtttccagcttcatccatatccctacaaaggacatgaactcatccttttttatggctgcatagtattccatggtgtatatgtgccacattttcttaatccagtctatcattgatggacgtttgggttggttccaagtctttgctattgtgaatagtgccacaataaacatacatatgcatgtgtctttatagcagcatgatttataatcctttgggtatataccgagtaatgggctggctgggtcaaatggtatttctagttctagatccctgaggaatcgccacactgacttccacaatggttgaactagtttacagtcccaccaacagtgtaaaagtgttcctatttctctacatcctctccagcacctgttgtttcctgactttttaattatcaccattctaactggtgtaagatggtatctcattgtggttttgatttgtatttctctgatggccagtgatgatgagcattttttcatgtgtcttttggctgcataaatgtcttcttttgagaagtgtctgttcatatccttcacccacttgttgatagggttgtttgtttttttcttgtaaatttgtttgagttcattgtagattctggatattagccctttgtcagatgggtagattgcaaaaatgttctctcattcttaggttgcctgttcactctgatggtagtttcttttgccgtgcagaagctctttagtttaattgaatcccatttgtcagttttggcttttgttgccattgcttttggtggtttagatgtgaagtccttgcccatgcctatgtcctgaatggtattgcctatgttttcttctagggtttttatggttttaggtctaacatgtaagtctttaatccatcttgaattaatttttatataaggtgtaaggaagggatccagtttcagctttctacatatggctagccagttttcccagcaccatttattaaatagggaatcctttccccattgcttgtttttgtcaggtttgtcaaagatctgatggttgtagatatgcggcattatttctgaggtctctgttctgttccattgatctatatctctgttttggtaccagtaccatgctgttttggttactgtggccttgtagtatagtttgaagtcaggtagcgtgatgcttccagctttgttcttttggcttaggattgacttggggatccggactcttttttggttccataggaactttaaagtagttttttccaattctgtgaagaaagtcattggtagcttgatggggatggcattgaatctataaattaccttgggcatcatggccattttcacaatattgattcttcctatccatgagcatggaatgttcttctgtttgtttgtatcctcttttatttcattgagcagtggtttgtagttctccttgaagaggtccttcacatcccttgtaagttggattcctaggtattttattctctttgaagcaattgtgaatgggagttcactcatgatttggctctctgtttgtctgttattggtgtataagaatgcttgtgatttttgcacattgattttgtatcctgagactttgctgaagttgcctgtcagcttaaggagattttgggctgagatgatggggttttctagaaatataatcatgtcatctgcaaacagggacaatttgacttcctcttttcctaattgaataccctttatttctttctcctgcctgattgccctggccagaacttccaacaccatgttgaataggagtggtgagagagggcatccctgtcttgtgcgagttttcaaagggaatgcttccagtttttgcccattcagtatgatattggctgtgggtttgtcatagatagctcttattattttgagatacgtcccatcaatacctaatttattgagagtttttagcatgaagggttgttgaattttgtcaaaggccttttctgcctctattcagataatcatatggtttttgtcattggttctgtttatatgctggattatgtttattgatttgtgtatgttgaaccagccttgcatcccagggatgaagcccacttgatcatggtcgataagttttttgatgtgatgctggattcggtttgccagtattttattgaggattctgtcgatgtgcatcaaggatattggtctaaaattgtctttttttgttgtgtctctgccaggctttggtatcaggatgatgctggcctcataaaatgagttagggacgattccctctttttctgttgattggaatagtttcagaaggaatggtaccagctcctccttgtacctctgatagaattcggctgtgaatccatctggtccggggcttttttggttggtaagctattaattattgcctcaatttcagagcctgttattggtctattcagagattcaacttcttcctggtttagtcttgggagggtgtatgtgtgcaggaatttatccatttcttctagattttctagtttatttgcgtagaggtgtttatattattctctgatggtagtttgtgtttctgtgggatcggtggtgatacctcctttatcattttttattgcgtctatttgattcttctctcttttctttattagtcttgctagcagtctatgaattttgttgatcttttcaaaacccagctcctggattcattgattttttgaagggtttttcgtgtctctatttccttcggttctgctctgatcttagttatttcttgccttctgctagcttttgaatgtgtttgctcttgtttctctagttcttttaattttgatgttagggtgtcaattttagatctttcctgctttctcttatgggcatttagtgctataaatttccctctacacactgctttgaatatgtcccagagattctggtatgttgtgtctttgttctcattggtttcaaagaacatctttatttcagccttcatttcgttatgtactcagtagtcattcaggagcacgttgtgcagtttccatgtagttgagcagttttgagtgagtttcttaatcctgagttctagtttgattgcactgtggtctgagagagagtttgttataatttctcttcttttacatttgctgaggagtgctttacttccaactatgtggtcagttttggaataggtgtgttgtggtgctgaaaagaatgtatattctgttgattttgggtggagagttctgtagatgcctattagttccgcttggtgcagaactgagttcaattcctgaatatccttgttaactttctgtctcgttgatatatctaatgttgacagtggggtgttaaagtctcccattgttactgtgtgggagtctaagtctctctgtaggtctctaaggacttgctttatgagtctgggtgctcctgtattgggtgcatatatatttaggatagttagctcttcttgttgaatgatccctttaccattatgtaatggccttctttgtctcttttgatctttgttggtttaaagtctgttttatcagacactaggattgcaacccctgccgttttttgttttccatttgcttggtagatcttcctccatccgtttattttgagcctatgtgtgtctctgcacgtgagatgggtttcctcaatacagcacactgatgggtctcgactctatccaatttgccagtctgtgtcttttaattggcgcatttagcccattcacatttaaggttaatattgttatgtgtgaatttgatcctgtctttatgatgttaggtggttattttgctcattagttaatgcattttcttcctaccatctatagtctttacaatttggcatgtttttgcagtggctggtaccggttgttcctttccatgtttagtgcttccttcaggagctcttttagggcaggcctggtggtgacaaaatctctcagcatttgtttgtctgtaaaggattttatttctccttcactcatgaagcttagtttggctggatatgaaattctgggttgaaaattcttttctttaagaatgttgaatattggcccccactctcttctggcttgtagagtttctgccgagagaccagctgttagtctgatgggcttccctttgtgggtaacctcacctttctctctgggtgctgttaacgttttttcctccatttcaaccttggtgaatctgacaattatgtgtcttggagttgctcttctcgaggagtgtctttgtggcgttctctgtatttcctgaatttgaatgttggcctgccttgctagattggggaagttctcctggataatatcctgcagagtgttttccagcttggttccattctcctcgtcactttgaggtacaccagtcagacatagatttggtcttttcacatagtcccatatttcttggaggctttgttcgtttcttttttttcttttttctctaaacttctcttctcacttcatttcattcatttgatcttctatcactgataccctttcttctagttgatcgaatcggctactgaggcttgtgcatttgtcacatagttctcgtgccttggttttcagctccatgaggtcctttaaggacttctctgcattggttattctagttagccattcgtctaatcttttttcaaggtttttaacttctttgccatgggtgcaaacttcctcctttagctcggagtagtttgatcatctgaagccttcttctctcaactcgtcaaagtcattctccgtccagctttgttccattgctggtgaggagctgtgttcctttggaggaggagaggcactctgatttttagagtttccagtttttctgctctgttttttctccatctttgtggttttatctacctttgtgtctttgatgatagtgacgtacagatggggttttggagtggatatcctttctgttagttttccttctaacagtcaggaccctcagctgcaggtctgttggagtttgccggaggtccactccagaccctgtttgcctggatatcagcagcagacgctgcagagtggctgatattggtgaacagcaaatgttgctgcctgatcgtttctctggaagttttgtctcagcggagtacccggccgtgtgaggtgtcagtctgcccctactgaagggtgcctcccagttaggctactcaggggtcagagacccacttgaggaggcagtctgtccattctcagatctccatctgagtgctgggagaaccactactcccttcaaggctgtcagacagggacatttcagtctgcaaaggattctgctgtcttttgtttggctatgtcctgcccccagaggtggaggctacagaggcaggcaggcaggcctccttgagctgcggtgggctccacccagttcgagcttccccgccactttgtttacctacccaagcctcagcaatggcgggcgcctctccccaagcctcgctgccgccttgcagcttgatctcagactgctgtgctagcaatgagcagggctctgtgggcataggaccctccaagccatgtgcgggatataatctcctggtgtgccatatgctatgaccattggaaaagcgcagtattagggtgggagtgacccaattttccaggtgccatctgtcacccctttctttgactaggaaagggaattccctgaccccttgcgcttcccgggtgaggcagtgcctcgccctgcttcggctcatgctcggtccgctgcgcccactttccgatactccccagtgcgatacctcagttggaaatgcagaaatccccggtcttctgcgttggtcacgctgggagctgtagactggagctgttcctattcggtacagcagcatttcaactgcactgatctgtggtcatctagtgacaacactagcagtgccacccgggcttccctactaaggatattagtgttcactctctccgaaccgttaccttttgtgaatttttttccgtcacttctcaaccataagtatacttagcctatatcttgggcataatttcagtgtatgtaattccattatttttgagtattgccctcctggcacattgaatgtatcttctgactcatcattttctgaatcttaaactataaaatggaaaattatgccttctgtagatgtttctatactttctcaaaccatttctgcatgtatagtacctcctttgtttcttgtaatgctacaagagttgagagctcagttgcagatgacagaatccaggcgaggctttctaagcagaacatgtttggctgcttcctacccacctggaagtaacacagggaggagggcagctactagacagttcagcacaaatgctgctatttcagctgcatgtttgtgtgttctgtgtcaacataaaccccccttacatttccaaacaacagcagcaacaatttatttacaccatcatacagctctcccgtatagaaataatgagggtctcactctacctagagggcagtcccaaaatctcgtttgtttctgcagttggttccaccagtgcaggttctcagggtgatcgttctttctttctctaatttaggcagtgttctgtcttagaattctgggatcctgtaacctatagaatgaattgcaaggctaatatcaccaatagaccctatctaaaactggggaaatggagaaaggaaattagttaacatgcataaatatatacttgccacaccgagagaggaagaagtatgcataattattagacttctcatttctacaagtggttactacccattttgtggtctacatgccctaaagtatccaaatgtattacttagtgggtttacggacatatgcagtgttactggcagacagtgaagacaaaaccaaacctgagtaggcatatcttctagtgaggataaaatggtatcctgtcatgatagaagggattgagtgtaattaaccggttattatgtagcaggcggtccctccaaatcgattgttgttcctagcaagttgacactccactgtgttgggaaatagctgagctctgtgcagggaggctgcccatgttgtacttctaccactgtggtcactttgctaatgagcccactaaacaacctctgggctactgtggagagagtgagacaagcattcatagggtgatttatcatgtccacctggtttttgagagccttctctccagtaagcattcagatggacaccgtatctgtcttactcctggttcaagaaatccacccatatgcctcttcccagccacctgctgccagctcctcagtcttcttcctcctttgtctgtgctggtcaatgtaagttctgattctttgtgagtagaggcttgtactgcaagctgtctttcagttgggtcagatagtccatgatatgtgcccataaagcgtcttcccaatggtttagctcagtagttgctgctgcccatgaatcagtgtgattgatacctcatgccatctcttctgggcagactggacccaagacatgccatgggaagctctgctcctctgtcagggccttctgtgaaggaagctgcaaagctgtaacagccgatttcagctgctcatatcgtgttgctccatctggatacgagctcctcagacagctggtcatgcagactttcccatgagccctggtggggggctgagggaaggatggcaggatgcaagagtaggcacatcagtaatataagcttcttgttgacggaacttaattttggatgctattcacacctaaatatgctatatatatatgacttttacttgaggacacagtatcctggacatgtccttctctgtagccccaatacccagttcatgtgggtcccatggccatgttttcacagttaactaacatgaaatgtcagctgttcattctccactaggagccagtattaagccaatctgtgtgtatcaaaaggaaaatagttacttgctatatagagtattgtgtgaccccaaaaccttgggacttcccactcttctgttttgacttcgagtatcccagttcattggccacatgagcaagggcagagttgcttgccttccatcctagcccatatggagggctttttcttggcccactcaatactggattgagtaattatgggttactcagtaaatagatcaaggtagtactcaaaaggctaccctgggagcagactggaggaatgtgttctctgccctcctgcaaatacttgccttaacaagctattctcaggtattgttacttctcactaacaaatcctatcagcatgatgccatcatgtcttgtgggctggtaggatgattgacgttcctatagactgagttatggcacagaaccagaattgacacagtgctcaggcaagatggtgaaagcaagtagctttctgttttcctgctattgggataggaaaacacgtacatgcaaacacataccacttttgtcatatcagtagctgcacaccagataagggaatgcattgacttgatatactgagtttgattaactggagtttctccttgataaagtttggtataatccactgtcattctcaaagacctatgtgtcttctgcacagggctgcacacacaaaaagagatgtgataggagtcaccaccctgaacctttcaaatctttgacagtggcattaatttttgcagttcctctaaaagatgccgtgttgctttcggttgctattgtggcagggaagagaagttcagaagcttttcttgagcccctcgaattctaacaatgctcactgcataggtcaagacacaactgtggaaattctccctgtgtgtaagtgtagatcccatctgtaaacccaggttctggcaggtaataataccacagtctccatttgtatctgacccccacgcagcttccaccccaccatcaggacacagaggtgttgagtcctccgggagaatgtccaataagtgctgagaagtccggttgtttctttttctcctcaaaagtagctgcacatcctttgggaatgggtagaagaaagacttgttacatgattatgtattatggaagtgtccttccattttatatatatatatgtatataaaatggaagtgttctttcttaaaggaccagccactccttcagtgagaggctgttggacgagagaagagcggctattgaggctgtcgtgctggatccctctaggcctctgtcacctgcctacagatcagattagagtgtctgaggctttcccactactctggccctacagaccctctcattaactgtccattcccaaatacccagctagcttacacacactttggcccttcggcttgttatgttagccagatcctcttgcctctggacacttagctctgctacctcagccattcctgttcttgtagaaatccggaagcccttgaggcagcatctgcaatgctggccggaattcctgtctgtagcctcttgggagtgtagttacgaggtgggtaagcaggagacatggtagatccccctaagtctatatttctacatctgtattttatcaagacattcctggcatctagctattctagtttctattacagggggctgttaaactatgcagaaggtagaagttttaaggtacttggttttagggcccaggagagtgccacttatagactggcattttggcaactgtgatgaactcccagttttataccttggatatctttctctagtaacatattacaacatctaacagacaaaaaagcaagtcgcataacttttcagcctactttcacatttattttcttacttcctctttagataactgtatggtattcgtaaaactagattcttacagatgaggaaagaaattcagaaaaggtaattaacttttctggggcagaactaggtctacaacgtatatctcttgacttcttgtcctcttttgttacaacacaaataccatggtggcacgtggatgtgtgcatgcgtataatatgatgcactcacacatacgtgacacacacaccacacatcacataccacttatgcacataccacacacatgcacacacacacacacgacacacacttaacacacatctgtacaccacacacactccctatccagaaactacaatttgtgtcatgtcaaatgttgatgctcctaaaaacagcatgtattattaagaaactcaaatacagcaattttttttgtttggatgaaggtaaaatctgcatttcgatttcagctataatcattacttgcaatgtgggggttttttttcctaaaaattctcacctcagaagttgcccaaaacccaactcatgaaggaatcttcagtctcattattaatcaaaaaaagttaaattaaaatatcttggcaaaatgtctgtgtcaactctatgtgtaattatgtgtgcacacacaaatgctgacagagttacagtgcggaggctgaaatgtgtaattgtcttactgagtacagttcttttggaaattagcatagcaatatgtagcaaatgtcaaaagaaattgcatacttaatctagatgtccatgcctgcaagtttattccaaggaaattgtttagcataaaaaaattatgtgcataaagcatttttttttgcaatagaactcttctctccctcccaaaaattattttacagttttagagtttcataaagtatgaaagatcataatatattaaatagaatggggaaatattcagtagagtatttgcaaaaaaaaaacaaaatgttgtgtataatgtagttgcacaaacagttaacaaatatacttgttgaattgttgatagagtctaggaagttacaagtgaaaaattgtataagaattatgtgtatgtttggaattttttgcaataattacaatcttcagtttctatgtctatataatatttctttttagtgaaaatacatccactacttgtttttggttatttttatttttttcattaaagtccattgatcatcacaaaaacccaggaaatacaactaaggagaaaacaaatgttcaaccaacacctaagaacctagagctgtggaggagatgtcacactggactactggtgtgtacaagggggcaggagggatgatccccatggggcatggccactggctgtgagaaacacaggagagaggccaggcagctgcctgggcagttaggttcaccactgcatgatggcagcattgagcaggttggcttccttcagggtccagctctcgtcagccagctctttgtttgggaaagtagtcatgaggataaagctggtggcagccatggctggccgggcatccacaatgaagagttggatgttgctgatcctgtggctgtggttaaatttctgcaccagcctcccaccgtctgcaagccgaatttggatgtttgtggtagtctctgattcgacgattaagatggaagagctggctttggcttcattttctgccagttggactggagagatggtactcaacacctagggggcagtgctgctcggtgtctgaccctcgccagtgaaggctttgaaggcttatttggacttcataaagtcctcgtcctgatgttcctccatatccaagttcgcctgtccactgtgagctagcctccacagctctgctggcacctcccttctgtggatagactccagaaactgggcatcggatgggtctcagtagcttctgagtcctccattatccaggctgaatccactcttgcagagtttcagtactacatgaacatcttggttggaatgatgtctcttttctcctgccacataagcagactcttcctctggtgctgccccaaggccatagccatctccggcaaatggtcttggtgtactggtctctccaggtctgttggtcactcgctccacagctacagctccatgctctttggcacctttaaagagatcatccaccagctcattggaacttttctttctgggagggccaacaatctgctgtccacttctctctgaggccccggcataaaacctctggccttcctcctcttcctcatcctcatcttggtcatgagtgagatctctaaaggatgtcactctattatcactaggggctgtgcctctggacactgaactgggggttgcctgtgaaatggttatgatgtcttcttcccctctgtcctcataaaagctcgctagcgcaatctgcaagtcccaggtagccgactcgaggaagaagcaggcccggtcctgctcagtgcccatcaccaccacgaactctctcagcgtcttctgttgctccgctgccgtcttcatcccatgcgcctccccacatccactactttcttatcatttctaaagcatccttgagtgggacttttgtctttctcctgagagggagcttagcgactgggttgttgaggatggtttaatagagggggatgtgctagctgaaacccaaactcttgtgttgttcgtctcaccctgtctacacactgttgcctatggtgattggtccactgaggattgttgttaatcagtttttacttgtttttctcctcccccaagtccaaaagtgttttgaagataaacagtaaatatggcttataaagccagctctgttccccctctctctgttttgggaggaagacattgtgcatttttagagcataacatgaaggaggttttagtataatatgatttagtgcaggcctcagctgctatctctcccagtggttttgctggaggctggagcttcccgacagccctgaccacggagaggtggaatgtggcgctgacgtcacggctgctcctgggaatgttttgcattcctcttcctggcagtggtcaggtggcttccagcaagaatgaaggacagcagcttccaaagaagaaaaaaagagaggaggaaaaggacagtttataatcaaagtattgcgggggaggcacttttattctgagccaaaattgaaattagaaacagatgtcttgcattccgatgcggcacgaatgttaaataaatttattaatgactgtaataactaagctatttggctttttactgaacttaagtcttgaaactctgtaagaattatggaaaaacgacttcttgtagttgacattttaactatgaaagcagctttctgactgtaaaagcaaggaccctgatgaaataaccctctagttaatctacaggctgttttaaggtctgttaatattctgaaaggtcacttctgaaacataaaatctctgtaatctattaacataatttgtgctgttcaaacaaatttaagccaatcattgagagaggtaaactctattttagcatctgctgcagaatgtcttttctcaaaatatttacacttccaatgttatttctgtacattactgctcaaaccagatattcaaaacaaaacagattcttaacaaacaggttttgcccaagtcttacaactctgcaataatatgtgtaatagaaaaatagacagtaattgaaaagtttgtgtttttcttgtcttccagccactaaagtacctctgttcaaaatcactatacgggtttagctaattacaatctatacgtctgtattttaaaataaaatgttatactttttaaaaaaacaacttgatgtctttcagtagatttggactcattttgatataacagcagttacattaacaacagttctccagtttaggtgaaatctgtttgaatacttcctgttatacattgaaatggaaagttggcttcctcttgtaggtcatgttgctggtgaggaatttccagaaatctggagaagtgctgactcatagtatacagtggactgatccagcaacagtaggacttgagggggttttttgagctattggctgaggcaagcaaaatatgtggctgtaatgtttcattttatttttagatataagggtgagggaggaggagagactattgcttggcatgggatctatgttaatagctttaaaatggctacaagttctagggttagaggtgtgtctaaatgtgtgttttcctacagtctattattagaatttggaaaacaggttgtttttgctatagtcaccctactgttgttctctctgcctcttgcccacaggtgaaccatgtgccttcttgggctgtggttggtgactcaccatgggttctataatgtgaaagtcacatagtacttgcattcaggagagtgctgcagaaaaaggtccatggcattgcaccttttgtatctgatcaaaagtccgtgaatctaataataacaatttaagtattagctgacaggagtacagagaaaaactagcatttgttgcctttaatatgcctgcttgtgtcctgtatattttacattcgttaaattgtctgactctgaagttactgattgaggtttttttcattcatttggtatagaaatgactgctagattgggtttggtacagggatttctaaaacaaaaactcatcacctaaactcatccctggtctcataaagttaatatatcccaaatgcacttgtctatcaattctacaaacatgcactcactgctctgtgttggtgctgatgacatggagaaaaggaaaatgtgctccttgttacctgtttgaggggagggaggcgctgggagcccactgcaggggatgtgtctacagaaatatgtatagtgttacttttcagttactatggtagaaatctaaagaaacagtgaggcataaaagaggggtatgctcaaatctgtgctaaagtctgtggaagtggttttttggatgtgattctgaggctgtcagagttactgattgaaagtaatttgaataggcaatgttaggagagacataaaaaatagaaatcagaatatgatgagggagataagggaaatataagtatttaggtgactgatattaagatatctgaaaaggaaaaacaaataaacaatatactacaagttatatttgtatgtgctttgaggccaacacccaaaacagcacacatggtttcacaagcacctctgactgctttcaaaggctgtaaaaggctatgcttttcaaagacattcattctacccttatgtttctgaggtttatatttttcatcatttctgaggaatttgaatggctatttgttaatcataaggattcacaaaatcatagaaattattttaaacacgatttcctgttttctttaaagttcagcaaaaggaagagcatatgtcctccttttgaacagaggtcccagggcagggtaggggatggaaatgggaggctgggccacactgtgctgtggaggcttaacctccacatctgacccccactagccttcaactgattctagtgtgctttctgacaatagcccattacttaaattttctatctgccagtttcttctgctaaaagatcttctgctaaagaaaccagtgacctattttggtgcttatgaggaattacttacagaattaagctcatagttcaaaatatgagggattgttctctgcttttttaagtgtgtgttctccaaacacttagcaaagaagaaccttgtcaacatctgcctgataattctgtcttgagaatcaactgaatactgttatgtggttgtcctgagctttgatgtcctctggtatagaaaagactgaaagtgatgaaggtggggtataattaaggcctgccactgtccccaaggatccttgggaagtgtcccaatccccttgggaggctaatctacaaatcttaggaccagaatagtgacatatatggctctataatagcacttacaggactttattgtattttgtctctcattcccagtactgtatgaaattctaggtctaaattgtctgacctgtttttctatgcagatctcataagcgtatagatatttaatccatttgttgactgaataaatgaaattgctcttccttgaggcagaaatacatttcctctgtaagcttttgtgtgtatacacatacagtccatgaaatgcctttttttcctttttgagacggagtctcgctctgtcacccaggctggagtgcagtggtgtgatcttggctcactgcaacctccactcccgggttcaagcgattctcctgcctcagcctcctgagtagctgggactacaggcgctcaccaccacaccagcctaattttttgtatttttagtagatacagggtttcaccgtattagccaggatggtctcgatctcctgacctcgtgatccgcccgcctcggcctcccgaagtgctgggattacaggcgtgagccactgcgcccggccagtgtctgctttttaagacacaaagtctgccttcgttgcccaggctggtcttgaatgtctgggctcaagtagttagttctttggctcggcctcccaaagtgctgggattgcaggcatgaaccatcatacccagcctcatgaaatgcttttaaaaaaaattgtggtaaaatatgcataacataaaaattaccattttaaccatttttagatgtattttcagtggtattaactacaatcataatgtggtgcaaccaacaccgctcttcatttccagaactttttcatcatccccggcatgaactctggtgcctactaaacactaactccttctccccacaagtccctagcaacctctattctactttctgcctgtttgaagttacctattctaggtaactcttaagtggaatcatacaatatttgttattttgtgtctggcttattttacttagcataatgttttcaaagttcatccacgttatgtgtcagaatttccttccttttttaaggctgaataatattctattgtatgtatatgccacattttttttatccattcatctgttcatcctgtgaaatattaggtttgttttcacttcttgactactgtgtgaataatgcttctgtgaacataagtatacaagtatctgcttagtttctgctctcaattttttttcggctatagatctaggagtggaattgctggattttatggtttgacttcttaaggaactaccatattgttttccacagaggttgcatcattttatattcctaccagcaatgcatgggagtttcagtttctccacattctcaccaacacttgttattttctttttttgataattgccattctaatgggtgtgaagtggtatttaattgtggttttgatttgcatttccctaatgacttgtcgcccaggctggagtacagtggcacgatctcggctcactgcaacctctgcctcccaggttcaagcaattctcctgcctcagcctcccaagtagctgggattacaggaacctgccaccacgcccagctaattttttgcatttttaatagtgacagattttccccaagttggccaggctagtcttgaacttctgacctcaagtgatcaacccgtctcgacctcccaaagttctaggatgacaggtgtgagccaccgtgcctggcagatacacctttaaattctgaaatacccccacttaaaaaaataattattactattacttgcaaaataaaagtctgctactaagatacagagagttcctcatcaatcctttatactctaataccaaccctccccatgcccacagacactgggtgcttgatatgaggtgcatatccatggccacagatgtccctgaggctgctgatccctgagggctcagaaaagagtgggcttctccctcattagctagtctgtctacacaatattctgttgatatatttgtgtcaaattcattaggtatccaaaatgattatgttcatctatcctgattgtagttttctcagaaaaaaacatacttttaacctaaagctatcaatagtatgtaggcactaaataatttgaaaagaaatttgtgaaattattcacagtgagaacatcttgtaatcatgaaatcaatgaaaaatttgctaattttcgtggtttcattattcgtatttaactctttaatccatctgaaatttattttgatgtatcatttgagggtagagattaattttaattacttttcaaacaattttatcagcactactttctgaataattttccctcactgattttaaatgcttctcctattgtatattatattcctatacatcataagagttcttgcctctgtattctatttcattgtgttatagcttttctttttcattctaatctctttcgttaagctaatatacattctgtagttggagtttttactttaaattctaaggttgttaatacttttaaaaaatatttaaagtaattgtaggctattcagtgagtattcacagatattctccatgtgaaagagtgcattggtggcaattcatagatacattggtctggcacagcagccaggcactttgttagttccactttcacctcatgctagacatgcaggcatcctaaaagttcaggtgtattcttgtgatgtgcttattattatattcaggaacttattaatagaaattaaattatagaacctgctgctccatttaattggctacaacattcttggaatggtaagtattttgccttgggcttcacctaattatctctgttagaagtgtacaaatgtttacagcatttcctttttgaatatttggaacaaatatttttatttgatttatgatgcttttctctttatttgaccaagaaatgttatggtggtcccattatgtgtctagacgctgtgctgaaggcattgggaagcaggagcacactcacaccagagcctcacatctagtgacagccactcgctagaactggggtgatagggcatgttgttatatcactgaagtcttctgctacttttttttttttttttgagacggagtcttgctctgtcgcccaggctggaatgcagtggcgcaatctcggctcactgcaagctctgcctcccgagttcacgccattctcctgcctcagcctcccaagtagctggaactacaggcgcctgccaccacgcctggctagtttttgtatttttagtaaagacagggtttcactgtgttagccaggatggtctcggtctactgaccttgtgatccgcccgccttggcctcccaaagtgctgggattacaggcgtgatccaccgtgcctggcctcaagtcttatgctacttttaaagtcttacgttagcaaaatgaagaaatgtgaataattggtgaaacctttgaaagccaagctctaagattcctgtaaagaactataggttggaaataatttaataatgccaagtacatatgatcaagaaaatgatagagtggacagttctctgacctggctatgtgttttgttgttgttgttgttgttgttgttgttgttgttttggagacagagtttcgctcttgttgcccaggctggaatgcagtggcgcgatctcagctcactgtaacctctgcctcctgggttcaagcaattctcctgcatcagcctcctgagtagctgggattacaggcgcatgccaccatgcccaactaatttttgtctttttagtagaggcggggtttcatcatgttagccaggttggtctcaaactcctgacctcaggtgacacacctacctcagtctcccaaaatgcagggattacagaagtgagtcactgtgcctggccaccatgtgttcttttaagccccataacaaagttttttaaaagatggctttggtcaagcgcagtggctcacgcctgtaatccgaacacttttgggaatccaaagtaaggagggaagatcacttgagactgggagttcagaactagtctgggcaatatggcgagaccctgtctgtagtaaaaaaaaatttaaattagccaggcatggtggcacaggcctgcagtcccgactacttgggaagctgaggtggcaggattgttttagtccaggaggtcaaggctgcactgagctgtgatggcaccactgcactctagcctaagtaacagagcaagaccctgcctcaacaaacaaaaaagatactttgattatatgttataacaagtttccaaaaaaaataaaaagattaatttataaatacatatgcttgattggagacatgatctttaaaaatttttaaacaaggtatatgatcaaagacaaccgaattagtcaatgagcatagagtgtgacagattttaaaattctacctctcgtcattatattaagcccttataccaattggtatagcacaaattcatcctgaatcctgtgggaggaaaggggttagctaccaataatcttatagcctgaacttgactatagataatatagttgtatttgaatatggagtatctgttatttgattcccacttagttatctttagttttcctgaaaacttataaacaggaattttagggacacgcctcttgtaacacagagaggcaaatattttataagctctgtatacattcctgcattgatcagctggctcattaaatgatcccccagcttgttaatgatcagttgaacgtgtgtaagccccatagatgagagggacctgttccattcatcttttttcttccttttgaaactggtatatgttgagtgtctgatatgaattgaacaaaagttgaattgtttaattttatgcttgtatcaagcaagctcccagaagtctggctaaagagtagtttgttcatttaaaaatctagccttgagaatctttgtaccatgaatatttttctctctcagccccagagccaattcccacccctttcagtctaatctttggcagcacaagaccgtgtgctggaagtggcatgaaaattcttaacttattcctttcaaaaaagaagctaactgtatttaatgctttgtgtaggctatttcttttcatccttaacacaaatggaagggaggtattactgtaaatttgcagatggggaaactgaagtcatcaaggttaaataacttgctgaattcccaccaccagtggatcacaaagctgtgtgacactggacatgacttcccaaaagaaccccatcttgccatcctatgatctgtagatgaaagtagggtttgctgatggccctgagaaaatcttaacaaactggatgaggctcaaagacttttccagggatatggctccagaactgtgaccttccctttatgggtccagcatgacatcgtcctgctgctccatatggcatcaatgtaagtatagacatggccttgctctgaagaatagtaaaaagacttcacttctttagaggaaaatgcatgtgtaccattttgagaatgaatgttggatccaagacgtctgtcaatagagaggctccgaagaatggggtgatacgtcacaaagattggatgggatccatgtatgcctctgaacccttccttgtttctagggagctgttccaaggcaaagttgaggtcaacctcattcagttttaccagagatttaattggacatgctttggctaatcaactagtaataactgtgtttcacatttcttcctttccttactgctttctccttaagagcaaataattaataccagaaatttctgtcttgggtattatgggacgtgtgtggctataaatgaagaaattacagaacctacatggaagataccagaaacaatacccagtcgttttgttgtgatttttttttcttttttttttttttgagaccgagtctcactctgtcagcacaatctcggctcactgtaacctccgcctcctgggtccccattcaagcaattctcctgccttagcctccggagtagctgggattacaggcacgcaccaccatgcccagctaatttttgtgtttttagtagagatggggtttcaccatgttggccaggctggtcttgaactcctgacctcgtgatccgcccacctcagcctcccaaagtgctgggattacaggcgtgagccaccgcgcctggccactctttatttttttattttcctctactcaagacagcttagaagagagatccattttgcatttggaattcttccagttagttttgaaatctaatcaacaagattggggagtgttttgtgttaatgaaatatgttcctagttcttagaaatatatgaatgaggccaggcacgatggcttatgcctataatcccagcacttggggaggcggaggcgggtggatcacttgaggtcaggagttcgagaccagcctggccaacatggtgaaaccccgtgtctactaaaaatacaaaaattagccatgcatggtggcaggtgcctgtaatcccagctactgggaaggctgaggcaggagaatcgcttgaacctgagagacagagattgcagtgagccgagatcgtgccactgtactccagcctggcagcttgggcgacaagagcgagagtctgtctcaaaaaaaaaaaaaaaagaaaagaaaaaaagaaacatgaatgagcaggagaaaaagaactgtgatactgaaggggtcagcctctcctcctgtgcgccactcttcccaatggagcatgtgctttgactctggggtttctgcagcatccacaataaatatgtaactgtattttgtatttacccacatgtgttttccctcccatggtgtctttccctaaatctgtgaagaaaataactgttttaaaattcatttattttctccatttggttgtcagcagcaggaaaggctgctgaaggatccgagccagtgtggaaatgggaagggcctgtgagctcagagggaaagaggaagtctctatgtcccggttaccagcatgaccccaggtcaaatgactccctcaccctctcctcctgccaaggttggttagggttcaaatgtgttcctacccaaaatcacacaatgtcactgtgtgggatgcacaatattccattgctttgctctgttaaaaaagacagttaaaagtaagaagtatttgttgcaatttttaaaaacatggtttttaaagctatcttattagtttttaatgctaaaagcattttatttactgaagattcttggttttggataggttttattttttcattaggtggtagtactctgtttctgagaaagctctttattatgcattatttgtgaaatctctagtaacctgatgatgtttctgtcacattgttttgaaaggaatagtttaaagatttaaagtgatctttttttgttgtatgtgtgtgtgtggtttgctttctttctttctattttttatttatttattttattttattttattttttgagcgagggtctcaccctgtcccccaggctggagtacagtgtcacaatctcagctcactgcagcctcgacctcccaggctcaggcaatcctcccacctcgaattgttgggactacaggcatagcgagccaccatgcatggcttttcttttttaatgcaagtatttcttttggaatttgaactttaatactactttggtgtgttttcacctaaattccattttgtgagcttcttagtatttgattgaaaacctatttcgttttacttgaccctaactagatcaacaagataaggatattacccaaaggtcatttctagtaggattgtggccacaaacgtcaattctgtagccaagtatggactaatgtggactgagaacttggcttagaggaaagacgcatttccacctgttcagggaggtttgaagattatccatgttttgagggaaaaggccagctgaatgtggagagtgcaaaggtgtaactgtcacttgagcttttcagaagtccttcgatgtagctgccaacttaaaccacctcaagtccagccagtacagcagctctgctttatcttcagtgtgagtctgtctccctgccggctggtgatgggggtcaggctggatcatggatgcgaccaccctgcacccaggcctgcctctcttttccctgttacatagtgctgggcagcctctgggggcctcacagatttttgttttttagtggtaataacagcatgatcaggccgcagccttctcaataagaagtgctaacttcctcaggaaaacagaagtgtggtatgcaccattacataacccagtttctctggtgatacaattttactttttgagagctgttttgaagtcttcccacagaactgcaggcctctctgttttcccgtatgaggtgaggagatggcagttttgtccacacacctatgaaaaaacacaatgacagattaagtgtcctgaagtgtcggaaggatacctggtgtggtagcttctaaaataccaccaaaagttattttagagatgaattaattagaattgacatctgagttaggttaccaaatgaaataaagggtgccaggtaaatgtaaactttagataaactatcaggcacatgtatgctaaaaaaattattcattgtttatctgaaatttacatttacctgggcatcctgtattttattaggtaaatcaggcgactctccacctgaaactagattatgcaaactaagaattaacataaaaagtactgtcattgtgtggatgagaaatctcctcctcctcttctcctaaaccagtttaggaagcctgtgcttcgtcatttctcatatactctcctcccatgtacatccagattaaaatgtgtgtatttggcatgtggctcactgtttcacatgcctaactgcagcccctctgggatcctatagtcgcagcactattttggtaggtcagccatgggcagcaggtcctgtactctcctgaccacccccgaggaactgcaggctctcagcatttgcgtgtgtccctcctcagagccgtgggacaaccccagccagctagaggcagagagacaggcacgtaaacctcctggcacgtcttgcgggtgcctgggccaaagtatgcgactgtcctgattctctgaaggtctcaaagcattttcatattaagttattcaagtgacccagagaacaagaaaggagttgctactgcatgatgtcagagaacactcagaggttggaagggaattgggagaactaagtaattattaataaattctaaaagtttaatactcagtattcaaaggagaaagagtggagctaacactttgtaccaagggtgctggtcttgggaattaagatatctcctgcaagagatttctgatacaatttagtaaaatgtagtttttaggggagatcttttacagaaggaagcttttatttccaaaggacttcatgaaaggtgtaaaggccacactgtgaattagggatgacacaccctgttttgaattggatttcctgctagttctgatccgaggcattcttcccggactagggtgaattcagttccagtgtttgcttgaaaactgaatctggtcattgtatttgcagtttggcttcctgcctgctgttaaagtacagagcaaacttcagctagttactccctatgattctgtgtcctcctaaagagcagggaaagaagagggaaaaacccagggggtgactgagttcatttacatgttgtgccaaagggcagctgcttgctgccttgtcgtcacaagattctgtggagaatcctgatagtccatttaccagaataggagcctggaaaacaaaaggaaaaaaagtatctttctttctatggttctagctttggcattactaactgaataacctactttctttttctttaaccaacataggtgaaaacttagaaaattttatgttctccctctttccaaagttttctgtatgaagaaagaacttataaaaagaggtcacagctgggcgcggtggctcacgcctgtaatcccagcattttgggaggccagggtgggcggatcacctgaggtcaggagttcgagaccagcctggccaacatggtgaaaccccatctctaccaaaaatacaaaaattagccagacgtggtggcatacgcctttagtctcaactactcaggcagctcaggcaggagaatcgcttgagcccagaagccactgcactccaccctgggtagacagagtgagaccctgcctcaaaaaaaaaaaaaaaaaaatcacaaggcacggtggtagcactgctggctagttggacctggctgtgcctactgagttgtcctgagagaacaccaggttgtgtacatgctgtctggatttgtgggaagtgtggggggcttaccccttttccctgcagttgtagaaaatgtgatgcaatctgctcagtgtagttccagccaccccttaagatacctggcaaaacttagcatagtgtggatcagaaggaatccagaagcatatagtggcaccagcctatgtgtccttacgaatcttgtattcccctgagttaaacttagagcctctgaatttgcggaagggacagaaaggaaagatgttctgttgtggggctgttcccaggctcagcttcctcacactgaggcagtgcatccagtactgaaataaggaacattgcaatgatgcctggggtcagcaagtggccttgctgacatcacaacatgtgcatttctcactgttcttggttatttaattctggtctggtccattggattagagccagattaaacatcaataaattttgagtttactattaacaaagagcagagtcctgctaccttactgttactttgctaggtgctaagagagaaatcagaaaatttaaggcatggattttggtcacagggagcaaaatctagtcttcattggctaagaagccttaaaaaccatgtaactgtcacatagtggcagaccacgagcaaaaagaaaaaaaatgaaccctgcttcttcttggctgttttatggagatggtgcattcagctgcctggtgtttagaggaaccaaatgtacagaaatgaaaccgttcaggagattcccagagctaactgcagggtgctgcagggatgtggcaactgaacatccaggaactgtaacaagacagtgtttaaataggtcaaaatgaagcagtccaaagcaggagttctgacttctggtttctagtctggcatataaggcaggtggaagttgtcattcctgtcttcacaataagaaaaagttgaacaaactaaaaatcaatggtttttagcttcatcagagaattgtcacagaacaaacagctgccccccaaattggagcaaatgacaggcaaataaacagagaatcacagcttcccagagcaaaagacctgaaggggacgtatccagcagaactcagaagcagcctaagaaaacttcaattaattcacacattgccagaggctcggtgtggacaagcttgcaagttacactccagggggtcctgtcttggagagagggggcacacttttgttttatgttttatgttctatgtctaggaaccctgctaggttctcactgtgaagatcagggaacaacccattgtgcttgtatcgggggaagggaaaggtagccatttaacagtataccggagcattcagccctcaagagaaactgttttaccagagtctgaccaattggagttttattggagcccagttaacttggggggaaggaaaaacgccaacaccaactccagatttcctccagccttcctgtttctctggggagaaaaaagcttagaagcacctgtcaagatctcagcccagaggcacaggcttactaaagacctagacctcatcataggactatagaacacctcccataccctgacaccataccaccacatcagcaaggctcctgtgtagtaacagaggaataaaatggaaagaactgagcatctcagaccttatttaagaaggctgtagagaaactcaaagataacaggggagacaaaaacatggacaccagagaaaattttagcttcggaaaacactctagcaaacaataaagacggcccatcattaaagtcgccaggtcaaccagatgtagcctctgtaggtgttggccttggcgaccagcttgggatcagtatggttcgccagatggcccccactggcaccagtcttggttgggttcaccagatgttgcctgtgggctactgttttattttatttttctatttccatctttggacagagagctactattcttttaatggacgtgaaatggtgaaggcacacaagcatattgctgtcattgttttcttgctttcctaaattacttttaccagtggtatatctttttttaaaagctatctacttggagatggtgtgtcttgattgacatctcatggagaagtggatggggaaaatactggttctgtggaaagactctctccgttagtggcttgctcatccagctctgatctttctgttccaggactctccctgtttcaacaacagcaacaacatgataataacaaacctcacatatgttgttccactggataattgtaattttttaaaataaatcgttgtaaaaccaaggacagtttcatcacttttttctatatagctgttcacatggggccaatctgtctttgcaaaaaagaagtgagaaaggaatccttgatactttcccctagaagtccagcatctgcttgtttaaatacatatctcatgtaaaatgggaaagataaaaaatattgaaaagtgaagttttaaaaccttatactaaagatctttatactgcagtctgtctcacacaatatatcattgtctggctttcaacaacaaaaaattactaggcgttctaaaagacaaataagtcacagtttgaagaaacagagcaagcattagaaccagactctggttttgcagaggtgttagaattaatcagactaggattttttttaattcctaagattaatatgttaggggctctaaagggaagattggacaacaggcaagaacaggtgggtgaaggagagaaatggaaaccttaggaaagatcaaaaggaaatcctagaaaccgaaggcaccataacagaagtgaagaatgccttcgatgggctcatcagtagactggacatggccactgaaagaattagtgagcttgaagaaatgtcaaccaagactcccaaaactaaaatacaaaaagaaaaaagagtgaaaaaaaaaagggaacataatattcaagaactctgggacatttgcaaagggtatggcatatgtgtaatgggaataccagaggagaggaaagacaggaagtcaaaaaaagaatttttccaaattaatgataggttccaaaccacagatgcaggaagcttaaacaccaacaggataaataaaacaaaatctacgcttaagcatatcatacttaacctgcagaaaattacagacaaagaaaaaacaccagaggggaagctggcagaaacataccacctatagcggaagaagaataagaattacatcagacttcccttcagaaatcttgcaaacaaaaagatgtagcacaatatttaaagtattaaaggaggccgggcccggtggctcgggcctgtaatcctaacactttgggaggctgaggcaggaggaccatgaggtcaggagatcgagaccatcctggtgatggtgataccccatctctactaaaaatacaaaaaattaaccgggcatggtgacacgcacctgtaatcccagctacttgggaggctgaagcaggagaatcgtttgagcccaggaggtggaggttgcagtgagccgagatcacatcactgcacgcctgggcaacagagcgagactccatctcaaaaaataaataaataaaataaaaaataaaaataaagtattgaagtaaaaaattcaccaagttagaatcctatatctagcaaaaatatccttcaatggtgacaaaaaaataaaacactagcccagacaaaaactgagacaatttgtcactactaaggctaccttgcaagaaatgttaaaagaaattattcaaaaggaaggaaaataatatagatcagaaattgagatatacataaagaaaggaggattataagtgaaggaaaaaatgtaggtaaaataaaacctcaattgatctaacacataagtttctttaaaataatagctaaaatgtattcagtggtcatagttcatgtataaatgaaatgaatgacagcaatattataagagatacaaggaggaattagaaatactttgttattgtaaagtacttgtgccacccatggagttgcatagtgttatttaaaagtggacttgaattacttttaaatgcacatcaaactcaagaggaaccacataaaaaagtaaaaaaggaagtacaatcatatatcacttaatgatggggatatgttctgagaaatgcattattaggtgatttcatcattatgcagacatcataagggcacttatacaagcctaggtgatatagcctactacacatctaggctgtatggtatagcctactgctcctaggctacacacttgtatagcatgtaactatactgaacaccatggaacattgtaacaaaatgataaatatttgtgtgtctaaacatatctaaatgcagtggctcatgtctgtaatcccagcactttgggaggctgaagtaggcagataacttgaggccaggagttccagaccagcctggccaaaatggtgaaaccccagctgggtgtggtgacactcgcctgtaatcccagctactcgggaggctgaggcacaagaatcacttgaacctgggaggtggaggttgcagtgagctgagatcgggcctgtgcactccagcctgggtgacactgcgagactctgtgtcaaatacaaaacaaaacacctttagaaccatggtgtcagaaaaaaaaaatatctaaacatagaaaacgtacagtaaaactatggtataaaggttaaaaatggtgcccctctatagggcacttacctgtctgtaatggagcttgcaggactggaagttgttctggggtcaggggccatcagtgagtgagtggtgagtgaatgtgaaggtatagaacattactatgcactactgtagactttatataaacactgaacacctaggctacactaaatttataaaaaagcatttctttctttaataataaattaaccttagtttactgtaacttttttacttcataaacaatttttcttaattttttatccttttgtagtaacacttggcttataacacattgtacagttgtacaaaattatttcaaaaatattttttatatccctattctaaaatttttttctattaaaattttttataactttttttttttaaaggcaaggttgtgcatcccccagactggagtgcagtggcgcagtcatggcttactgcagcctcaaactcctgggcacaagcgaccctcccacttaagcattccaagtagttaggactccaggcatgccaccatgcccagctattttttaaaaatgtttctcgctatgttgcgcaggttggtcccaaactcctagccacaagtgttcttcccaccttggcctcccaaaggtattacaggcgtgagtcactgtacccaaccttttttaaaaacttgtaaagtttttttgctaaaaatggagatacacaaacattagcctaggcctacatggggtcaggatcatcaatgtcacactgtcttctacctctacaacttgtcccactggctggccttcatgggcagtaatgtgaatggagctgtcatttcccatgacaacaatgccttctggaaaatatcctgaaggacctgcctgaggctcttcttgaggagatgtcattccttttagaaatatatccatggtagatcacttggtttgttgctttatcatcatagatttgcttataagcagagaatacaccgtgaacattcctcaacattaatgaaaaccttttggtactggggtttgtgttttcagaagactttttaaggagcctgttgaggtctgtaaaagcttctgctaaacccttcagtgagaattttcttggggattctacttctgtttcttctcctgcagtttccttttctcttacctcttcttccggtatgcatttctgttccagttccaagaaagtcttattagtcaatttctcaggacaacattactaggcagtaagaatctttcagctccatgataaacttacgggaccactgtcatatatgcagtctgccatttactgaaccaccattatgtggcatacgacaaaaattattacattaagagaagaaaaaaatagaatcatataaaatggccaattaaaactataggcagaaaaagagtagaatacaataacagaaagacaagggcaaataatagaagacagtaacaaatagtagatatcagtcctgctgtatcaataattgctttaaagatcagtgatctgaactctaattaaaagacaaagattgtcagagtggattttttttttttttttttttgagacagtgtttggttattttgtttcccaggctggaatgcaatggcgcgatctcggctcactgcaacctcccctcccaggttcaagcaattctcctgcctcagcctcccaccttgctgggattacaggcatgcaccaccatgcctggctaattttatatttttagtagagatggggtttctccatgttgatcaggctggtctcgaactcccgacctcaggtgatccacctgccttggcctcccaaagtgctgggattataggcatgagccaccacgcctggcccagagtggatttaaacaaaaataaaactcaactacaagttgcctataagaacctcattttaaatataaaaacacagatagggatgctaacattgatcaacagaaagctggagtacctatattaatttcaaacaaagccaattttagagcaagaaaaattatcaaagataaagagggagtattacataatgaaaaaggatcagttctccaagatggcgtaacagcccttaatgtgtatttatgtgacaacagatttaaaacacataaggcaaaaaactgatagaactgcaaagtaaaacagacaaaaccactattacagctggagacttcaacactcttttataagtaattgacagatccatcaggcagaactcaataaaggcattgttgaactgaacaacacaatcaacagaatctaatttacatttatagaatacttcattcaacagcagcagaatatacattcttctcaagctcatgcaaaacattcaccaaggcagaccaaattctggaccataaaacacatcttagcaaatttaaatgataggatcatacagagtatgtttcagaccataatggaattaaattggaactcagtaacaaaatacttggaagttaaacagtacacttctaacacacatcaagaaatcccaagagaaatttaaaatattttaacaaagtgaaaatgaaaatacaacataaccaaatttgtaagtttcagtgaaagcagtgtaaagaaaatttatagcattgaatgtacacaatagaaaagaaaaaatatttaaatcagtaaatctaaacttccactttaggaaaccagaaaaagaagagtgaattaaatcataaatagaaggaacaaaataatttttaccaataattaataaataagataataaaaattctcaactcaaagtggattaaagaattaaatgtaaaatcccaaactataaaaaccctggaagacaacttaggcagtaccatcctcgacataggaatgggcaaagatttcatgacaaagacaccaaaagcagtcacaacaaaagcaaaaattgacaagtgggatctaactaaactaaagagcttctgcacagcaaaagaaactagaaggagtaaacagcctacggagtgggagaaaatatttgcaaactatgcatctgacaaaggtctaatatccagcatctataaggaacttaaacaaatttacaagagaaaacccattaaaaagtgagtaaaggacatgaatggacacttctcaaaagaagacatacatgtggccaacaagcatatgggggaaaaaaaacctcaacatcactgatcattagagaaatgcaaatcaaaaccacaattacataccatctcacaccagtcagaatagctattattaaaacgtcaaaaaataacagttgctggcgaggctgcagagaaaagggaaccctaatacactgttggtgggagtgtaaattagttcagccattgtggaaagcagtatggtgattcctcaaggggctaaaagcagaactgccattcaacccagtgatcccattactgggtgataaggtttggctctgtgtccccacccaaatctcaccttgaattgtaataatccccacgtgtcaagggcgggaccaggtggaggtaattgaatcatggggaccatttttcctgtgctgttctagtgatagtgagtgagttctcatgagatctgatggttttgtgagtgactggtatttcccctgctggcactcattctctctcctgctgccctgtgaagaggtgccttgcaccatgattgtaagtttcccgaggccatcccagccatgcagaactgtgagtcgattaaacctcttctcttcataaatttccgagtcctgggtgtttgttcttagcaacataagaacagactaatacacttggtatatgcctagaggaatataaatcattataccataaagacacatccatgtgaatgtttattgcagcactgttcacaatagcaaagacatggaatcaacctaaatgcccatcaacagtagactggacaaagaaaatgtacatatacaccatggaatactatgcagccataaaaatgaacaagatcatgtcttttgcaggaacatggttggagctggagcctattatgcttagcaaagtaacacaggaacagaaagccaaataccacatgttctcacttaaaagtgggagctaaatgataagaacttaagaacacaaagaaggagacagcagacactgaggtcaacttgaagagggagggtgggaggagggagaatagcagaaaagataactgttgggtactgggcctaatacctgagtggtgaaataatacatacaaaaaacccccatgacccatgtttacctatgtaacaaaccttcacatgtactctcaaacctaaaataaaggttaaaaagaaaaattaggcagaaattaatgaaatcgaaaacaggaaattagagaaaatcaacagaaaaaaaaagctggttctttgaacgattaataaaattgataaatgtggagccagattaagaaaaaaggaaaaaagacagaaattactaatatccacagtgaaagagtgaccattactactgatcccatagatactaaaaggataataaagtaatattttggaaaactctctgcccacaaattcattaacctagttgaaatagaccaattacgtgaaagacacactctaccaaaactcgcacaaggagaaacagataatctgaatagacctgcatttattaaagaaaatcagtaataacctttccaagcagaaagcactgctgggttcactggtaaattctaccaaacatttagggcagaaattatacctattttctgcaatctcatccagaaaatagaagcagaaggagtactctataatctttcccagaaaatagaaacttaaggaaacacttaagcactaagtgcaggagcaagacaaggaaggatgcccttttcaccactcacagattgtgagggatgaaataaagctgtccttatttgcagataacaaataactaattctatgagaccagtattaaaaatcaggcaaagacattataagaaagggaaacttaaggatcagtgcctctcatgaatgtagatacataaatagttaacaacatgttgacaaatcaaatctaacacatataaaaagaattatctaccctgaccaagtttaccattcaaaaaacaattaatgtaatccatcacaccaacaggctaaagaagaaaaatcaaatcttatgaatagatggaagaaaaggattcgacaaaatccaacacccattttttgatgttaaaaaaaaatagtcagcaaactagcaatagaagacacatcctcaacttgttaaagaacctctgcaaagaaacctgcagctgacatcatacttaatggtgagaaactagatgttttcccactgagagcaggagcaagacaaggaaggatgcccttttcaccactcacagattgtgagggatgaaataaagttgtccttatttgcagataacgtgattgtgtatgtagaaattccagagaatcaccaaaaaattcctgaacctaggatgtgattatagcaaggctgcagaatatgttaatatgtaatagtcagttacttatatactagcaatgaacaattagagaataaaaacaatgccatttacatttgcatcaaaaaaatcaaacaggtataatctaaaaatatatatatatataagatctacatgaagaaatgtacaaaattctgatgaagaaatcaaagaagagctaaacaggtattccacgttcatagataagaagactcaatgttattaagatgtcagttcttcccaacttgatttgtagattcagtgtaattccaatcaaaatgcctataagttatttcatggttatcaacaaactgattctaaagtttctgttgaaatgcaaaatacctacaatagccgactcaatactgaaagagaacaaagagaagtgacattatccaacttcaagaattatggtaagtaatcaaggcagtgatacaggaaaaagaatagccaaataggtcaatggaacaaaatatagaacaagaaattgacataaatatagtcaactgatctttgacaaagaagcaaaggatatttaatggaaaaataatcttttcaagaaattgtgctggaacacctgaacatctacataaaaaagaatgaatctagacacagatcttacaccaaaaagtaactcaaaatagatcatagacctaaatgtaaaatgtgaaactataaaactagaatataagatagaagagaatctagatgactttaagtttggcagtgaccaaaggcactatctgtgagagaaaaagtttacaagatgaactttgttaaaatttttaaattctgctctgtgaaagacactgttaagacaatgaagacaagccatggacatatcttgtaaagaacttgtactcagaatatactaagaacttttaaaactcagtaagaaaacagacaacccaattaaaaaattaataaaagctctgaacagacaactcattaaggagatgtacagatggcagataatcacattaaaagatgcttgacatcatgtgtcatcaggaattgcaaattgaaacagcaatgagataccactagacatctattagaatggctaacagtcaaaacacacaacaccaaatgtagggaaggatatggaagaacagaactatcattcattgctgatggaagtgcaaattggaacagccactttggaaggcacttcagcactttgttacaaaaatacacatattcttaccatatgatccagcaattgcactttttgatatttatccaaataattgttgaaagcatgcctatacaaacatgagcataaatgcttatagcagctttattcataattaccaaaaacttggaagtaaccgagatgtctccagtaggtgaatggataaacatactggtgcatattcatccacacaatagaatattactcagtgacaaaatgaaatgagctgtcaagccatgaaaaaacatagaggaaccttaaatgcatattgctaagtgaaagaaaccaatctaaaaaggctgcatgctgtataattctaactgacattctggaaaaggcaaaactatggaaatagtaaaaagatccatggggtttagagggagggagagatgaataggtggtggacagggtatgtttagagcagtgaaacttctgtatgatactgtaatggtggacacgtgtcattatgcatttgccaaaacccatagacctgtacaacacgaagagtgaacccaatgtaaactatgaactttactcaataaggtgtcaatattggctcaccagctgtaataaatgtatcacattaatgcaagatgttaatagggaaactgagataggtgagagggtatatgggaactctcagtatttctgcttcatttcttcataaacctaaagctactctaaaaattagtatattaattttttaaagaatgaaaaaacagggccagacatggtggctcacacctgtaatcccaacagtttgggaggctgaggcgggcggatcatttgaggtcaggagttcgagaccagcctggaaaacggtgaaaccccatctctactaaaaatacaaaaattagtcaggcgtggtgactcgcgcatataatctcagctactcaggaggctgagacaggagaattgcttgaacctgggaggcagaagttgcagtgagccgggatcgtgccactgtattccagcctgggcaatagagctagactccgtctcaaaataaaaataaagaaaaaataggagttcccagaggttgctgagaagattaactttggaaggagaaaatactatgaaaataaattaaggctgggcgtggtggttcacgcctgtaatcccagcactttggaaggccaaggcaatagatcacctgaggtcaggagttcgagaccggcctggccaacatggtgaaaccccgtctctactaaaatacaaaaattagctagggtgtggtggtaggtgcctgtagtcccagctactagggaggctgaggcgagagaattgcttgaacctgggaggtggaggttgcaatgagacgagatcatgccactgcaccccaacctagacaacagagtgagactctgcctcaaaaaaaagaacaaagtaagtaaattaatgttcattgtcagacactgctgtttttctttctcggttttgagcagctttattctggtccaagtaattatatttaatatttgagttttcaggttttgcctctataaatttgatatagctctctgtcttgctttataaaatagagagtaaaccaaagccttcaaaaggaaatttatataaattgaatcatatttttctctttatgaatagatttatttgtttccaataataagggcaagaaatgattattgtgggatatttgttttggttttgccttttttcttttctttttttttttttttttttttgagacagagtctcactctgtcacccaggctggagttcagtggcacgatctcggctcactgcaacctccgcttcccaggttcaagtgattctcctgccccagcctcccaagtagctgggattacaggcacctgccaccacgcccagctaatttttgtttttttagtagagacgtggtttcaccaggttggccaggctggtctcgaactcctgacctcaggtgatccacccgcttcagcctcccaaagtgctgggattacaggcatgagccaccatgcccggcctattgtgggatatttgaaaaaaatgctgagagatgtgatagataaagagactagaaactacccgttactgcactagcggagattaacctttttaaaaatgtattaagattttatatactggtaattttttccttatcagcacaccatcatatgtaagtcctttcttacatcattaaaaggcacagaagagacggtgggtatgcagtgcccagagcgaggccacctcccttagccagacaaggaccacacagggcccatcctacctggggctcaaggcagtgctgagacttttcaatgttattaattgttattttatttcactttagaagataaatgacatctcattttaatttgcattttttaaattaaagagattgaacactttttcaagcatttcatatgtcctttttggtggtttttctggccatgtcctttggccacttgactgttattctggtgtttttctaatccactcatgtaaatgctttataaatcaagactcgtgtccaagaggggacagtattcagtcctgggaagtggggtttggtgcatacctgacaatcttaaggtccttcacttttcttcttaaaaaaaaaaaaaacccttttcccaagggatgctatcaggtgttggtttgagtgcttgttgtgagacctgcagccttgttaggactgtctgctagcagctgggttcctctctctccatggtgggaagctggcctggcctttctagtgcatggattatggattggactggcttccttcttatcctaacccaacttttaaagaaagaagtaaaaatattctgtggccctgagagacagcaaataagaggaaaagggaagcacagttttgctgaatttattgctccaagttgactgtattattcccccacattatgcttgataggaggtaaataaacccttggaacttgtgtagttcacagtttgagggactctgctgagacaaggtttgaatcctaaacacttttttgaataatatcataagaaggttataaggctaatttaggaccaaaacttccaatgaaacagaagcaataaaattgttctcgcggtttctcctttgatggagagtgtgtaggccagcctgaagcataggggaaaataaatattgatgtcatccaaaaagaatttgctaactttttatattcaaataagtgaaaaagaaagtaaaattggttattttaacttacttttgaattttatttaaaaagtatccctgttactacaggatgatattttttgaaaacttattttaccaggaaaagcattcaaaaaatatataattgcaaaatgacaataaaatattttgaccctcttttaggcagtccctagccctcttctgcccctgtggccagcctaccaaggctgggcattgtctcctcttaggaactttctctaactacatctttagtttagaagactatcttccaaggcatgcttctaatctgaatgatttacagtattgccagtactacttaccaccctctgtggtcattttcttcttcgttttcttcttgtctttccccccattgcccctagataggtagtcagctttaagtcagggcctgttttatgaaactttgtgactgggacatagtaggtattcatgaaataactattaagtgagttaatggataatggaatttttctgattttactttattgaaaaaacagtggttttaattaacactcttgttttgagcgtctcactctgttgcctaggctggagtgcagtggcgcggtctcagctcactacaacctctacttctcaggttcatgcgattttcctgcctcagcctcccaagttgctgggaatacaggtgtctaccatcacacctggctaatttttgtatttttaatagaggtggggttttaccatgttgaccaggctggtcttgaactcctgacctcaagtggtccgccttcctcggcctcccaaaatgctgggattacaggcacgagccactgcgcccaaccaattaacactcttaaaagaacatactaccaacctgtctttgtactgaattatttacatgaattatcttattcaatcttcacaataatcctaacagttagaaattggagccatttttgttttacaggtgaggaaacttgctcatgtctataccaccagtaagatgctgagctggggctccagcctgggtctttctgactcagacacttgcttttcaccacaatagtgtatatatcttcccatgggaagggaaatacttttgaaacagtttaaaatatagtgaatagaagaacttttaaaacttactgtatttagtaggtgattttcctttatgttaatgctagcaacactcagaattaggcctgtggcaattcttgcacatttcacataaaagctcagaaatatagtagttttatcttatttttacagtaattatcaattattagaagaaaatatgggctgggcacagtgactcacacctggaatcccaacactttgggaggccaaggcaggtggatcacctgaggtcaggagttcaagaccagcctagccaacctggtgaaaccccatctctactaaaaatacaaaaaaattagctgagtttggtggtgcacacctgtagtctcagctattcgggaggctgaggtgggagaattgcttgaactcgggaggctgaggtgggagaattgcttgaacccgggaggctgaggctgcagtgagccgagattgcgccactgcactccagcttgggcgacagaatgagactccatctcagaaaaataaatatgtttatactatacttacctaatccacatgcatacacatacttctatctgatctttactgaaagtcccccaggcacattctggaaaccccagtcaaatcagttaaacacatgcacttgctgtctctcctgatcaaatgaaggtctacaaagtctcaagaagaaactacagcaaagttaattaaggaagaagatttctgtaagcaacgtcgtcttaactgtcattttctttttttttttttttaatctttgtctaacatccccatgtacaccagagattaactttcattttctaatgactaagattgtgaaagagaaaattctgggctgggtgggtggttgccaaccatttgttactttatgggtacctggatgagggttgtggtgaatgtaaccagaggcaaatccgaggagaccctgtgaatgcccagagttgcgtgagtgactggagagtgataagggatcagagcagagatttctgaagggggaaagctgacgttaaagaagacttaccgctcccttggaatacctgtcccactggtttctaattcagattccacacagtagctaaggattttttttaaaaaaagtaaatcaaagcacttcccctgcttgaaaatctttcagttaatgtatacacctggagctgatgagaggcatccaagtgcagagatttttaattaaactttttattttgaggtaattgtagattcgcatgcagttgtgaaaagtaatacagaaagatcctatgtatcctttacccagtttccactaagggtaatatcttgcagaactgtcatacaatgtaaaaaccagatcttgttatgaatgtagtcaagatataatagtttcaacaccaaaggatccttcctgccactcttcataggcatactattttcttccaccctgtcaccctccagaacccctagcaattgctagtctactttatgttcttattattttgcatttcaataatgctatggaaatggaatcatatagtttgtaaccttttgaaattggcttttttcacttgggataattttctggagattcatcccagttgttgcatgtataagtagttactttttactgcagagtggacgtccctggcatgggggtatatcagtttgtttaactattcacccatggaaggacgtccaacttttatgaatagtgctggtatgaacatttgtctacaggtttttgtgtgaaggtaagttttcacttttctgggataaatacccaagagtgcaattgctgagtcctattgttgttgcatgtttagttgtttaagaaactgccaaactggtttttagagtggctatttcattttacattgccacgagtaatgtgtgagtgatccagtttctccataccagcatttgatgttgtcactatttttaaatttttattctgatagatagatagtgatatctcattgtggttttaatgtgcatttccctaatgcttgtcaactgaagaatcatgaggttcaaaaatttggaaaggagagctttatttctcataaagggtggcacactgctggctgggaaatgcagcctttggcaaaagctgagaacaagcaatttaagagaggaaagcctaacacaggtatttatgcccaatgggttggctaagtatacatattcaaatttagctatagaaggagtcatgaagatttatgaaaaaagcacaactgagcttcatgcctcttcataggtcacatgttaaaaaaatgatggcattagcatgatccaggggtggaatttttggccctctggcatcaaaaggtgaaacagaggacctgaaaaccctcatagcacatcctctgctagtcagttagaactggtccagagatatggtggtcagtttttaggaagggatgcattgtcaagctggtgggctgtcacatcaaaacttcaaagagggagagggagcctggttttggcctcagataattggctgaaggcgataaaggaatgaatcatctgtttcttgttttctggagttggtttccgcttactccttagggaagaattctggttaaaggttaataaggaaggagcatactgaggcgtaaccaacctcttatcctgtcatggcccaggactttgttttttagggtttctctgtggtccctttggccaagagggttctgttcagttggttgggaggcttagggttttatttttattttgcatgctaatggcatcaagcatcttttcatgtgctcatttgccatttatttattctcttcagtgaaatatgtgttcttgttttttgctcattttctaattggattgtttgctattttattgtgaaattttgagggttcttaatatattctggatactagtccttaattgcaatctctggcttatatttttcatatcttctcaacaaggtctaccagaataagttttaattttaatgaaattcaaattaccaatttttccttttatgaattgtgtttttgatgtcacgtctaagaactcttcacgtagctgtaaatccaaaagattttctcctgtgtcattttgtatttaactctatgatctattttgagttacttttcatataaggtgtgagacttaggtggaaggttttggtttttctgttttttgcctgtgggtgtccaatttctccaccatttgttgaaaaggacttcttcccttcaatgaattgctttttgcacctttgtcaaaaatcacatagatctatttctgggtgttctgttccgttgatcgttgtgtgtgtttctttgtaccatcacacagtcatgactacagaagctgtatgtcttgaaatcacgttcatagcactgtattctttttcaaaattgttttagctgttctagttcctttgctttgtcatataaattttagagtaattttatctccacaaaaaaatcttctggaacttcagtaggaattgtgttaaatgtatattattttggaaagaattgaactactaattatatgacataatgaagtctttcagttcatgaacacagtatgactcttcatttgtatgattcttcttttatttctttcattagcattttgtagctttagcatacagctcttacaggtattttgttagatttacaccaaagtctttctttttatcttttctttctttctttctttctttctttctttctttctttctttctttcttttttttttttttttgttgaaacggagtctcactgtctcgcccaggctggagtgcagtggtgcgatctcagctcactgcaacctctgcctcctgggttcaagcgatttccagccaatttttgtatttttagtagagatggggtttcactatattggccaggctggtttcgaattcctgacctaagtgattcgccctctttggcctcccaaagtgctaggattacaggtgtgagccactgtgcccggcctttttttctttctttttctaaaattataaaaagtgttgttttttaaaattttggtgtccatgtattctagtttgctagtatattgaaatataattgatttttgtgtgttgatttttgtgccctgcagttttgctgaactcatttattagttttagaagttttttgtagattctttcataacttctccataggcaatcatgtcatctgtaaataggtttagtttaattcttgttctctgatctgtatgccctttctttccttttcttgccttattgcactggctagaacttccggtactacactgaatagcagaagtgagaatagacattctggcttgttcctaatcttagaggaaagttttcagtctttccccaataaatataatattaactataggttttttatagatgttctctaccaaattgaggaaatttccctcaatttctagttttctgagaagttttaacatgagagggtgtttatttttgtcaagtggtttttctgtactgatttatgtgatcatatgattttttctttataatttaatgtggtagattacatagattgattttcaaatgttgaactagccttgcatccctggaataaactcatctttgttatgatgtatatatattttttacatattactgaattttatttgctaaggatttttacatctatattcataaagcatattggcctatagtttttgtactgttttgttttgataccagcgtaattctaggttcataaaatggattgggaagtattccctcctcttctatttcgtgaaaaagattatggagaattgatactaattgtttcttaagtgtttggtagaattcaataatgaaggtgtctgagcctggagatacctgtttgggaaattttgaaatcacaataccaatttacttagtagtcatagggctattcaaataatcagttttatattgggtgacttgtggtagtttgtattttttcaaggaactggtttattttacctaacatgtcaaattttgtgtgcagacttgtccatagtattcccttgttatccttttgatgtctacatggtctatagtgatattccctttttcactccagatattggtaattcacatgttctctgtttctttgtcagtcttgctagacatttgtcaatcttactgatcttatccatgaaccagatttgtttcatgaattttcttcattttttattttcagcttcattgatttctgctctaatctattatttccttttctcagcttgctgtgggtttattttgctcttgttttcctaagttcctggagaggtagcctagattgttgatttgaaccttttctcgtatacacatctttttaaatttatttttattaattatgccacattatttttaattatgtacaaagatctaatttgtcaccaagagaccatgtcacctactgctgtgtttggctgccagtctcttgtctccgtcttcagcaatggtgaggcgtatacgtttcctcagggaagagaaattaatggtttgttgcccttgccagtaacaaaaacgttggaaagccaggtggcaaagctgttccattggcatctttcacgtgaaccacatcaaaagatcaagggtgcctctctctgtgggtaatgacaccagttcttcccaagttagcacctccagtcaccatccacaggttaccagtgtcaaacttgatgaaatcagtgatcttgccagtttccaaatcaatctgaatgggatcattcaccttgatggaggggatcagggtagcagatgatgcgagcatcatgagtcaccagatgagggattccttttgtgcccacgaagatttttctcactttgcacaacttgtacttgggctcctcaggtgtaacacgatgtacagcaaagcaacccttggtgtcatagatgagacgaaaattctctcccatctagtcaatgcccatgacatctatgaatccagcagggtgggttatatcagttcgaacgttgccatcaatcttaatgaaccactgcatgcaaatcttctctttttttgtatatttttaatttatttatttatttttgagatggagtctcgctctgtcgccaggctggaatgcagtggcatgatcttggctcactgcaacctccgcctcctgggtttaagcaattctcctggctcagcctcggcctcctgggtaggctgggattacaggtgcccaccaccacgcccagctaatttttgtatttttggtagagacacagtttcaccatgttggctaggatggtcttgatctcttgacctcgtgatccgcccgcctcagcctcccaaagtactgggattacaggcatgagctgccacggtgggccacaaatcttctttatttcacctcctgtcaaggcatacttaagtctgttccttaggaaaatgatgacggggagacactctctcaacttgtggggactgggggatggacgatgaacaaacacactggacaatttatccagcatccagtgatttggagctgctacccactttagatgcttcttgggaccaccagccatggctgcattaggcacggaaagagctcatatatgcatttagccctataaaattccctctcagcactgctttcgcttcatcccaccaattttgatatgtaatcttttcattttcattcagtttaatgtatttttttttaatttcctgagacttcctgtttgactcatagatattttggagtgtgttgtttagtttccaagtgtttggaaatgtttctgtcatttttctattgttaattagaagataagaaaaagtagcttttgccttaaactaaaactcaataatttatatgataaagtatgaattcgtggtacatgaattatacagacgaagtgaattgataattacatatgcagtgattaagtctgctatgcacattaacacaaagaagggaagaaaatagaataaatagatgatatcttaagctttttaagtaaaaattggctgaatgtggtggctcacgcctgtaatcccatcactttgggaggccgaggctggtggatcacctgaggtcaggagttcgagaccagcctggccaacatggtgaaaccctgtctctactaaaaatacaaaaattagctaggtgtggtgacgggtgcctctaatcccagctactcgggaggctgaggcaggagaatcacttgaacctgggaggctgaagttgcagtcagctgcgattgcaccactgcactccggcctgggcaacagagcggaacttcatctcaaaaaacagaacaaaagggaaaaagtaagaatgatgaaaggactaatgaaaaatcattttaggagacaactggaaatattctttcttgtgtgtttgaatatcctcattcctctttgtgtttatttatttatttttattatactttaagttctagggtacatgtgcacaacgtgcaggtttgttatatatgtatacatgtgccatgttgctgtgctgcacccattaattcatcatttacattaggtatatctcctaatgctatccctcccttctccccctaccccatgacatgtcccagtgtgtgatgttccccaccctgtgtgtaagtgttctcatggttcacttcccacctataagtgagaacatgcggtgtttggttttctgtccttgtgatagtttgctcagaatgatggtttccagcttcatccatgtccctaacaaaggacatgaactcatcctttcttatggctgcatagtattccatggtgtatatgtgccaattttcttaatccagtctatcattgatggacatttgggttggttccaagtctttgctattgtgaatattgctgcaataaacatatgtgtgcatgtgtctttatagcagcatgatttataatcctttgggtatatacccagtaatgggctcgttgggtcaaatggtatttctagttctagatcctagaggagtcgtcacactctcttccacaatagttgaactagtttacagtcccaccaacagtgtaaaagtgttcctatttctgcacatcctgtccagcacctgttgtttcctgactttttaatgattgccattctaactggtgtgagatactatctcattgtggttttgatttgcatttctctgatggccagtgatgatgagcatgttttcatatgtctgttggctgcataaatgtcttcccttgagaagtgtctgttcatatccttcacccactttttgatggggttgttttttcttgtaaatttgtttgagttctttgtagattctggatattagccctttttcagatgagtagattgcaaaaatgttctcctattctgtaggttgcctgttcactctgatggtagtttcttttgccgtgcagaagctctttagtttaattagaccccatttgtcaattttggctttcgttgccattgctttgggtgttttagtcatggagtccttgcccatgcctatgtcctgaatggtattgcctaggttttcttctagggtttttatggttttaggtctaacatttaagtctttaatccatcttgaattaatttttgtataaggtgtaaagaagggatccagtttcagctttctacatatggctagccagttttcccagcaccatttattaaatagggaatcctttccccatttcttgtttttgtcagatttgtcaaagatcaggtggttgtagatgtgtggtattatttctgagggctctgttctattccattggtctgtatctctgttttggtaccagtaccatcctgtttttgttactgtagccttgtagtatagtttaaagtcaagtagtgtgatacctccagctttggtgattttgcttaggattgtctttgctatgcaggctcctttttggttccatatgaactttaaagtagttttttccaattctgtgaagaaagtcattggtagcttgatgcggatggcattgaatctataaattaccttgggcagtatggccattttcacgatattgattcttcctatccatgagcatggaatgttcttccatttgtttgtgtcctcttttatttcattgagtagtggtttgtagttctccctgaagaggtccttcacatccctagtaagttggattcctaggttttttattctctttgaagcagttgtgaatggcagttcactcatgatttggctctccctttgtctgttattggtgtatataggaatgcttgtgatttttgcacattgattttgtatcctgagactttgctgcagttgcttatcagcttaaggatctttggggctgagacaatggggttttctaaatatacaatcatggcatctgcaaacaggaacaatttgacttcctcatttcctaattgaataccctttatttctttctctttcctgattgccctggccagaacttccaacactatattgaatagaagtcgtgaaggagggcatccctgtcttgtgccggttttcaaaaggaatgcttccagcttttgcccattcagtatgatattggctgtgggtttgtcataaatagctcttattattttgagatatgttccatcagtacctaatttattgagagtttttagcatgaagcgttgttgaattttgtcaaaggccttttctgcatctattgagataatcatgtggtttttgtctttggttttgtttaatgtgatggattacatttattgatttgcgtatgttgaaccagccttgcatcccagggatgaagccaacttgctcgtggtggataagctttttgatgtgctgctggatttggtttgccagtattttattgaggattttcacatggatgttcatcagggatattggtctaaaattctccttttttgttgtgtctctgccaggctttggtatcaggatgatgctggcctcataatatgagttagggaggattccctctttttctattgatgtgaatagtttcagaaccaatggtaccagctcctctttgttcctctggtggaatttggctgtgaatccatctggtcctgaactttttttggttggtagactattaattattgcctcaatttcagagcctgttatcagtctattgagagattcaacttcttcctggtttagtcttgggagggtgtatgtgtccaggaatgtatccatttcttctagattttctagtttatttgtgtagaggtgtttatagtattctctgatgatagtttgtatttctgtgggatcggtggtgatatcctttttattattttttattacgtctatctgattcttctctcttttcttctttatcagtcttgctagcggtctatcaattttgtcgatcatttcaaaaaaccagctcctggattcattaattttttgaagggttttttgtgtctctatctccttcagttctgctcagatcttagttatttcttgccttctgctagcttttgaatttttttgctcttgcttctctagttcttttaattgtgatgttagggtgtcaattttagaactttcctgctttcttttatgggcatttaatgctgtaagtttccctctacacactgctttgaatgtgtcccagagattctgttaggttgtgcctttgttctcattggtttcagagaacatctttatttctgccttcatttcgttatgtacccagtagtcattcaggagcaggttgttcagttcccatgtagtagagtggttttgagtgagtttcttaatcctgagttctagtttgattgcactgtggtctgagagacagtttgttacaatttttgttcttttacatttgctgaggagtgctttacttccaactatgtggtcaattttggaataagtgcgatgtggtgctgagaagaatatataatctgttgattttgggtggagagttctgtagatgtctattaggtctgctaggtgcagagctgagttcaagacctggatatccttgtttactttctgtcacgttgatctgtctaatatttacagtggggtgttaaagtctcccattattattgtgtgggagtctaagtctctttataggtctctaagtacttcctttatgaatctgggtgctcctgtattgggtgcatatatatttaagatagttagctcttcttgttgaattgatccctttaccattatgtaatggccttctttgtctcttttgatctttgttgttttattagagactaggattgcaacccctgctttttttttgttttccatttgcttggtagatcttcctccatccctttgttttgagcctatttgtgtctctgcatgtgagatgggtctcctgaacacagcacactgatgtgtcttgactctttatccaatttgccagtctgtgtcttttaattggagcatttagcccatttacatttaaggttaatattgttatgtatgaatttggtgctgtcattttgatgttagctggttattttgctcattagttgatgcagtttcttcctagcattgatggtctttacaatttggcatgtttttgcagtggctggtaccagttgttcctttccatgtttagtgcttccttcaggagctcttgcatggcaggcctggtggtgacaaaaatctctcaacatttgtttgtctgtaaaggattttgtttctccttcatttatgaagcttagtttggctgggtatgaaattctgggttgaaaattcttttctttaagaatgttgaatatcggcccccactctcttctggcttgtggagtgtctgccaagagatccgctgttagtctgatgggcttccctttgtgggtaactcgacctttctctctggctgcccttaacattttttcttccatttcaaccttggtgaatctgacaattatgtgtcttggggttgctcttctcgaggagtgtctttgtggcattctctgtatttcctgaatttgaatgttggggaagttctcctggataatatcctgaagagtgttttccaacttggttccattctccccgtcactttcaggtacaccaatcagacatagatttggtcttttcacatagtcccatattttttggaggcattgttcgtttctttttactcttttttctctaaacttctcttcttgcttcatttcattcatttggtcttcaatcactgataccctttcttccagttgattgaatcagcttctgaagcttgtgtgtgcatcacgtagttctcatgccatggttttcagctccatcagatcatgtaaggtcttctctacactctttattctagttagccattcgtctaatcttttttcaagttttttagcttctttgcgatgggttcgaacatcctcctttagctcggagaagtttgttgttacgatcatctgaagccttcttctctcagtttgtcaaagtcattctctgtccagctttgctctgttgctggcaaggaactgtcttcctttggaggagaagaggcactctgatttttagaattttcagctattctgctttggtttctccccatctttgtggttttaactactttggtctttgatgatggtgatgtaccgatggggttttggtgtggatgtccttcctgtttgtttgttttccttccaacaatcaggaccctcagctgcaggtctgttggagtttgctggaggtccactccagaccctatttgccttggtatcatcagcagaggctgcagaacagcaaatactgcagaacggcaaatgttgctgcctgatccttcctctcagatcttcgtctcagtggggcacctggctatatgaggtttcagtctgcccctactgggaggtgtctcccagttaggctactcgagggtcagggacccacttgaggaggcagtctgtccgttctcagatctcaaactccgtgctgggagaaccactactctcttcaaagctgtcagacaggtacgtttaagtctgcagaaattggctgctgccttttgttcagctatgccctgcccccagaggtggaatctgcataagcaggcaggcctccttgagctgtgataggctccacccagtttgaacttcccggcactttgtttacctactcaagcctcagcaatggcagacgtccctcccccagcctcgctgtcgccttgcagttcgatctcagactgctgtgctagcattgagctaggctccgtgggcatggaaccctctgagccatgcgcgggatataatctcctggtgtgccatttgctaagaccatttggaaaagtgcagtattagggtggtagtgtcccgattttctaggtactgtctgtcacggcttcccttcctaggaaagggaattccccgaccccttgcgcttcccgggtgaggcagtgccccaccctgcttcggctcacactttgtgggctgcacccactgtccgacaagccccagtgatatgaaccctgtaactcagttggaaatgcagaaatcacctgtcttctgcgtcattcacgcttggagctgtagactggagctgttcctattcagccatcttggaacctcctctcttctttgtgtttaaatacatattgcacagttaaattttcaaaagcaggtggcctgtaagtttgatcatttggaaataccagacttttatgcttccagttcttggtctagaaattaatagcaaattttttttcctaaatcttagtcttgatctaacctagagtacttatgagtaaacaagtggtataaagtggtataatctgttcctttctattctgtcttctgtctctgttttgctagccttcctcccactctgtacttatgatcattatttgactttcccaaagggtagattttagaagctgtatatggactcctagaaataaagcaattagaatatgttagaaatgaatccagccatgccactttatttctataaaataacaattccaagataagaatgactttctcaaagaattgagaaatattcattccagtatgtatctcttggtgcctaggatgtgcctagtacttgttgcatactgtagagattcaataaatagaagagtcaactccagtcccttgcatcactaaaatctcactggggaaatagacacgttctacagaagaaactgggagatagatacttgtgtataataatataatctagtaacttttaatttggttcctcaaaaattgagcaatagaagcagtaattttttaaaaatctatagtgttaacagctgaagtgtaatggaactcatgttccttcctgtgtatattccattttgatggaggtgctaatagttggagctaggagtggggtatgtgtattctttgcactgtatgatgtggcttctttgtgaagggagacctgtgattttctgaatacatggcctgtatcctctcaatggccagtgagacattctcgaggggatgggtatcaagccactctgtgaatgtgagttcttactccatctggtagaaatcacagtagcatggaaataataccacactgtaatttccagcaaagaaattttggacagttatcagagccttactttttcattcatcaagtcagaatgttgacagtagtctgtctgtctgacagggttgttatgggaactaaataaaataatagaagcaaaaactcttagttttctaagattttaaagatgttataggtatgttaatgagtttttatatgaccctacacagatgcccaatttctgatgctccctgaaggccataccaactcctgttacattgtctattgtcagccagggacgattttccatctctgctaggccaaagagaagccagccaatgagaattagcctgtaggcctagcagtctcaagcatagaaccacaactgagatctgaagatagctggctgatcttagatggcctcagtggggctggctggctggatgtgcaatttttgttcactggcttagcttccctaatgattgttccatactgaatctcagcctgcctccacctcttccttccattcattggcttcattctactctagagacactgggtttaatctggggctctacctgcaaagtaagcattgcttccaagccagaactgttttagccctaggtacttgggcttacttgaggaatgaaatcctttggttagccagcaacctataatgcctaaactacatgttgtaatttaaatctacaggtggatatttaggagtagaagttgtcacaggtcatgggatgaggagtaaagcttagtaagtttattttcttattttgtttttgttttttatagagatggggtcttgctttgttttgcccagagtggagcatagtggcacaatcacggcttactgcagcctcacactcctgggctgatgtgatccttccacctcagcctcctgagtagctgggactacaggtacatgacactcccattcccagataattttttaaatttttgatagagaaggggtgttgctatgttgtctaggctggtcttgaactcctggcctcaagcagccctcccacttcggcctcccaaaatgctgagattccaggcatgaaccaccgcgcccagccagcatagtaaatataaattaaggtgtttttatgtccccactttgctactttttgctttctgatttcaaaggacacacccttaagtatgaacaggttgtttcccaaaagttctttgcttagaacttagactgcattttcccagagagcagcagtggaaatcatagctgcattcccaggccagcccccaaaagtctgttttatactaatgcattataacattttactgataatgagacttcggctcctcatagccacatttataatattatttctctgagaaaaataattttgagtcaagttcagatactgtggaagtatgcctccatgaagtggagagaaggagaagatggaaaaaagggggtgacctttgggtagtcaatgcggcaggcgtatctgaataaattagaaaaatattcctgaaccctaggaacctacgtcttgatgctgtcttagagaaggcgcctgtccaggccagttgctgcacctctgttctgaactgataacaagaagggcagttgcagggagattatgagcgtcatatggcaaagtctttcatgctaatctgtgtacctttttggttatgtcctaaactgtttgcaagtcagaaactgattatataatatttggtgtatgtatttcttatttttaaaaaacatgctaagctatgtcattgttactgtattaaagtgtgaataacctggagggcaaaaacaggtgttggctgaacccttcctacacagcctgaagaccacactatggttggctatctcttaaatacttaaataatgttgttggccaacattatgtataagtagactcatctcatttctaagttcatgaacctttggtatatcactaaagacaattaagaccttttgagatacgcacaagacttttgtgctctttaatttatttaaggaagacagttttctactttaatgcttctgtgtagaaatgggctttactgttattcacaatagcagcgacctggaatcagcctgggtgccctatagcagtggactagattaaaaaaaatgtggtacatacacaccatggaatactttgcagccataaaaaatgaaatcgatggcctttgcaggaacatggatgcagctggaggccattattctaagtgaattaacgcagaaacacaaccaaacaccacatttaatcacttgttagtagaagctaactactgggtacacatgtacataaagataggaataatggacactggaaaccccaaaagaggggagggagggagcagggcaaggttgaaaaactacttacttggtactatgttcactgttgaggtgacagcatcagtagaagcccaaacatcagcatcatgcaatgtgctcatttaacaaacctgcatgtgtatcccttaaatctaaaataaaataaagaatctaaaataaaataaaatttgttttaaaaaagaaaacagccaggttgggtacactgttatatagtagttctaatgtatttttttaaacagagctcttttcttgagctttgataggaatatttatatcatataaatataaatcatatatcttgagtctttttgtagctccgattgaacacaaattatttgcccccaaagaggataggttctgcagtgttccagcaagatgccagtagataatgggtaagttaaggttacactcagcatttgtgaatggtgattgtcttcacaaaccctggataagtatctagcttcaccttttttttttgtttctttgtttttttgagaaggagtctcgctctgtcgcccaggctggactgcagtggcacgatctcagctcagtgcaagctccgcctcctgggttcacaccattctcctgcctcagcctcccaagtagctcggactacaggcgcccaccaccacgcccagctaatttttttgtatttttagtagagacagggtttcactgtgttagccgggatgagtgtcgatctgacctcgtgatccacccgcccttggcctcccaaagtgctgagattacaggcgtgagccaccgcaccagcccagcttcaccgttttttaaatgtaagtttgaattccaaattaaccatgtaacaagccagtgaaataaggcagtgatggatcttgtgctgtatctggcccttatctgtagattttaacatcctttgtggttgctggttttagtcttcgaagaatgtttgctcttgtttcatttctctagtttgtcactagttcattttggagtgttcctttaaacagtcaactgtataatataaaaggaaaataaaaacactttagttatacagaggttaaaaaactcacttgcataaatagtggacattttaaagtaatatactaacaattggaataataacaattcagtactgaacaaatgtgttacatttaaccatccataagtatataccagtgtgccctctgactaaagctgctgtaccctgcctggctgttactgtcttccttacatatgtgtgttccattggaaacagaaggtttgcacagtccagttgaccagattggaacacacaagtgtcccccttcctcagcctctgaccccctcccctgtgagctggtcatccagttacccaggcctttgcttgcctgtctgcaagttccatggcagcataaagaaacaattgtatgttcgtctttgtaggggtgatcctgataattcgtggggccttttttaaatgcaagtgttgttgagaagacaggagtctcaggtatggcttgacccagaagtgtcccctatgcctgttggagtgggtttaaagatgagaacaaggggcagtagcatgtggtaccatgttccttgcttcctttgtgaagaacatgaagtgaaataaattatgaaataattggtaggaaagactctatgtgattgcatcttgtatcttccattacccaaatccaagttttctctttctgagcaggttgactttaacaaacacaaacagaaactgattgttggtctcgcttttaagtaatttgtgaaagacgacctgctgataagaataacattaacataatgttatctgtttaaagtgaaattcttattccctttgggaaaacagacatagataccctaaaatggtaaaatttccttgcttatgttgataggccacacctgacaggtgtgcttacattgacaagccatacatcttatcaaaagtggtcattttgttggctgaactaaagagcatttcatcattttccctgatattaactctttgactatgagatgcaactgtcagtgtgaaacttggcatttgcccagctcttctgataggaatggctgttctctcaccttgtgggatatttttacaatcttgactctcttttccaatatcactttcacatatagtgctggtaggccaagggaagacttctcctctccactgtacagattcttgggcccagcatcttttctggaatccccaaactagtccctcaccagctccatccttgtgtctttgagtactgggtagcctggtgtgcccttttcccttcgtcccgcctgcagctgtcctcttgcagctggctgttgcttcaagtcctcagttccctgaaaagccttccagtttctgcttataagttcagactgtagaagcactccaccagaatctcctgggtttgctcaggtacaaaagttccagaaacccagtgtgactgcttttacatgttcccacagaattacatgttcattgtgcctgtctggctgatgatgattttttcttcttttactttttttatttttctaagttatctataatggccatttatgactttcataatcagaaaatacttcttttgccttgctgttctcctatccttcctttatatggatcgtagggtgatctagccatttttaagtccatagagactcccacattttgccactttaagagttagcatctgtgtgtattttcctccaaagacatacacaattcactttaaatggtcccttctgtgctctgctgcacaatgaaactgtttcattcttcggtgaccccagggcctcctttctgggtgtagcgttagattacctaaagcagaggtagttcacacctagcttcttcattccagtttgccaggttgtcagcttcctcagcttcaaacttgtggtaataatagcatctccttcacagagccaccaggatgctccactggataaagcagcagagtgcctggcacaatgcctgccatcgaacatgagtggcctaacatttttgctgttgttttaatgacttaatgacttcctccatggcgcatatgttcaagtgagacccaggttgtactgccagagtctatgaagtatcatgtctgtgtggcagcatagcaggtagaaaagtatttctcaattagagtattgtatttcttttggagtttccacctggagtctccaagcagaactgatttaacatttaatcccaaacctgttcagtaccttgctcatttgcttcttcctctgaactgtgtccccttaagccaggcttcaggacgcctccctcaaccacttgaagaagctgccagcagcctctctacactgtgtccagatttcacatacttttctcagcccgctgcagttgatctttagctgctacttctctgctgagattggctgctcagcagtcagtctctgatcaactgacttttaaatccattggctttttccagcttgcatcctttttgcctcctctgtacctttgccatttctgacttgctagtctagctgcagtgcccacccctgcccctcctgggatcctcccccatctccctctggcagctttctcaccctcttccctgggtcccttgtaccatctctcccactagctgcccttcttatgcccatcctatacgtaagggttactatgggtcgacatatagccttgtataacatgtacggtaactgacacattatatctcgtacactgatacaaagaagtggttttgaaataatactgagaagtggaatactgaattttgtttgtaaagcatgactacaaaccacaaaatatgttcaaagaaagaggtgagggaattacacaagtgttcggctgtctgccttgtgattttttcctccttttccaatctttccaagtttttataatgttcacttcttttataaccagaaaaagatttgtttctcttgtctcttttatgcttcctttatatgtatcttagagtgatcacatccacttataataatttcacctagttaacagctatagccctaggcgtgattttcttctcctcttgccatttggcattatataatgtagatttccccattccttggatggtatttgtgaccatcttattgatgtcataacatttcattggtttaaaaaggtatctaattttaaatagtttttgttgattttaatattacctgtgtaacagttggtcagtggtggaggttgtgaattctcagttttgaggctgaggacatcagagtccttggtttccttcaggggtgaaatgagaacaatggacatgctctggggcaccggacagggcattgtctgaagggcttgcctggtctttgtgaaaggatttctctctcctctgcaccctcggcccccatggaggcaaggttcactggtaggaccaaacacacagggcgctccacctcaaagtcagcggagaaaagctgagagatgtcattgtcacctgaggtgactgcctttgctgacgctgttgctgctgggtgtcagaaggctgaagactgcgcgcagtccagaatcagctgcccttgtggttgccgctgtttcattttggcagcaaaggacttagctttccccatttgtgaatgtgtatagatttgtttaaagttatagggtgtgggaagaagggaagagaacagggaagagacttattcctactcctgtgccactgtcccacccttcatccccgccaaacttcacccctccagcttctcttactcatccagcctgaatgcacgttcagtctagcctttatctctctcttgagaaagttgctgaatgaaggctagaaagaatttcttaactctgttttgatgtatgacaattttttttggcaaatatgcttcccagtatttagaatcactgggctaattagaaacagtactttactcttttctcttttttttttttttttgtcaatgaaggaaagaaataaggtagtcttcatcaaggactactacatgttttgttcattaaattctcactaaagcccactgagggagtgagggaggcagctcagatcacacaggccctctttttttcttttttgaaacatggtcacaccctgtcgcctaggctgaagtgcagtggccccgtcagggctcactgcagcctcgaactcctaggctcaagcgatcctcctgcctcggctcaccaagtagctgagattaccagcgtgcaccatgacacctgactcatttttcttttttttttagtagagatggggtctccctatgttgcacaggctgatctcaaattccaggattcaagctattcttcgcctcagcctcccaaaatgttgggattatacaggtgtgagccatcgcacctggccccacatgggccctcttgaaacccaaatctgtgggattccaaatcccatgttctccacttggccacatcacttgtcactgtgcctcaggttgtcatgtaccattgtgcccctatcgactgtcacatgcgaggataagcctggctaggtgctagtggttaagaaaataagacttagaatctgcaagggtccagatcgttggcatgctatcagcttggtaagaatactcctaaagatggaactgctcattgtctctaaggtgatctaaattttattctaattctgggagaaactgggcaagttttcagaagtttttaagtcaggtatttgagttataggacatctgtgtgggattaatacctatgaataattttttagttgctcttgttggaagtaagagagaggaaatgtctatttaacacaatatctgaccagtctttcagctacttgattactttcctgttcagtctgaggttaaatgtcttttgatgtagtaaaacttataaagtgtgaagaagaacttaaatccctttccttatacttagccattatttagtccctttgggaaatcatatttaaatatttgcttcttttttcttttctttttttttttttttttttttttttgaggcggagtctcgctctgtcaccaggctggagtgcagtggcannnnnnnnnnnnnnnnnnnnnnnnnnnnnnnnnnnnnnnnnnnnnnnnnnnnnnnnnnnnnnnnnnnnnnnnnnnnnnnnnnnnnnnnnnnnnnnnnnnnnnnnnnnnnnnnnnnnnnnnnnnnnnnnnnnnnnnnnnnnnnnnnnnnnnnnnnnnnnnnnnnnnnnnnnnnnnnnnnnnnnnnnnnnnnnttttacagaatttagtagttaggctgggtgcggtggctcacgcctgtaatcccaacactttgggaggccaaagcgggtggatcacctgaggttgggagttcaagaccagcccagctaacatggtgaaaccctgtctctactaccaattaaaaaattagctgggtgtggtggcacatgcctgtagttccagctattcaggaggctgaggcaggagaatctcttgaactcgggaggcagaagttgcagtgagcagagatcacaccactgcactccattctgggcatcagagcaagattccgtctccaaaaagaaaaaaaaaaaaaaagaattcagtagttaaggaaattttcatcattcattattacactgcgcttttctttaaaagtagactagttttaaaaataaaatagtttgatatatataatacatcatttcatcatttttcagataaacctactaaaaatatttccttgttcaacttgagcttattattttgcagttccttattgcaagaagtatcaagcaaaactgggcacagatttattttattttaggcttattgcctttgtgtaaaagaaattcattgacggccaggcacactcgctcatgcctgtaatgccagcactttgggaggctgaggcgggcagatcacctgaggtcagtagttcaagaccagcctgaccaacatggagaaaccccatctttactaaaaatacaaaattagctgggtgtggtggcacatgcctgtaatcccagctgcttgggaggccgaggcagaagaatagcttgaacctgggaggcagaggttgcggtgaaccaagatcacgccattgcactccagcctggacaagaagggtgaaattccgtctcaaaaagaaagaggagaagagagaagagagagaaattgaagaaggctgacttcctgtttgggggacatgcatgcattgggcagtaaagagaagcaacattgagttagagtacagagtgatgtttacactgagttctaaagtatatctaaggaaattctttttattttaacattttaaaagtgaaaataaagaaccttgtaccattctaggcttttagaaacattttaaataagtttaaatattaccattaaaattttatttctgtggaattcttacagatatgatacagaaaaaaatagtttataccttttaaaaatgtaaaatatccctaattatcccactattatatttaatacaactacaaatatttaaaaatattttatagtctttactcatttgtattctttttttattgttgcaattaaattagccatgccattttacattatgcttttttacttaatattttattaaacatttatgcatgattatatagtccttatatactattcaaatatttacataatatttcttcatttgctgtctcaaattatttaaacaatcccatattgtttaacctatattaacaagattttgatattaaaggtttaaaaatagaaaaaataagacaacaaaggggacattctactatgtggctgaaaactatataaccaccatataccaggtatattaatagttatggataagaatgtgatatttatactcatatatatatatatatatatatatatatatatatatattttttttttttttttttttttttttttttttggagatggagtttcagctcttgttgcacaggctggagtgcagtggcacaatcttggctcaccacaacctccgtctcccaggttcaagcgattctcctccctcagcctcccaagtagctgggactacaggcatgagccaccatgcccagctagttttgtacttttagtagaggtggggtttctccatgttggtcaggctggtcttgaattcccgacctcaggtgatctgcccgcctcagcctcccaaagtgctgggattacaggcgtgagccaccgtgcctggcatttttttctttcttaaacttgaaattttttccctcctaaccttaaatgatttgtctgaaattccatattcagtcacaggtacagatctacttcccttttcttccagttggctaataatgcagctttaagtgagtagtcatagaattgtaggactagaaaggacttataaagtccagcttcttgcctccagacagtagggatactcagtcactgagtatctttttttatttttgaagttctcctgggaaagagatttcataactctatctggaagcactgttacttttttattttttttattttttgagaaggagcctcgctctgtcgcacaggctagagtgcagtgacatgtaaatcaatcttaaatgacatttactatagtttgagctcctttcactcagtcagtagttactgatcacctgctatgtgcaggacacaacattaggcaccgagaagtacacaaatcaaggtttcagtcccaaagaacaggtgagcctcttgtggggattgaatggccttgaatatcactttaaaatctttggactttattctgagccatcacagatatcttagtgtagatgtgatactgtggaagtgatattttaagtagaattaatgtgtggttctgggaagcaaggttttatttatcattcattcagcaaatatttggtcaaactctaatatatataagtcatcaggttaaggaatatggaacagataaataactagaaaacacaatttgttctctggttggaagattttaaatatgcaagtacataagtaatcacagtataagatagggagttctgtgcagataatagagacaggtggggaggtctttttttctggttgcatttaattcatgagagcaggaaatggggattacactggttttggaggataaactatatatatatatatattttttttctttttttagttttgctctcgttgcccatgctggagtgcaatggtgcgatctcggctcaccgcaacctctgcctcccgggttcaagcaattctcctgcctcagcctcccgagtagctgggattacagccatgcgccaccacgcccggctaattttgtatttttagtagagacggggtttctccatgttggtcaggcaggtctcgaactcccgacctcagttgacccacctgcctcggcctcccaaagtgctgagattacaggtgtgagccaccccgcccggcctgaggataaacaatatttctgaagaatgtgaattctggactctgccattgcattcaaagatcctgctactagaaaaacattttcattcagactccaaaagctcagttactcagagaagtgaggttagtatggtaggaaggggctggcaattaggagacaaacttatcatcagtgctttgccattaacagaccgtatgtgtgacctttggacagtgcactaacttgaacttttgttttcttcttttcttttcttttctttttctttttttttttttttttttttttgagacagagtcttgctttgtcacccaggctgaagtgcagaggcataatcacagctcactgcagccttgacttcctgggctcaagcatcctcctgcctcagcctcccaagtagctgggaccataggcatgtgccaccacacctagaaatgtttaaataatttttatgtagagatggcggtctcatactggctttgaactcctgggctcaagcaaacctccccgccagcctcccagagttctgggattacaggcatgagacatcactcctggcctattttcttattttcaaaatgtataacatgccttgatgattttttaaggcattttcccactttatagaaatatatattaatatatggagagtttggtagttacgagcatgaatctaccttgtttgtgtcctggatcaaccattcctcatctctttgattaggctcattaatctacctcggtttatctgtaaaatggagatcttcgtaatacacttctttatagggccaatatgaagatgaaaagtgttagaacaatacttggcacagactaagtactcagtaaatattagttgttattggaatggtatcagggtagatggcagagtagaaagctccaggaaattgtgccttcaccaaaacaattgaattaattgtgtaaggaactgtgtgagacaactattttggaactctgagtatagaagaacacttgtagcatccaggggcaaagtctctggtaaatttcagaaaatcatggtcaagttcagctttcacattgtagcagctaccatcttccaccctcaacctcatggcaggcagctgtcagtccacaagccttcctggtgcagcacactggagccagggtgagcaaagaggattttcacgtatcagaagagaaagagaaaggggcagaaaaaatatttaaagaaataatggagcaaaacatccccgccaaaaggaaagaactgaatatatgccaccatgagctcaatgtactccaagcaagataaacactatgagattaatgccaagatatattagagtcaaactgttaaagcccaaacatggagtggagagcaggcataaatccttctttatcagtaatcacattgaatgtaaatggataacaattaaaaatggaaaaaatgtaaatggatgaaattcaactatgaaaagatagagattagaagattacatttaaaaaaacaggattcatctatatgctgtctacaagagacatactttacatatgaggacagaaggggttgaaagttaaaagatggaaaaagatattctatgcaaatattaactaaaagagaaccaagataggtatatcattgtagataaaataaactttaaatcaaaagcagttacaagagataaaggacactatatattaattaaaaggttcaatacagcaagaagagataacagatatatatacacctaacaaaggtgccccagaatataagaagtaaaaattgacagagtcaaagggagaaatagacagttctaaaataataattagagacttaattactcccactttcaatagggattagaacaactagaaagaagatcagtaggaaatattggacttgaacaacactgtaaagcaattaaacctaacagacgtgcagaatattcccacctaacaacataatacccattcttgtcaagtgcacatggaacattttccaggatagattatttgttaaaccatcaaacaagtcttaataagtgaaaatattcaggtcttacagagtatattttccagttacaatagaataagagaaggatatccatttttaccacttctgttgaatattgtactggagtttctacccaggacaattaggcaagaaaaggaattaaaaagcttccatgttggaaaggaagaagtgaaattttctctattcacagatgacatgatttcaaatgtagaaaatcctaaggaattcactaaaaagaactgatagaagtaatgagcttagcaaggttgcagggtacaaggtcagtatagaaaaatcagctgtatttctgtacaatgcaatgaacaatctgaaaatgaaattaaaccaattttatttacagtggcaccaaaaggaataaaatacttagaaataaatttaataaaacaagtgtaatacactctgaaaactacaaaacaatgttgaaagagattaatagggttaagaaggcaatactcaccaaattgatctgtagattcaacatgattcctattagaatcccatctggcttctttgtagaattaacaagatgatcatgggaattcatatgtaaacccaagagacccagaatagccaaaacagccttgaaaaagaagaaagttataggactcaccctttccaatttaaaaaagtgctacaaagctacagtattcaagacagtgttgacataaagataaacatgtcgaccaatgaaatgtattagaaagccctctaaacccctctatggtcagttgattttcaacaaaggtaccaagatcattcaagggggaaagaataatggtcttccacagatggtgctgggactaccagatatccacatgcaaaataatagagatctttaccttaaacatatacaaaaattaactcaaaatgaatcagagacctaaatgtaagagccaaaagtataaaactcctagaataaaacacaagaagaaatcttcctgaccttgaatgtggtgatggattcttaggtatgacactaaaagcataagcaataaaaggaaaaaaatattgcacatcatcaagattaagaacttttgtgcttcaaaagacactatcaagaaagtgaaaagttaacccacagaatggaggggagtatatgcagatcatatatttgataagagagttacatagagaatatataaaaaattcttaccactcagtaataaaaagacaacctaatttttaaaatgggcaaagaatctgaaaagattctttctgcaaagaagatatacaataagagtaatgattaagatgaaaggttttagccgggtgtggtggctcacgcctataatcccagcactttggaaggcctaggtgggcggatcacaaggtcaggagttcgaaaccagcctggccaatatggtgaaaccccgtctctactaaaaatacaaaaattagccaggtgtagtggtgggcgcctgtagtcccagctactcgggaagctgagacaggagaattgcttgaacccgggaggcagaagttgcagtgagccgagatcgcaccacggcactccagcttgggctacggagcgagactctgtctcaaaaaaaaaaaaagttgaactcgtagaaacagagtagaagggtgtaccagggcttgagggtgggagaaatggagagatattagttaaggggtccaaactttcatttataagatgagtaagttctggagacctaacggacagcatggtatctacagttaatgtatatttgacatttgctgagagagtggatcttaagtattgtaagcatacacatagaacatgtgagtagatggagatgttaatgctgtggcagtcatttcacactctatacgtacttcagacatcacattgtgtccctcttatatatatttgatttttatttgccaattttatttcaataaagctcagggggaggaggaaataaaataataatgaaataaaatgaaaaatagaatcatatatatcctacttccctcccagaattgttacaagaatcaaatgaggtaacttaaggaaagtaatttataaaatgcaaatttaattaatatataaaatacaaacattatagcaataagcataattgccattattaaacattatactagtgccgccttattcaaggaggatatattccaatacctccagtggatacatagtactcaaccttgtataaactgtttttgcctatgcatacatacctgtgataaaggttaatttataaataaggcaaagtaaagattaacaacaacaataataaagtagaacaattataacaatatactgtgataaaaattatgtgaatgtggtctcctaaaatatcttattgtactgtgctcacctattttcgtaccttggtgttctgaggataactgaaaccacaaaaaacaaaaccgtggatgagagaacactgtattaaataaatataataacattatattatgctttccctcttctaatagatcaagcttacttttaagttggttctgttgtcatttctaaccattggtgtaccaagtaatctcttgtatgtagtgagtgctcagtaaatgtactagaaaaaaatttaactgaaatagtgtaatatttgatataatataaaatatttaggtagtattttgttttcctgagagggtaccacagactgttttgaatgtcatatcaataatctgtttattttgataaaggtaacttagataatccttaccattgtatttatagcccagcacagtgatagtttacaatcttaacatacatctatctttaactatcaattttaggaggccaagaattcagtcgataagatattatcagtaataaactggtcaaaaaaaggtgtaaaaacttgtatgagggccgggcacggtggctcatgcctgtaatcccagcacttcgggagttcgaggcgggtggatcacaaggtgaaaagatcgagaccatcctggctaatgtggtgaaaccccatctctactaaaaatacaaaagttagctgggcatggtggcggacacctgtagtcccagctactcgggaggctgaggcaggagaatcacttgaacccaggaggtggaggttgcagcgagctgagattgcgccactgccactcctgcctggcgacagagcaagactccatctcaaaattaaattaaaataaataaataaataaataaataaataaataaataacttgtacgattcctgtattgtttcctttgaagatgtggtttgcaattgagaaacatttttgagacagaaataaaagatgaaaaaggcttccatcggatgggtctgtttccctcttgagctctcccacacattgacacagcatctctcatggaccaggggcagtgccgctgcctgtccccaaggaagctccctaagcccagtgcaggaagagaagcgtgctaaataagataccctgcagacaagagaatgacatcgttgatgaaaacaaatttttctatgtttgtctttattttaacaaacagcattttgggtttgttaagtaaaaacccatttacattaatttttcaggtaataagtttaagacaaatatacctaaagtataaaatgacttgaagttctatttaaaatgagttgtctaaattataaatcagaaagtctacacagtgaagttacgagtgaaaagtccacttggtgtttgtcctgattgtttttcggcaggcttagcacagtgagcccctggagagacttggaagtgtgtgtgggcacagtaagtgactagttaaaagtttatgtttcaagttagtgttaccaaacttggaggatgaagatttgaaagtataatggcctagtactgacttctctgtagccacacactttaccttcaggcagggcacactcagtagtcctctgtgataaggcaggaaggtcagagtatattgaggggtctgtcatgagcgcagtagctgcccagcagccctcaggccctgcaagatacccccctgctgagccatcacatttgtagggggcaacatgatgtcggagaccagggccaggtctatgttccatcctcatcagcctggaggaaggtgacaggagtaagttggaggagaagcaaagtctgggaggcttcattcctgccccggatgttttcctctttggactgcagcctctggtagctgtagagatgcagttttcctgctcaggccaccagtctcacttttggaagaccaataattgtgcatatgtttctgactctgcttattgtagtgtttctcgtaggcaggtagttgaatctcaccttagggtattattttgatgttagcatatgatacacgccctgctatagttctgctgtgccttggttgctatgtgacattctgaggtttttgctgtccttgttgccctaatttctttgtttgtgaaaataagcagcgtcattcaagagaaattatgcttcctctgtaaaacagacttttaatccaagaatgttcctactgctttaagaattcaaagcattgtcttttaaccagccttgcacatttatctattttagctgaggtttgttctgtttgaagctaaactaagcttagtgcttgcctctatgtggtaataattaaagttgggctttatgatttctgaggacaatatttcttggtcttactttgttgattcttttatgtttgtaatgtcagtttcatctttcttgtggtcattgtcttccaaaaatccttttattgccagtcagtgtgaatccttttgttctgaatgcctacataaatttttgactggaagttcaatttaggatattttgtggattttagaaaaacacttttcaattcatttgatttgtttttttccctttttattctcagttgcattattcaaataatataatctgttcttatcttgtgccatctccagttttacttctgcttctacaaccttgtgacatcaaaacatccaaccattaaaacatgttctacaggccggatgtggtggctcacgcctgtaatctcagcacttttggaggctgaggcgggtggatcacttgaggtcaggagcaagaccagccaggccaacatggcaaaaccccatctctactaaaaatactaaaaaataaaaataaaaaaaaataaaaacaaaaattacttgggcgtagtggcaggcacctgtaatcccagctcctctggaggctgaggcaggagaattgcttgaacccgggaggcagcctgggcgacagagtaagactcgatcttgagaagaggagaggggaggggaggggaggggaggagagggaaagttttacatatgaacagtgtcaacttttatcaaggcaatctgtattatggtgaccattactagaattcctttttataccttttaaagtacactattggctttctgcttttgctgatttgtgatgatctgaatctatttacagattattattcatgtgaataattactatgatgtttcttgatttttttttaactttgtcagcattttcagttcaactagaatttttaaaccagaaaacaaaacagaacccctgagctgttattgctgatgtgattggttcttcatcctatcctgagtcaggttattcttcccagaactctaataaaaattagcctaagtagaaatcgagtcatttattctgacccctgcttgtcttgggaattgccacttcatctttttgtttctaagtgtcttgttttctttgaaggtggtccccaccattcaggtttgtggttattgacatcctagaaatgaagttggctttgttacctgtgtgtttggaaatttatacatttctgatttaaaagaatacactaaatatttcttaacttctgtagttaagaaaaaagctggccgggcgcggtggctcacgcctgtaatcccagcactttgggaggccgaggcgggcggatcacgaggtcaggagatcgagaccatcctggctaacacggtgaaaccccgtctctactaaaaatacaaaaaaaaaattagccgggcgtggtagtgggcgcctgtagtcccagctactcaggaggctgaggcaggagaatggcgtgaacccgggaggcggagcttgcagtgagccgagatcgcgccactgcactccagcctgggcgacagagagagactccgtctcaaaaaaaaaaaaaaaaagaaagaaaaaagcttcggccaggcgcagtggctcacacttgtaatcccagccctttgggaggccaaggcaggtggatcacaaggtcaggagttcgagaccagcctgaccaacatggtgaaaccccgtctctactgaaaatacaaaaattagctgggcatggtggtgcgcacctataatcccagctacttaggaggctgaggcaggagaatcacttgaacctggcaggcggaggttgcagtgagccgagatcgcgccactgctttccagcctgggcgacagagcgagattccttttaaaaaaaaaaaaaagtttctttttttttttgtttatctttaatttgtagttaagtgataattttaaacgatctgttatgtgagaaatactattttgaaaattttctacaataggcatattataaatcgaatatctttgaagaataataaacatttttttgacaaggtcttttttattatttatttatttttattttatttatttatttattttgagacggagtctcactcttgcccaggctggaatgcaatggcacaatttcagctcactgcagcctccgcctccggggttcaagcagttctcctgcctcagcctccagagcagctaggattacaggcacatgccaccacacccagctaattatgtatttttagtagagacggggtttccccatgttggccaggcatgtctcgaactcctgacctcaggtgatccgtccgccttggcctcccaaagtgctgggattacaggcatgagccactggacccagcctgagacagggtcttactctattgccaagggtggagtgcagtggcacgatcttgactcattgcaacctgtgcctcccaggttcaaactatcctcgtgcttcagcctcccaagtagctaggattacaggtgtgggccaggacacctggctaatttgtatatttttagtacagacaggatttcaccatgttgaccaggccggtctcaaactcctgacctcagatgatctgcccaccttggcctcccaaagtgctgggattacaggcatgagccaccacacctggccataaatatcatttttataaagcagtctaatggatcaaataccttcatatccattattgccttaaaatgctctaatataaatatcgttatacctgtatacaagataaaatggattccattagtttaggtgatattatggcttgtatgtgacaaaactgagacttgaattcgtgtctttagaattcatgttctgtatttgacctgccatacaacagtaccactccaaatagttttcacctggagaaaaatgtgtaatggtgaattggatgtttattataaaatgtgcgtattgttggcatgacttattgattccacagatgagatgcttaggagcctttgtcaaatcagtcaagtgaagaaagatgttcttcaaattgtgattttctctgcagcaattgagctgtgggcctagagacttaagttatgatttttacatttttcttctatctcatggagtgagatctttattgttagttagaaagctagaaagttaaactgttcatgtcaacaagttcatgcattaaaatcctatagctgtcctgagtacagaaatcaacctgatgtcatggaacaccaagcagttcctgccaggactggcaaagtggacaggctccatagaaaggtttcttgtcatttaccctacatcctatcctgagagttgagtagctgtttcatcagccaaaaagggtaaacttgagatgtgtgctcggtacagttgcatcttaaacaacatggatttgaactgtgtgggtccacttgtacacagatttttttcaataaataaaggtggcccaccgtattggtgggttctgcatccacaaccaaatgcagatcaaaatacagtattcgcaggcatcctgtgtgtatggaggaccagcttgagaaagtgcagatttttgtatccgcggggatcctggaagcaatcccttgtagacatctaggaacaactatacttaagtaaaattaggtagaggtaaatggtcttgtgtgggttttttttaagagtagtaatactcaaaatgtggttgtgggtccaatagcatcaacataaccttggaacttgttaaaaatgcacattagggggccccaccccagacctgctgaatcaaagtctggaggtgggacccggcaacctgtttcaacaaggctgtgattctgattcctgcaaacatttgaaaatatctgctctagagtcacactgggagatataaggctgtaagataaagatttatggttggcctgggaagagtagtgctggcaagagtgggaatgtatttagatttgtattcaggagttgctttataactcagggttggaatgataacttaaagactaatcataactgatactaaggtattcagttttctttcaagactacactatgcacttcacttgttaatacatacatttgaatctcattataaaggttgctactcatgattttcaaaaaacataatcagccgggtgcggtggctcacgcctgtaatcccagcactttgggaggccgaggcgggcagatcacgaggtcaggagattgagatcatcctggctaacacggtgaaaccctgtctctactaaaaatacaaaaaattagccgggcatggtggcaggcacctgtaatcccagctacttgggaggctgaggcaggagaatggcgtgaacctgggaggcagagcttgcaatgagcagagatggcgccattgcactccagcctgggcagcagagcgagactccatctcaaaaaaaaaataataataataatcaaatagaacaagtacagttctttacccagaaatcatatgtatggaaactcagccatagcgctatgctactactgacctagtaacaaggtgcttcaatgaagccaaatgtctgaaacttgttacttttgagtgctagactcataaaccaaaccctgtagacagatcctactgccatagtgtgaatctaaattagaaaaaaatgcatttatttactatattgttcactttcatacatgaataaatcatataaaatatggtctgttcctcagtgttgtatttattctgataaaaagggaattagacaagtacacttggggaattttaaagtagcacatacaatcataaatgccagtcttttatagtcaatatttttatcagtttcttagttatatgtaactgtctgacttgggtaggaaggtagagaaacacctttgaatgaagtcttgtcaaataagaagctgaaaataaaaggaatatgaggcttaaacttcttatttctgaaattatctttatgcttcagtttagagtcattttctaagacttgtatttttaaagttttattagagtaaatctgatttttggtgaggaggagtggtacccagtcactaaatggctgggaaggtgggcagaatattttgctattttaacaaatccattagtagcaagcactattgacattgccttgtcagagtcatatttcatgctggtgtactgatgcaggtgtccaaagtcacaaacagaggtggtgtcaaagcctgtgaatttagcactgaaagtcactgagatatcgtagcccttttcaaatccagtcagtcaaaaagaatttactaagtaactagaatgtgatttattgtctgtcttgagaaccagaattatgataaccccacagaattttctgcattgatggaaatgttctattttttgtgctgtccactatggtagtcactagccacactgaataccagaaatctgggtcatgcaacccaggaactgcattttaaaattattttatttcattttactttatttcatttaaatatgattagctacatggcccagtggctaccttactggccaacacaatgtagaaggtggctttcaaggttctgtcaccacagggacccttgtacagtacatataaatctttccatggtaacttgccaaactgcctaacacttgataactgtcagcagatagagaagcatagtttcctctaccccaccatccccacccccaacccaatttcatgccttcatgtgagccccatctaatcgtgtgcctggctagccaactgccccgtcagtttgtgtcccttccctttcccatatgttggttcctccagggttgattgtggcaggatcttccttacccatatccaagtagggagtcctgtcctccctcctgggagatggtctggtatcttggaaagagaacagactggctttgaagccagttggtttgtattacagccctgtcatggactaggactagtggtatacaattagttggttgttatttaacctcctccgaagatgggaatagtcatgtttaccctgtggggttgttgtgaagaggactaagagcatagcaagtgaattaaagccatcagactctaaccagctagtatgggtagcaaagaaggctcagtgtaaatgttgtgtatatgagcaggtgatggaaaagtgatatccactgctaatgattgtgattctttttaatatttaggaggataaagataataggttttgagtaagtaacactaaataaccctagtttttgctaaacaatagacaacaactaatttgaaattgctgaaggtataattcacagtagtgacagcagcagtgccgaccatccttcccactgagcccttgcacgtgggaagctcttctcggaactctgcatcaattcattaatttcattttcacaagaaatctgtgtagtgcttacatctactctgaatgctcccgatttataaaaaccgagtcacaaagacattaaatttgtccacagccacacagcttgtaagtggcaaagccaggatttaattccagagtttttaggtcaaaaacctatacgtcctctccttcctcccatgtcatcgtgtgctgtgcattagattctcacgtgcttggtcacatgccacccagcgtttttattctaagcctttattttaaatttatgccattcttagatgcctacattaaaacacccgggactcagttgttacaaggtctggtttatctgtttcaaatgtactctcctgccttcctctattccctgtaaatgtgaatgtgtgtttatccattaatttagtaaacatctgttgagacccttgcacatgtcagatactgtgaagtacctaataaaaaagaaaggcaaaaaaagaaacagctgttgtattctagaagttcagtttttagttgtagaggcagacccttgaacatgacagtgtggaaagcaccattggagcacagagaaaagagcaacttttcccaggaaactggaagaaggaatgacattcattccaaaatcattgattttccaggcactggtgagccacccagccaaagccccttctctcacagaggcaacattctagaagggacttaattaacatgattaagtccatcttctgtctcccgtgtagaaggccatattctttctattgcagcaccggtaacctactgtgttttgttgtttcctggtatatgtctctctatgaacttgaagccctctcagctagcccccacccagagatcctagtttattttttattttcagtaaatctagtgaaaaacccagtcattttcattttcaaagtgattttaactcatagtctaaattgaaaaataatgttttcctaagtagatattagtaagtttgcaaagctagaattaaacgagggctttctttgattccccagttataagtggggtcatgtttttgagtgaaaggctgggttttctcccccaaattaatgagtcagttaaaaaatatacacctgtagcatgatcaccacagtatctctccctgtataaggcgctccagcatagtagccctgctggacagacagaagatgcatctaccatccagcttcagcctttggccagtgggtcccagagttgaaactgaattgtaaacgacattatcccaagcatgccttccatgaaaagaaaaatgtagattatattttctgacaacttcagttctcaatctatccccctttagatagctaaccattaaaagagggaaggaaaaaagggaggagaaggaaggaagaaaaaaatttctatttgcctttgttttctttctgtcactgcattaatacctattaatccactaatcctctttgccactctccacagacgaaaacacattcttccttgacagtaaacaagcaaatcgatcctaatttatgatttggaataaatactgtgactgggcatggtggctcactcctgtaatcccagcactttgggaggctgaagtgggtggatcacctgaggtcaggagttcgagaccagcctggccaacatggtgaaaccctgtctctactaaaaatacaaaaattagccaggcgtggtggcgggtgcctgtaatctcagctactctggagtctgaagcaggagaattgcttgtacctgggaggcataggttgcggtgagccgccaagattgcagcactgcactccagcctgggtgacaagagtgggactccatctcaaaaaaaaaaaaaaactgcttgttttttaaggtagttatagtaatctacatgttagttacattgtccctatctacatattcagtgtaaaatgtattcttgatttaatttgttgctaagcacagaaaaaaatcaagaaaacctaactagtaggaaaataaaagtaaacatctttcgtgaaactgggaattcctaaaacaagttgctaggagggtatttcaccgttgacagtgctgatagtgatagaaaatgaaaagatgtttcacatggttttccttctttggtcttttagtctcaattactttttcttaagtctattaaattgttccctgtttaattgagttccacgtatataacattctcaggtgagaagtggaaatagttcttaatgcaaagcgtttgtttaggcagccatttctgagatgtaatcagaaaacattttgacacattgtcatttttattgatcatacaatattctctattttttaaaaaaagcagccaggtgtggtgacacattcctgtaatcctaacactttcggaggcagaggctgaagggtcacttgttgtctgggcaacatagcaagactccattaaacaacaacaacaaattacacacacacacacacacacacacacacacacacacacacacatatttttaaaagctttccaccagacacacacacacacacgtatatttttaaaagctttccaccagaaactctagcacttagacttcactgaagactgttatgtctagttttttttgtgtagtttatttgtgtgtgtaactcttccacattttagcctgtcctaccactatggccaccaacttctcaagtatgctctgagaatttactggaaagtaaatgcatatcctcaaaagtttcttgtaagaatgcaaccctgtctctactaaaaatacaaaaaaaaaaaaaattagccgggcgtggtggcgggcgcctgtagtcccagctacttgggaggctgaggcaggagaattgcgtgaacccaggaggcggagcgtgcagtgagccaagatcgcgccactgcactccagcctgggtgacagagcgagactccatctcaaaaaaaaaaaaaaaaaagtatcagtgggagtccaacatcatgataatgttcattggtagtgttgggtatatgtgtgacttatcacgtgagatttaacaacttaggttttgttcttagtttcagttcaatcttcacaaaagctaaacatgctgaatgttcagtctcaatctatacatgctatatcaacgtgctttttgtttgtcatataacatttgtgacaatgagatctgtagagagattgtaaaggccacaccacgtggtgttggattgattgcagcataaaaagaaatggaaagttcatgctatctagatagatagcactggtactatagatatgaatgtttaaaagatgtgatttcctctgcctgctaataaaggaaacagaacatgaattttttctgcagaaacttgatgatgtgatagtgtggcatgctgattacattgactccaaagtgcagtccttgtccctgggcagtgcccatgtgctcccttcctctcccttcacacacccacagcacactttgtcctgcctctcctgggaagcctcctagcagctcccagaggggccgcccttggagcatcacatccgagtcacaaccttttcctttacagtgaaactgtcctcttagcagccttgttgtcctggactggattcccagtcccctgtcaccgtgtccgctgtgtcacaagtggtcattaaagggagagtggaatgaaccaaatggacctggagatggatttcaagatctttcccatatccatttgcctcacaaatctatttgatttgtgctattatgtgacttgatttcccagatcatatagatcatatcatatttagtcacgttatatttgtgactaaaatttcaggcttttcacattatgctgaatcatactttaaactcattcagattccctaattcagaaactatgatcttttggatctacttagattaatgcttacctgtgtagttatctttgggggataaaggagacttgtgagtatatgagaagaatggacaagatttcaaatatatgtttaccttaaattagagaattaagtattttcaataacatttctgcagaaacaggtaatatgctaatcaaaacttgcttgtatctgttttaagaggcttactgtattttctgtatcctaaggaccatcattttgttacttaataaggtttaaagcaacaaactaaatttccttatgaataatttctgttctagactaatttaatttgagtaacttgagttgggaagaatggccttaacaccttggactgggcagaacatacatagttctaatattggtatgtttatctgcaaactaggaggttctaaatacacacatacactttacctactgcttccttcttcttagctgttaaaacagtattactttatcatatctttaaaaaattaacttgaatcaaaaagctagaagtttataacacctttcatccacctgacagtgtgcatcagatctgcagtcagccccaggcagtgccagacactgcacccaccgtacccttttattctcctgtggctttctctgcctttccccctcccactccatctgcccctgcccttcctttctctctttctcacaacttttttccttatctctgggttaccatacctatcggctattggcttaaaataatattatgtcaagtttgtattggaaaaattatatggaaatttattaggtattagatactaagaaaaaaatgtatctaggataaatgacaattagagaatgagactctacctcttgaaaagaaatcatgggagtataagctttacgtataattaatcatatgcctccgtgttaggcaagttgagcccagaacatagtacgtgaagttaaaaataagcattttatcttctatcagggaaatttgagtactagaaattttgcataaagccaaaacttaagtttgtgtaactagtactgataattggacagaaattagatactgaccattgttaattggtgttttttcttaatatatggaagtcttaaagactggaaaactcatgaacataaaatgactagtgggatgattgagaggaatgttgttttagattgattaatgttatacaatgtctattttttattaaattttttatttttagataattgtagatttacatttagttgtacaaaataatacagacagatcaacttccttctttctcctttccctacccccaccccacaacctaaacccctggcaaccactgtcttattttctgttgcttataacagaatacctgaaactgggtaacttataaagaagagggatttatttcttacacttatggagcctgaatttatttcttacacttatggaggtcgaggggttgcatctggtgagggccttcttgctggtggagactctgcagagtcttgagatggcaccaccattacatggcaagagagctgagcatgctaggtcaggtctctctacctcttgtaaaaccgccaatcccactcccatgataacccattagtccattaattcatgagtggattaatccattcatgagagcagagccctcatgacccagtcatctctttaaggctccacctctcaatgctgccacattggggattaagcttcaacatgagttttggaggggcacatattcaaaccatagcaaccaaaatatgctctccacttctttaggtattggcttttttcacttagcatcattctctggagattaatacaagtcattgtctgtatcaatagtctgtttctttttattgctgaatagtattccatgatatggatttaacattttgtttaaccattcacccattgatagacatttaggttgttgccagtttgggactattattaataaagctgctaacattcatatgtaggtcttcatatgaacataagttttcatttctctgagataaatgcccaggagtacaaatgctaggttgtttggtagttgcgtgcttagttttgtggggttttttttccaaaagaaaaaaactgccaaacttttccagagtagttatacaattttacatttctgccagcagtatatgagcaatgtagtttctccacatccttgccagcattcaatgttgatattatgttttgttttagccattttgcctcactgtggttttaatgtgcattttcttaatggctaatgatgtagaacatctttccttgtgctaatgtgccatttatatagcttttcaatgaaatgtctgttcatacctgttgtttcttaattggattgttcattttttatactgtgtggttttcagaattctctatatgttctaaatactagtcctttcttggtatgtggtttgaaattgaaatgattttccctatgtctctagcttgtctttccatcctccaaagggggtctttcttagagcaaaagttttcagttttgataagttctagtttatcaagttttttttgttgttgttagcttgtttttgagagggagtctcgctctgtcgaccaggctggagtgcagtggcaagacctcagctcactgcaacctccgcctcctgggttcaaacagttctcctgcctcaccctcccgagtagctggaactacaggcacgtgccagcacacctggctaatttttgtatttttagtagagacagaggtttcaccatgttggcaaggctggtctcgaactcccgatctcagttgatccgtcagccttggcctcccaaagtgctgggattacagacgtgagccactgcgctcggcctcaagttcattttaaacagatcaaattttttatcttaagtctaagtactctttccctagtcctagatcctaaagattttctcttaaatttttccctaacatttttctcgttttatagtttacgtttatattcatcatcaattttgagttaaatggtatataagttgtgagaatgaggttaaagcttatatttttctgcctatgattatccaaagtctatccttccttaattgaattgccttggcacttttgtcaaaaatcagttggtaggctgcgcacaggggcctatttctgggaggcagagacgagaagattacttgaggtcaggacttcaaggccagtctggccaacatggtgaaaccccatctctaccaaaaaaatacaaaaaaaataacggggcatggtggcgcacctgcagtcccagctacccgagaggctgaggtaggagaatcacttgaacctgggaggcagacggaggttgctgtgagccgagatgttgccattgcactccagcctgggcgacagagcaagaccctgcctcaaaaaaaaaaaaaaaaaaaaaaatcaactggtgctgagcatggtggtgcacagtgtatctgtggtcccatctagtcaggaagctaaagcaggaagatcacctgatcccaggagtttgaggctggcctgggcaacatagtgagaccctatctctaaaacaaaaacaaacaaaaatcacactgtggagatcaatttaaaaaaaaaatcagttgggcatatttgtgtagtatatttctgggttcttctgtttcattgatctatgtgtctatcccttcaataacaccatataatattggttattatagttataaaataagtctttaaattagggaaagtgatctcctttacttcattctttttcaaaattgttttagctatgttagttcctttgcctttccttgcaacttttaaaattagcatatatatatatatatatatatatatatatatatatatatatatatatatatatatacacgtatgtatctgcaaacaaaatcatgctggaattgatgggaatttctttaagcctatagatccatttggggagctccttgattttggcatctttatgattttgagtttttcaatccataaatatgtcttccatttgttaagatctttgatttattttatcagtgttttgtagcttcagcatataagtcattacatgttttgtgagattcacactgacatgggttattttggtctttttttttttttagttttacaattttaaatggtatgtttttcccattttggtgtccatgaattcattgacaatatgtagaaatacacctaatttttgtgtgtgttggtttcttcaaccttgcttaatagttctaggagttattttgtagattccttgccatttcctgtgtaagcaatcatgccacctttaaataaggacatttttatttattctttttaatctgtatgcctttccccacctatcttgtcttattgcactagctagaacttctggtactatgttgaatcaaagttgtgagggaggaaatttttgccttgttttccatcttaggtggcaagcatctactctttcatcattaattttaatgctagttgtgggatttctgttgataattctttattaagctgtggaagttctctttctgatttcagaggttttttaaaattattattaaggatggacgttgaattatgtcaagtggttttttcacattgctaatgtaatcatctgatttttctccttcagccttcaacttggtgaaggtgattttcaaataccaaacaaggccatcttgcctggaattaacaccacttggtcatattgcataacttcttttatacattgctaaattctatttgctaacatattgttaaagaattttgtatctgtgttattgaggtatattggtttatagtttgtttttttttttttttttttttgtactgtctttggttttagtatcagagtaatacttgctttataaaagggattggaagtgtttcctcctcttctgttttctagaagacagtgtgtagaattggtgctagttcttcttttcccatttgttagaattctccagtgaaagtatctggacctggagataccacttttgggagttttaaaattacaaatttggccgggcatggtggctcacacctataatcccagcactttgggaggccgagggcggcggatcactaggttaggggtttgagaccagcctggctagcatggtgaaacccccatctctattaaaaatgcaaaaaaatttgccgggcatggtggcgcgcgcctgtagtcccagctactcgggaggctgaggcaggagaattgcttgaacccagcaggcagaggaggttgcagtgaaccgagatcacaccactgcactgcagcctgggcaacagagcatgactccatctcaaaacaaaaaaaaaaaattacatatttattttccttaatagttataggctattcaaataatctgtttcatatagcatgagttgtggtagttatttttgtttctttttgagaaatttgtccatttcatctaagttgtgagaatgtatgtagacttgtccattgtactttacctagccttgtgatatgtacagggcctgtagtgacagcctccgtcttattcttgatattggtaatttgtatcttctgccttttttcattttttagtcaattcattgatcttttcaaataactctattgcattgtttttttctctgttgtttttctgttcaattttatttatttctgctctttaattatttccagctgggtacggtgactcacccctgtaatcccagcactttgagaggctggggtgggtggatcacctgagatcaggagtttgagaccatcctgaccaacatggtgaatgaaacctggtctctactttaaaaatataaaaattagccgggactggtggtgggcacctgtaatcccagctactcaggaggctgaggcaggagaattgcttgaacccaggtagcggagattgcagtgaaccgagatcgtgccactgcactccagcccaggtgacagagcaagactctgtctcaaaaaaaaaaaaaaaaattatttcttttcactttctctgagtttattttgctctacttttttctaggtttttgaggtaagaacttagattattgatttgagacttttttcttttttaatgtaagctttaagttctgtaaaatttcctctcagtatcacttcagctgtttctcacaagttttgataggttaaatttgtattttcatttagttcagtgtttgtttttacattttcattgagacttcctctttgacccttggattatttagaaatatgttgtttaatttcaaagtgtttggagaatttcatgttatcattctgttattgatttttagtttgattgtactgtgattagagaatatactctatatgatttcagttcttttaaatttgtttatatgtgtcttatggcacatgcattttgtgggcacctgaaaaaaatatgtattctgctgttgtttggtggagtattctataatgtcagctagaacctgtttattgatggtggtgttgtgctcttctgtattctttctgatattctctctagttctatcaaatgttgagggagagatgttgatgtctgcaattctaattgtggatttgtctattctttgagttttatcagtttttgcttcatgtattttgaatctatgttgtttgttgcagatacatttaggattgctatgtcttcatggtggattgatctttgtgtcattatgtaatgtgcctttctatatttggagttttctgtgctctgaaatctacttcatctgatattaatatagcactcccactatattttaatcaatgtttacatgatgtatcttttctcattttttactttcatcctacctatatgtctgtatttgaagtgagtttcttgtagacggcatatagatggatcataaatttactctgccaatctctgtcttttaattggtttatttagaccatttatcctcagtgtaattattgatacattagggcttaagtgtacctttttactttttgttttctttgttctctggtttttttttttgttttatttttcctggtttcatatgggttacttgaacattaatttttttagaattttatttataacgttttggtgtatatctctttttatagatattttattgcttgctctgggtattacatatatgtaacttagcacagtctactgggtcaaaattttaccagtttccgtgaagtatagaaaccatacctccctttatatcccctttccctccctatttatttatttatttatttatttatttatttatcttttagaataacaaaaaacattttactaaaacataagatttgcagaaatttccagacaagccatacaaaatggtcacaagctttttttgaaggggggaatctacatttgacagcagtgttattagtgagggctgtgatgtttgtttaatgttcccattttggttcaatcaatcaagcttgtccatctacagcatctaaataaagttagacttggctagagagcatattctaaagacctggttagctgcttttaaccaatgcaattagatcaccaaaaaagggggaaaggaacccataaaattaaactacctcccccctcaaaaaaaataaaataaagaaaaacacgcacatccctgcagctaaccggacaactaccttcattcacagtgctttatacttaaaccaggatgggggaagtaaatagaaacggggcgggggggcactgcttttaaacgtttcacaacaatccagatgatacttctagcttctgctcatgctttatgacagtgaatcaggacaagacatagatttgctaatgtgcatttaatcaccaaaggactgaagatgtctgggcttttttattcagtaatgtttctaagactgtgtccattaaatgcaaacaaaaaggaggaagtcttggcagaacaggagaagtgatgcacacttgatgatcggatcaatttaaatattattcatggcatatagcctagttcatgctctagctgtttctatggcttgggctttgttggtcttccactgctctgctacatcatttgctaatggatcgtctggattgggagcacataacaaggcctgggttgatagcagaactgtgtgcggatctgcagtgctggggaccagttacctttcaaaatatcgaaacatattcttcccaacttgtctacattaggatgataaattttggtcatgaaacatactgtaggggctgccattgagtattcttctggaaggaatagttcaagtttaaaagtccctccctcaaagggggaaggaatcctgagagccagcaatgaccacatgaaaataacaggcattgctctcatctggttctgctttgatgccaggaactggttctgccagcaaaccctgggtttccttgatgatcctgcggggcagccctgccatcttatcagaacccgagttcggcctctggtctagtctccggctccgcttgcctcacgcacgagtagaagtcctccctccctatttataatatgattgtctttaatgttttatctgcatacatttagaaccacctcagacaatgttataatttttgttacaataaaaatttagaaaactcaagaggagtaggaaagcctcttgtatgtacctgtattattttatctatagccttccatttctatttctttcttcccacaggtccttggttctgttgggggttttttgtttgttttttgaagaggagttttgcttttgttgcccgggttggagtgcaatggtgcgatcttggctcaccacaacctccacctcccaggttcaagcgattctcctgcctcagcctcccgagtagctgggattacagccatgccccaccacgcccagctaattatgtattttttagtagagatagggtttcttcatgttggtcaggctggtctcgaactcctgacctcaggtgatcgcccgcctcggcctcccaaaacactgggattacaggcatgagccaccatgcccagccaggttttttactttttttttaagtctgttttccctttattatttatattgggtaatttttattatttttatcttcgactttattgattcttttctctttctcctcctttctgctgttgaacctattcttttattttcactatttttttagttctgaaacttccatttttaagaaatatttattctgtttatttgctgagactattttttttcatttgtctcaagtgcgtcaaggttgcttattaaagcttttttaaatggctgctttagaatctttgccagataattctaacctttatgttatctcagtattgacatctattaactgtctttattcattcaagttgagatttttcatggttcttagtataacaagtgatttttgatagaaacatggacatttggagtattatgttttgagactctggatcttattgaaacctcttttaggtagcttcatctgacactgctctggtaggagaaagtgaggagtggagtgggttgttactgccacgtggagagggaagtccaggttcctcagttgacagttgagagagggagagactccttgttcctgctgggcaggggtatgagttccagctccctgctaagcctctgctgacaccaccctggctgggagggccagggaagccttgttgctgttcctcacatgccttctgctgaggggtaggagggaagggtggcctcagcaccactgagcagcggtgaaaatcctgattctctgccacacttcctctggcaccaccccagaggggcagggagtgttgcttggttactactgtcaggaggaggtgaagtccaggcccccaggtagtctctccattgtcacaatgaggggagtactcgttgcaggcctgtgggagatcaaagtcctccaggcacggtggctcacgcctgtaatcccagcactttgggaggccgaggcgggcaaatcacctgaggtcaggagtttgagaccagcctggtcaccatgatgaaacccagtctctacaaaaaaaaaaaaaaaaaaaaaaaaaagaattagctggacatgatggtgggcgcctgtagtcccagctatttgggaggctgaggtgggagaatcacttgaacttgggaggcagaggttgcagtgagctgagatcgtgcccccagctgggcgacagagtaagactccatctcaaaaaaaagaaaaaggaaaagaaagctccttggcccaccttctctggtatcccagctgggatactggggtgctctcattacagcccaatgaggggggaagtccaggtcttcacttggcctgtgctagcatgcatagggacaagtcataggtttttcatgatgtttacctagagtagagcagttaccatctaagagttttctgcctttctaggctgccccttccttggtccttggttaaagagagcaggctttggtagagctttttgtcagcacatgttactgtttccgggttgctggctccttcagctcaaaacctgagatataagaggcaaaaagaaaacccagggccgggcacagtggctcacatctgtaatcctagcacttcgggaggccaaggtgggtggatcacttgaagtcaggagtttgagaccaatctggccaacatggcaaaaccttctctctactaaaaaactaaaaaaaaatactgggcatggtgattcatgcctgttattccagctactcaggaggctgaggcacgagaattatttgaatccaggaggcagaggtttcagtgagctgagaccatgccactgcactccagcctgggcgacagagccgagaccatgtctcaaaaaaagaaaaagaaaagaaaaagaaaacccaggaacttgccactgcctcattcctgaagtcctgaggtctctaggttttagcctgttggtctcttctctccacctctcggtgtcttcttatgtttactttacatataatatcaggcattttagttgtacttaattagaggaataggggaaagtgtgatactccgtcctcccagaatcagaagtcccaaatttttaatattaagcagcgccatgttttaaggaataggcattaaagtgttttctcttgtccaaggactgagaagaaccaggagaattttgtctgctctatttcctgactccttttctattaatacttaaatgtgaggtattcagcaactatagtcagtttgatagcaaaggtagatgctcctttggcatttaatggtatgttctttgaaagagctatcaaaatttctgaaggttttatttgtacattttatttcattgtttgggcacttttttgaggctgttgacagtttttgtttatcctccgtatttccccctgaggggtcttgaggccatactgggagggcacaagggagcccaagcccagggacttagccttcttccatcccttcctgacacagggctttcactagaacagtgaagtcagactactggtggccatgctggagcatgaaggacagctgtgcctctgtgggtgggcttggctttagctgtccatagcaggcgagtcattgctctttgcattcctgatttagcaagaatatgaggggaccccaatattgcaaagaaactgttgcatgtctttctcttttccaggcaaaaactgattattccaagtggaagttgccctgttattctgaatacttacttttgtgagaaagttgttgccaaagaagattcagaaaaaacttgtgaagtgtactgtccggacataccccttccaagaagaagcatctctttggcccagatgtttgtaattaagggtctaacaaataattcacctgaaatccaggtaaactcctattggcctaaaggttttatgcttgtaataatgttagtgactggatttggaagggcttcagtgtaagtgaagatgttagccttttgtctccctccaaaaaccccaccacaaggatgtatgctgcatgaacttactgttacgcctgaatatattatagttcagttcagcatttagtggtgctcttgttacagtatttcatctttctaattatgtgtctttaatctttattctaatttattaaaatagagtcatgcatcacttaacagggatatggtctgagaaatttgtcattaggtgattttgtcattgtgtgaccatcatagcgtgcacttacacaaacctagatggtccagcctactacacacctaggctatatggtatggctgattgcttctaggctacaaacctgcatggtggcaagtacttgtgtatgtaaacgtatctaaacatagaaaaaggatagtaaaaatacagtccaaaagataaaaaatggtgcacctgtatagggtatttaccataaatggagcccgtagaactggaagttgctctcgatgagtcagtgagtgagtggggagtgaatgtgaaggcctcggacactactgtagactttataaaccctgaacacttgcactacactaaattaaatttttttcttcagtaataagttaaccttaatttactgtaactttctagctttataaactttaaatttttcattaacttttttactcttttatagcaacacttagcttacaacacaaatacattgtacagctataaaaaatattttttctttatatccttttttctatttttatttttatttttttacttttaaaactttttttgttgtaaactaaaacacaaacatacacaatagcctagatcttcacagggtcagggccatcaatatcaccatcttccacctccacatcttgtcccactggaatgtgttgagggacagtaacatgcatgaagctgtcatctccttggataacaatgccttcttctggataccttctgaagtacctgtctaaggatgttttacagataacttgttttttaacaagtagaatactctaaaataacaataaaaagtatagtacagtaaatacataagccagtaacattgtttattattatcaaatattagatactgtacataacaggatgtgctagacttttatgcaactggcaacacactacctttttttttatactttaagttttagggtacatgtgcacaacgtgcaggtttgttacatatgtatacatgttccatgttggtgtgctgcacccattaactcgtcatttagcattaggtatatctcctaatgctatccctacccctttcccccactccacaacaggccccagtgtgtgatcttccccttcctgtgtccatgggcaacacactacttttgtttacaccagcattaccacaaacatgtgaatacatcactaggcaacaggaatttttcgtctccatcatagttttatgagaccacggtcaaacatgctgtccattgttgacagaagcatcattatacagtgcatgctggtatttgacaacgttcattttctctattcttgtaatgtctaagaatttttaaagccctcctttatttatttaaaaaatcatattttgcttttccacaatatgtattatcccttggaataaaaagaactgcataagcttgagtttatatgctggagttgttttttggaattttactgatcctaagccatgatcatgtgccaagatgaatttagggaaccactaaaattcacttgctgtgggcatgaatggcccctgggaccaccctaagcactgaatgtttgtgtggctcccagtgcactggcctcaagatctctgggttatataagttgtcgctgaacagaatgcttcctgagactgacagatcaagggaggaagaatacgaaagaaaagtagacaaactttcagcctcttttgtgccagccagtcaagcaaaatctctctttgactatcaaaagaagtatctggagaggattatgcaaaaaggaagactctcgaatcaatttaattataacatcaaaaatatggcccagagcacattactgttttaacatatagttttaaacagctatgtaatattaatcccatgagattcatttttgtcctgtgacagtgataatgaaactacttgtagcataatggttaaacgtgtgaactttggagccagatgacctggttcaaatcctgcctcagccacttcctgctgggtcatcttgggcaagatctgtggtctctatgtctcagttttcttatctgtaaaatggaggtgtgatattatctatcttcttgggtgattgtgtgagggtaagcatgtttaatatgtacatttaaaagcctggaatataggaagcactctagaagtgttgttgttttattatgacagctgatactacgtaaggggttgttgggagaatatgtgagcatgtaaaatgctcagcctaggagattgcacatacaagaacttaataaaatgaagcatttgtattatccctagtcattcttttatcttcatttttagtttgttctgttggaattcttacctcaaaagagaaaaatttattgaattatcatgaattattttattagcagaacttcctgtgtgttttcaaagacctgcctggtatagcaaacatcctgctgtggtccttgttctttcactcgccttcagcttgcagtcttagccacctggcaggcccagagccccatgccacaagttcctttattttcatcttcatcatcacttcagtgtagtgcagatccattgggtggctgcttaaggatgtcattatttggtgtgcagcatgttgcttgttgttagccgaactgaaactttgtgagtcttgaaactgttccctttatgtgtcttggccaggttgtgtgtagtggtgtagccactacagggacagcctggacccatgggcacaaagaagcaaaacagcgcatcccaaccagcactcccctgagggattctctcctggatgtggtggaaagccagggagctgcctcgtggccaggagctggagtccgagtggtggtgcaaagagtgtattctcttcccagcagagacagcaccaggggtcagcagggggccagctcaggacacacagacccagctggaactcggtgagtgccaagatgctggtgtggggcagaggtgaagagtcacttagacagagtgctctagaaagtggagcctcttctcagagcacgttcttagctgcattcaccatatacgtgagctgtttttgtttttccttgcatcaaaatttgggatacatggcatgatgaaggattttatctatctatttaattttaaagtcctattaaaaattaaatttgctgcattttgttttacctttaatggttcatgttcttgaaagtaatacaaatgcaagaaatattggtattattctggaaaagccaagacatgtggttgtcatacctcaaaagaccatttgcaacatccagttttatatgtctcgaaaacctgagtaaataatggcaattggtaaacctgtggctttcagagagtactgtatcaaaccatctgcatcagtactgcctaatacaactttctgcaatgatgtaaatgtcgtctgtctgcaccatccaatgcagttaagtgcagacaaatgtagtagaagtgatgttgtctctactcagatttaggcccttcctggtgttggttcttacagatagctgtagacgcatgattgacagagaggtttgtttgtttacatcagagcctcagcatagccttttttctttttgcaatctctgcctctggagttcaagagattctcgtgcccaagtagctgggattacaggcttgcaccaccatgcctggctaatttttgtatttttagtagagacaaggttttgctatgttggccaggctggtctcaaactcctggcctcaagtgatccacccgcctcggcctcccaaagtgctggtattactggcgtgagccaccacgcccagtctggcatagccttttgaagttatctctggcaatgataattgccctcaaagaagtaacatggatttccaacagaatagaaattaaaagtatagatgctacttcatcagtttggttttgtttaactattaataagaaaacacgtagtgaagaaatagtacttaacaatcatcctggccgggcatggttgctcacacatataatcccagcactttgggaggagccctaggcaggcaggtcacttgagcccaggagtttgagaccagcctgggcaaagcaagagagcaagaccccatctctaatataaagacaatgcaatcatcctatcattatgctgccttctgatgccagagagagaaacaggatacctatactccggtgtgaattatgaatcatcttcaagtggaggcactttatttgaaaatactatgaatttgagaaagtcgtcttgaggtctagagttggagaatgtttcttttggaattacagaaaaaagattcttttttggaatatgtatgtttgtaaaatccattaaatcagttttaaggtatttatcatggcttgtagatgtagaccagtcttctaccctttgccctaaatctgtggtaaatttatatagaattttccaagacagttacacatcagacataggtttttgttttgtgtttttgttttgcttggcctttttaatgacacatatccagtgttaggttttgaagaaggggatactagttaccttggcaatgaggaacttggtagagcttcctcatctcagtacacagaccacacactccaaggggacgaggaaacagagacagtggggaactgaatcaccctgacgagaaagaacgacaaaactgacagtgcggttgcttcctatgactaatcacaaccaatgcacgttatgaaggctgtccctctaggtccttcagtggtacttgttttacttgtttagcaaagagagaaaaactagaagctaaaatctggtgaaatgctaccgatgtgagttgcattgtgaatgctttggagttgtactttggaatacatgtggtgacatatctaatgagaatatccttgtggtagactgaaagaaggccaggcatgaacttcaaaaacaagaaaacaacatccagttattcagagttaatgaatatgcattctgtgtgatgcattttctgtagcacatctgagattgcacaatatcgaggctagacaatattatttccactttgcagatgaggaaacacagcctcaaggaggatctcactgctgacacaggtagacacaaagaaaaatgaatgggatatagaatcccagatggcatggttgtagagtgttagagtttaaaagaaaagggagaggctaggcgcggtggctcatgcctgtaatcccagcactttgggaggccgaggcgggcggatctcgaggtcaggggatcgagaccatcctggccaacatggtgaaaccccgtctctactaaaaatacgaaaattagttgggcatggtggtgcgtgcctgcagtcccagctactctggagactgaggcagaagaatcgcttaaacagggaggcggaggttgcagtgagccaagatcgtgccactgcactccagcctggggacagatgagacttccgtctcaaaaagaaaagggagaaaattgagttagaaccaagccgtgtttagattaaggctgacccagggtcaagttgtccagggcagcagaagtgcaagtgttttgccctggggagacttggttggactgtgtacaaagatgaactttggaactaacggccgtagtgctagccttgagtttgaggacagggctgctgagatgtctttgggtacaagaagatctgatcattaatattttctagattattttgcagtgataatgatcaggctctctagtttacatatcaaattaatatagaagtaaaactgtactttattcactactaattctttgctaatatatttagaaagaaaaacttagagaatatatctgccttcgagacacatttagcagtatgcattctaaggcagttttttatacatgtacatgtagcacgaatattattagaagatgcagatgtgtagcctggaagattttctgcctgtgattcctgctttcagcttcctgatcatagatgacatatggaatgctctgtgggtcccacaggatggacaaagttgggctcagttagtacagactcatcagcacaacacacacagaagaaggaaaattgcataagcagtgacccctttcaactaaaggcagctctaagtctggtctccttgtctttcagaatggcttttcttgagctcttgtcattatctgctctaccccagagatctttcaaactatccgtgaacttaaagacaaccttgattactgtgtgttttctgtgaagtccagaaattaccatgtcagaagaaattaagcctgggtgaaaagaaacagcggtgtcttatggcagatttgtttgccacaatagttgccccttccccacccagcccaggtcaggtggttgctgatgaaaccctgtggtaaatttctgtcttaagtttacttcacaccttgatcgtaggtgtcaatctcagtctgttcccagtcctcggtcagtgtcacttttctgataccagtaacagcttatcttctgaaagctgacagctcaattagtgccaacctcgaaattaaaagaaaattttttgaagcagctagtcctattcagggtcagatagattctctcaaaagattcatgtcctctgcactgtgaaacattatcagaaatagactttacatttcagaaatatagtatgttagagtcccctgtccattgttcttctggatgacttcctgtaacttgagctattaatgaaaacgtttctgtgaggtttctcaaggtgttgtaggtcagagtaaccaacgcaaacttaagttttataaatcactaaaatcaaaggtaacaaaaaactgatgcagaaggtgctccctaaccacagggtaggcagtctgttcagagcccaaacacaccttttttatagatagactacatgttgaatgatcattagataaatgcatgactaataaagccataggcttttttttttttaacagaaagggagcactggccttcgaggtaacttataatgaaaactgaggcaaagagagaaagtgatgattccttagtgattctctgtgtcctggtggtgcaggtccagaccatattacctcactccaagcccatggtgattgccagcagacatcacctttctttctccctttctaaaacattctcttcctttcttcttgagatatttaacctagggaccagtaatttatttttttcttttttttgaaacatggtcttgctctgttgcctaggctggagtgcagtggagcaatcatggcttactgcagcctcaacctcctgggctcgagcagtccttccacctcagcctccaagtagttggaaccacaggcacgtgccaccatacccagctaattttttttttttttttttggtagagatagggtctcactctgttgcccaggctgatctcaaacttgtaacctcaagcaatcctcctgccttggctttccaaagtactaggactacaggcgtgagccaccatacccggccaactaatgtaatctctgtcctttagagatgcaaattctttcttgcccttcattgcagaaatattttaaagtggagagttagtcctttgcaagaggacagaacgtgctaaatagtcgtgtcttcagacaaaaagctggagaaattcactgagctgaactcagaagaaaagcacattttcctttttccataccttgatgttttactcctctttttggtcttttggcctttgctttattctcatgttgtatatttattccttctttccactaagggaaaaaaaaatccaccatgccctggaccaggtcctgggcctgcagtggttaacaaaaccagacattgtctctgtgctcctggagcatagttctagtgggagatcccacacaaaatactttacaacaaatgcatttatgattacaagttgcaataagtaccctggtgagaaaaaatagggcacaatggagaatggacataatttagtttagagggttcaaagatggtgttctaaggcagtactatttaagtttaggtgttaggtaaagagaagatgaaagagaattgctcacagaagagagaatacctttgaaaagctcttggacaggagggagaagccagcatgaccatgctgcacaggccagcaagagatcccaggcacgcaaccggccacagcctagtggaccatgtgcaggagctgcagtgtttgctgtggctgcccactgaccaagaatgaggttgccctgcttgaaagtcagctttagctaccaggggtttagtaagatgggcacatggggcagggcctagtgaaagcagagagacgcaggaagcagctactgccgtagtccaggtcagagaggactggtgggttcctgagtctcctgtggctttgccagagctagagaaaagatccgtggtctagatgtgtgtgatggcttcataatggattggttgggggaggagcaaagtagaagggaatgttcagagagtgagcctcagcttgagttatttagttgaaggatgttcccatttgctgagatgagaaaaactatagtgagagcaggtctggaagaaagcttgagaatgcagtctaggcctactaagtttgagattcctatgagacatcgaagaagagatgtcctgtgagaaagctggacgtacataccttacgcccagagggttttagattggacatgaatgtttgggagctctcagcctatgtctggtcagtatgtatctttgtatgtacattcattttgtttgcgggtgtcagcaggttatatttgtttatggtgccaagctccaaaggcactaatgcgtgtgagtgcaaggcagcagtgtcctgtcacagccaagtctacagccagggctgtggaggaggtcactttagggaaacaatagagacaaaggaaagaagaaatgcaggcattgaactccaaggtcctcttgcattggaaagcaggtagaagaggagcccactgaggagacagaggaggctgggctggtgaagccaagaggaaaccagagctcgtggcaagcgctcaggatggtgcttccatgtgggaggggacccatagtactgcaaagtctaataaagtgagcactgaaaatctgtgccccagatttgggaggagttgctgggtcacttcacgagcaggaggtgtagggagcagtgagcacagaagctcacttagcagagtagagtgggtgggatgccagaggagaagcaagcttggataacaaatgttttgttgatgcatacgaggatgacaatgtccaaatttacatagaacaaaagaactgcaatgagggcattctgtctcttgtttcctaatgtgtatgcaggtaccatttttcttttaaatatgcatagaggctggtggtttaatggaaagaacaaaaaatctggaatcagactggtgtgggttcactggtgacaggacatttagcagggagactggggcaaattgtgtttccttgtctgtgaaattggtattataatactataatgcagactggtggtgaggactgattgggatgatgtatgtgaagtactcagcaggatgcttcccatatgacaagcactcagtaaaaagcagctcactcactctttaacagtaagcatagatgcttaaaaaaaatagtggtaaagagcattgctacaataatagaaacctgaactaagcaaagacaagctatcgcattacaaatcagcactcagtgttggtactgagtctgccatctggctgctgaggaagcttgcttgaaggtgatttttatttctatgcttttggccacctcattccccacctctacccctagcactcccatcaacaaggagttgatgcccatttactttggaaaagaagcatttgtgtaaatttgtatgtgaagtgtgaccactgctgtctaaatgatggagatacggaagttcctctggaataaacatattgcagaaaactgccctaatgctggggccagtgttgaatggtgctgatactgtggttggaaatttttttactttgtccagagcattaaacaaagatcccggctgggcacagtggctcatgcctgtaatcccagcactttgggaggccgaggtgggtggatcacgaggtcaagagatcgagaccatcctggctaacacgatgaaaccccgtctttactaaaaatacaaaaaaaaaaaaattagctgggcgtggtggtgggcacctgtagtcccagctactagggaggctgaggcaggagaatggcgtgaacccaggaggtggagcttgcagtgagccgagatcgcaccactgcactccagcctgggcaacagagcgagactccatctcaaaaaaacaaacaaacaaacaaacaaaaaacaaggatcccaaactcctgatggtgagaatggttcagattaaggccgaatgaggaacatgcactagtagatcgtggatgtgatgattaggggcattagcctttgcatgtgtttggacagtggagaaagactcttggataaagcttactagactccttttgaaaagctggtcagctgtggcacactgattccccagctgtgtgctcacctgctgtgtcctgctgggtgaatacagctcttctccctggttgtgaaccgttacttttcttcccactaaacagttgggagatattcttgactctgcctccttttctctgtatggagacagggtggcatacattccttcgctgtaacggtggcatatgcctgtctacagttaaagagcctgaagggaagacagctccctcgtcaacaacacaggggaccatttcacctgcttttcttttatgtaccaccacatactgccagagctggcagaatgactattcatccatctgcttagcatcacattttcataaggtggttgttgtcactcatactttctttatttctgaagtctctttgcttcttcctgttgtagaaaagttggaattgttccttttcaatgatttgaatattttttattgtaatgtgaaagattgtgagtgcagagtatcattttttttgcatgtccttgtaattgatgccatagcccatgccttaggtttgttcttacctttgctcattcaataaatttaaatcatcccttaattaattagttctgtgtccatgagtcttaagtaaaccttttaatctcagctgcccatctattcttaacctttgcttgtttcctctctaaaacagttattggcagtccttatgatatccaaggccatttgacattgtttcttctcagccctggctcaatattaaagcctaatgaggaacatgcactagtagatcatggatgtgatgattaggggccttagcctttgtgtgtgtttggacagtggaaaaagactcttgcatcaagcttactaaatttcttttgaaaaggtagtcaaccattttgactnnnnnnnnnnnnnnnnnnnncttgatccaagagtctttctccactgtccaaacacacacaaaggctaattctagtagtagaagtagtcttactactgcttattttactaattgacatccagaccctttatattctttgccattcttcctgtccacatgccaacttactgtaagaataaagacatatcagaacccatggaattacagtctagtgtttatggttctgtcatgtatacatagttccaatctagaaattggaacttgactcatggggacctgaaggaatctatcttatctctatcacatttttaaagagctttattgatacataattcacatcccataaaattcatttatttaaagtgtacaattcaattgtgtttattgtaattacagacttgtgcaatcataactataatacgatattagaactttctgcaacctcaaaaagaaaccccataccaattgactgccaattcccaattcttcccagcccctggcaaccactcatctactttttgtcgctacagatttgcttattctggatacttcatatacataaaatcacaaatctttcgtgactggcttcttttacctagcataatatttttaaggtttatccatgttgtgacatgtttcagtacttcattccttgttatggatgaataataatccattttctgtgaatataccatattttatttctcttttgagttgatgcacatctgagttgtttccactttatgattaacatgaatagtgctactatgaatatctgcatacaagttttttgtgtggatatattttcatttctcttgaatatatacctaggcatggaattgctgagtcataaggtaactctatgtttgattttctgagggactgccacagtattttccaaagtggctacacgattttacattcccatcagcaatgtaaaatataccagggttccactttctccacatccactccaaaatttgttattgttgtctttcttattgtagccatccatgtgtgtctgaagtgggtatctcattgtggctttgatttgcatttcctgatgactaacaatgttgagcatcttttcttttttttattttttattttttgagatggagtctcgctctgtcgccagggcggagtgcagtggcacgatctcagctcactgcaacctcggcctcctggttccaggcgattcttctgcctcagcctcccgagtagctgggactacacgtgcgtgtgcgctaccacgcccagctaattttttgtatttttagtagagacggggtttcaccatgttggcctggatggtctctatctctcgacctcatcatctgcctgcctcggcctcccaaagtgttgggattacaggcgtgagccaccgcacccggctgagcatcttttcataggctattggccatttgtatatcttctttagagaaatgtctttcaagtcctttgcctatttttaaagttggattattttttgttgttgaattgtaagagttctctgtataagtcctttatcatttgcaaatattttttcccattctgtggagtttttcacttttttgatagtgtcctttgaaacacaaagatttatcattttaatgaggtccaatttgtcatttttgttattattattgcttgtgttttcagggtcatagctaagaaaccattggtgaatccaaggttatgcaaacatacttctgtgttttcttctaagaattttatagcttttgcccttatattttggtctgtgatccattttgagttaatttgtgtgtatggtccaacattgtgggttggaccctccttgtagttagagattatgtttagtactagtagtagtctttatattttatttaaatgtatatcttatttttggcatttgttacagtttgcactgttacgtctttgtgtgcatagcatttcttcctttgtaggtggcagaaaatggatccatttctccaccctttgtctcttttagcttttatcattttattgatctagtgtttggttacagctatctgattgaaaaagtaatagtttcagagtagagttagaggtgtaaataatatgaaagtaatatgtacacgctctttaaacacttgataataccaacctgtatcatttgacccatgttatcatttatagctatacacattgaataactttcttggtgaacttacggataatatgaaaactgctgtgaaagttttcatgctcttttttcctatatattaaaccagtgatagacttaaagggaaaagtgaaatggaatggcaacagcctggggatgtgagtacagacaattatgaagttttggtaatagaatgaaaacagcaagagtaattttccagattatgctatgtgtaaccaccattctaagtttgcgtcttaacctggccatggtgattttccagcacctgtcatccatgaagatcaagaaggatttcaaggtggccctatataaaagccatggaattttttcctccctgtttctgacctcctttctctggaaacttttgttcctaaaagagactggagacctggaacagtctccctactcttcccaccgtacccccaccccattcctgcagctgcaatctggagcagcactgtgatcacactagatcacactttcctgtgagtcagactgcagctctggaatgtgctttgctgagatgacggcacagagaagagccatgggagacagagcacacagcctggcagagtcttcaggggtggccagatgcaagcacacagtgccacgtgcctctgtgggcatgaagcagagaaaggatgagatcaagcctgacccaacttgacttcctcctctagctgagccaccgcaccttgctgcccctctcctccccttttgcctctgtcaaatgacctactctgccctctctcccagctgctgctagacccagagcacttggtgcagccagctggcgggtttggtaggctcacccttgttgtgctgatttcttggctccacagttctcaatggcttgagccagctcagctctttctccacagggaactggagcaaaaatcctgtagagcaattcttgggttggacacccccttcccacgagagaggattatacatgaacagatgcccttgtttcttcctcacttgctgctctggcactggtattataaatggtctgaattttcacatttatttgcacagatacaaaagacagtgacagatgcttgattatatagtgagactaacaaccaggtattaaacattgcactgatacttgtcattgccttcaaaataagctctacgtgttttctttacttcagttgtctcatttaaccataaataagtcctcagaggtcaggggctgtgactcatctggttttggtactggaccatgaatgcagtagacacccagcaagtatgggttgatgggaaacagcaatggctgattgagcagctgagaaggtggggtgaggttgtggctccccttctcttctcaggatgaaccagtccatggagttgtgctacaaatgttgttgtttgtctaaggagattgatgagaatgccagtgagctagaaattgccaggaatactctgctttgggacagaggtgatgtctagtctgttccaatcagatagaggatgagacactgggaaccaaggtccctgaagaatattcagtcagtgtaaacaaacagggaacagcacaaggagggacacttaggaaagtggcaagggaggaacaagggcagctcttgggtgaagatgtttataaagaaaatagaggctgggcccggtgtctcacgcctgtaatcccagcactttgggaggccgagacgggcagatcacgaggtcaggagatcgagaccatcctggctaacacagtgaaaccccgtctctactaaaaatacaaaaaattagccaggcatggtggctggtgcctgtagtcccagctacttgggaggctgaggcaggagagtggcgtcaacccaggaggcggagcttgcagtgagcccagatcacaccactgcactccagcctgggcaacagagcgagactccatctcaaaaaaaaaagaaaatagagaattcagtcgataatgatgtaagggttttaaagcatttattacaattaatatagaactgaaagttcaagcaaaaattaagcaaccacaggcagatgatagaagaattaaaatatgacatttaacattgaatgaaataaaattacctgagaggaaggaactcatcatttgaattaaacaaaaaaggagaactgagccgtcaagaggtagcttgtggggagagactcctcaggcctctggtagttgtatgtcaaggcaactgtgtgaggccttccacacgtacctggcctgccacctggtttcccataagcgcaagaccacccttcctttctttggtgtggaatctcagtgcaggttgtctacagctcctagaggagggaacaagagaggactagattatatttgcctgctatggagtgggaagaagagtgaaataaatgtcaaaatcttcttgatgcctcccaatgaaatcagacttttggaaaacttcagaagtggcttattcagctttgtacctcgagtctttgcacacaggtaagttaaatagaacgctgactactctggaatcccacagacattgaatgaggagaagctgaacatctctgaggacctatctcctcaagagctatggaaaagtgggaaactgcagtgacagcaaggataccaggaaatcttgtctttaaaatttttgaacgtaattctggcttgtactcagctcatggttgcatcattctctcttcagaaaaggctagaacaagatttcctgaaatgatatatgttcaagagctaccacatatttgggagaaagtgtcattcctaatggcagaccataaaagcactatctggtaatttacttttatgtttcagttttgaacttcttccaggtgcttcctaaatattaatatctggtctctgttttatgtttgggtggaaagttggggagagtatagcccaaggagctgaggagcaacgatgaagccacatacctgtgagcactgtgacttttaggccttgtggcaactatgactcatctgtcacctctgcctggacagagtgtgctctgttaatattgtggtaaaaacaacactaagtatgcccatttacttatatgcatttatatgtgtccgctttatacactacctggaagcttccataagaagagactgtttccagtcactgccgccacggaggaaatggatgctatgcggcaggctccctgaatgcctgctagaaccatgtgaattgtatgtgtatgtatgcattaacttatatttatttgtttatttactgatataaaattaacataaaattggccattttaaagtatgtaattcagtggtagcacattcacaatgctgtactaccaactctatatcattccaaaacagttcagtcacaccaaaggaaatcctgtacatattaagcagtccctccccactaaccccttccccagcccattgcaaccaccagtctgctttctgtttctgtgtatttgtctattctgaatatttcatacaaatagaatgataacagcatctgaccttttgtgtctggcttcttaaacttaggataatgttttcaaggctcatccatgctgtagcatgtaccagtatttcatttctttttatggctgaataatattctgttgtatagatatatcacatcttatgcatttatcagtttatggacatttgtgttgttttcactttttggctattatgaataatgttgctacgaacatctgcacagaagtttttctgtggacatctgttttcatttctcttggtgtagatatgcttaggagtaagttactgggtcatatggtaattatgtgtttaactttttgaggaaccaccctactgttttccacagtggctacatcattttaaattttcaccagtggtgcaatttctccacatcctcgccagcacttgctattttctttttgtaacaataaccatcctaatgggtgtgaagtggtatctcactgtggcttttattcacatctctctaatgactgatgatgagcttcttttcatgtgctcattgtccatttgcatatctactatggagaaatgatttttcaagtctttttttaaaattatattgtatttttattgttgagttgtaagagttttcttattttattttattttattttaagttccaggttacatgtgcaggatgtgcagctttgttacataggtaaatgtgtgccatggtagtttgctgcacctatcaacccatcacctgggtattaagccccacatgcattagctatttatcctgaggctctccctttccccactccctaccccatacaggccccagtgtgtgttgttcccttccctgtgtccataagttctcattgttcagctcccccttgtaagtgagaacatgtagcgtttggttttctgttcctgtgatattctgctggggataacggctcccagctccatatccacgtccctgcaaaggacatgatctcgttccttctttttttttttattttttaatttttttagatggagtctcgctgtgttgccaggctggaatgcagtggtggcatgatctcagctcactgcaacctctgcctcctgggttcaagcagttctcctgcctcagcctcccaggtagctgggactacagacgtgcaccacaatgcctggctaattttttttgtatgttagtggagacggggtttcaccctgttggccaggatggtcttgatctcctgacctcatgatccgcccacctcggcctcccaaagtgctggaattataggcgtaagccaccacgcccagccgatcttgttccttttatggctgcatagtattccatggtgtatatgtaccacatttgctttatccagtctatcattggtgggcatttgggttgattctgtctttgctattgtgaataatgctgcagtgaacatatgcatgcatgtatcttcatcatagaatgaagatacattatattcctttgggtgtatacccagtaatgagattgctgagtcaaatggtatttctggttctaggtctttgaggaatcaccacactgtcttccacaatggttaaactaatttatattcccatcaacagtgtaacagtgttcctatttctccacagcctcaccagcatctgttgtttcttgactttttaataatcaccatcctgactgacatgagatggtatctcattgtggttttgatttgcatttctgtaagagttctatttttatatattgtagatataagacccctataatatacatgctttgcgaaattttcctcccatcctgtaggttgtctttttactttcttgatagtgtcctttgatacacagaagttttaattttttttttttttaaagagacagggtcttgctctgtcacccaggctggagtgcagtggtgggattatagctcactgcagcctcaaactcttggactcaggcgagcttctcaaagtgctgggattgtaagggtgagtcactatgcccagccaagttttatgtttgatgacactcaaattgtctattttttcttttgttgcttgtgcttttggtatcttttctaagaactgttatcaaatccaaggtcatgaagatttactcctgtgtttttgttcaagaatgttacagttttagcctgtgtatgcatttaggtattggggacattttaaattaatttggctagctcattgcaattcccccttaatcttaggattgacatttctatttctgcgaaaatagcctttttttttttttttttcggccagagtctcactctgtcgcacaggctggaatacagtggcactatcttggctcactgcaacctccgcctctcgggttccagcaattctcctgcctcagtctcccaagtagctgggaatacaggtgcacacactgtaatggacatctccactaaaccccaggcactccaccatgcccggctaattcttgtatttttagtggaaaaggagtttcgccgtattggccaggctggtgagccttatcaaaaaccattggtttttgataaggattgcattgaatcactatatggcagtagcttaataatattcagtttttcagttcatgaagacaagatgcctttccatttatttaggtcttctttaatttctttcagaaatgttttggagttttcattgtacaagtcttatatttccttatttacatttctattttattattttgatgttattataaaccagtttgtttcttaattttcttttcagattgttcattgctagtgtataaaaaaaacaacttatttttgtttgttgatcttgtatcctgcaactttgctgaagtttttagctgtaacagatttttgtggatttttaaaaaattttctacataaaagattgtcatcgcgagtaaagacagttttacttcttcctttccaatttgttttttatttatttctttttcttaattgctgtaggtagaatttccagtacagcgttgaatggaagtagcaaaagcaggaatcattgttttgttcctgatcttggggagagctctcattctttcaccattgagtgtgttagctgtggagttttcatcaatgccctatgccaggttgaggaagttccttcttttcctgctttgttgagtcttttttgtcctgaaagaatcttggattttgtcaagtgctttttctgcacagtataatcacactttttaaattttatatactatatagttaggaatcagagaagtgtgttacctacagtgattcttagtagagaaggtgtttataaccaaattactgaaataattgctttgagtcatcaggatatagaaccagttcaattctactggatccttctttgcagtgatattctctatagtgggaatttacaaatatgtacgtatcattacttttttatttaattacttttaacatgcttctcattttaaaatagttttagctgtatagaaaagtttgcgaagataatacagagcattcccaaatacagagtgttcccacgtactccatacccagtttcccctgttgttacatcttacattattatgacacatacataacaattaattaagcagtattgtcacaatattattcactgaagttcatactttatttaaatctccttagattttccctgatgtccattttctgttgcagcaccccattcgtgatagcacattacatctcattgtcatgtctccttaggctcctgtagactttcttaaatgctttttgctttttattaccaggacaattttgaggattactggacagatattttgtagaggatcccttattttgtgttttttttatatatatttagacaggtatggatttgggagaaaaagattgcctacataaaattccattttcattacatcctatcaaaggtacatactatcaacatgatgtatctctgctggcattaatcatagttgctggctcaggtagcaatcatgatttgtctggtgtctatgaagttactttttaagaaaattaagctatttttaaactcccattttataatgcctgggaggtgaagctggagcatgcactgttacctccattggtacctaagatagtctgaagcaagagcatttgtgacatagacaacaacatcagagaaggcgtggcatacaagctaaatttctgagtagtctttgaagtcaactgttattcatgtttgtttcaggattaatggtataggattgggggcacttctaagaccttaaacataattttgcagtggataaatatatcagattgtatccattcatcagtttatggacattagggccatcaaaagatgcagcatcacccttcagtgctgtcaaatggaaataataaggcctgttgtaagttgccttttgttgcaagtgttaaataggataatatataagagatgttgttccattaatagacctttgtcaagtgcctactgtgtcacatcatcctgcagtgcaaacagtggcatgtacaaaagagagaaaaaacagctcctgtcctaaaatatctgtatgaataaaagccacctccataataagttttgtcctggatgatatgagctaatgtttccaaaatactgaccttagattactttatgccattttgggagtgggaagtactaacttaaaatgaatattgcttctctgagccacattgttggtgttcagctgctgctcagttcttggggtgcgccagagacaagccccagtcttcagggcagtgacaatcatgtcatcaagacttgccacagctttgggtacgctatgttctaatagatttcctttaggccaaaagatatctttaatgccagtaagtgcactgcagaggtttaatgtattgggcaaggatctctaaagtcaggagaccaatgcagagttaacacgcttttgtgtacgtggtttgtgtttgaatcagaattcctctcgtgtcattttctagttggtttggctggattttttttttaagtaatataatctcattcctttatcttctgcaaaagagatccatctatcggtgtaaaggcttttcctgtcatcctcttcattctatacagtccggctatcattattcagtcttgaaggaaaaccaaactgagtttattaaaatctgatatgaattaaaaaaaatttttccctttaaggtgcatacattaactcaaactgtaatataatattaccaagggtgatagataggttgcacagtaaacattctataaattttagcaggaattaatttttttattcagctatagattttaataattttattttctaaatataaattttgaaaacatgtcagtgcatattatacacgaaggagataaacaattgtgttattttctcagaattacctggcaagtaatttattactatatacaaggccttagttttaaaaacccgcatataattgttttatataattaaaatagtttgtgtgtgtgtgtactttgaggtaagaacagctgagcaaccaacttttaaagtaatcgttttttagttccattggtctttttagctttatttatgagaacttacaacttagtttaggaacaatatcaatgtcaaaaatgggatactatgctgtcatctaaaattaaggaatgtgaacagtctgtgttaatatggaatgatcacaaggattattataataaatgaacaaggtccaaaacaagcacaaaagtgtgttaccatttggttaaaacaaagtgccataggcactaatgttctttctatgcatgaaatatctttggaagatacacaagaagctggcaactttaattgccccatgggagaatgaggcagttaggaatagaagggagaagtttgaattttgaactatgtgaatgggttacctgtgttaaaaattagccttttgtaatgaataatctaaaacagagtcctggccagctttaagatttgttaatgattaagttggttttagtcatggagttgatcttgtgtgctctgagatataattctacacaatgaatctctgcatatgtctttttaggtggtaggattattcagctttaaataatttagatgtttggggtcttggtttaaatgtctttttggtgttaacagaatcatggaatcttaagagttcaattggcccttaaatactagttacaaattattgatttactacttcgtctcagctgcacatttgagcacctcccatggtggcacattgctctactgcagcccctgtgcagctccctttcctagaaggctctctcctatcttgagcttgaacctctctccctggatcttctgccccttggaactgacgcttcctctcagggtcatgtagggtcacataggatcagtctgtttgctttttctacatgatactctgaatatgcatatatgtatattacccttttttttttttttaagggatggggtctcactctgttgcctaggcccagtcatggctcactgcagcctcatcaacctcctgggctcaagtgattttcctgcttcagcctcttgagtagctggaaccacaagtgctaagtctttatagtgctgagcttcacattcttttctcctctggctctttaatgtctttaagagcaactctattaatattagttacaaaataattttagccacctgctcagcacatgtattctatttcccccaccgtgctgcctttaaggtggtgtagttaaatgaaaaaaggaataaggaggaaaggaaggaagagaagaaagtttatgctaaagattgaccagagaattctatatcatgtctgtgctgaaggagcccactatcttttcaggaagatagagaggatgtattcatacacatgcatgtgttctattctaatagaatgcaagctattaatagaaagcgtactagcaggatacagatcagagaattacagcagctgccaggagtagtcaaggaagacattttgaaagacaaagttcagccaggttttgagaaggacaagttagatctctctgtgatggtaacatgggatcatttggttttgttttgattatgagatgaaactcaccatttaaaccttttttttttttttttttgagacggagtctcactctgtcaccgaggctggagtgcagtggcgtgatcttggctcactgcaacctctgcatcccgggttcaagcaattttcctgcctcacccttccaagtaactgggattacaggcaccacacctggctaatttttttatttttagtagagacgggttttcgccatgttggccaggctggtctcgaactcctgaccccaggtgatccacccgcctcagcctcccaaagtgctgggattacagggatgagccaccgcacccggcccatttaaaccattttaaagggtatacacaattcatcggttttgtttttttgtttctttggggtttttttgagacagaatctctctctgtcatcaggctggagtgcagtggcgtgatctcggctaactgcaatctccacctcccgggttcaaacgagttccctgcctcagcctcccgtgtagctgggactacaggcacacatcaccacgcccggctaattttttgtattttagtagagacggggtttcaccatgttggccaggatggtctcaatctcctgaccccaggcgatccacccacctcggcctcccaaagtgctgtgattacaggcattagctagcatgcctggcccatttaaaccattttaaagggtatacaattctcactgggtttttgtttttgtttttttgagatggagtctcactctgtcaccaggctggagtgcagtggcacaatctcagctcactgcagtctccgcctcctgggttcaagcaagtccccagcctcagcctcccaagtagctgggactacaggtgcacaccaccatgcccagctaattttttgtattttagtagagacggggtttcaccatgttggccaggatggtctcgatctcctgaccttgtgatccgcccaccttggcctcccaaagtgctgggattacaggcgtgagccaccacgcccggccaattcatatgggttttagtgtgttcacaatgttattgtgaccatcaccactatctaattccaaatgtctggatcattccattttttaataattccttacatgaatcatcttgaaagtgaagcccaaatgaatcatctgggcatgtcatgtagtctcaccctgccttggctgcctcgtctgtagattgtagatttgggttatgtgatctcttcatcctctcatctctgttctcgcttctgtcttattgtgcgcgcctctctcttgatgacctgagcgtctttgaaggaaggggctctgccctttcttgcctgtgtgtgcacatatccatttggcccaggcctctcagtgccgtctggcacagagctgtgtgaatacagggcccccataaatgtttattagagaaatcaaaggtgtgctcagttctaagttgagtgcctagactacagtcagattttcaaactttaaaagttcaagtatgggaggccaaggcaggcagatcacctgaggtcaggagttcaataccagtctggccaacatggtgaaaccctgtctctacaaaaattagccaggcatgatggtgggtgcctgtagtcccagctactcaggaggctgaggcgggagaattgcttgaacccgggaggcggaggttgcagtgactggagatcgtgccattgcactccagcctaggcgacagagtgagatggagggaagtcattgcaagataagactggaaaggtagattgagatcatgttgcagagggcttgagaattatcttatgggcaaactgctgaggcatttgatatgatccaagtagtgtcttagtggcaggcaggaagcagagttcagagcttgaatgtccagggcgaggtgctcagccctgtcagccctgcagggaggcccagcagaggaatggatgcaagagaagggcttcttgagtgatgaaaaaatctggattcagcaatggttaggatttgaggagtaaggaaaacaaaaaggtctaaagatggctttgaagttttcaaccttgataacttggaaaataataggcctggggagagggcaggagaaggtttagacttgaagtcagagacccaccgcttggagcagctgtacagcctgtgacgttccctaagcttctggcctcctggccacaggaggcatagtcctccaagggctgattagaggtaagactcggcctgagtcaggcctatactcaggcactgctgacctgacgcgggtctcctttggtgctctgcctcacctgctgcagcctcacagccagctagggggtgcacagaaggtggagttaatgacaggatgtcatgggaagtaggggctggcgtcccaggaggatgggggtgactcgagagttagcatctgtactacagattaatgtcccaggcacagcatcggccctgcatggatgaggcgaaaaccctttcatccaccaggataactaattgaatcacactttgagcctcttcaagaaaatgaaaaaatgtcaggtcaactccctaaattttcagttgacgttgcaagtaacctcatacattaaaaggctaggttaggtcaagcccataatatgaaattatccaggcaccctctttggtttattcttggccatgttcacttagccacatctagaatgagatggagtagaaaaacacttgtgagtgccaggacacccatgttctttttgccactaagcagcgtggcccacagcagtctcagtatccgctacgccctagtctgtccatctgtgagatgaagatgagagaaattgccacaggaccttgtagtgcactaacagcttggagttttttagccatgtaaagaattaaaatgaggatcatctctttatcataagattgcctcctcttgtaaagtaagtcactgaataagaaatgatttaccacagacaagcaaatgctgagagattttgtcaccaccaggcctgccctaaaagagttcctgaaggaagcactaaacatggaaaggaacatctggtaccagccactgcaaaaacatgccaaattgtaaagaccatcgaggctaggaagaaactgcatcaactaacaagcaaaatagccagctgacatcataatgaaaggatcaaattcacacataacgatattaactttgaatgtaaatgggctaaatgctccaattaaaagacacagactggcaaattggataaagagtcaagacccatcagtgtgctgagactgaggaaacccatctcacgtgcagagacacatataggcccaaaatgaagggatggaggaagatctaccaagcaaatggaaaacagaaaaaggcaggggttgcaatcctagtctctgataaaacagactttaaaccaacaaagatcaaaagagacaaagaaggccattacataatggtaaagggatcaattaaacaagaagaactaactatctgaaatatatatgcacccaatacaggagcacccagattcataaagcaagtcctgagtgacttacagagacttagactcccacacaataataatgggagactttaacaccccactgtcaacattagacagatcaacgagacagaaagttaacaaggatattcaggaattgaactcagctctgcaccaagtggaactaatagacatctacagaactgtccatcccaaatcaacagaatatacattcttttcagcaccacaacacacctattccaaaattgaccacatagttggaagtaaagcactcctcagcaaatgtaaaagaacagaaattataacaaactgtctctcagaccacagtgcaatcaaactagaactcaggattaagaaagtcactcaaaactgctcaactacatggaaactgaacaacctgctcctgaatgactactgggtacataacgaaatgaaggcagaaataaagatgttctttgaaaccaatgagaacaaagacacaacataccagaatctctgggacacattcaaagcagtgtgtagagggaaattgatagcactaaatgcccacaacacaaagcaggaaagatctaaaattgacaccctaacatcacaattaaaagaactagaaaagcaagagcaaacacattcaaaagctagcagaaggcaagaaataactaagatcagagcagaactgaagaagacagagacacaaaaaacccttcaaaaaattaatgaatccaggacctggttttttgaaaagatcaacaaaattgatagaccactagcaagactaataaagaagaaaagagagaagaatcaaagagacgcaataaaaaatgataaaggggatatcaccaccgatcccacagaaatacaaactaccatcagagaatactataaacacctctacgcaaataaactagaaaatctagaagaaatggatacattcctcgacacatacatcctcccaagactaaaccaggaagaagttgaatctctgaatagaccaataacaggctctgaaattgaggcaataatcaataccttaccaaccaaaaaaagtccaggaccatatggattcaaagccgaattctaccagaggtacaaggaggagctggtaccattccttctgaaactattccaatcaatagaaaaagagggaatcctccctaactcattttatgaggccggcatcatcctgataccaaagcctggcagagacacaaccaaaaaagagaattttagaccaatgtccttgatgaacattgatgcaaaaatcctcaataaaatactggcaaatcgaatccagcagcacctcaaaaagcttatccaccatgatcaagtgggcttcatccctgggatgcaaggctggttcaacatacacaaatcaataaatgtaatccagcatataaacagaaccaaagacaaaaactacatgattatctcaatagaggcacaaaaggcctttgacaaaattcaacaaccttcatgctaaaaactctcaataaattaggtattgatgagacgtacctcaaaataataagagctatctatggcaaacccacagccaatatcatactgaatgggcaaaaactggaagcatttcctttgaaaactggcacaagacagggatgccctctctcaccactcctattcaacatagtgttggaagttctggccagggcagtcaggcaggagaaggaaataaagggtattcagttaggaaaagaggaagtcaaattgtccctgtttacagatgacatgattgcatatctagaaaaccccattgtttcagcccaaaatctccttaagctgataagcaacttcagcaaagtctcaggatacaaaatcaatgtgcaaaaatcacaagcattcttatacaccaataacaggcaaacagagagccaaatcatgagtgaactcccattcacaattgcttcaaagagaataaaatacctaggaatccaacttacaagggacgtgaaggacctcttcaaggagaactacaaaccactgctcaatgaaataaaagaggatacaaacaaatggaagaacattccatgctcatgggtaggaagaatcaatatcatgaaaatggccatactgcccaaggtaatttatagattcagtgccatccccatcaagctaccagtgactttcttcacagaattggaaaaaactacttgaaagttcatatggaaccaaaaaagagcccgcattgccaagtcagtcctaagccaaaagaacaaagctggaggtatcacactacctgacttcaaactatactacaaggctacagtaaccaaaacagcatggtactggtaccaaaacagagatatagaccaatggaacagaacagagccctcagaaataatgccgcatatctacaactatctgatctttgacaaacctgagaaaaacaagcaatggggaaaggattccctatttaataaatggtgctgggaaaactggctagccatatgtagaaagctgaaactggataccttccttacaccttatacacaaattaattcaagatggattaaagacttacatgttagacctaaaaccataaaaaccctagaagaaaacctaggcaataccattcaggagataggcatgggcaaggactccatgactaaaacacccaaagcaatggcaacaaaagccaaaattaacaaatgggatctaattaaactaaagagcttctgcacagcaaaagaaactaccatcagagtgaacaggcaacctacagaacgggaggaaattttcacaacctactcatctgacaaagggctaatatccagaatctacaatgaactcaaacaaatttacaagaaaaaaacaaacaaccccatcaacaaatgggcgaaggatatgaacagacactctcaaaagaagacatttatgcagccagaaaacacatgaaaaaatgctcatcgtcactggccatcagagaaatgcaaatcaaaaccacaatgagataccatctcatgccagttagaatggcaatcattaaaaagtcaggaaacaacaggtgctggggaggatgtggagaaataggaacacttttacactgttggtgggactgtaaactagttcaaccattgtggaagtcagtgtggcgattcctcagggatctagaactagaaataccatttgacccagccatcccattactgggtatatacccaaaggattataaatcatgctgctataaagacacatgcacacgtatgtttattgtggcactattcacaatagcaaagaccaggaaccaacccatatgtccaacagcgatagactggattaagcaaatgtggcacatatacaccatggaatactatgcagccataaaaaatgatgagttcacgtcctttgtagggacatggatgaaggtggaaaccatcattctcagcaaactatcacaaggacaaaaaaccgaacaccgcatgttctcactcataggtgggaattgaacaatgagaatacatggacacaggaaggggaagatcacactctggggactgttgtggggtggcgggagcggggagggatagcattaggagatatacctaatgctaaatgacaagttaatgggtgcagcacagcaacatggcacatgtatacatatgtaacaaacctgcacgttgtgcacatgtaccctaaaacttaaagtataataataataaaaatttaaaaaaaaagaaatgatttaccgctagtaggaatttctgatgtcacaaaaaaaatgtttccctttacttaagaattttgaatatttgataaggcattaatttatctgtgatatatattttcatacgaaaaccaaagtaccctaagtgtgtgtatgtgtttaagaaattgctcaggatactctgtctctgcttttgaaaactttctcttccttctatgtgttatagaactaaatccaaacgggaaatttggctttgtgcactgacagatcatgtgattcctcccccctccctggcccccagcacccccatcggtgctcagcgagtcccctgcacactctgttcagtaaacaagtttagagaaccagacccgccggttcattcactgagagcatttggaaagggctgtctttgtgcagccttgacgtactggccggagtggaatggagaagttagcatttgtgttttcattagttctttttatagcagcggaccagctggaactggttaacattagcctgggctgcctggtagtgcacaggtctcttacgcaggatgaagggcttctgatgaaaacagattttgttactcatgataccactgactgtgtttacatgaactcactcattctgtcatgggatgtgatttagaatggcttccttaaaatgcaggaactccctaggtgctattcagatccatccttaaaaacaaacgagagactcaaaaatatagatggctttccctattaaactagccatccttccacagaacatgcttcctgagataatgcttttaaagaaagctaaattttggctacttgggatgttttccccatggtgttttaaaaattggttagagaaggttgtttttcctccagtaacagcaaggaatcatcatcttatggggatagagaataatttaaccaaccatttctgacaaagttcaacagaattgttccatgttttcatgggtagaattctgactaaaggcaaaaattaacaattttaagaatcattagtttaggatacattaatataagttgagcatccctaagccaaaacttgttgagcaccagcatgagtggctgaaatagtgacaccttttctttcttatgagtcagtgtacacaactttgtttcatgtataaaataatttaaaataaaaataaaatgcataaaattaccttcaggctatctgtataaggaatatatgaaacataaatgaatgtcatgtttagacttgggtcccatccccaagatatcttattatgtctatgcaaatatttcaaatctgaaaaaaaactcctgtcccaagcaatttgggtagggaatagtcaacctgtgtatcatgaatacacatatactgacttctgtctaacaaaatggaaatgggagataaaaaacatcgaatggagaatgtttgttggttttttggtgtggcttgttttgggattaaagtataaaccaacttagccaatattctcaagtagctgaaaatctgtagggctcagctactttctggatcagtctcattgaaaatgtatcctccatttaaacttaatttatttgcaaaaatgagtttagggcctttgaaaagtgctaaatgattaagttgtaaaaatataaggactgagattctccctttaagggtcacagcagctgtttgaagagatgcaggcatctctcacagtttagctagatgacttaaggaaaagtttcgtttgattcttcctgatgctgtcttttcccctagaatagggtagacagtattaggagtttagtaatcatatgtgttaggatggtagtagggacacaattgtcatccacctcacaggagattgtttagtagattaagtgagataacaaagatgagatgctggacacccagtaggtctgggttttgggggttttattttatttatacatagcaggtattggcaagcatattattttaggcttggcgggccataccacagtctgaaagcatcagtctgaaacactgaaagcagccgcagacaataatatctagatagatggatgtggctgtgtgccagtagaactttaggtacaaagggccaggtgtggtggctcatgcctgtaatcccaacactttgggaggccgaggcaggtggatcacctgaggtcaggagttcgagaccagcctggccaacatagtgaagccccttctctactaaagatacaaaaattagctgggtgtggcggcatgaacctgtaatcccagctactcaggaggctgaagcaagagaaccattgaacctaggagaggtggaggttgcagtgagccgagatcgtgctactgcactccagcctgggtgacagaacgatactctgtctcaaaaaaagaaactttatgtataaaaatcggggacaggcaaaatttggcccacaggccataatttgccaacctctaatctatataaataggtaaatttctttatgtctggtatttcccttgacttttcttaaagggataaaagggaattttcagccacttttttactatagttccaagttcccatactgcacatcaaaataatacttgaaggtacaaatatgtacttatatattttgaactatatgcagaaaaaatgtaaaattacagtgctgaatgtattcatatgttaatttttagataaaatagcttctgtcacatgaggtaaaatgatgtgacattttgaaatgtcaagttttctcaccatactttgtctcaaatatgttaaattacaaaataatacacgtagcaaattgaatttttgaaccaagataaagtaaaaattaaaacccttataggagaatttattgttcacaagtgaaagaaggaatactggggaaaatagaagagcctcagaaggaaaaacatgtaaaatatgatgaaagcaatatttaatgtaaacgttgaaaagagcagtagagaggagtggaaaagcatccaggatttgtcatcaaaagctcaaaattccggtgccagctctggtctctacaggtttgtgacctggggcaacttacttaattgctctgagcttcagttttcccagtactgagtggacagaataatatactttatatacattgttttagagtgttaaagaaatgtgtgaagtgctttgccctagaactttccattgctataaatactactgtttactgtccacataacagatgcagttccctacatccatcctgggtgatctgaaactgccttctgagaagcgtagttggcctttccagggcaataggacttaagaggacctgtagcttgtctcagttacccacacattggccttggctgtcatcccagcctttacaggtgtgcataggtcaaatgttgtaactctttactcagaaaataccacgtgacctatagccccctatggtcttcccatgcacctgtatggctgatccgacgttcctggttcttgttcacatgggatatagaccacatccatttattatgccctgttgactcaagaaagtaaaagctacaaccatggggcagaaggcacagtacccctgtaacacggaatcccaggccttcttaaagggcaacctacagactgtgagaacaagaactcaacaacagcccccagcaccctgagggaagaggcaggcagaggccaggatgagggcgtcggagggagggacggagagagacagcgatgaagaggctgaggccctcatctctgaccactcccaaaggtcacataggcactggatggtagaggcagaaaataagccctttctctttccaagtctctgccctgcctcatgcaacccatggatcctctgactctgaagtgggcagacgggcaccctagacccaaacttgtgactgccccaaggctttgtaaccatggggaaaagaaagattgcagtctttagttgaagactttgcattctctgtgccctcggttataacaataggtttttagaaaaatctgtcttagggtcaatttatagttcttcaaagtaagagctgaggcttttgttgacagtcaactgggtcttacctcctggtggttgcatatggcatgcattaataaatgaattctaaaaccacacaaatattactgaatatgttcaaactaaaaagcaacacagaaaagtactggatttatgattcatcacaataaatttatcagagaaaatggtgaaagaggaaatgtgtgtctctaaaacagatttggattttatttatttgggacatataaaagaggaaggaagagttgataaagaattcttatttgactcttcaaagtcactgttcaccagaaattcagagaatcaacatacaaattacaatggtagtttgttttctggaaggccagtgaaatacagctccttaatttataatgaaatttactttctaacaaattaagtctttctaatgagaccaacattgagaattcagcccttacctcgggatggtctgagaaaaccaaaaggccaactgttttattgctttagatcagttaggtgatgataactatgagcatttataataatattttaaattggccctgagaggcttgaagacatagaactgaatgtactgccagatatttttgcaggagtcacagatgtaaaagagaattctgcacacacatccccctccccagcacccaaatgcagcatattttcagttaaatcctctggaatggactatttttagagaaatggcagggggaagggtggctaggaagcatgttcttcacaacctttttcattatgtactacaaaaaatatttacgttttaatttaatcacgacatgtgctgtactgtggttcaccctactgagagtgaaataccgagttgaactaccatttcatcttcttcaagcaaactgcaaagtttcgcctactctgaaatttgagagttaacacatggtacccaggcctgggctaggcttggcaaaatgcaaaatgcaagcaacattgctcaacatcacaccctttcactgcactcacagcccatcttgtgcataaaataatgtgacagcctggttcattagtatttttcatgtaattttaagtaccattataggtttcaaaatttgcaaaaatagaaaaattattttacttctactcccagtataattattttacatattatcttctagtctgttttataatatttattttaaattgaaatcataaaacttttttttgctcttagccaaagaatgtcggcaaactctaatggtcctcattcccactgcacagcatttcagtttgactttacatactcaggggaaaagaaggcagcttggttgagaaactgcaagatcccaagtgcctgttttttgtcttttgtttagtcttgtttttttgttttttgtttttttgaggaactaatgaataaagcacacaaaatctccgagcagtagctggcctttcaggggcacgctgcacagcagttctggagaggacagtatctccaagggtgggtgagttccccattgctcagaggaatcagccaaggggcctgcagcggaagctcccaggctgagctggaacttgaaaccaggtctgtctgcctctgcaccttcaagccaacaagggcataaggcaatttgcctctataaatgtagcatccaacttatttcacattctgtgctcagtagaacagtgaccatttagaaacactggtaacagcataaaaacaattattctcattcactctaacggaaactaccactagtacagaattgaaaaatacaagtaatactttcatttgaggcatgagcatttatctgtcagcttaacttgtgagaaacctggctgtcatgataagtgtctgtaatcaggagttaggcaaattaatattatttgcatttttttatgtctagaaaatatttataaacaaaaagccagtcatctgagactctaatgaaggaaggaagtcaagacaaggaagtgtttccttgtctcctcctgcttttgttgactgtgtgggtagccaggaaaggactacagtcttctttataggagggggatggcagcagaagcaacaggaccatgaaccaaggagaatgttctcacctgctgctgttggacctccaggccatgccatctgatgtgtataagaggatatggaaagatttaggttttttctttttgaagactagatatgcaaatgattgaaaaaaaaaaaaaaacaaaaaccaagcatggtggctttgggaggccagggcaagaggattgcttgaggtaaggagttcaagaccaacatgggcaacctgggcagacactcaggaagtgggggtgggagatactgtttactgactgcattcctcatcaccctcagttaatgtttattaggtatactcaaagtacagggcagtattatggcttgaaaaaagcataatgaacttaataagttaaaaataaccttgaggctgagcgtggtggctctcgcctgtaatctcaacactttgggaggctgaggtgggcagattgcttgagcccggggttcagaaccagcctgagcaacatggcaaaacctgatctctaccaaaaatacaaaaatgtagctgagtgtggtggtgcatgccaatagtcccagctactctggaggctgatggcagttggatggattgagcctaggagattgaggctgcagtgagccaagatcgtgccactgcaccccagcctgcgtgacagagtaagaccctgtctcaaaaaaaaaaaaaaaagaattaccgtgactcctgtctagttagatcctcaatgcaactttgaaaaacaacgaaaaaagggccgggcatggtggctcatgcctgtaatcccagcactttgggaggccagggtggatggatcacgaggtcagagttcaagaccagcctggccaagatggtgaaaccccgtctctactaaaaatacaaaaattagccaggcatggtggcgggtgcctgtaatcccagctactcagcaggctgaggcagagaattgcttgaacccgggaggcagaggttgtggtgagccgagatcatgccactgcccagaagcctgggcgacagagcaagaatccatctcaaaaaacaaattaaaaaaaaaaatgaaaaaagaacttttccaaatacaaaagtgagaaaggaaacttaatattctgactcactgaattcttccagcggaaaacctccactctatagagaccctgaaattagtaaggatgttcattaaagccattgtgtttttttagcgtcatgcactgcactgcccaagagccagaggacaccctgctcacctggtccaggcctggctgtggtacccctgcccaccatggctgagtgggagggcgagctgtcattgagcagtgcaaactactcccctggctcagagcctgtacccacaccatcctctcacgcctgggccaggcaacctttgctgacttagcttccacagaacatttgttttctgctttgtagtgtactgcctccacagaaatgaatggagaattgaacagctggagaaagtttttcaccatccagatttcaccagtgcatctcatttatctggctgtaatgatcgatcacctggccccagtaaagcatttgtatgatcaagtaacacttttcttgaaaatggagtcctaaagtttgctgtgttgtcagttaaaagaactgtgggttgggggaaagggagatggttaatgggtccaaagatataaagatatagttataggctgagtgcggtggctgacacctataatcacagcactgtgggaggccgccaacatggtgaaaccctgtctctacttaaaaaaaaaaaatacaaaaattagctggacatgatggcacatgcctataatcccagctactcgggaggctgaggcccaagaatcgcttgaacctgggaggtggaggttgcagtgagccgagattatgccactcctctccagcctgggtgacagagtgactgtctcaaaaaaataaaataaaataactaaaagattaaattggcttatttgtaaaacaatgaaaggataaatgcttgagggataccccatctaccctgatgtgattaagtgttgtatgcctgtatcaaaatatctcttgtacccccataaatatatacacgtactatgtaccctcaaaatttaaaaaaaataaataaactgtggaagaactataaccaagcatcaaaaaacagattgccctggccaggcgcagtggcacctgtagtcccatctatcaggaggctgaggtcagagaatcacttgaagcaagagtttgagtctgtggtatgctatgatcatgcctatgaataggcagtgcactccagctggggcaacatagcaagaccctgtctctaaaaaaaaaattaaaaaagaacagattaccctaagaagaggatatttgggtgaaggtgcttctgacctctgggaggaaggagaaagctgacatgcttacctgcttcccagtgggtgaaaattgggcagacatacatgttggctttctgtgtagccttggataaggagacccacccacaaaggtaactatttccttatatgtagagaactttagtcagaaaagctttgcagtaatttgtgaatgctatacaggcatggctcactttattatgcttcactttactgcactttgcagatagagcatttatttactacttgagggcttgtggcaaccctgcatcaagcagttctatcagtatcatttttccaacagcatgtgttcacctcatgtctctatcacattttggcaattctcataatatttcaaatcccttcattattattatctgttatgatgatctgtgatcagtgatcttttatgttggtattgtaattgtttcaggacaccaccaaccacacctatattggatgccaaatttaatcagcaaatgtgtgtgttctggctcctctactaactggctgttcctccatctctttccctcttttgtgacctccctattccctgaaacacaacaatattgaaattagagaagtcagtaagcctccagtggcctcgaagtgttcagatgaaaggaagagttgcacatctctcactgtaaataaaaaactggaagtgattaagcttagtggggaaggcatggcaaaagccaagacagatcaaaagctagacctttgcattaaacagccaagttggccaggcgcggtggctcatgcctgtaatcccagcactttgggaggccgaggctggaggatcacttgagcccaggagttcgagaccagcctgggcaacatagtgagcccacatctctaagaaaaaaataattagccaggtgtagtgtagtgcctgtagtccctgctacttgggaagctgaggtggaaggatcacttgagcctgggagttcaaggctgcagcgagccatgatcgtaccactgcactccagcctaagcaacagagcaagaccctatctcaaaaaaaaaaaaaaaagagattgtctaaaattgcagctatttggaaacatttactagtgacagaacagtaagataatcatgcctgtcgtgagagtactgttccttctgagggtattgattaccaaatctcaaccaggagccttggcaggagggtgaggggtcctggaattgacagacattcaccattgtcttcgtagactcaaatagtatgtccaacacaaatatattctacttttggaaagcacatagatgtgattttttaattaactaaagtatgtactttattcgcatttccttagtgtttacctagtgttacctaattatgctccaggatcccattcaggacaccacattatactcagttgccatgtctcctcaggctcctcttggctgtcacaacttttgagacttctcttttatgactttaacagttttgaggagtgttaggtattttgtagaatgtccttaactgtgcccaatgcggtggcttacgcctgcaatcccagcactttgggaggccaaggtggatggatcacttgaggcccacagttcaagaccagcctggccaacatggtgaaatcccttctctactaaaaatacaaaaattagctgggcatggtggcacgcacctgcagtcccagctactcgggaggctgaggtgggagaattgcttaaacccaggaggcagaggttgcaatgagccgagatggtaccactgcactcaagcctgggcgacagagcaagacgtgctctcaaaaaagaaaaaaatctccttaactggaatttgtctgatttattacatatgatgagattggagttatgtgagttacgtgttcttaggaggaaaaccacaggataaagtacagttttcatcatgtcgtatccagtgtacactctgtcaacatgagttcctgctgttgatactgaccttgatcacctccctgaggtagtacttgtcaggtttctgcactatgaagttactgtactttttcctcctttccatcctaaagtctttggaaggaagccatcatgcacaatgcacacctaaggaacagagagctccaatccccttgtttgatggtggagcagttgtttggaattcctctgcatgtgagatttgtctcttctctactttttttttcaattatttatatcactatggacttgtacatatttattttacactttgagttataatccaatactattttatttattttgttgttcacattgttccagtttttttcccttggagttatttcaattgatatctgtatccctttgatatactcccataattttgagtgttctgttttgttttgttttgagtacttctttactccctgtcactgtaagatgtgctaggcttatcttgtatattttctgccttcatcctggaatcagccatttttccaaggagacctggctcctttttttcaagaatggtattagataccaagaggtacaagaagatgaaggaaatacaagtgcaatttatttatttatttaaaaaagagacagggtctcactattgcccaggctggtctcagactcctgaactcaggtgattcccttccctcagcctcccaaagtgctgggattacaggcgtgagccaccatacccggcccaaatgcattttattgcatagagttgatactagcattggtagtcatggccagatagaggctttagaagtatgaatgctcggttgtggaatgtttgatatgtacctcttgctactgggagagcttctatagccccaggaaaagatccttttctcaaaactgttctatagatagactttatttagttgtttactaatttgctatttctttcctgtcgctcatttttcagtatcactggtatcctatctccatagacaatacttttatcatttactgccttcctgaagtatttctggaggagatagtgtgagaatttctgtcagcctcagtaactccctgtgccattccagatccctggtgggcctcacttttcctttatctcctctccaggcttcttaactacatgccagcattatcacatactctaaatcatttcaggatatcatcggcatgaacggttcctattcaaaataaggctctctgaatgatttaccattctttttatgagtctctggtgcctagataccatggtttctgtgatctgtgatgatggtattgaaagaatgtgcattctcaaatacttcttaaaatattgtttggctagataggaactaggtattttaactaccaattgtcaaatagtaaaagctttcttttagcctcagaatttctgtttttataaaagtttggtatgctagctaaggagtgttctagttatggttgtctttggtgaaatgacactaacagtacatgggagggaaggtggaatcgtccacgtgtgctcctttgttgtatgtgtggctcccatggagaagttctgtagttcttcacacattataaaaagtgttttgttgcataagtcataacaatgaatatatattaaaatacctcagtgcagcaaattaattaagtctgctctctagggatttctagactaggtaagtgaaatggttcactccttatttcacttgtctctcagagagatacattatttctggacaaaagtggacacaaaattgttggatttgttcatgattttgtttttgacttttagttgtagttgttgatttatctagggaagagtgtatggcgttcctttaccctataacttcacttccacgtatcaaatattagatgtggaatcttcatattcgactacatattgaatgtttcaggcccagtgatgaatcttttctatccaacttaaacagaaggagatttattggccaggtgcagtggctcgcgcctgttatcccagcactctgggaggccgaggcgggtgggtcacttgaggtcaggagttcaagaccagccaggcaaacatggtgaaaccccatctctactaaaaatacaaaaattagccgggcttgatgttgcacatctgtagtcccagctacacgggaggccgaggcaggagaatcgcttgaacccggaggcagaggttgtagtaagccgagatcgcaccattgcactccagcctgggtgacaaaaaaaaaaaaagagagatttattaatggattttaagtggcttttaagcaatactgccatggaagctgctgcctcttctattagtacaaccagaaatatggcaagtcagctcacgtgcatccccagagccacagccgacagcagggaactgcatgacccccagagctgttgccttccagctttcgaaccacttagtgtgggctgcaagctgaatcaacacactggatgccccattcctgccatttaatgctgcagagctattggccaacaccctgagatcttttgttaatgttatgcctgctggcagaagtagcacagttaggccctctgctctgattgacaggtcccaagtcacaggggaacctgagttgggtagagtttgctgaccggcctctggagttaggaaggcccatagaaggcgattggactccttcgtacccaccaaaagagttagaaagaactcttaggaagagagaagtaaaaacatatgatcaaagcagacaataacaacaaagtcccacagtcctaaaatttcattttagaatgccattagctgtagaatgtagcatataaaaagagagagggtggcgtgaggaaaaaatgttttgtcctttaacttaatgttctatctttctaaaagaattcaaagtccaaatatttttatatgtattacttggtagtaagtatgaaaagtataaaattttatgctatggactacaaccattgaactgtgattttttgtttgttttttgttgttgttgttgtttttgagacggagcctcgctctatcgcccaggctggagtgcagtggcacgatctcagctctctgcaacctccacttcctgggttcaagcagttctcctgcctcagcctcccaagtagctggaactacaggtacacactgccacacccagcttttttttttttttttttttttttttttttttttttttttttttgtattttggtagagacggggtttcaccgtgttgcccaggctggtctcgaactcctgagctgaggcaatctgcccatctcggcctcccaaagcgctaggattacaggcgggagccactgcgcctggctgagctgtgatttttaaaaggaaatttttaattagatgctgaaaaagggtatgcatatttgaggtacactttaaaatgtttttaaataagcaaatgttaatgcaaatagatattgcaaacactaagaaattaaataagactaggtaatttttaatttaattttatttagagacaggatctcactgtcacgcagactggagtgcagtgacatgatcatagcttacggcaccctccaacccctgtcctcaagccatactccagccttggcctcccaaagcactggtgatacaggtgtgagccactgtgcccagccagactaatcaattttgacttttctctgtactacttgctatatccaagcatgaacttgtgttatttttgaatattttttatttctgtgatgtaagatttgttatagattcattcctgctttatatctcaagcaagattcaattcgatgcatttacttagtagagtgcctactatagatgagacgttttaaaacagtatggccattacaaatatatgtttaatgatagtgagtagtaagtgcttaaagtaataatgctaagctttaacagttcttgaaatttaagtaaaaggtagtggtactaacacaagcatgaaggaatgccacatgtggctggagtgctgctgggctcccctgcagcctctcaagggaggaggatgaacactcaagggatggaccaactgaagcagggaaacttggccacttactgcctgacatagaagcccagctgactgctgcatcttacccagcccaccatgtgtaagaactggttgagacgacattgaattccctaaacttctgggtgctcagtggtgaactgagatggaatacctgccagcagctgggcagaggaaagaaagccagcactctgggaaggtaggcttcacctacttacatcctaatggggactcacagtggcagcagagctgtgcagagcctcgggccctggcatggtattccagccagagtggactctgcgcacgtgtgggagcagccctggcattcaaggatttgcattgaaggccttggttgaggatgctgtgaaggtggccactgtgtgtatggagcagtgactttatgggtcaagaattcgacatgtggctgggcacagtggcagacacctgtaatcccagcactttgggaggccgaggcaggcggatcacgaagtaaggagatcaagaccatcctggctaacacggtaaaactaaactaaaaatacaaaagttagccgggtgtggtggtgggcgcctgtagtcccagctactcgggaggctgaggcaggtgaatggtgtgaacccaggaggtggaggttgctgtgagccaagatcgtgccactgcactccagcctgggcgacagagcgagactccgtctcaaaaaaaaaaaaaaaaagaaaaagaattcgacatgtgcttgctatgtgaggccagtgagtgaacccgcactctgaggctcagcatttataggtcaagacagcccgctgacttctttgggacctgtcataaactcttctaaagtgttaatgtttttcgtatgcaagaaagctcaccaataaaagaggaaactttagggaaggttgaaaagcaactgtggactggccacggtgatttatccctttaatcccggcactttgggaggcaggaggattgcttgaagccaggagtctgagaccagcctgggcaacaaagtgagaccccgtctctactaaaaatttaaaaattagctgggcatgatggtgcacgcctgtagtcttagctacttgagaggctgaggcaagaggatcgtttgaggccaggagctcaaggctgcagtgagccatgatggcagcagagtgagaccctgtctctaaataaataaataaatggaaaaacaatgggatttgatagaaggcaggaacatgtacaaatattgcaaatttttgcaaatttgggaaattatgaagatcttaatcatacatatggattctagcatatggactgttattgattgaatctggattattttagttggttctactttgttctactgcattgaaaatcattgttagtatatttagtcttctcagctaacatcttatacctagataactgttgaggtttataaaggccttaaaacatgaataatacttacacaactgtgggatgctttttttttaactgaatgtattgtaagtcaaattcagtccatatctaaagtctgaaaattttaatattcagatgactaataggtataactctttaccttctagtctgcattctgtagtatttgccatacttctataactgcaacttctattttatttattttaattttttatttgtttgttttgagacagtcttcctctcttacccaggctggagtgcagtggtgcagtcacagctcactgcagccttagtctcccatgctcaaacaatcctcccacctcagcctccagagtagctgggacttaaggcacatatcaccacacctggctagtgttgttgttgttgttgttgttgttgttgttttctagagacggtttcatcatcttgcccagcctgctctcaaactcctaggctcaagtgatcctcccaccttgacctcccaaagttctgggattacaggcgtgagccattgtgcctgaccgcaacttctattttagagaaagctgcaactcaataattagtggaatatttcctatgtatattatatacacaaaaaagcatttgccatgaaaaacctaaactgtgtattcaaaagctttaatataaacagtattattcaaaatggaaagactttcattcctgccctcatgaaatagaaattcagctatatttgatcatgactgtagaatattactagagattgggttttttatgttatgttttgttcaagtagatacacctttttgaggtcattcatatagttagtgacatgtaaatgctttttaactacactgtttaaacagtatcaacagaggcttcgagtgtgatgtttacatttctggaacttacgggctgtaccctcagtctgtcctggaacctctgcattccaccctcagtctatcctggctgctgtgaagatggagtgctggtggctggtcgttagcagtcactccacctcacacccaagtttagccacatggccaagccagtcctgtggtgtttatcaaggaagaagggccctggagattgcaggctccactttctgcctccccagccatccctttacttgcatacctggcaggaagggttaggtaggacagccaagcacagcataaatctgaacggaagctgatgtcaggtctctctccttcttagctgtgccccacagctgtgccccactatcacgcaagttgtttcatgtggcacattctgtgatgatgacgtaatcgtgttaccttcatttactgagtgcttgctaggcattacaaaattatgaagcacctcctcgtgttgggtttaggaatatagagcaatgaacaaaacagacaaggggccggctctccagaataaagtaaataagatcattttcaattggtttgtagccaggtaaccttggacaaattaccttatactttacttttctcatttgtaaaatggaggttatgatggtatctccttatgtgattgatatattaatgagataatactcaaaaagcacttagaacaggtcctagtacatggtgaatgctaagtgctcaaaaagcactcccaattattatgagacataatactgtgtgccatgatatggagtaacctggataggagcatcaaggtcaccttggaatgagcagtgaggggaagctgaagagggagagcttcaaggtgaaacctaacggatgaagtggagtcagccacgaaaagctccaggagacacactttccatgcaaagacaccagctattgcaaagaaaaggatggacttgctgtgttctaggagcagaagagaggccagtgtacctgggatgtagagatgtacccaggggctgagacagatgattagcacacagaagagccaggtgccagaagtttagacttcattccaaggacagtgagaagcctttaaggttttcagcatgagatacatgtgatccaatctgtgctttgaaaagatcactccagctgctccagatcaaatggaatgtggaggtacaagaataggaacaggaaacaagttaggctatttcaaaaatccagccaggtcagactgacgacctggaccagagtgcttatggtgaaaagcagaaaggctcagggtctgttttagagatatggtttacagtaacagctaaaaatcagatgtgggatgataggaagtgggggctcaaggatgactgtgaggttgttggactggtggtggtgtggtcattgaggtgaggggtgactgggggaggccagaattctagtgatggccttgttgaggtggagacctctaagacaccaagctgaaggagtcaaattggatatgcgcttaccgtggaggagagaggtaagcacgtgaaggccaggcactggacccgggaaggaattatcttctctagtctttataaaaacactgtaagataaataacatctagctatgggaaacagaaattaatgaaagccactttctaaggttaattttaagttaaaggatttttttcaccttaaagtagtagataaaccagtggaatagagagtcccaaatatatacaggaacttagttaataatacatttcaaatcaatagggaaagatgaaccattcaataaatgggtaaggacagtaggttagccatctggaaaaagaaatgaattcgatttacactttaatcttacaccaagataggttacaaatgaatcaaagatttaaaaactgaaatcgtaaaagttctagaagaaatagtgggagaagtatcttgaggtggaagttttttcttgatttttcaagatttttcttgattcaacatccatggatccaaaagaaaaaattaagcctacatgacaaaattaaaagttaaatggcaaattgagaatatatatgtatgatttgtattacaaagagccactctttctagtacatgaggtactcatagaaattagtagggaagactgacaactcagtataaaaatgggcaaagggtatgaatacacagttcataaaaggaaaagatgctcaatgtctcatgataaaaaatatgaattaaaataacactattatttttcccctaccaattttgcagaaatctaaaattttagtaacttttgtttggtgaggctgaggggcaataaacactcttcctttggtggagggagagtacattgtcaccactccagagagagcaccttggcatgtgtatatacagatgtgtgtgtgtgaattttaaacaggtcagctctttgacccagcacttctacttcttggaatttatccaacagatatacttgtgtatatatgaaatacaagcttattccttgccccattctttgtgatagcaagtggaaatggcctgaaggtcagcattaggaaattaaaaattatggcacgtgctcatagtagaatactatgcagctctctatatggctacaagaagaatgaggaaacaatgaactgtcacagaaaaatctatgacattggttacattgaaggaatggtgggatgcttgaaatgggctatattccttgaatatatagagagaaacttttgaagcatatgtgagaaacaagtaacagtgattatctgtgaggggtagctgggaactagaggatggaggacgggagctggacagagggaaatttgtcaccatatacctttaaattttgaattatatatattactcagaaaaatgaaaggactttatatatagttatttatcttgaaatgtttagacgttatatatattttggaaagcagtatatacagcaataatgttatactctttgacccaatactccctagaaatttaattcatgaaaactaaacaaaaactacacataaacgctgttcttcttcatggtagcaatacctataataatggggaaaatagaagcaacctaaatgtcagtgtgggggattatttagttgaataatatgacatacagcttgatataatgttaagcaactgtgtaatataattaagaagaccatgctgaaacatttatccattcaacaaatatttattgtgtgcctactgtgtttcaagcattgttctaggtgttagggatacagcaagaaataagggccaaaataaataaataaatccatacaccattggaactgccattatttgggggaagactggccacagaccaatagatataatgtaagaaagtaagcccaggcgcagtggctcacgcctgtaatcccagcactttgggaggccgaggtgggtggatcccctgagatcaggagttcgagaccagcctggccagcatggtgaaaacctatctctactaaaaatacaaaaattagccaggcgtgttggtgcacgcctataatctcagctactcaggaggctgaggcaggagaatcgcttgaactcaggcggcggaggttgcaggagccgagattgcgccactgcactctagcctgggtgacagagtgagactccatctcgaaagagagagagagagagagagagagagagagagagagagggagagagagagagggagagagggagagagagagagagagagaaatgatggttacaacttcaaataaagcaagataagggacagtgaaggtggagggctgctatttttacataagactcaaggaaagtctcactgacaagttaatacttgaatggagatgggtgagtaagtcatgtaaatgtgtagggagagcatctcagcagggagatctggtacttgaggatgcaagaagggatctgtttggcatgtttgtggaatgacaaggaggccagtgtttctgtgcatcacatacatgaaggtcagagaggtagaaagggtagggttgggactctgatcgtgaggaggtctagaaagccatgataataaggcctttggattttattccacgtgtgatacaaagccattagaaaatctggaacccctgtagaagtgattctaaatgactgtgtgagaagcaagagagtctgagtcctccattagggcaagctggtggataaagacatggtgcagaactggagatatccaagaggtagaaagttaattcaacttagcactctgaatgattggatgtgggaggtggagaaaagggagggatccagaaggattctaaggtttgggcaacaagatgaatggtgataccattaaacgagacagaaaattcaggagggagaacagagttggagagagctgagatgatggttttaaacatgttgagtttgttgagggacctgtgagtcacaaataccaaaagggagaaaagtaaaatgaaccctgtcatgtttgatcagaattagggtagtataaactcgtacttttcaagatggatgggtgaatgaacagaagtcagtgtctgtttgtgtgagagggtgtatgtgtgcacacacttcccagctctactaagaggctctgggacagtgatacgtcagtagcaatgagcacacctagtgccagatagtagcttctaaatacctgaagggaattggcaaagtgactgattccaagtttggatgagataaaatacaagatgagccttgaaatcttgttatgttagaaagtaagaatgttctcaaagaatgatggggacatcaaaaagaaaaaggacaccgaagctagcttgaaagagtccccaactagccaaatctggggcaattcatgcatcaaaataagggatagttatagattataaaccattcagtaagactcgatgaaaacaaatgaaaaataatttaagaaaatgaatgaattggaaatttgataaggaataggatattagacggtttcacagtatctcctacacaatgttttttaacttcaaaaggaaaaagagtaacttatagttgagaagcctgacggacatcaccttaagttttaaaaagtcagcgtcatcagtattgggacaaattaaaataatgtaattattttaatacacagaatgtaattagaagccggcccaggatgcacacctatagtcccagccactcaggacgctgaggtgagaggatcactggagcccaggagtttgaggttgtagtgcacaatgatcattcctgtgaatacccactatactctagcctaggcagcatagaaagagcctgtcaagaaaaagtgggaagaatgcaaaaaaaaaaaagcacacagcatcacttctgtgttatttttaccaatgatagatcaactgaatctcacaatgagaagaaatcagacaaacccaaaatgagggttcatgctgtacagaatacctgaactgtttccttccaaaatgtcagggttatgaaagtcaaggaaagactgaggaaccattccagactgcagagtattaagagacatgacaactaaatgcagcccgattctgaactatctccttttgctatacaggacattaccagggcaatgggtgaaacatgagtgagtaggaagattaggtggagggaagatcagggttcatgtcctcctcttatggctgtagagcggctatatgggaaaaagtccttatttgtaggaaaaacacacaaaagtatttgggaatgaaggggtatcatgtcaagaagttaccctcaaataattcaggggaaaaaaacatgatttttactgtatttagaactttttagtaaatttgagatttaaaactttttacagggatggtttaacatatacaggtcaataaatatgatacatcacattaacaaaataaaaaaacaaaaatcatatgatcattttaatagatgcagaaaaagcattcaataaaatccagcatccctttatgataaaaactctccacaaacctggcatagaagggacatacctcacagtaataaaaaccgtatatgacgaacccacagccaacatcatactgaatggggaaaagctgaaagcattccccttgataactggaacaagacaaggatgcccactgtcacccttctattcaacatagtactgggagtgctagccagaacaatcaggctacagaattaaagggcacccagattggaaaagaggaagtcaaactgttactgtctgccactgatatgattgtatacctagaaaaccctaaagactcctccaaaagacatctagatttgataaacaaattcagcagagtcttagagtacaaaatcaatgtacaaaaatcagtagcactgctatacaccaacaatgaccaagcggggaatcaaatcaagaacccagtctttcttaacaatagctgcaaaaattagaataaaatacttaggaatatacttaaccaaggaggtgaaagataaagagaaccggaaaacactgctggaaatgatcatagatgacagaaacaaatgtaagcacgtctcgtctcatctcatggattggaagaatgaccatcatgaaaatggtcgtgctgcccaaagcaacctacagatttaatgcaattcctatcaaaataccaacatcatttttcacagaattagaaaaaacagtcctaaaattcataggcaccaaaaaagagcctgaatagccaaagcaatagtaagcaaaaagaataaatctggaggtgtcatgtttcctgacttcaaattatactataaggctatagttaccaaaacagcgtggtgctgatataaaagtagatacacagaccactggaaaagaatagcccaagaaataaggccaaatacttacagttaataggtcttcaacaaagcatataaaaacatagattaggggaaggacaccctatttaatcattggtgatgggaaaactgaaaagccacatggagaggaatgaaactggatcctcatctctcaccttatacaaaataaactcaagatggatcaaagacttaaatctaagacctgaaaccataaaaattctagaagataacccaggaaaaactcttctggacatcccctaagcaaaaaattcatggctaagaacccaaaagcaattacaacaaagacaaaaataaataaatgggacctaattaagaagcttctgcacagcaacagaaataatcatcaaacagacaactcacagaatgagagaaaatatttgtaaactgtgcatctgacaaaggactaatatctagaatctacaaagaactcaagcaaatcagcaaggaaaaaagagaaagacaagtaatcccatcaaaaagtaggcaaatgacatgaatagatatttctcaaaagatgacttacaaatggccaacaaacatgaaaaaatgctcaacatcactaattatcagggaaatccaaattaaaaccgcagtgagatagcaccttaccccctcaagaatggacattattttgaaagttaagaaacaatagatactggaacggacgtggtgaaaggggaacgcttatacagtactggtgggaatgtaaattagtacaggtctatggaaaacagtatggagattccttaaagagctaaaagtagatctgccatttgattcaacatttccactgctgggtatctacccaaaggaaagtaaatcattatataaaaaaagacacctatacacatatatttattgcagcacaattcacaattacaaagatagggaaccaacctaagtgaccatccatcacacaatgagtagataaagaaaaatcactatacacaccatggaatacttctcagccataaaaaaaagaacaaaataatggcttttgcagcagcttggatggagctggaggccattattctaaatgaagtaactcaggaatggaaaaccaaatactgtatgttctcacttacaaatgggagctaagctgccagcacacagaggcatacaaagtgatataatgcactacagagacttagatgggggagagtgggagagggtgaagaataaaagactacatattgggtacactgtacactactcgggtgatgggtgcactaaaacctcaaaatctcagacttcaacactatacaattcatctgtgtaaccaaaaatcgcttgtacccccaaaagctattgaaatttttaaaaaataaataagggtcagaaattaaataaaaactttttaaaatgatcagaaaagtgagtaggaggcaatcaaatggaaatgtgaggcccacactttctcaaaggttggcaggaaggttggcaggaaagagagagtgacatacgctcccagcagagactgcactgagcatttggagccaatgtgcagagagagaagagatacacctaggctaggtggtgagcactgcaaagcaaagtcctagaggccgtgttttgctgggcacccaggtccagtggaaagggcaggctgggcaggcagcaggaggatgtcagctgggcacggcaggcagctccaaggtgggcgggctggaaacaaaactaattcctacctgggaaccttccttctctctgagaaatagagttgtcttctaaaagtggccattgtctgctgtcttaagtacagtaaactgaatatggttcgtcttcaaatttgaaattacttcactgaaaaatgtatcaaaacaatttaatatttctcagtgatattgtttctaaaacaggttttcttaggattgcagaatttacaaaattaccattgatatttgaaaaagaagaaagccttgtatgtatgcatttgccaaggcagtttgatttttttatttggtagggtcagagcaggtagaacatgtatgcatacttcacaaaaaacaggtgatttataagccattgcattagacaggactggtttccaagccagtcagtcagcttagaatgtgaaaccctgattcagaagcgaatcacctaaggatgattcaacactgtgtttcctgttgtgctagtaggcccactacagtagcagtttacccccacctcacccagttcattagactctaatctagtcccatactggaactacagagcctgaagactatataagcaactgtcttctcattctccttagactgtccatgactgatgccactcaccaggcacaggagggatgctaatccattccatggaatggagcctcagggtttacaggctttattccctccaagaaccctgcctctgaaagcctgtgtgactcttgcgtgggccaacatgccctttgatggctcaggggaagctgtaggacactaacttacccatggcaccaccaaaacttgcatccccaggcctgtgtcttgttccttactctatacccagttacaaatccttggcctctcaggtttcagtgatgaataggcatgggaaagtaggaataccaaatggcctctcatttggtagtcggttggggaatgcatgagagaaaataagaccacagtgtgcccagggatgctgagctgatggcacattttgagcagtaaactttcttagtgtagatccctccttcctcgctccctcttttccttcattgttcttgtcctaatttacaacttcactaagttcttcctttcccacttgtatactttgtagcaatatatgttttggtttgtgaactacctcacattgtccccaagggcaggaactatgtcttatgtcccttttccccaggagggctgaataaatgcctgttgattaactcaacttggtgtaacaaacatatattatctataatgcataagtctctgagctaagggctctgacatgtacatacggaataagaaataagattcctgccttcaagaaacttccaggagagagaaaagagctcctcaagttattataatacatagtaaatgtgatgagaactaaaagacaaaaaaaaaacaaaccacttttaatgcaaaggaaaaaaaggaaaaagaattgtttacactatgggaataagagaagtcttcatataagacatggagtttcagtttgactttgaaaaatgatacttagatgagtgggagtggcaaggactatcagattccatgaggggaacaggcgggagccaagacagataggggcgtggtagcagcatcttgatcttcttaggccccaccatgtgtgtaccaagaggcatgcaggagccattgggatactcccaaagttctctggccaggtgagtgacatgattaactctattcgataagaaggagcactgtagcagcaacctgcaggaggggttagaagaaaggaaagaacagggtttaagagacaggttgggaagcacctgcctaatccatgtaggtggcaggaagggccacaagcaaggcaagaccgtgacaatggggatgaggaggagaatattaaaaaggtgatgcggagggaaaatagacaggttacagcaactggatgtgaaaggaaatagagtacttccaggttttgagactcagtgactgggagaacagtggggcattcttcaagagggatctctgcataatgatggtaaagtaacagatctagagaaagagagatactggccagttacattagctctgtattcattggcctaaataaatgcagcagtgattttattctgtgtaccctacgaaatatagatgcactcatataacactttgccaatgataaactaaaactctggttgatcctcttgagaaggtttagactcttttctttcttaaagacctacactcatataagacattatcttttaatacgactggcatgatatatatgttctttttttatatatactttaagttttagggtacatgtgcacaatgtgcaggtttgttacatatgtatacacgtgccatgttggtgtgctgcacccagtaactcgtcatttaacattaggtatatctcctaatgctatccctcccccctcctcccaccccacaacaggccccggtgtgtcatgttccccttcctgtgtccacgtgttctcattgttcaattcctacctatgagtgagaacatgcggtgtttggttttctgtccctgtgatagtttgctgagaatgatggtttccagcttcatccatgtccctacaaaggacataaactcatccttttttatggctgcatagtgttccatggtgtatatgtgccacattttcttaatccagtctattattgttggacatatgggttggttccaggtctttgctattgtgaatggtgccacaataaacatacatgtgcatgtgtctttatagcagcatgatttataatcctttgggtatatacccagtaatgggatggctgggtcaaatggtatctctagttctagatccctgaggaatcgccacactgacttccacaatggttgaactagtccacagtcccaccaacagtaaaactgttcctgtttctccacatcctctccagcacctgttgtttcctgactttttaatgatcaccattctaactagtgtgagatggtatctcattgtggttttgatttgtatttctctgatggccagtgatgatgagcattttttcatgtgtcttttggctgcataaatgtcttcttttgagaagtgtctgttcatatccttcgcccactttttgatggggttgtttgtttttttcttgtaaatttgttggagttcattgtagattctggatattagccctttgtcagatgagtagattgcaaaaattttctcccattctgtaggttgcctgttcactgtgatggtagtttcttttgctgtgcagaagctctttagtttaattagatcgcatttgtcaattttggcttttgttgccattgcttttggtgttttagacatgaagtccttgcccatgcctatgtcctgaatggtattgcctaggttttcttctcgggtttttatggttttgggtctaacatttaagtctttaaagatatatatgttcttaaaaaggcataatgccttacatttttggtccattgatttttgacatgggtgtcaggcaattcaatggagaaagaagagtcattccaatcaatggttttggaatgactaggtatccacatataaaagaattaaggtggacacctgcctcataccatacacaaaaattactgcaaaatgaatcacagatctaatgtaagaactaaatttctcagaagataatgtaggactgtatcttcctaaccgtacatattaggcaatggtttcttagatgtgacaccaaaatcataaacaacaaaagaaaaaatacataaatgagacttcatcgaaattaaaaactttaacgtctcaaaaaacaaatttgcaaatcactagtctgataggggacttgtatccagaatatgtaaagaacacttactactcaacaataaaaagatacccaaataaaagatggttaaaaaattcaaatagacatttattcaaagataatgcaaatggacagtaagcacatgatgatcaacatcattagatactagggaaatgcaaataaaaaccacagtgagataccacttcacagtcactaggatggcaataataaaaagaaggacaataccaagtatggataaattcaggatgtggagaagttggaatcttggcacactactagtgagaatgcaaaatgttgcagccattttgagaaacagtctggcagttccccaaaaagttaaacatggaattaccatataacccagaattttcactcctaggtatatactcttgagaattgaaaacgtatatccatgtaacttctacagagtcactccatggcaacattactcacaatgcaaaaatgtcaaaacaactgcaatatctgtcagctgatagaagataaataaatgtgatatatccatgtaatggaatatcattcagcaacaaaaaggaatgaaacactgatccatgctataacatgagtgaacctagaaaacatcatgctaagtgaaaagaagttagacatagaaggccacatatcatatgagtccatttatgtgaaataactagaacaggcaaatccatagaggcagaaatccaatcaattgttgccagggactcaggggaggggagaataggagtaattgatggatggaggtttccttttgggatgataaaaatatcctggaattagatagtgctgatggttgcagaacattgtgaatgtacttaatgccactgtggtacactttaaaaggattaaaatggtaaattttatgttatgtgtattttgctacaatataaacaggtccattctatggcatgtgaattatacctcagtaaagctgttataaaaataaaaggcataatagcttgttttacttaccagggaattgtgctgaggaaaaaaaaaatccaatcccaaaaattgtatactggatgattcaatttttgtaacatttttgaaatggcaaaaattttagaagagaggacagatgaatgtttttctgatgttagtcatgagggttgggagatggaaggaggtgggttattaaagggcagcctgagggacccttatggtgatggaactgttcagtattttgactgtggtagaaggtacaggatcctacacaggtgataaaactgtatcaaactaaatatgtgacacacatacaagtaaaagagtggcaggttttaacaatgtcaatatcctagttgtggtattgtactattgtttactagtacatatagtttatactattggggtaactgggtgaagtgtacaggggttctctctgtggtatttcttaggactgcatgtgactctacaattaactcaataaaaatttcaattaataaaaaggcaggcttgaagcaatggctcttgcctccaatcccagcactttgggaagccaaagcaggaagatcccttgagcccatgagttccagaccagcctgagcaatatagtgagaccccatttctacaaaaaatttaaaaatttagctggacacggtagcacaggccttagtcccagccgtttgggagactgcagtggaatgatcacttgagcccaggaggttgaggctgcactgagccgtgatcatgccactgcacaccagcctgggcaacagattgagaccctgtctcaaaaaaaaaaaaaaaaaaaagaaaaagaaaaagaaaaaaaaaggcaaaagaggtatctttgaaaacgtgttccatgggtaaatgtctatcaaattatacgacgtcttggccgggtgccgtggcttacacctgtaatcccagcactttgggaggccgaggcgggcggatcacctgaggtcggaagtttgagaccagcctgaccaacatggagaaaccctgtctctactaaaaatgcaaaatcagctgggcatagtggcacatgcttgtagtcccagctactcgggaggctgaggtaggagaatcgcttgaacccaggaggcagaggttgcagtgagccgagattgcgccattgcactccagcctgggcaacaagagagaaactccatctcaaaaaaaaaaaaatagttcgatattcaccggcaataaacaaatcaaagtccagactggcaccagttgtgtcagcggttttatttgtgtcttccttaaagaccaagcttgcagcagggttttgttactgttgttgttgttgttgttgttgttgttgttgttgttgttaatctcagcagcacaatgtttttctacaataaagatggtgtgtgagtatggaaaaggcctttctcggccagacttggtggctcacgcctgtaatcccagcactttgggaggtcgaggccagtggatcgcctgaggtcaggagttcgagaccagcctggccaacgtagcgaaaccccatctctactaaaaatacaaaaaattagcagggcgtggtggcaggcacctgtaatcccagctactcaggaggctaaggcaggagaatcgcttggaccggcgaggtggagattgcagtgagccaagatagcgcaattgcattccagcctgatcaacaagagcaaaactccatctccatctcaaaaaaaaaaaaaaaaaagaaaagactcttctcagcgccgcacagtggcttacacttacagtcccagcacattgggaggctgaggctggtggatcacttgagtccaggagtttgagaccagcctgggcaacatggcctagccccgtctctaccaaaaatacaaaaattagctgggcgaggtggtgagtgcgcctgtggtcccagctactctggaggctgaggtgggaggaccagttgagcccaggagttgaggctgcagggagccgagatgacagcacggtactccagcctgggagacggagggtggccttgtctcagaaggggaaaaaggctgaggtttttttccctcttcttttggttgtcacttttagcaaagtaagattgttattcctttcggttcattgatatttaaaagtttacatgtcacatttttatttcagcaaagagaaaatatgatttttaaatgaataaaaaacatttctgtgcagtagaagtcgtgctaacatctcatgttaaaaagataaacaacaggattaactgtttactttgggagcgcagaggctggttgttttttgagaagaagaacacaatgtcctgctgtctctggtttcccggtcggccctcctcccaggcggctacaggagtgggcgaggcccccgcccccaatgcgtccccgcccccaccccgccccgccctcgctctggcccttctcgcccccgccttttctcagcggctcccttgcgctcaggttccagccctcttctgtccccatgctccctttttttctctctctcttcttatcacttcatcctctgatttcttggtttttttccttgggttgaagcttcgtaagagattataaagtggagggcaggtctttgttgatctttagaggctgcttaagttgacagtgacctagaatgaaacagccgggcctgactccgattccgggaattcttggtggactgctaagaactgctcccataactcacgtaaacatcccacatagccacttaatctgccctctcagcacatgcgtgcgcaggcacacacgtttgctgtgctctcgctgtccttcattcgtgtagctatgaaactgagccagtgaatgaaagaaagggaaaacacgtagctttggaaaggaggaagggacagttaaaacttttttaaaagagaaattaaattgtactcccacaacttcccctacaaaattaagagttttatttttttattccttgtgatttgttctgttgcctttacagataaacaagacgtatttttacagtttttgaaatactctttaattggcataatggacattaagttggtaagaaaaggaaaaaaaaattcttaaagacaaatattcacttcataatggacttttatacttccaacgtgaacagggaacctcttatctgtattattttatgttgctgggaatgcactgtggaatgtggtttcatctggcaccagttttaatcggctcttccaacatggtccaggcctcaccctcatggctcagaaatgcacagaatcaaagtcctgcggaatggcagctgatggctgaaacaggtgattctgctgctaccctgttcccctggaaccactttctgactgctgccttgttttcccagttgagaggggtgaagtgtgggtggctaggggcagggacccgctgtagacatggtattctaatggttatgtattgctttacccacagtggagctttaccttacaaagcaaaacagctgtagctgaatgatgaggtcaccgtcataaggccgcatctatgtgaaatggtataccctgtgccactctcaagcaccttcctgtgagccccttcccatgagattaggccttttataaaaatgcagacacctggcttcaggacttaggagagctggcccttaatgagagggaaccctattttcttgtcagttaactgcatgtgtaacaatgcgcatttgtctggtaggtgaaggaaaccaagattttgagcacagaagagatgcaggcacttaactgggtgtgaaacaaattcacataatctggattgtgcaggtacccaaactcctagtgtccgtgtccattcgtgtcatgtggtgcctgctcccctgcaccaccgtcttatagtcatgaaagtgggggttattggggtgtgtctgtggcagaagcattgatcttaaacattaaataagtggaattcacttgacggactgttattccaagaagttttgaatggctctctggctgatggaatcagtgcagttgtgagactctcattctaaacacacatgtcctacttctctgtgagatattttatcatggctgttctaagcacttatctaagttaatcactcctatagatagcagcatcccctcacaccaggtataagggacccaccaaccatgctcagtgctgcatagggcagagaagtcgcctgcagcccaagccttagctcaagatcgctagcagcggagagtgtggtgtactggatgcatacctttgccttggcagtgggtattctatggcaggacagcaaaggaatgtactcaactgcttcccaaagtggaagctccgttttatgaacattaatcagataactttaagatgtcagatctcttgagcccgccgtggcctggctagccactggttcccaatatttcagagcttactaaggatcgtgctggtgtctgctggttgtcttgcagagcacaaccacacacagtgagcgtctgctcctcaacttgggtgctggtgcctgagctgcagctgcagttgcagccttctctatagatacacaaagatttaacgttccttaaacaaaaataactgaaaggacttctagagaatatccacttgtcttataaaaggactctcagcccagagagcttctgtgccttgtcgatagtggcagagctgggatcccaatgcttctgccctgctggtttgagtcacattctccatagagcagtttgcccttcccagttctgtgttagtcagccccgttctcacttgcatcctgcctcgagtcacttgagcagcctctgggttcttccacagctccttgttctctgaaatgaggcccatcctatgcctgatgccgaggctgctcttcactctccacacctactcacctcctccgaacctcaggccagtgcaggcgctctgtcccgcatcccttactcacaactgtgctctccagcctctgccttgaaatgtttctcgaatgccttctcacatgctgacagaagccaaagaggcaaagagggtggcagcatctgaggactgggaccaggcgtggaggggagggcaccaggatggactcacaagcccatgcctcatcctgaggcagccactgtgggtgttgacctagtgctaccggggttgcaagtttctcaagataactagaaagttgaattttatgtaaagtcttccagttcttaattttagttactagtttctgaaaacttttaacactatataaacaaaagaaaacatactagccaatgagcactactttgcaccttcactccttcctctcaggcatttgtcattgattagggcagtggactcccactgggtctaaggagactgtctaaaagttctctcttcaagcaaactccccacaaaaccctttccctcaccagtgccattattcccttccttccaagagaaaataatttttatcaaatttttaatttttcataaatatgtttaattttaaattaagaataatgcaataaatagtctttcctcttatccctgctttctcctattgctatggtctgaatgtttgcatctcccccaaaattcatatgttgaaatctttacccgcaaggtattagggggtggggcctttgggattaacatccttataaaagaggcccaagagagtcattgacccttccgctataggaggttgctttgaaaagacagctgtctgtgaggcagcaggccctcaaccagatgccaaacctgctggtgccttgatctgggacttcccagcctccagaactgtgagcaatacatttctattgtttatgacccacccagtctgtggtatttttgttagagcagctcaaatggactaagacacctgtcttgtctttcttattatcttctagcctccttccagtttctcagccacggaaaacctctttcccgtcctagggtttcatacatgctatgctctctattttcagtgttctctcagcctttgcataactggttgcttctctctctttaggctcggcctaaaggtcaccttcctttaagaagccttccctgacaagcctgactagaccatcccaccaccccagtgctatctctcacagcactctttatttccttcctatcactcacacagtctgtagttgcacacttgtgtgtgattggtctctcttgccaagaaacacagagggcagggactgtttgcccactaccctgtacctagcacctcacagagggcctatccaggaggcagtcctgctgtatttagcacatgaatggatggatcattgatttactagaaaccctaagaaggccaaggcactattttggagcacaatgacaaacccccaagtgcttttgttattaaggatcttgtgacacttacttcatggctctgcagcccttcatgcctcactgcatgtgttgcacttccattatctggcttggcaattttgtacttggctcatttcttgtgttcaagcaaatcaagatgtctcaagaaataacagctcacacttgtgtacaaattcagaatggatagtttccaaatactctcaagacttataaataagggctaaagagccattttgttttctcacacgacacatgctaatcatctagagaatctttatttccaatggaaataaatcaaagaaacagaagaccagctttcagaatagcagaatgaggacacagtggattctctctccaacaaacatttagctggagaaaattatgaaagacaagcatttaaaatctctagaaattgtcctaagggcatacagcaaatggagaaacattctatgaatggaatcaaaaataactactaaatctaagtgagaacggcaagtgtgtggcctgtgagccacgacccactcctccaccatccaaactcactttctagagactaacctggggctctactctagggggtccagtcaagaagatggtcccctcttcccccagcccccagtgtagggtacatttcacccttcatggccagcctccagcatctctcatcacccagcaaatgagtcaggccaagaatacggacctgactgtcccactccagctcacccataggttggaggcttcatgctagagaggcaagcccggaagactagtgggggtaggtgggaagcaggcaatagaaactgcatttggagaggtccagatgtttgatttagccgacaaaagatttcaaaccagccattataactatattcaaagaactaaaggaaaccatgtctaaagaattaaaggaacatatgttaacaatgtctaaccaaacagagtgtcaataaaaagatacaaactatgaaaagaaccaaatagaaattctgttgttgaaaagaacaacaaccaaagtgaaaaattcaccagaagggctcaatagtaggtttgagacagcacaacaaagaattcgtggacttgaaattaagataatgaggctgcgcatggaagctcacacctgtaatccaagcattttgggaggccaaggctagtggatcacttcagctcaggagtttgagaccagcctgggcaacatggaaaaccccatctctacaaaaaaaaaaaaaaaaaaaaaaaaattagccaggtgtggtggacttgggaggccgcagtggaagcatcacttgagcctgggagatcgaggctgcagtgagccaagattgtgccactgcactccagcctgggtgcagagtgagaccctgtctcaaaaaaaaaaaaagaaattaagattatgcaatctgaaagggagaaaagaatggaggaaacgaaagagaacctcataaaaatgttggacatgattaagtgcaccaaaatatgtgtaatgagagtgcgagagagagaggatgatgccgaaaatatttgaagaaataatggctgagcacttatcaaatttgatgcaaaattttaataagttaaaatttgtaacatattacatacacccagacacctcaaagtcaaaatgtggaaaaccagagataaagagaaaatcttgaaaacaacaaaggaaacatgactcatcatatattaatacaagggagccccagtgacagtctagctgacttctcatcagaaacaatggaggccagaaggcactgggatatatcttcaaaatgctgaaagaaacaaattacttacaccatactttccttctggcctttaatccctgaggttaggtcagtaggattgaacactaattgttttatcttagctcaccttttcatttttatagaaaccaaagaccactgtcgttcatcttcattttgaagtattctagctttttacttgtttggactagacctaattattagctgcagaaccctaattcttacataaaatttccttcagtcacagaaccatgagaaattagtttgtactatataaatatcttatagccactacaaattaaataatgtcatacatatctgtggaaatgttaagactagttgtcttaaaataggcgatacattcttctgcatatcacctgctaaatactgctgatacacaaggtgaggacctaaaatcatgtctttctgcatcaggtgaccactcagggattccctggcattcttgggtgtaaaatatcatattatcaaggagattgaacacagtagtaattatgtatggttttgatatgttaaaatacatttcagagaaaatattgctaacattttgttgatagtgctaatttttgagaaacacctattaatactctgtgaatattagtgttggataaaacataaattttttgcatttttttatagaacataatttggaaaagctttaaattgaaggctatttgaaataacctcttatttatttatgccgtggtttccctagtcactttaaaaattcatcactttttaattactgtgtttgaaaggttgattaaccaatttttaagtattcatagtttttggttcttccagttctgtaggcctttaaactgtgctgtccaatagggtggctactagccacatgtgattatttatatttaaactaattaaaattaaataaaattaaaaatgtagttcctcagtcacatcagccacatctcaagtgctcagtagccacatatggctagtggctaccacattagacaacatagacatagaacatttattccatccttgcagagagttctcttagaacacagtgctttagactgatgatctattccttattgctgactacagtggtatataaatcaatttcacctgcacttgaattctgatggaggtttagctctggaaattaggctggtatttccccacttttataaatttaaagagatatttatatcaaatatgcttatatatcatttcattttattgttagtttgcttatttaatgttgtatggtttttgggcaagatagtaaacctttctgatctacagtcttctatgtgctaaatagggataataatagcctagctcctaagggccttttgaggagaagaatgcaaatagaacaggatctggcactaactgactgctgtcaagatgatgaacctctaacccacatacactatgaaaaaaattaatgtttgtattttaagcttcaaatttgtgggagtaatgtgtatagcaacatacaatgaatgcaataagagttaataacaaaaacatatatttaaaaatccctataaaatttgaaaaatacttcctgttggatcaaaaaagaaataatgacaattttaaaatatctacaactgataataaaaatactaaatattaaaatttatgtgatgtcattaacttgatatttagaataaattttagtcaaattagctcaactttaaaaagaagaaaggggccaggtgcagtggttcacgcctgtaatcccagcactttgggaggccaaggcaggcagatgacctgaggtcaggagttcaagaccagcatggccaacatggtgaaaccccgtctctattaaaactacaaaaattagccgggtgtggtggtgcacgcctgtagtcccagctacttgggaggctgaggcacaagaatcgcttgaacctgggaggcagaggttgcagtgacccgagatcatgccattgcactccagcctgggcaacagagggagactcggtctcaaataaataaataaaaataaacaaaaagaagaaaggactggacacagtggctcatgttgataatcccagcattttgagagtccaaggcagaaggatcgcaagaggccaaagtttgagaccagcccaggcagcatagcaagacctcgtctcttcaaaagggaaaaaaaaaaaaaaaaaaaaaaaaagccaggcacggtggcatgtgcctgtagtcctagctactcaggaggctgaagtaggatagcttgagagaaaggctgcaaactaatgatctaagcctccaacataagaaataggaaaggcataatagaataagtccaaagaaaatggaaaaaaagattataaatgtgagtagaaattaatgacataaacagtgactaaacaaaagcaagaaataataatcctgtggtaaaactgataaagagaagataaataatagtaaaaaggaaaattagggatatcagtcccatcaggaattggaaacatatatgtgctcactttggcagcacgtatactgtaattggaaagctacagagaagattagcgtggcccctgggcaaggatgacatgcaaattcatgaagcattacatattttttagtaatattaataaaacttgaaaaaaacaaatgtaagaatactgtagcatcttcatgctattaagtttgaaaatagacaagatggaaaaatccctagaaaaatatattaccaaaatatcttaagaaaaaaattaaaaagttcaaatagtccagttatcattagagatgttgagctggtagttcagaatcttctcaggaaagaaaacactaaagctaaatgattttattacctaattatttctaactgtcaaaacacagattatgtgagtcttatacttagaatttttatctaaaattttcaaaagaaaaggtaatcaacttgttctgtgaagctgatataaatgatcttgataccaaatgtagtatgaaaaataaaattaaagaccaatatcattaatagacctagagacaaaatttctaaataagacatagcaaataggatcttggctttacatcaaaagtgaaaaactactttaatactcagaaagaatttgaaattgtcatttgccacattaacgtgttaaagggggaagcaattatttaaattaatacagataaagcatttgataagctccaacatccattcatgatttaaaaaaaaaaaaaattccttgacaaactaggactccctaactgggtgaaggacatctacaaaaaaccaaaaatgaaaaactaccaacaataaaagcaaacattagtgactataaaacattcaagactttttctttaaagctggaacaaaataaggatgcccagtcactggcttctccagcattgccctgaaggtcctaaaaggcagccataaaagaaaataagaagcaaaattggaattatgaaatgattgcatgaaagtacactaaacggattacaaatagtaattgatggattacaaaagttcaatatacaaggccattgtatttctacacaccagcaacacacaacaacaaacaaaacaccatttaaaatagaacacaaaaccatagacagtctaggcgtagatctaacaaaacatgtacaagagctatatggagaaacttacaaaattttattataaaaattgacctaagtaccccaccaagaaaagatttatctaccagtcactctaccatgccctaaatcactatatcatgtgaatgacttcaatgctcacaacagccctctgaattagattctcttattttgtgttaaaaatgagtaagttcaagctcatacagataagcaacttttgcaagatccaaagttattaacataatgctgccccccgggaagccatttgtgttccattgaatatgataaaatttatggtaaatacctggcagttcaggaaaaacaagtaagtcatggggacacttttctgctcagacctgtcacactagcactgattttaggagatagcgtttcactgggcagaaagcattgacaagtgggtggaattcagcgcaggctgctgataagctgacgctggtctgggcagtctgtggaatgccacagttccaatccagtcgaaccaggggggtgatgactccacctcgggcctgagccagcctgcctctgagctgcagctgtgtgagcaaaacagagtgggagagcatgtgtggtgggtgtgaataccaggagaagaagagtgataactcgtctctagggcaaaagaatagacagaagcacccttccttgttatttgagacaaaggaaaacgtcagggcaaacttaaaggcaaaggtagtagccagttccatacctctcccttctcaacacaatcaaaaatatagaaactttgtatttggatctgtggggatttttgtgtttgtcttgacttttgcataggttaaaaaaataacacaggccgggcacagtgactcacgcctgtaatcccagcactttgggaggccaaggcgggtggatcacgaggtcaagagatggagaccatcttggccaacatggtgaaaccccgtctctactaaaaatacaaaaattagccgggcgtggtggcatacacctatagtcccagctactcgggaggctgaggcaggagaattgcttgaacccaggaggcggaggttgcagtgggtcgagattacgccactgcactccagcctggcaacagagtgagactctgtttcaaaagaattaatcaataaaaataaaataacatttaaagcaaagtcttgggggtatcagtaggagatgaccaggccttaatgtaatcacatgtggaggggtaggggccaccatgggttgttctctaacagaagagcctggagactcctcctaggaaatgcagcctggtcctacctccagttcccctacatgtcctggtccccaaggcttggcctggacttccctatttagttatggaatggagaagcaagtcacgtgaggagttaactaggaggtaaggaggcctttaaatggtgtatataccaaaaaaaagacattataaattcaacatcaaaacgtatacttttatacctgctctcaggtagcatactggaaactaaaaaagacctcagacttggagagaagagagggaaacaaaacaagattagactatgaatggaaaaattagttcccatctagaaatctatacccagccaaactgcccataaagtttgtggatcgattaccaacaactttattttcttggccatttaatgttttttctttgtgttttcctatatttctcattccattttttttcctctagtgattaggaggttatattccctgtttctgttctttggtgattatccttgaaattgtaccgcatacactatacttaagttaatatcttaactccaggcttagagtgatatgaggacttgggaacatttgagctccagtcactgcccgtttgatttcattgctatccattttcagtttttcagctctacacctttaatattattaattgtgttgttattctgtcctgtgtttattttgggttgtttgtatttttgctcattagtccttgtatctcaggcctttattccacaataatttccttattcctagagtacgtaatttagaaatcattttatttgtttttttgagacagggtctcactgtgccacccaggctggagtgcagtggcacagtcgtagctcattgcaaccctcaaactcttgggctcaagggatcctcccacctcagccttctgagtagctgagaccacaaccgtgcaccaccatacccagctaatttttttatttattgtagagacagggtctcactttgttgcccaggctaatctcgaactcctagactcaagtgatcctctcgcctcagcctcccaaagtgctgggattacaggtgtcaaccactgcacctggtctagaaatcattttagtaattagtaaatcagtaaatacgtcaggttctgtaggtagaaaatgctcctagtttttctttgtctaaaaatgtcccaggccaggcggggtggctcacgcctgtaatcccaacactttgggagaccgaggtaggcagatcacttgaggccaggaattcgagaccagcctgcccaacatggagaaaccccatctctactaaaaatacaaaaattagccaggtgtggcagtgggctcctgtaatcacagctactcaggaggctgaggcaagagaatcacttgaacacgggagatggaggttgcggtgagctgagattgctccactgcaccccagcctgggcagcagagcaagactccatctcaaaataaataaataaataaataaataaataaataaatacaaataaaaaaattaaaatgtccttattttaccatcattcttgaaaggagttttgctggtacagttctgagatggctttcagaattctgaaaatattccatgtcttctggcgtcattcattgctctttagaaggttgatttaagtcaaatttgtgttcctttgcagatgtactatcttctaaatcttctcattgtgtgtacttttaaaatcttatttgtgtgcttcttgcttttaacagctcatagtctttggtattctctagtttcattacagtgagtatattagttggatttccatttcgttgtcttgcttggtatttgtttggtctttttcccccctttgtttttgttttgagacagggtcttgctctgttgcccaggctggagtgcagtgacatgatgacagctcacttaagcctcaacctcctgggctgaagtgatcctcccacctcagcccctgaagtagttgggactatgggcgttcgccatcatacccagctaaattttttaaaatttttcctagagacaagatctcaatacattgtccaggctggtcttaaacccctcagttcaagtaatcctcccaccttggcctaccaaagtgctgggattacaggtgtgagccactatggccagccccacttggtatttgtttttcttcctgtatcttaaatcagttgggaaaaattctcaatcactgtaactacatattattgcttcccctcctctgtcttgttttactgaaattcctattagacgtgttagaccttctcactctcctctatttctgcaccttctctcatgtttttttcctctcacttctcaagctatattctgagtaatttattcagatttatacctcagatctcatatatacacttttcagatgcatatagccatttgttacacctactcagtgaatatttttatttcaataaatgtagctttcctttttgaaaatgtgatttcatccttcttcaaatctatcaagtcattttatgtagtttcttgtctcctattcatattttggggaccttttacctctttaaaacagttattctatattttctattcattaattctaatatctcaagtccccagcaggtctggtgttacttcttttgactattcccacatgatggtttgtttctttgtgtttgatttttatttgagcacatctttgtttggtcttattccatggtgaactagcaatccaagtaaaggtgctttttttcagacaggatatatttctgcttctcttgcaaaccagctggccctgtgggcctggaagacttcattaaggagtctacagttcttgacccttttgccaaggcagcacttaaggctcctggcttcatctgttctcctccaacatgtgcttttttcacattcttatctttagaacagtttttatgtccattttgtgatgttatttactgactataatttcttcaggctccgtgaaatgttttctgagaatatgtcattttgtgataaataagcttcatttacttcagttacaaaataagaggattggaaattcagtcataaataggctctcatgagtaacatcatctaaacttaaaagctggggggaatcccatcatgtcgctggctgtccatcatggctgtgttgctgcaagctgggacaccaggttttatcctgctgggatatgcgtgtctaaacgtgtactgtcgcagagaatgcctcttattgttgttcttatcgtaatgttatcctgcagcttttctcagtatcgagcatccacacaaagcaaatatttctttcatgggaaacggtaaaaatgggaaaaggacactctgtttctaggtaatgtatttggtttaagagaatggtcatcttgaggtacttttcagccatatttggcttaggttttagtttcatgcctgtggatggtggttcaaacacctgcatgaacacatacagaaaggatatcttgaattcaacgtttttttaatcctgactcacccatttaggaagatgactacagtggatttcttttttttttccccccttggtttttctttactttctttaaattatattgaccagtcacagcagtatatagtggctttataatgaagaagagggaaatcttgatctctgtattaatccaaactgcctcctcaaagacaaatgtgaatggttttttacagagcctgccttctggtacaagatgcctgtggaatgttcggtgaagtgcacttggagttcaccatgtcgaaggcaagacagttggaagggaagtcttgcagcctggtgggaatgaaggttctacagaaagtcaccagaggaaggtgagaacgtgcaggaatggcatccaatttgctacaattgttggttctttttcttagtcttttgtctctaattttatttttaaaattaaaaggcaataaaccaggatcctagagtttgcccataaaacaaggccaggagttgagtggaatctataaagtatctttaggggaagaatttcaattgacaacgaaaagaattaggcagatttcatgattcataattttattaaaagaagattaaaatgttatgtatgtcttttaattatgaaaatctgtcttttgtaagtgttttcttcactataacaataaagcatctttgggtggtaggttgtgtaaatgaaaatctaatttagtgaaaagacattttgtgagctttaagcaaaattcttaagttgtcatgtctttgcactttccaaagtaagcaagcattgttctctgccaggtttcatggcacctcgccctaaaatgttgtttttgataggcagaggtggagtgttacaaagatctggcctatctgtgcctgttacatctccagtaatcattctaatctatgaattagggggaaaaaaaaaagaaacatttttaatggaactatccagtcatacagtgaattgggggttttctcaatcttcttgttacatctctttctttaaatggtttgttattttagctctcttgttgatgtttatattaaattatagtaacatctgagctataacagtatcggaaggaggaaaagtccagttctgagtgtatgatattctgcttttggaacatttattgatagtatcctccagtagtttgcatcatgaccactctggctgtggccattctaaatggtgaatgtttagtgagcatttccttgactgagctcagtaggcatttagctctcccacaggccttgactttgagtcctgtctctctttcctgtggcaccgtactgctgagtgacagctctgcccaagagcttgttttcctgggagacatatcccctgtaagccctgagtagataagagcacattttcattgatctgtatagctgtgttttgttttggtttggtttggtttttggtttttttgttttttgttttgtcttgttttattttgtttttgagacagagtttcgctcttgttacccaggctggagtgcaatggcgccgtcttggctcactgcaacctctgcctcccagattcaagcgattctcctgcctcagcctcccaagtagctggaattacaggcatgcgccactacgcccagctaattttctgtatttagtagagacagggtttcaccatgttggtcaggctggtctcaaactcctgacctcaggtgatccacccacctcagcctcccaaagtgctgggattacaggcgtgagctaccacgcccggccagctatgttttataataaatacttcctcttgtttgtaaacaggcagctatattataatttaattgcattatgtatttggggaatgcagttcatccagatatttggaaagcatgtctagatacgagaaaagcttggttgggtcacatgagtcttacccttattaagactgaacctcattttagtcctcattagaatattcattgtaggccaggcacggtggctcctcacactttgggaagccaaggcaggctgatcacttgaggccaggagtttgagaccagcctagccaacatgtcaaaaccctatctctactaaaaataaaaaataaaaattagctgggcatggtggcacatgcctgtagtcccagctacttaggctgaggcatgagaattgcttgaaacctcgaggcagaggttgcagtgagctgagattgcaccactgcactccagcctgggtgacagagcgacactctatctcaaaaagaaaagaatattcattgtaaacatttcagactcacaagcatctgaagactaagtgtagttatggtaaccatcagggtcgtttagaggggagggctctttcactcggctgccacccacctgagcctggcaaggacacgagggggctcccgccacaggatgttccagctgtgctccaggccagaggcagctgttctggctggagactgcaggacgtagcatcttacagaaatactgctggggaaggacacagccagacaggacctgggaatctttgtctctctaaaggtcctgttctttcaccattcttctttatagccatacatgtacctaacatttaatctagtttttgtggttggcactagaagcctaaccgtctgtaacatttacatgggaaatgtttttgccatgggaaatgcattgagtattccaacaaattcatttactgataaacttttgaacctccttccttgttaaagttggtgactaatatttgatgcttttttaggttgagattattttatatatttaattatattttgccatgcaaaacatccaaataaatgtttagattgtgttcttgttcttttggaagctatatttcttcaaaacaaattattaaatagttttggaatgtgggatgttataattgcttattagtgacatcatccatccatggcccagtaaacacaacattctctctctttttttttttccaaattattgtgtttcatagcaattctcgtaaactttaacaaaatatgcttctcataaaccttaacaaaatatacttccccaaattcaagctaaaatgattaattttataatttcagtatctaataccgaaaataaccttttcccaattggaagatagttgtatgtttgggctaagtcacagagcctcttagatctggcctaccagatctaaatttcatctgatccacagttctggtgatgaaatatcactcagccctacccgctgttgaatggctgtgttgcagggaacttgtgatcacagagccaccaggcaggcacacatgctgccagatgcctatgcagggagcaccgctccagccacctgctttggtccagaggctcgcagaaaaacagcatcatagcttttgtttctctgacggactaattttttggatttgagtgtctatgtcgactggtcagaggaagaagagtcagaaaaacagcctgagcttcggtttaaaaactgtacagttttcacaacagtgccagtctgatgtatgctcaccgcagaacatgcagcatggcctgtgcttccttcctctccggggcacacctgctattcctcaatgactctctactaagggccaccccccaacctgcccccgaccaccgacctctgtcctcccaagtggcctgtgcggcactttagtaggccaaacaagctgagaagtcacgtggctttggtgtcataattctgtgtgtgaacttcattttttgttgctgtttattatatgcttttatttgtatttgccagggcaatactgagaaaaagaaaagaaattccctgaaatatgttaacctatcataggtatagaaactatagctaacaaattattttgtggggagtggggaaaggagacctctttcagttcaaaaatctggtatttatttcccaacttgttaaaacaaccacagagtccaaaatatattattaatttataggtactattttctgtaggcctcttgaagggccgttttacagtagtgtactggagaagctcttactgaagagcattttgtcaatactcagtgtctacagagggtgctgtctgagtgttgagaatgacaaaggaagcaactgacatggtctttgaccttgaattgtgtccctttcaacccaaaacaggacaggcagaagtattagagtagttgatgattcaattaactagatcttagctgactgatctcagaaggtttcatgaaagaagtgagaacaaatgctttaaacatcttgatctagcagaaagaaaagtgtctctaaattggtgagatgttatctgtggagacaaatgtaggatttagagagagagatgcaaaaggggaagtaagagggtttattcaagagagattatgactgggtgcagtggctcttgcctgtaacctagcactttgggatgccaagacgggcagatcgcttgagctcaggagttcgagaccagccagggcaacatagtgagacctccacctcaaaaaaaaaaaaaaagaaaaagttaattctctcacttattcagtaaatattatttagtccctgtttgtactatgctcccagctagttgccatggcattgagctgtgtgccagatttgggggatttatcacaaaccagaatatactgaggtataaagtctgctagataaagcctaaatcctattattagggattttgcattggttccagagaaatgagggtcgatatgagtttttgagtgaagaagagaagaggtcataaacacaaaaatggagtaagactgtctactcctgtacctgcaatagatgggaaattgagggagagattgggatagggccacaaggctggaaacttttcccacagctgaaggaaggggaacagagaagtggtacatagggagctctcaggagctgtggcacatgccaggagcacaaaacagctcacttcctccacactcagagcagcatggaagccaaggggagactcagaaggatagctggtgatgcagcaccacctagcaagcacccacacagagagcggaggctcagagcacccactttggagggggtgcagagggtggggtaagatgtaggagctctggagagaacaggaaaggcatgggctaagggctaaaatggaagggagaacaagctcccaggcccacacagccatttcatcccctggggagtgaggcaaggcgaggaccactgccctggtcagtttccatgaaaaggtgaggggaggaagtgcatttcagagaatgagccaattgagaagctattgtctaaacaccaaatttgatttttacggcagcagattaagtggtgataagctttatatcagaagccaagctcagtcaacatgctcagaaaaataaccatctgagtcaggatagaaagttcctttgtagcccccagtgggattcccagcccactgccctgctagcctctgcactagtttcccaggctttatttaacccccttttccctcacaggccagtctcatgctgcaccctcattaagggcccagcactgcctcccttgcctcctgctgcaaccaccaccagggtgccctctggcaccatggaggtaaccttgcagctcactctggtgcctgtgcctagggctgtgtgggatgtctgctagcctgtggcccaacacagacgcatgttttaatgtcagtgagcagtgtcactggtataggtttgagtgtgccccttttttgatgaataatatgagaacatcatgccattcatatgaggagccctccagtgcatcatagatgcatcatacaagggctgctctccagtgctggcccatggcacgtgcctgccttccccatcccctccagtgctggcctgtgccaggtccccaccttcccccgccccctccagtgctggcctgtgccaggtgcccacctgcccccatccgctcctgtgctggcctgtgtcaggtgcctacctccccccaccccttccagtgctggcctgtgccaggtgcccacttcccccatcccctccagtgctggcctgtgccatgtgcccgcctgcctccatcccctccagtgctggcctgtgccatgtgcccgcctgcctccatcccctccagtgctggcctgtgccatgtgctgcgccactgggctccaagtctaatggacctatgatggcttcatcatcattacaactgttccttgtagggtgtctgcacatagacagtcagtgaaggtgtgtcaattgcatgcccagccgccatatttcacagttgcctgctggttggtaggctccctcagggcaggtgctgtttctcatttaccgttatattttctgtagatagcagaatttctgacacatgataagcaaataatttgtatttgtgggatgcacattaggtgttttcttgggttaatcttagaacttttgtcagcaagatttaaatgtgtgtttatacttcataattattggagctcaattttagcagtaagggtggcgacccattactgtatgcggtgcaggtgacagagtctgtgtgcggtgcaggtgacaaccacgctagccatgtgcctctggacacagaccctcggtgtcctcactaatttaagggaaagtgaacatgggcatgtggtgaaagcactttatcacggatggcaagagtgtgagtgttcattatgaatttttcacaggaaaaaaagttgtatgcattgcactttcccttttccttttagtcttcacaaaagtcaattacagaggaggaagctcaatgtccacccagtcttacagaagagggcctgagatagaggtggggtgactggcccagggtccaccagccagcccagctgtgactgggcaggatgctggggccttcagtctcccgcagagcccatcacgttccatccagctgagtgagactggggtacaccaaagtgctggagagggaacccttaggaatcattccacacaagtttactgggccgggttatgtattggagaatcatttcagaggctcctttaacaggaaatatgtagtggtaagagctctccgtgggtaagaaacttcaatagtaatttacttcctttgattttccttcttcaaaaaggccacccttttaaaaagccacacacttcccttggggtttgaggtccagaatctctttcttaattgctatgcttagaaaccctgcttcaaaggacatttctaagaattctttcatgattttgaaaaataaaattgttcctggtgacttcaccgaagtttctgaaaggagaataaagtaccacttaagatagagtgctgggctgggctcaatggctcacacctgtaatcccagcactttgggaggccgagaggcagatcacctgaggtcaggagtttctagccaggcaggcgtgccacatagtggcatgcacctctaatcccagctactcaggaggcagaggtaggcgaatcacttgaaccgggaggcggaggttgcagtgagccgagatcacgccattgcgctccagcctggacgaaagagcaagactccatctcaaaaaacaaaaagagagagagagagaatgcgaatcttgagaccaggactgctcagagcagcaacagtagacaccttctacctgagcagcatgctgttacttcaagcccttcatcagtttaggagtatgttttgtgttttccctatagtttttttctttctgccaaatgttacctcccactagtattttaagtcaaaatttaattttattgtcctttaagactggggttttttgggccaatatttaactattgtaaagtatctctttgtaagatcttctgctaaaataatgcattctaagcatccggattgcgattttttttttaacatagagcattttagaaggtacagtaagctctacaaaacattttctttggattggttacattttaggaagatgaagtctgttttcctgatttttgtttaatcgctttatttctgagtgtctttattgttactgtaaactgacaattatttttactagtgagtctaatccaagattaatagagatcgtgacttattttaaaggaaacatattttttaaatctaaggtcttagtcccaagtcacacaaatcattattagaatttataactctctaaggcttcaactgtttcttcacttccttatatatttggttgctttactatgaacacattaattgattcttatacaaggagtctttatcttaataatctgcttaaaataattttgataatgtgtattttgcataagaacaatgaagaaaatcagaagttgaaaagttgaatctttaatttacaaagacttattttctcattagaataataaaggagtgtgtagaaatacagcaacctgagcaatattatacttccaagttttagtttcttcattttaattagcagctaaacagtcatgaatcttcagtgatttaattaaggagggaaaaaaggaggaatttatgtgcttagaccagaagaatatgggatatagcaccaataataaaattcaaaagtgatacaattaaaccaaggtggtcgttgtcctaaaacatcaccccaatgcaaacagagagaactggaagtaaaggaaggaaacatctttaagagaagacatgaaatgggccataaaagaggtttttattacgtccaaagtgaactaactaaaaggagcatgctacaacatggaaggacctcaaaaacatgatgctaagtccaaaaaaaaaaaaaaaaaaaaaaccagacacaaaaggtctcatgccttgtgactcccgtattgtgaaatgtccagaccaggcaaatctatggagacagcagatgggctgccagggcctgagaggagaggaagtgggagtgactgctaatggggttggggtctactttgggatatggaaatattctgcaatttaatagaggtagtgtgtgcacaacattctgaatgtactaaataccactgaattgcatactttaacatgactaatttcatgaggttttaatttcctttagttattttcttagtataattttatgttatattaattttacctcaagtttaaaaaagaaaactgaatgtctagaaagtgcttatgctgttatgaaaataactacaactatttcataagttcagttggaaaataatagtttctcaatggaacttctgggcataattccacatttatcaaaaaggtataacataaggaataggggctcaaaaaggaggaaatgccagttattaaccttggccagtaagggtattttggggaaataagaacacggatttgtttattaaaatgggcacccctctaaaccagccatcacttttgtctttcagtggaagatctcttatccttaagataagaaacctgattttatatctactgtatgtaatctactttcactatcaatgagagtgaaaatcaagagtgattaaagcatgcaaagggaagacaagggactgtgatcaggcttggaacacccatctgtttgatcacaggaaggaggatgaatgagaaccacaaaccgtctgagagattctgtttgaactgtgtaggctaagcattaacaattcccagcattcctgccctgagtacctacccttctactactgaagctaaaactatttaaaacttttagactatatttaccactactcaacaaaaataagctcacattattgtcaattagataaaagttctgctttgactacagtcttctgtatgttgctatggcttcacttattctttcagcaaacagcaccttagcatgggcttgtgaagtcatagctcctgccctcaaggcatttacactccagagagcagcaggttaataacacttttgctgtagtgggtgaacatccccctcatcttctttgttcagcaggggaggagccctttggctgggactcataggttctagtttctaggcagaggcccgtgggaaagcgctcagagtaaaatgaccttaccctctacccataaacttattttcccagtacaagttgagcatcccttttctgaaatgcttaggactaggagtgtttcaaatttctgatttttatgaattttgaaatatgtgcattatacttactggttgagcatccctaatgggaaaatatgaaatccaaaatactccaaagagcatttcctttgagtgtcacatcagtgcacaaaaggttttgaatttcagattagggatactcaactttggtcagaccatcttttgaccaaaaataggctgttgttcagggccaagtgttatttttgtatcttctgtagcagttagcacagtgttcaataaaaacccaatttggccgggcatggtggctcacacctgtaattccagcactttgggtggctgaggcgggtggatcacgaggtcaggagatcgagaccatcctgggtaacatgatgaaaccccgtctatactaaaaatgcaaaaaattagcttggcatagaggcacgtgcctgtactcccagctactcagtaggctgaggcagggagaattacttgaacccaggaagcagaggttgcagtgagccaagatcacaccactgcactccagcctgggtgacagaacaagactctgtctcaaaaaaaaaaaaaaaaaaaaaaaaacctgattaataaatgatgaaatctgaacctaacaaactgttaaaattttttcttggctataaaaacaaattttttagaagtgttctcaaaagtgactttattcttcctccctcactccactacctactcccacataaccaaggaacacagtataaccgagttagctctgaattatttgactgtgagggccaagcttactcaaggggacttgctggttaaaacaacaacaacaaaaacttctaggagcatcctgatcactgaggggagaagctgtgattcagcactgattcacagctctggctttagaatccatatgtcttggttaatacattggtttttaaatttgctggttgattggtactaatcccatccttagttatcaacaaggataaatctacttccaaaagttgttaggaggatttaatgagatcacattcatagaagtaccttgtgcaatgtaaaccaccatgtaagaagttgcttttcccttcttcctcagactttctctttctacttaattgaaaaagtagaaatccagccagcactgacccaagactttgttgtcttgtttttacaaacaaaatgggtagaggaaagaaatcagaagtaatttagaaaaatgatacagtttgaaagtgttccatgtttttcccaaggaagaatataaatcatccagttggacattgctaggcattgtcaattacccaataatgggaaggaatggaaattaagccagtgggatttgtacagagagatctagttaaaacagggataaaagaaaccaaatgggccgggcgcccattacacctgtaatcccagcactttgagaggctgaggcaggtggatcacctgaggtcagaggttcgagaccagcctggccaacatggtgaaaccctgtctctactgaaaatatagccgggcgtggtggcagatgcctgtaatcccagctatttgggaggctgaggccggagaatcgcttgaaccctggaggcagaggttgcagtgagccaatcatgccattgcactccagcctgggcaacaagagcaaaactccgtctcaaaaaacaaacaaacaaacaaaaaacaaatggaagatcagctgatatgacagcataaaaacaaataccacttatccctccaggttagtaatttaactagttaatttaccttgcagcacagtaagtctagaattcagtaaatgggcagggttttgttttattctttttttaaatcatttcttctcttaaaaatatttcccccaccctacccttcactgtccttcttaccacagaaattataattatctaccagtaggaggtcagtggttttatttatttatttatttatttatttatttatttatttatttttttgagacagtctctctctgtcgcccaggctggagtgcattggcagagatcagtggttttaagactttcagtttttgtttttctttctttttttttaatctctgctcactgcaacctccacctcccaggttcaagcgattctcctgtctcaacctcccgaatagctgggactacaggtgcacaccaccatgcccagctaatttttgtatttttagtagagacggggtttcaccatgttgccagtatggtctcaatctcttgacctcatgatttgcccacctcggcctcccaaagtgctgggattacaggtgtgagccaccgtacctggccctgtttttctttaatagaaatctgttcaggcacgatggctcatacctgtaatcccagcactttgggaggccaaggcaagaggatcacttgggtgcaggagttcaagaccagcctcggcaacatctcgagacctgtctatacacaaggaaagggagggagggaaggaaggaagcaaggaggagagagaagggaaggggaaggggaagcttataaaacaaattatgtgaagttgtttgttctggaaggtggatgagttgggccaccatggctccccacccagctccttaggagtccagcagcatagtctgaaagcatctgttgtggattaattgcccatataaacatttcacatgttccatagttcttctttcttcctctcgggttaatagcttgcggcagtagttgctaccatggggacactgggtagcagtatgattcagaagcagaatagaaatgttcctgtattaatctcaaataaaaaatccaaatatttactttaaatatgctattattagctgaattctcaaaattggaaaatcttacagatttgaattttggaaaaaatacttaaatctttataatttgccaagaaaatctctgttaatacgggatgctgaaagtggaaagaaaagaaagcttgagtgtcactagagtcactctattttttcattttaccttcaaactagctaataaattagatcatggtatttattttttagataagaccctgaagttcactgacattaagtaatttggatccctgtatgtgagctgggtcttaagacaggtgcaccaaattccaaagtctgattttcagtactacagctgacatttaattacttccagttttaggggaattcatttctataaatttctcatttgttttatatttataacccctggccctcaaaataaaaatctgattatttcttgtcagtgatgttgatattaatttagattcttggtattttccactgtttttgttaaacaacagcaataaactatctatagtaggattgtcttgagtaactaggagtattaaatccatagtaaataattacactgcctgcttttggtttagttagggttctttttttttttcaaagtttacttagatacttattaacaaaaataattagcttttaaaaaaggttagtgcaaaagtaattgcagtttttaccattacttttaatatcattacttttagtagttttcattactgttaaataaaagcaagataatttacttctctttctcaagccaccaacaacggagtgggttgtgatgaagccattgaacctggaccatacatttgtaaaaggcctcagattaggactttcagtatgatccataaatgtgataataatatagccactgttttgttggttgttgctgttaacagaattaacataaattataacaacaatttaataatctctcttttaccttttacccactggatatttaccccggtaagtaatctttcacatctttctccacgaatgtagacatatctataaacaaaaagatatggtttgcgtttttcacttaatttcaccaggatgtccctctcctgatagacattcaggttgtttctggtgtttaccacttcaaagcagtgctgcaacacacttccttgtatatctctgtctgtatctcctgtatgtattgagcttatattttaaccttctttactgtgaaatataacaagcatatgaaagagggcataattgtagattgtaacaaataataagtgaataaataaagctcactcattaagccaccactgtaattcaataaacatggtgggtatccagaagccacctgctgcccctaccctgatcctaaagatcttcacacttctgagagtgtttccatgtttttctttacagttatactactttttgtacatctttagaaatatatttaggctgggcacagtggctcacgcctgtaattccagcacttcgggaggccaagacagaaggatcacttgaggccaggagtttgagaccagcctgggcaacatagtgaggccttatctctacaaaaagtaaaaaattagccgagtgtggtggtgcacacttgtagtcctagctacttgggaggctgagatgggagaatcactgggtgacagattgagacctggctgtcaaaaaaaaaaagtgtgtgtgtgtgtgtgtgtgtgtgtgtgcatgcgtataggtttacctgtttttgaactttatggaaacagcatcatgcttgtgcattctttgtgttttgctttttattttattttatttatttattttttgagacggagtctctctctgttgcccaggctggagtgcagtggtgcaatcttggctcactgcaagccccgcctcctggattcacaccattcttagtctccctagtagctgggactacaggcgcccgccaccatgcccggctaagtttttgtatgttcagtagagacgggcttttactgtgttagtcaggatggtctcgatctcctgacctcgagatccgcccgcctcggcctcccaaagtgctgggattacaggcgtgagccaccacgcccggccgtgttttgctttttttgctcactagagatgccgcggccccagctgcacacaaaaggaccctggtgtgggggacccttacaaaagaggacggaaacaacatagttttaaaccaataaaccttgtaagtttcttctgtctattgcaggtagctccggtttattcgttttcattccattttatgcatttaccatagtctctttgttcatgcagttgttctaggcatttccgaccactgctggcagcggcaggagcccttgctgtgtatcccctagggcacaggtgtgcacatcgtgggggtggggtgttcctcaccttcaatggatagtgctaaactgtcttccaggagcggagttcagcctccatttctgttagcatagtagagttcctgctgctctgctgtctttccattatttggtacacttaggtgtctttttcattatcttttttctggcctgcatttttttcaaactggtagatctgtagtggaattcactgtggtttaaattccagttcctgattaccgctgaggctgagagccttttgctgtgtatttccatttgtgtttccactttgatgaagtgctgttcaagtcttttgtttatttttcttttggggtgttgagctttatatattctgagtagtagtccttcattggttgtgtataatttatgtgttgtaggtggcttgtctttttatcggcagaagtaccaatttttggagggggagcggatagcattcccaaagtgggactgcctggccagagtatgtaactggacttgttttcatgacccccaggcagggccgcaggaagcatcaagtgtttttgaaatggcttctggacccatagctctcccgggttggttggcttacctttaaccagaacactcccagcagaggctatgggtctgtgtctccttcaggtaaaatgagattaacttgagtaccaagggaaacagtgaagtgtaaaagtcaagagctaccgtttatcgcaggccaattaggtccgttttgtgtgatcttcaaaataagtctcagaagcagatattattttacccacttcacagatgaggagcttgaagctcatcaggaataaagattttactctatgccatacaactggaaagtaggaaagtggggttaaagctcactttcacatggctcccaagcaaattctgcatccattctggcagcttgaagcatagcctagcttcatggtactgggtaccttgcagaggaggcatgggtagaacagagtccacaccagatgtctgactgtgacataagccacagccccttctcgtctgcaactctccgtgactgggggtggcatgggagctctgatgaggcacactccaatgccggtgtcccacccctccccaaggccagccgtggcacactgcaggctgcttactgatcaggttgaagcctggtcgcttgataaagggtattttgttgttttcttcttcattatttggcacgtcaatgtaaattattttaataggactcaacagtttcagtctttgaaacattatatgaggggaggctacttgatgtgtgaattcaagataataagatgaattgtaaggagacaagcatttttgttaagtatcagagcacacttataatatttggttaaaaaaaaaaacttacacgtgtctataagagatatgggctgacagattttgtgtggtagtgtgggtttttccacctccacgctggtgagcgagtggatcatgtgaggcttttggaataataagtaccaccaggacagaagagagaactgtttgcagagttacagatagcaacatgtttcaggagctcttcatttcctgtgaagttgagagagtgtgtggggggggtgaggggtgcgcgtgcacgtgcgcctgtgtgtgtaatttcccaatgaagtagaacagaagtgtgtaaagaacatttttttttacaaagttactaaattatactacttgataattttatgtccccaatcttgagtcaagagttgattaggaggattttttctttatatattattatattatttttatataatttatatacatatattatttttaatgccctgtctttaacaaaagacatttttaaataaaactagcaggctgggcacggtggctcacgcctggaatcccagcacttgcggaggctgaggtgggcacatcacttgaggccaaaagttcaagaccagccttgccaacatggagaaactccatctctactaaaaatacaaaaattaaccaggcatggtggcatgcgcctgtagttgcagctgctttggacgctgaggcaggacaatcacttgaacccaggaggcggaggttgcagtgagccaagatcgcaccattgcactccagcctgggtgacaaggcgagattccatctcaaaaaataaataaaactagcagatgtcctgtaaaatgtgagacattccagagttacaaatttatcttatataattatataaatttaagcagagattcaaaggaatagtgcaaagggcttaatttcagatgtgtgttttaatttccttctttcagtttctccaactagctacaatctgaaaaatatcttgctggctgggtgcagtggctcatgcctgtaatcccagcacttttggaggccgaggagagcagattgcttgaggtcaggagtttgagtccatcctgagcaacatggcaaaaccccatctctactaaaaatacaaaaattagccctgcatggtggtgcacgcctgtaatcccagctactgggagcccgaaacacgagaatcacttaaacctaggaggcggaggttgtggtgagccaagattgcaccagtgcacttcagcttggacaacagagcaagactccgtctcaaaaaaaaaaaaaaaaaaaagagagaaaagaaaaagaaaaatatcttcctgaaattcagtgaacttgctttggaaatgtttcgtaagttcccacatctatacggtattcataggctattcttagcggagatcaatctctggagtcagaatgcctgatcagtttcccttcctggctgtcccaccacggtggttgaagggctgctccaggacacaccagaagtattactgaaatactgctttatggtgtgcattttactgttctgcaatatcttatgtcatagaagagggtttaagtatgaaattcacatggccacagttttatatagttgtggaaacccaaggaagtatttttctttgtattctaagccatgttctcttgtgctgccacaaacccttggcccagcacaggtgctgtctctgtcctctgaagagccacagtgcagggctgtcctgtctggtgctcaagacccgctcctgtggcttagcaggaccgatgggcacaccgggggttacatggaattagtattccgctagcttgacttaggaaaaggaagcgcaaccactccaaaagtagagtgctgaagccactgggctcgctcccaaccctgtgctgctcctgggctctgtgtcagctttccagtgaagatagcagcactactcttttattgcagaagtccccagtttttcatttcctggaagctttgagattagttttgaatgggggctttgaggacagaagaaagataatgttcgtaggaaaatcattaagcagagttcaagaaagtatagcaatggatgtatttcaggtcaggtttagtggtctcctgattagtggcccctgtcttaagttaatgacactttttaagtaatagcttgactgagatgtaatttacatactaaaaatttaccctttttaaagtgtacgaatcattggtttttattttactcacaaagttgtgcaaccagcaccctaattctggcacattttcatcacctcagaaagaaaccttgtaccttcagcaggagctccgcactttctctcccccagcagccactcctctgctttccgtctctgtggatttgcccgttctggacgtttcctgtcagtggaaccatacagatgtgacctttggtgtctttcactttagcagaatgtttttaaggtccatccatgatgtaacatgtatcagaatttcctttttttttttttttttttttttctttgagactgagtttcttgcttgttgcccaggctggagtgcaatggtgcgatcttggctcactgcaacctctgcctcctgggttcaagcgattctcctgcctcagcctccagagtagctgggattacaggtgcatgccaccacacccagctaattcgaactcctgacctccggtgaccgacctgcctcatcctcccaaagtgctgggattacaggtgtgagccaccacacccggccagaatttcattctttttatggctgaataatatttcatgacatagatacatcaaatttatttatccattcaacagttgatggacatttgggttgtttctactttctgggtaccttgaataatcctgctgcaaacattcatatgcaagtttctgtgtggatgtcagttctcagttctcttggatagacagcaaggagatgaatggctggattgctgccacgcagctttccagagcgatggcctcattttaccatcccaccagcctaatggtacattttaatcactgctattctaatcttgttagagtcttaaggtttccatggctcctaccagtttgttcatgatctcttgggctatttgttgctgtctgcctagcagaacaaatcttgttggaggaaatccatttcagtatgaaggcaaaagtttaattcactcaagtattgtttttttgtgtgtataagggtgacataaaagtagataagctatcttctggaaggcattatttttactccttaattatatacctaaactgtgtcaccaactagcctagagtttaatattaaatgaatgaaatgaacaagtgaatttaggttaaagaaatgtatcagaagccatgggtttcttacagaagaaatcagggctcatgaaaaattctcatactgaagcgttgagggacacttgtgatatgtgacaggtgccggcattgctgaaatgccatgtgtccttactgtgcagtactggccggtgggattgaagagtcctgccggccctgctagctagtatgccagatccatggcctcgtgccatgccagcgttatgcgcctcccaggcaccagtctgtcatctaggcactgggattccacagagaacagacacatagagcctgccctcaggaggttcacattctcgtgaggacacaaaacaggcagcactaactaagccagaggatctcggtggtgaccagccccggaacacagggtgaggtggggcagaggcgcctcagagtggcatcaggggtgacctctgtgcctcttctcacctatgtccttgtacagaacccaacagtgattcttacaggaattgcctcttcaagactgctcggcctttgctgttctctttggcactgatgtgacattcatgcagtgggagccacagcagcgctaagagcccttctcagaggtggtcctccagggtgggagtgtgggagcatggccctagccccaggagccacatgaagagctcctttccggtccagagagacttcctcagtctccacaggtctttctcaacactgcaggttggcctgctcctaaaactactatttttatgtcgagtgtggagccacaggaaagaatggagttataggaagtgttacattatttataaataacccacatgcattgacctaattttacaatgaatgggaatttacctttgtaactcaaaataggattcctatctaagtttattggacactattaataatgattcagcaacaaataggaaattgtttcttagactgcactgaaattatatcttaaaatacagcctaccagatatgtctgaaaagtctgttgtctctggcacgtagagaccctgctgtgtgggggaagatgtgtagtgtgtggccagcagtgggcaggaaagggagacagactgagagaggggagacaatctaaagaacatgaccatgtaaaagataagcggggaggaaagaaaaaaataaaaatgaatgaggactggccaggcatgatggctcacacctgtaatcctagcactttgggaggccaaggcaggaggatcacttgaggccaaacattggagaccagtctgggaaacatagtgaaaccccatcctgtacgaaaaattttaaaaattagccaggaatggtggtgcacacctgtagtcccagctacttgggaggctaaggccagaggattgcttgagcctaggaggtcacaccactgcactccagcctgggtgacagagcaagactctatctccaaaaaatatatatatttggggtgtgtgtatgtgtgtaatataaaaaatgagggcccaaagaggtttttttaaaaaaaaatatgagttaatcagtattcaccttattagaaattaaaactgaaaaagatttaacacattaatttacctaaaagcatctataatcaacctattagatgacaacctaaataacattttttatgaaaaatatttcctaaaacacaaaaacatatttagcaatgagagtcacattgccctgtgttttgcaggtctcttcactggttgaacaggagatgatggattatcatctgtgctctgccttcagtctgttgtaatatcacacatcatgggcctctagaaaacaccactgtacactcatgagagaatggaagtgagaaagaaaaataaagacttggcagaaaacagttttggccttgtaggctgcctgaaaggctctcggaacctccagcgacccccagaccccactttaagaatgactagtctaaagtattccactatccaaatgaactctcttggagaggtatgagtcctacagcagtaacaggtacagagaaattagcagcaacatgacaaattttaagaacattttatacccagaatacatgcttggttaaaaaaaaaatgattccaagctctctgagggtgagtccatcatgggccaggtgcttccttgttatcttcccgttttctgttgtccacagcaccattgtggcttaaatctcctagagcaaattccactctatccacacccaaaagaaagtggttcaggcagttttaaattgtcctgtgaagatttgagagttagttggatgagacagtatcagatggaaaaaataagccctgaaataactaagagaataggcaagcaagctggtaatatcagctaatgttccggtgtgcaaagaagactttccatgtttactttcttccagtggactggagagtggaaatcttggttgcccttactttgaatggttggttttccaaatgacatttgtcatctaccaatcaagataaataacaccagctataatgaggccagaggaggtagatcatttgctacaccaaaatatccataaaatgtgtgtaaaaatatgtaaatttagcattgtttcaatggcagtgaggtgggaaccctgcttccttcatctattgtatatttctgagactcctcttgggcgtggtgccactcccactctcttcttggtccgcagctgatttctattgccccaggacttgccccatcctcacttctgagctcatgagtgatgctggggctgcctttttaggaattcaggaaatggaggcacccagttaaagttatctgcaccttactcatttccatgcacctttcttgtcgcacgatgggaaacctcagctctagtttgtttactaaggagaaacatctgtcctttgacatcacttccgactcttgaactgaatttgtaatttttttctgaagatggtctcaagttggttctcttcctttgtgatttgttttctacttagattttgacagcttccaaaatatgttaccaacaacaaaattcagacaagaaaattggttttttttcattctaagaagttaactttgctccgtataaatatctccatttgtttattcctaaccctttataatgtttagagtatttttttctctctcaaggatctggtaattactaaaacagcaaatttggaaatgtttttaaaattaaagttaatggctctgtctttgtaaatttttctttacaaatagattggaaatgttcaggtgcaattctgctttgcaccagagagcactttgtaacacaaaaagtcttcagtcagccaagctcacctgtcagcctgcagaaggcacttatcacagatggctggttgtttctagcgccccatgctgccacactctcatagaaaggtgtctgcttcagcacccacacctagcactggagactttggaactgtctttcctcctcaaacagaggcacatgtcagcgagggatagcagcagcactaggaattagagaatcacagaatcctacaagggaggaagatgaagctgagagagattcagaatttctgccgtggaaggtggacagtgtcctttctatccccaagtctgcagccagctttcctctgagcaaatgcacatcacctgcagcatcatggggttggagtgtgcaggctcagccctggaggacgtgagttggcaggactccttccgcgtggccctcatctccagtacagcccagtctcagtctctccatggggccctcatgagatgtaagtgatgtggtgcccccatccttactctatctctcttgaggggtgtctccaagggcttttttataagtgagaacatgttctcagaaagtgcctcttacatttcattgactcgtgacatgtcggggtggccttcctttaaagagtgtggaagacttgaaaacagccgtagggttggcctcagtgagccatgattgctccactccagcctggatgacagagcgagagaccctgttaaaaaaaaaaaagaaagaaaaaagataaaaacaacacttatatttatttttatggtaaatataattttcattgtggtaaaataacatactataaaatttacaattttaaccattttaagtataacttggtagatacaattttaacatgtgtatagatcttgatatctttccacttaaaaaatacactggttactataataaaaacatagcactgaaagtctttcagcttcctgagcgtgactttaggaaagcacgtgtgggctcctgccaggcctcctgcctccctcctcccgcctccaggagcagctgcgtgttctgcagcctgtgctgcaggtgggtctgccacagcccccaagtgagtgcgcagaggaggctcccaggctgtccctgttccctgcctatgccatgtaccatgctgtctcctttcttctccgcgtgtcctgcaccaccccccagccttcttcttgccgctcttcaaatacagctgatttttagaggtcagatgaactgtgactgagtgtgatgggaaacgtggctctcccttcactgatgggtagctgacttgacctccccccatgctctctggcagtcttgtgggagctgctgggtgagctgctgactgctgcagagcctgccagactagggacctggtgagtaggacagctggccctgcttctctccttgtctgctccacaaacttgttgtcacagattaatgacctgaatttgtctgcaggctcattttatgcaatctataaattaaggtataccccatgaaatttattccaacataattaagttatcaaatcataagcataatgaattaatctgtatgtcccttttttctctaattaaactttatattttaaactttttaaataaaaatgtttattaatctttgaaaagacagactaatggtggccactcccctgtcagactgtttgttgcttaaacatatttttaaaggatcacttttttaaaagaatgtttcctgtgtaacaaaatgaatagtaaagaatgaattgcagtgagaggaacaatacactttttaactgtgccaaaagtgagcttctacaccaagtctatgcccagcagaggcgggagtcatttaaatgaatgtgtcagctgcccccagacaactctgcttcacaaggcaacagtggccatccaaaccattatctatttttaaaaatagtttttaaaaacagtggagaagctgattttttatgagactaagcattttatttaactcatagccattcttcagctaagcattgtgcattaaataaatgtataatatgtctaaacttttttaattagctggtagcatcctctaaataaaagtcattaaattcaaatagaactttcctatggctgtgtgcttctagaacagcatttgtcagaattccaagggaacgctagtttctcaggacattattagtaatgacaccaaaaagggtttcatggttataaatgggagaagctttagtttaaaataaaacaatatgtcacaggtgccttttacacggggctctctaggccctctgccatgtccagtcccactgtagcatgtgagggtcctgccagccgcagatgtgccacacagcaacaatggccgaacagggagttctgttctcatgggttacacttcgcagaacactttttgggaaactccaaatttttagggaaattgataagcactctgtcactgtctggaaagggttgtttatttttctatactgtataaagaaattttttttacactcatcttttatcatgctcttaattttactctgtttcttcacaaagtaacactaggattaaaatcctgtcttcaactgggcagattttttagcaaaaaacagcataaaagtttatggctttagcaatgacaatactgataactatagtaacatcaagtggctaatgtgttggacactcactctgagcgtagaaaccttagtaggtgctgcacatacgttctttacttcctttactccttgcaataatgccagcagcatcccccagtttcccagaagggctgacacaaggtccaagcattttctcaaggtctcacagtgtataaaaggcagagcttaagcaagatgagtttcttgactccaggggccctgctgttccccatctctgttaacaaggggctcaggtaaaggttagagccaggtctcggaagtgcagtcagatctaaggtgagaaccatacaactgaaatcataactgtttgtccttttgtgtccctctatatattttacttcagataactttttttttttgagacggagtttggctcttgtcacccagctggactgcaatgatgtgatctcagctcactgcaacctccgcctcccgggttcaagcgattttcctgcctcaacctcccgagtagctgggattacaggcatccgccatcatgcccggctaatttttgtatttttagtggagacagggtttcaccatgttggccaggctggtcctgaactgctgacctcaggtgatccatccgcctcagcctcccaaagtgctgggattataggcatgagccaccgcacccagcccagataacttttcttacataagtaatacatatctgtttggggaaaatatacaaaatacccaatccacaggaagaaagtaaatatcacctccaaactctactcagataaccactaaaaacattcttataggcttcagtcttttcctttggcttaatatatatagatgcatgcatagatacacatacatacacacacacacagagagtgagagagagttaatttgttgcctgcttttttcttagcagggtatcacaaacatgtttccatgtccataagtattttctttgtaaccatttcagtgaccgtatactatttcactgtgtggatggatcctaatttagtgagcaagttcctgttgtgcagttggtttcccacagtgtctgtccatctgtctgtgtgccttcttccccctctgaatcgccacacatctcgaattgtagttccatggccttaggcattagagtctgttaagcattctaccagctcactggccaagtactcagtaagggatgtctgatgatgaatacctttgacttttcttgttccaggacagcggggattttcagtttgattgacaccctgtggcccccagcgatacctctgaaaacacctggccgcgaccagccctgtgaagaggtaagcccggcactggaaaaacttccccagtcacagactactccatgccaggtgccaagccaggcgtcatcactgtcactcacatggtctgtgtcccctgctccagtggcaacaaggagcccccatgcagtcagttcctttgtagtgatgcatgaatatgagccaggattgggattcaggtgcctggagaccaagctctggctgccttccctactgtgctgcacagcattttcttgaagttaacttatgatgaatgcttaaaccacaaccctcacatactgttggaacagttggggtctcagccttgtactaaagtaaacatatagaatttttcccacgaacttctagtcattcatagaaccaacactcagttaccaattggagcaggaactcaatacaatccatagacattcgtacaacgtcctgggtagccaggaacttccattgtcctgcttgtttatgagagtgtctcagaagcagcaaaatggatggaaagtgttccctcctctccctcctgagccttttccagcaggctagccagctgctgctttgggccagaggtcccaaaacaaaactggggctgtcttccttaggttgtggctgacttcttagtagtgctaagtctgtgaccctgaactgtgctaaacagcatagtagttgtcaaagcacacggtggctcatgcctgtaatcccagcacttgggaggccgaggcaggcagatcacctgaggtcgggagttcaagatcagcctgaccaacatggagaaaccccgtctctactaaaaatacaaagttagctgggcattgtggctcatggctgtaatgccagctactcgggaggctgaggcaggagaatcgcttgaacccatgaggcagacgttgtagtgagccaagatcgtgccattgcactccagccaacgagagtgcaactctgtctcaaaaaaaagccatttctagattacttaagaggaagtaatttctagatgatattttcagtataccccgaaagatttctaaaatgaaaccttgaattaataggttcataagtatggaagttcttatagttggtcccagaagtaaacaatgcaatccattccttgtatagcattccagagagaggatgcacctgtaagcaaatatgtatatattaaagaggagattttaataatatctcctctttttgagtcttttaacaatacattcaccttctacctttgtctcatttaaacagataaaaactcatctgcctcctccagccttgtgttacatcctcacagctcatccaaatctgggacaaattgatataattgacgaagaccccatttataagctttaccagcctccagttacccgctgcttaagagacattctccaggtaatgtctttgtttctaacaggttttttaggtattggccacgtctgtgtgcttcgtgtaatgctgccaaccttttctaattcctttccagatgaatgatcttggtacccgttgcagtttctatgccacggtgatttaccaaaaaccacaggtaataatctctctcaatctctcaatctctcagcctttctctctctctctctctctctctctctcacacacacacacacacacacacacacacacacacacacggtgttagaggtttattaaagggtaatctcctttggaaattaatgcattgccaaaacagagaagtgtttttaaagtccagttaagcatgccccatatactgaagtggcagtaaatccattccttttacagatgcagactaccagccactgtgctaagcactggggtgtaagacacccaggtacaaccctgtccccaaagcttctcagcccagtaatgttcattctttcccgacacttaggcaggttgaagaaaggaaagagatggagaaacctcatttatgtggtagaagtgggaatctcaggatcgagctcagctacttctgggaacttttagagccttcaaaactgaaagcccccccatcccacctccatggtccctgtgaggccttgggctgttctagggagcagtggcctagaggagcttgctatcaatcaactaggagtagaggagggaaggagacctgcttgccagtttgaatgcatggactacattctgctagaaacctctgccagcccttaccttatggaggaatatccatgtagatctaatcacccaagagggattgagaacatcctgtttgttaaactcttgtccactcatgggcaatgtgcaccgggtgcatctgccatggtgcaggagagagtgagtgccccacacattgcctccttgagggtgtgtatgagtggagcaaaccaggccccagatgcctgcactcacctgggctgtcggtggatcaccagctaccagccaggccagaatactcaggaattgcccagcaagcagtctcaagggagggcaggaggctggcaccttggccagcaacctcggccaggtgccccagtgcaccacgagtcgggggacagtggtgggggtggcaccaggggctgtcttctaatcatactatgcctggttatcaagatctgacactcacacccctcacttttctttttgttgctgaagtatgctaaagcacacccagacctcatgccatttcaccccgacacgcttgttaggaatctcttcaaagcattcatggttgcatacaacccaattcagctgcctggttttggagcctttctcttccgcttaagttatccagagttattttctgttgtgcatttattttgaacaaattctttgcatttctctgatcattcttcgacagtggaagaataagagagtgactaaaagaatatgtttcataacttctagtcaagttcttgatgaattgcatatatacgagtatcattaaatcagtgttatcacaagcatgttaaatcaacttctcttccatctgcatcaggggtagtgggcagactgtttctgtaaagagccagatagtcaatattttaggcttcttgggttgtatggttttcatagcaactactcagctccaccttgcagtgcaaaagcagccatgttgtcattcacaaatgaatgagcagggctgtgtttcagaaacctttatttacagacaccaaaatttgaatttaacttaatttttacttgtcacaaaatattcttacggttttttaaccatttaaaaatgtaagaaccttgaataaacataaaaaccatacttagcttacaggcctagcccacaggccatggtttgctgacgttcttcaggtgctgagcatggctggaggacacaggaactctgacgcagaaagaaaaacaacccaagtgtctcctggtgtcccgtaggttgtactgaatgcacagtgcggtgtgtgtcagggagaggagacggggagggccatctactgacggccaccgagtaggatgcaagcttgttacctaaggatgccataggtgctgcgcaagaacacagcgctgatacatatgatcgtcatatgaaagtactttaaggctttatctcaatttaatttttacatttcagatgtaaggagtgtgctttaggtgatatgttagtaactgtcaattgcgtttcctttccttctctgcagaaagtgtgtgtgtgtttctgcagcttaacctgtggattagctagtgcttgccagcacatagagtcttgcccacagaaaggaaatcagagggctgagttgtgaatataaacgaaccacatttagctctttattttttattatcaatacttcaccacctttaattctgtcagagatttttcagattttcaaaccattctcatgtacatatcattttatctcagcagcaatagtgtcactgttcctaattccaagtggagaagaccaaggctaggcctggttatctgctgtctctgatacacacaaccaaaccctggtggagcctggtgtgggtttcctgactcttactcagcccagtgtcccctggtgcttcctggctccacggtccctcagttacctggtgccctggggggtggggggnnnnnnnnnnnnnnnnnnnnccccccccaaccacatgctgactgagcttgtgcaggtacttcaccgcgttgtctcatgtccttgtctgtcaaatgggtgtaacattctctcaccatattggattgttctaggatgaatttaggagttttgaaataccctttttcctttgttttctcttcatctgttccccttttcatcatttgacagctgatcagtgcctctcatgaagaaatggagaatgattggcatgagtccctcagtggtgctccctgtgagcaccccagtgtccggctcaggagataggaggatagggctcccagcaaggacgaggcagggcacgtgctatgtcccatactttccaagcctgaggagacctaagactgacttcacgctcctctgcctaccttgagaggggtcagtgtgtgtagggatgcccctggcatctggcacattcctgctcttctgggtcatgggccaggcggtggctctctgtgcaggtgcctttcacccatagggagaatgctgtcctcagagcagccacgtggcagttgcagctaacactcctgcccacggccctctggctgagaccgaggttgaaagtaaagaaagcaggtgtcaaaatgcttgcaccaaagccagttggaggggagctctggggcagagaaagaccaagagtgaagcaggtcatccaccttgccctgtgaaggggtcctccctcagggaggtagagaagataatgttaatcccctcctatccaagaaacaggctcccaccagtgccaagtgcagctttcagtgagcatggcttccagtgggcatgtgtgcctaggaatcagtagtcctatagccacaaaacagtcaaagacctggaacccaatggaacaggttccatgatccactgaaattctgtctgtctcctatagtctgcttttgtgtgtaaaagaatcaccagaaaccagctgtctcaagaaggaatagaaataagctgactcctggggccagtccgtagttaagccagtggcctgcatccttggcagtgagggttgactttcagaatggcaccatgagtcattgctggaactccagtcataaaaacagacccagactaggcgtggtggctcacgcctgtcatcctagcactttgggagactgaggctagaggatctcttgaggccaggagttccagaccaacctggtcaacaaagcacgaccccgtctctacaaaaaaattaaaaattagccaggcatggtgctgcatgcctatcatctcagctacttgggaggctgacatgggaggatcccttgagcccaggaggttgctgcagtgagctgtgattgcaccactccactccagcctggctgacagagtgagaccctgtctcaaaaaaaaaaaaagcagattcagttgtatttccgttacactaatgactaagtcatgaaggtgaaaaagatagttttcatatttaacttttattttgtaataattatagtttcacagtagattgcaaagaaatacacggggggtctggtgcacccctccacccccatgtcaatatcccacacccacagtaaccacagtaaaaaccaaaaccagctgggcgcggtggctcacacctgtaatcccagaactttgggaggccaaggcgggtggatcacaaggtcaggagattgagaccatcctggctaacatggtgaaaccctgtctctactaaaaatacaaaaaaattagccgggcgtggtggcaggcgcctgtagtcccagctacttgggaggctggggcgggagaatggtgtgaacctgggaggcggagcttgcagtgagccaagaccacgccactgcactccagcctgggcgacagagtgagactctgtctcaacaacaacaacaacaaaaaacaagaaactgacacaggaacaatccatggagcacattcaggtttcagcagccacgtgtgcactctgtgtgtttgtgtgtgtatgtgtgcgtgcacttcttgcagttttgtcacatgtacagccttgcatcactgtcactgcagtcagaatcctccgctgtgccatcaccaacgattcctgtgttcgcctttatagccacgtcgatccttttttcatccctagcgctggcaaccactcacatgttctctgtcattataattatgttgtcttatggttgttacatgaatagaaccatgcagtatttatctgtattagtttcctactaggattaccatataaagttccaaaaactagatagcttaaaacaatagaaatgtattctctcacacttccggaggccagaagtctgaaatcttagcagtggccagtcgcagtgcctcacacctttaatctcagcactttgggaggctgaggcaggaggatcacttgaggccaggagcccaagaccaccttggccaacatagtgagactccgtctctatttaaattttgtttttaggcccagtgctgtggctcacacctgtaataccagcactttgggaggccgaggcaggtacatcatctgaggtcaggaattggagatgagcctgtcaaacgtggtaaaaccccatctctactaaaactacaaaaaattagctgggtatggtggtgcacgcctgtagtcccagctacttgggaggctgaggcaggagaatggcttgaacctgggaggcagaggttgagtgagccaagatcgctccattgcactccagcctgggtgacagagtgagactctttctcaaaaaaaaaaaaaaaaaaattcattaaagaaatataaggtgtcggccaacagtattgtctagagattcatccaaaggactaataatgttgaacatcttttcatgtgtttacttgccatccatatgtcctctttggtaaaatccctgtttacatcttttgcctattgtctaattgggttgcttgtttgttggtttattgttgagtctttaaagttatttctattttttaaatacaaaacctttgtcagatacaggatttgcaaatattttctcaggatctctaaattctatttttatccttttaatgatttttcttaacatagtagaagtttttaattttgatgcagtcagatttaccagatttttctcttacagatcacagttttgttgtcaagtctaagagaagtcaagtctctttgcctagtcataggtcccaaagttattcttttgtgttcttttccagaagatttaattttacactttaccttccaagtccatgatgcatttggagttgggttttgtataaggtgtgtggtttaggtcaaggttaattttttcacctttggatatccattcattccagcaccatttgttgatatatcgtccttcctccattaaattgctgttgcacttttgtcaaaaattaattgggcatatttgtgtgggagagatctattttttcctgataaatttgcattggtaatatttttgccttattactagcattataggtgtctatatcatctatgcttaaatacttttcctgggccggacacggtggcttacgcctgtaatcccagcactttgggaggccgaggcaggtggatcagctgaggtcaggagtttgaaaccagcctggccaatgtggtgaagccctgtctctacaaaaatacaaaaattagccgggcatgatggcaggtgcctgtaatcccagctacccgggagtctgaggctggagaatcacttgaacctgggagacagaagttgcagtgagccgaaattgtgccactacactccagcctgggcgacagagcgagactccgtctcaaaaacaaacaaacaaacaaaaaactttccctgattacacagggctataaaaatttttattagacttttttcttttagagcagttttaggttcacagcaaaattgagaggaaggtacagagattttccatacaccttctactcccacacatgcacagcctccccattatcaacatccctaccaggacagcacattgctcacaactaatgaacctgcattgacacatcgtactcacccagagtccacagtttacatgagggttcactcttggtggtgtaattttatgggtttgcacaaatatgtaatgccatgtatctacgatcatagtatcatatggagcagtttcagtgacctaaaaatctgctccacgtgtttattccccctccccacaaatccctggcaaacattcttatttttaccatctccatagttttgccttttcagaatattgtataaagttggaatcttagagtctgtagcctttcagacggacttctttcacttaataatatgcatttaagtttctgtgacttcatggctagatagctcgtttccttttgagtgctgaataatgttccattgtctggatgtaccacatagttcagtttagttattcattcacatactgaaggacatcttggttgtttccaggttttggcaattatgagtaagaagactttttttttttttttgagatggaatctcactctgttgcccaggttggaatggagtgacgcaatcttggctcactgcaacctctgcctcccgtgttcaagagattttcttgccttagcctctcgagtagctgggattacaggcatccgccactacacccggctaatttttgtttgtttgtttttgagatggagtctctctctgtcgcccaggctggagtgcagtggcatgacctcggctcactgcaacctccacctcccaggttcaagcaattctcctgtctccacctcccgagtagctggaattacaggcatgcaccaccacaccagctaatttttgtatttttagtagagacagggtttcacaatgttagccaggctggtctcgaactcctgacctcaggtgattcacccgcctctgcctcccaaagtgctgggattacaggcgtaagccacggcgcccagcctaattttggtatttttagtagagatggggttttaccatgttggccaggctagtctcgaactcctgacctcaagtgatccacccaccttggcctcccaaagtgctgggattacaggcgtgagccaccatgcccggccagagaagaaatctatttttaataaacttttagcaatgtagtggtagtactagtactgctttcattagttactgatgtctttttacagataattttattgttactgactttgttcataaccccaatagtaggacaattttatagttaatttcaaaggagattagaacattttggtatattaatagattgaaagagagaccactggccaaatccagagtatttacaaaagcatctaaaatttttggacattttcagaacctccaacctcagataatcttacagaaatctttgcccttcctgaaatattcaccaatttttttttttttttttgagatgctctgtcagtcaggctggagttgcagtggtatgatctcagcacactgcaacctccgcctactgggttcaagcaattctcatgcctcagcctccagaggagcaggaattacaggcatgcaccatcacacctagctaatttttatatttttagtagagacagggtttcaccatgttggccaggctgctctcgaactcctgacctcaagtgatccacccgccttggtctcccaatgtgctgggattaccacgcctggccagagaagaaacctatttttaataaaattttagcagtgtagtggtagtactgctttaattagttactgatgtctttttacagttgatttgattgttactgactttgttcataaccccaatagtagagataatttcataattaatttcaaaggagattagaacattttggttcattaatagattgaaagagagaccactggccaaatccaaagtatttacaaagagcatataaaatctttggaggttgtcagaactcccacccacagataaccttatagaaagctttgcccttcctgaaatattcacctttttttttttttttgagacggagtttcgctcttgttgcccaggctggaatgcaatggtgcaatctcagctcaccgcaacctctgcctcctgggttcaagcaattctccttccttagcctcccgagtagctgggattacatccatgtgcctccacgcctggctaattttgtgcttttagtagagatggggtttctccatgttggtcaggctggtcttgaactcccgacctcaggttatccgcctgcctcggcctcccaaagtgctgagattacaggcatgagccaccacgactggcccactaatttttttaattttttttttctttgagaaggcggtcttgttctgtcatccgggctgtagtgcagtggtaccatcacagctcactgcaacattgacctcttgggcccaagcaattctcctacctcagcctcccaagtagctgggactacaggcactcgccaccacacccagctttattttattttttgtagagatggggtctcactatattggcccagctgggctcaagtaatcctcccgcctcagcctcccaacgtgctgggattacaggtatgagccactgtgcccagcccacttattaaatatcagtatggaccaatgaattcatcttttattcagcaagttatatctattactgtattcattttgatgctcaattttaccatatttaagctggttcctgtgtcctttggacacatgcccgtcattctttgagtacctccttattttctgacacagtaagatgcgtcaaactcatcttttgctttctgtgctctggagtcagccatcttttcaagaagctctggttgattttaatggagaatggctttttggttttggggtttttttagttttagttttagtttttcagagatggcatcttgctatgttcactacgctgaaatgcagtggctcttcacaggcatgatcttggtgcaccacagcctcaaactcctgagctcaagcgatgccctcacctcagcctcccaagtagttgagactgctcctgagtcacttgtgccactgtggctggttaagaatgttacttagaagccaagatccgggttctaggtgggcttcctgctattgagatatcattgcctctctgccctctcagtggacagaggaaggaaatgtgtgtgtatattcatccacatacacacacaactatatctacttctatatttctatctatctaaaatcattatttcataccaatacttccaactctagatcattaccacagaatttattctaagttttcttatttctatatgtataactcgcttctccaacagtaagaagcttggcttcattttcctcaatattacttattcatacttcctgtatataatcaacctcctgacaatgtaggccacttccttcaccccaaccctcagctacgcaccacacaagtgaccttctctgcccagtcctgttaactggccatgtggaattctcagcctgaccacaccgtctgtgccagcaacaccagctgaacctccaactggccacatcctcaggccctggccctgctgaccatccttggccccatttgcgtctactgaatcctaagccctgaccaaaaggaaagggcagaataccagtctaatggaacttgaaaaggcattacaagttttgaagataagaaaaaaatgaaaaaatatagaaggaaagaagaaaagaaaataataaaacctgttgcagatgcaacaaatatgcgacaccagctttataccaaggccctgtacaaagtctgagggcaagtaagatctgttcctaaccctcaggaaacttacaactggctggaaagaataatatgtatgtactacacaggaaacaatgttgtaattaacattctaagtatataaacagaggatcaggaggaaaagaacaatggattcagcctgaggatgtcagtggacaaatggaatgctgccagggaagggtggcctgttcccaaccaaggaagcctttaaccaggtgcaaagtcgaggcacccagggcacatggggctagtgaccaagatgtgcaaagtctagtgtatgttttaaagtgtttttgaaataatatcttaaattgttagtatatgtataacttctgcttttaaatgcttttaaaacattttttggtataataattaatctttattgtgtcttcaaattgtagctgaagagtctgctgcttctggagcaaagggagatctggctgctagtgaccgatgtcactctgcaaacgaaggaggagagagaccccaggctccccaaaaccctgctggtctatgtggcccccttgtgtgtgctgggctctgaagtcctggaggcactcgctggggctgcccctcacagcctcttcttcaaggacgctctccgtgaccagggtgtgcttgcgtctccacagctttgatgcaggggcgactgatccgtgcccatagaatacctcttgtggcctctggatgcctccttgttgcttggacgctgccggcaccttcacggagcccatcacagacatggcccatgtaccagcctccagccttcactgaccctgtagcagccacctgggcagaaccagctccatggagatgctgtgctcactccagaattgcctgctggtggcaccccatactgctgcagactccacaaacaaaccaaaagctagaatattataaatgcgtatacttagatcagccagcccctttttccagggatcaaactaaaatcctgcctcagctatcttttttaatttttattgagtcataattcacatgccacataatttaccctgtgtggattgacttgaatctcacatttgagtgcttttttagcttagctcatggggttcaggagtgtgcacacacaatgaacgtgctgctggacacagtcccataactgcaccttcacctgcatgactcgaggggtagcaaaggagactgccattatgggcacaattcactttttcttcaaggcttcaataacctgaagtgtctctgtcggcaggtcggattgtttgtgctgaacgaactgtcctcttgcttcagaagccccttttgagtgtggtctctggtgcaagttcctgtgagctgcctggcccggtgatgctcgacagcctggactctgcaacacctgtcaactccatctgcagtgttcaaggtaggcagccatctcacaggaattggtgcttatactttcttaactgttatactttatattcatttactcatttattcaacaagtatttgtggagcacccgctaagttccagacactggatacataaagaacaaaagcagaaattgttcttggtatcagactcgagtctgcacagaaagatgtgaatcagacgaacacagacaggcctatcctcaggctctgagtgctctagccgctgataacctgggcccacgtcttagtggggaactcagggaaggcttcccaaagacaggagcctcaagctgagctctgaagcatagatgagactacttaggtcagggatggagcaggaggaacattcctgggaagagagcaggacttcgtaaggccactggcatgagaaagttggtgagcaggggtgtctgggaagaggcaggacaggcagccagatggaggtgggaccaagctgaggctggtgggcccaccaggctggtggtgtcaggagtgtgttctgtcattggtacaggcggcctggtctgatgtcctccctgcagagcagagtggagggactgggtggcagaggtagagaaggaaatccaaggatggacttagggaaatcggcaggttgagcgatgaattgggcatagatggaggcagaagacatctgacaacctccgagctcctggctcagttgaggtaacagtggtgctgttcattaagtaggatgtggcaggcaaagtcagctttgaggggacctgctcagttctgtcgggagagtttgcgtgttttacatacatctgagatgtttcagtagctggttagatatgtgagtctggagctgaaaatagcattattattttctcttttttaactttataaaacttagtaataaaagtcatacatgtctagtggaactagtgaaaaataagagaaagttaacagcccaccctctgtccccggcttcctgcctgtgctggcgcatccaggagacacagctgcccgccttgagggtgtatgcgttcttgcaagtcaaatgatttactgcacattattctgccacttgcttccctctaggagggatgtccgtccaggtggggggagaggtcaaactcaagagtttaatagttgcatagcatcccctcatatgaataaactcttcctccactcatggacatccaggatctctcgtgtttttgcaattattaaacaaggctgtaataaacattcttggacatcaatctctactgatttctgtaaaggaggatttcagcggcttggggtttatggactttttaaacaactttattgagctataactcagtaataccctataattcactcctttaaagtgtttttagtattcacagaattgtgcaaagatcactacaatctaattttagaacaaaaacccatacccgttatcattcacgccccgttaccacccaccctcccacaccctagtcttaggaaaccaccaatctactgtttgcttctatgaatttgcctgttctgctttttgggggggttttttgtttttgtttttgtttttgttttgagatggagtctcgctctgtcacccaggctggagtgcagtggtgtgatctctgctcactgcaacctctacctcctgggatcaagcaattttcctgcctcagcctcccaagtagctgggattacaggcgtgcaccaccatgcccggctaatttttttatttttattagagacaaggtttcaccatgttggccaggctggtctcgaactcctgacctcaggtgatctcctctcctcggcctcccaaaatgctgggattacaggtgtgagccaccgcccccagcctattctggacacttcatgttaactggaataatatttaggctggtgcaaaaataattgtggtttttgccattaaaagtaatggaaagagccgtgattacttttgcacaaacctaacatactatgtgatctttcatgattagcatctttcaatcagcataaatgttttcaaggttcatccacaatgcagtgtgtatttcttttatggcataataacatttcattgcacagatatgccacattttgtttatcctttcctcagttgatggacatttcatttgggttgtttctactttttggctactacgaataaagctgctatgaatattcatggacaaggttttgtttgaacgcctgttttgaaatttggggtatgaatccaggactggaattgctaagtcatatggtaaccctgcatttttaacctttttgaagaacaccagtgttttccaaagtggctacactaggggtttgtgcctctctcttttttctttttttttttttttttttggagacagagtctgtctgtcacccaggctggagtgcaatggcatgatctcagctcactgcaacctctgcctactgggttcaagagaatctcctgcctcagcctcccaagtagctgggactacaggcatgcaccaccacacctggctactttttgtatttttaatagagattttgccgtgttggccaggctggtcttgaactcctgacctcaggtgatccacccacctcggcctcccaaagttctggaattacaggtgtgaaccacggcacccagccggttcaaagcatatcaaaattcagaattccgagcgtaatgtctaagatggctggtgttcctcacccttacctataactagttcctgactttttataattgataaacagaaaactcttgtgattccattgttgctttcacattcttttcactgtgttgaggccatttggattttctcttctgtgcatctccttttggggttaatgctaacacattactgcagttatggggtgatgggtcatatggggcctccattttctcatctgtaaaatagggctaacggaatcagcctcaaaacactgttgagaattaaatgagataatgctcaggaggctttgggggctttgaagctctgagtccagtggagaaaacagacatctcagtactggtaccaggagtcaggaagggagggagggatgtctgagggctgcagccactgactgcagagggtgggtggccttaggaccatcaggatttgtcaagtagagttgggcaaggctgtaagagcaggtggaagggcacatggaaaacccacagaagtgctgggagcagttataaaccctcccaagtgatgggagaggggcagggaccaagaagggcagcaggggacccagttgcttgtgtattgctctgctttccctggccatgtggagattatatggtcagattttttaatgaagaaattctgcagccccagagactgtgatgcaaagcagggagagatgattggcaggaagaagagggtctgcaggggtggagcagactgcctggcccacgtgagccagcgtggagctgctctttggtgtacagcagcactgtgtccctgagcagaccggctacagggacagggcatatggtgcagagggatgcagcctggtccctggggcgcatgtgctatttgtgtgcctttggcagtgacccatcgctcgcttccagggcttgctggtctccaggctcatgtataaggacatcccttccaccttcattctcttcactggttgctacctgttcttctcccaccccctcagctctcccagaggccaggattagtcaggggctcagggagaacatcccacagtgaaggtctcagctctgggtctgagagtcacagccatgccacaaaccagttaggctgcatgggaccctgttattttatgaccagaagaatcgccaccacccatagcagtgtctcatgagaaaatgtgtacctgaagaaccccaaggagggtttccctaacccattcctaactacggccaatgagtgccacaggtgcacacagaggcagatcctcaccttttgtgcctgtggcagtaggcctgcctgttggtacactgagggaactttgctctaggtggtcagatgcagcctcatgtgacttagtgcagtgacctccctgttgggcattagctgtgttggcagcagctgggaacactgatgaggctcagtcatccttaggccccaccttacttaaactgaaccttcaaatgggtgttgaaaactaaatatgtgtaatgtaatcaataggcagtttgatctgtcacaaagctctgttcctggtagcaaatttaggtgttctagagatcagcagttcagattcttaagcacctaaccactggaaggagagcagcacaagatgccattcctaacactcggctgctgccttcagacctctgtgggctttgctgagtgtaacacctttctaaaatgagagcagccctggggcacatgctgttggcaccctccttaatcaaaaacagctgcacaggtccaagcccagtgtccatatgccagacacattgaaggactctagaggctggggttccctgtatccagtccacccaagccacatttcaaagcttgtagccgggatctgtgcttttattccaaggtttgaatggacagtaacagtggaggcatgcactactaaagctacgtgcttgcctccatgtgcagtagagagggcatcatatcagtcacatacggagatcaaacacacatttgtcctttgctcatccaatgctgttcccaactaaaagcaaagaagcaagatttctaaacaggggaggaaacatgctctgattggttcatgtattttgcatgtattaagatgaaaattattttttttttctgtgccctcattttacaaattggtgggatcaacgtttctgactaagccagttgtatttaggcagtttttccttctcaaattcacttaagaaatatgcttaaactacttatctttggctctttttttttttcatttttctgtacctcattggaggcaagggctcctttttatttttttaacatgagcactagtcaggaagatgaattactatcctcatggtttaagtcacctttcattttttcattgcacgttgataaaactttattttataaagtgtaaaccacagtgagacattcagacattacctataaacttcattttcttttatagaaatattgaagaatagaaatacggtcttggccaagcaatggcaggattctttttttttcccctcaacttttaagttctggggtacatgtgcaggacgtgcaggtttgttaaataggtagacgtgtgccatggtggtttgctgcacagatcaacccatcacccaggtattaagcccagcatacattagctattcttgatgctctcccttcccctacgcagggctccttctaaatagagaaaagttggaaaccctcacaggtcttccctgtgagagagctgtgggtgaatactgaggtgaggtggtgagcaggaagggagtgggtactgggggaggtggcctgcatggcacagagacagcactaaacacaggcaccattggtttgccaatgagaagttctaggcctctcaacgtcagttagtaaatgtcctaggaacctaaagtcactttagtggcctgaacagggaagcagccctgccatcctaagcttcatagaaacgatgtaagtaccaggctgggcgtggtggttcatgcctgtaatcccagcacttggggaggccgaggcaggcggatcacgaggtcaggagatcgagaccatcctggctaacacagtgaaaccctgtctctactaaaaatacaaaaaaattagctgggcatggtggcaggcacctgtagtcccagctactcgggaggctgaggcaggagaatggcgtgaacctgggaggcagagcttgcagtgagccgagactgcaccactgcactccagcctgggcgacagagcgagactccgtatcaaaaaaaaaaaatagaaagcatataagcaccagttgtgtctggccagtctgattacggccagcattgccagcagctgggaatttgccttctccaagcagctacagctggcccaggcactgggctaacaaggggtgagtgccctaggagccaggctggagggaccaggggttcctactcctgggaaagccaagggagccagagtctcaatgctcctcacacccagggaagccagggcccccacatctcccacactgaaggaaaccagggaagccaaggcccccacatctcccacagtcaacccgcactcaaggaacccaatgctccttacatttacaggagccagggctcccatgccccctcacacccaggggagccagcattctctgtttgtgttgtacagttctgttggttttgacagatgtataataccatgtactaccgttaccattagtgtatcatacagaatagtttcaccaccctaaaaatcctgtgctctggctcttcatccctccctccccactgactactggcagccactcttctttgtactgtctctgtagtttggccttgtccagaatgtcatatagttggaatcatgcagtatgcaaccttttcagattagcttatttccgttagcaatatgcatttaaggttcctccacatcttttcatggcttgatagcgcatttctttttagcactgaatagtattccattgcatggatgtaccacagttttctggtttgcttccaagttttggcaattattaatgaggctgcaatagacgtgtgtgaaggtttttgtgtgggcataagttttcaactcgtgggtaaataccaagaagtatgattgctggatcatatgtttagttttcgaagtaactgctaagccgtcttccaaagttggctgtatcattttgcattcccaccagcaatgaataagagctcctcttgatccacatcctcaccagcatttggtgttactagtgttttggatttttgccattctaatagatgtgtagtagtatctcactgctgcttcaatttgcaattccttaatgacatatgacatttagcatcttttcatatggttatttgtcaacctctttgatgatttgtctgttcaaatcatttgcccattttttaattgggttgttcattttcttattgttgagttttaagtgttaacagtccttgatcagatgtgtcttttgcaaatatttttcccagttcatggcttgtcttttcatacttttttttttcttttttgagatggagtctctctctgttgcccaggctggagtgcagtggtgcagtcttggctcactgcaacttccaccccgctggttcaagcaattctcctcccttatcctcctgagtagctgggattacaggcgcctgccaccatgcccagctagtttttgtatgtttagtagagactgggttttgccatgttagccaggctggtcttgaactcctgacctcaggtgatccacccacctaggcctcccaaactgctgggattacaggcatgagccaccgcttctggcccttttcatactcttaataagtctttttgcaaaccataagttttaattttaatgaagtctcacatcagttgtttctttcacgaattgcatttctggtgttacatctaaaaactcattgtaaaacccatgatcatctagattttctcctgttttctttctaggagtttcgtgttttacatttaagtctatgatccattttgaattaatttttgtaaaagatgtaagatctatgtctagattcatttttttgcctgtggaaatctagttgttctggcaccatttgttgaaaagactgttctttctccattgaaatgtctttgttcctttgtcaaagatcaggtgactatatttatgagggtctgtgttcccttgatctatttgttcttttgctaccagtacaccatcttaattattgaaacttttttttttttttgagacagagtcttgctcagttacccaggctggagtgcagtggcacgatcttggctcactgcaagctccgcctcccgggttcacgccattctcctgcctcagcctcccaagtagctgggactacaggcacctgccaccatgcccggctaattttttttttgtatttttagtagagacggggtttcaccatgttagccaggttggtctcaatctcctgacctcgtgatccacccactttggcctcccaaagtgctgggattacaggcgtgagccaccgcgcccggccaattactgcgacttttaagtcttgaagtcgggtactgtcagttttccaactttgttcttgttcttcaatattgtcttggctattctaggtcattttgcctctccatataaactttagaatcagtttgttgatatccacaaaataacttgatgagattttgattaggatagtgttgagtctgtagatcaggtggggaaaaaatgacatgttgtaatactagagccttcttatccatgaacatggaatatctttgcatttatttatatcttctttgatatctttcagaagagttttttagttttcctcatacagatcttgtacatattttgttagatttatacctaagtatttcatttattttgttgctattgtaaatagtattatttttaatttcaaattccaatcgttcattgagtttcataggaaaacaattaactttttgatattaaccctgcaactttgctgtaatcacttagtagttccagtggtcttttgttgtttctttgagattttctccatagaatactaggtcatctgtgaacagttttctttcttccttctcaatctgtgtatcttttattttattttcttgtcttactgcattagctaggactatcagtaccatgtagaatagcagtagtgggaacatccttgccctgttcttaatcttaagggttaaccatgtattttctcaccattgattatgatgttagccagaggggttttgttcttccatttgctggagatagtatcactttggaagaaaataatattagctctccttcccttcttttattacactcttcttttccatctacctacctttgcatctgcactttatattgttaagattggtaacattctgttgtataactataattaagctttgcacacattttctacagattgattctcaaagatgaaaatcattctatacaagttgagtatcccatatccgaaatgcttggaaccagaaatgttttggattttttattggttttttcatcctttttttttttcttgagatggggtcttgctgtattgtccaggctgctctcaaactcctggccatattttggttttaatatttttaagacagcatcatccaggctggagtgcattggtgtgatcatagctaactgcaaccttgaactcttgagctaaagcaatactcccacgtcagcctcccgagtaactaggactactgggatggcacacaccaccatgcccagttaatttttgttgttgttattgttgttgttgttgttgttgttgttgacacagagtttcactgtgttgcccaggctgctctcaaactcctgacctcaagtgatcccccggccttggccttccaaagtgctgtgattacaagtgtgagccattgtggctagccatgtgtctttatataaacaacatatagttggttcttgttttttgttcactccgatagtctctgtcatttaatttgtgtattgagaccattctcatttaaagtgattattcatataactgagataatatcaactgtatttataactgttttctattcattgacccacttgtttctttatcttccactctctgcctattctgatttttattgaacattatgattccattttctcttttctttcaaaatatcaattatacttttttttttttttttttttctggagaaggagtctcgctctgtcgcccaggctggagtgcagtggtgcgatctcaagtcactgcaagctccgcctcccgggttcatgccattcttctgcctcagcctcctgagtagctgggactacaggcacccgccaccatgcccggctaatttttagtatttttagtagagacagggtttcactgtgttagccaggatggtctcgatctcctgacctcacgatcctcccaccttggcctcccaaagtgctgggattacaggcgtgagccaccacgcccagcccaattatacttatttttaagtttttctagtggttaccctggagtttgcaatacactttacagccaatcaagtccactttcaaataacactgtcctgcttcacaggtaatgcaggtaccttctatcagagtgttcctgatttcttttttttttccttcccatcccttgtaacactcctgttatgcatttcacttactcaaaaggtataatcattgattacattatcattattatttaaataaactattatcttttctatcaatttagaattagaaatgtaaaagattttattttaccttcatttattccttctctagtattcttcctttctttatatagattcaagtttctgacatttcattttcctcatatctcgccattttcatgtagcattccctgtgggcctcttctgcttccgggcctgttctacagctgccctgcaggccctcatgtagggttcaagatttgtaaacagacttatcacagaggcagggctgagtgctgccagatcctttaatgagaaccagtcaactaggcattaagagaaaacaaacccccagctgcaaaataacaaagattatccaagcctcacatgcaggaatgtccatagcaaggtagcagctaggcagtgacctactcctacacagtcctcagcctgcacacccaccagccacaggtctgcccacctccatcagatccaggcaaggctggagtcctcactgctgtttggcaatagcagttgcccccatctcagcacctcagatttgctctgttctgctctgccctggtccagaagatctcagtgatgacatgtccgctgcatggctccaaggggaccccttcacatctgcagagagttggtgctagggcttgggcagctctcccagcagctgaaccagctgagcatctgggtctcagatggctgagtactgaacattttctctgagcagagtttaaaaggaccctgaatatattctgagcatggagcagtcactcactgagagctggcagcatccctctgtccatccaggtctcagtgatggggtgagggggagacactcactccttgctggtgtcacaaggcctcctcgtctctattctccctgagtggcagctctggggtgtgcggaaatgtttctctgctgtgtcttctggggtgaagtcgtttggcagcgctggttttccctccctcactctgctcaccacctctctgtccaccactcactagcgatgggacctggtgcagggctgtaggaagggatgcagcaggctcacatctctgtggaaagaggggtgaagtcctatctaaacccaggctccagcttctaaatagaagacttgtgagccctgacttctttccatcaggagatagggaggaagagggtatagcagagttcaagttactgaagaaatgtgtgcaccaggcgtggtgagcgccagacccacccatcctgaggaccctttgaaaggacctttttaaaaagatgtgtttgtaactaagcaatacacctttcccaaacctaattacaagacatttctgcacataagacaagcaaactaaagacttaatggcaaactgctggcaagttcatgagtatggtgtcctcaaccctgatgtaaactatctttttctttctgatgctcatttaagtgaatgtcttttgtttttgtttttgtttttttgagatagagtctctctctgtcaccaggcttgagtatagtggcgtgatctcggctgactacaacctctgcctcctgggttcaagcgattctcctgcctcagcctcccgaggagctgggactacaggcgcgtgccaccacgcctggctaatttttgtattttcagtagagacggagtttcactgtgttggccaggatggtctcgatctcttgacctcgtgatcctcccacctcggctgcccaaagtgctggaattacaggcatgagccactgtgcccaaccttaagtgaatgtttaatcatacacttcccagccatctcttgaaatttatttagggttgccagaaaagatttccacaatggcttatggacctcagatgaaatgtatttcctcaactcttgccttattctctaattggaaggaaattgcttaatcccatataaatgtaaatgctattaacacccatggatatcctaggataaaaaggaactttggctggtagcagtctactttttattaaggtagcagtcatttaccaaacatcagtaaaccagtgagtgggcctttggtgggcctgcaggccctgggcaggagccaggccacagtggcagatgtgctctggggcttggggatgccccggctcctttctccacttgcacctcctcatgtgcctgcccattgtgaattagtcaacactgctttccagctgcattacgagcctttattgactttgcttttcatccctttgacccactttgacaatgtcattagctagggcagccttttcaaaatcaagatctattattttcatttttaaaaagtcattcaagtatgcattgcatgaatgcactttaataaaccaagcctactcattctcatacttctgttttatcctctaaagataaattttctcccaatgctggttttagtgaggaatgaaattttttgtgccaagagtggaaaggaagacctttctatttttctagaaactcagattttactttttcttcaaacatctaatttcaccgcttttcaacaaggacatctgcgatttggtggtgtatctagatgatatctacaatgcttcacatccaagaaaatcagaccatcccaatccccagcaagcactgaccaactgtgctcacccggcctcagccctgccatggtgtgcagagttggctgaggccccgtgtggcccgccctggctgtcttgtggacccccctcactcccttcctcaggaagccatgaccctctgggatgcccagaggtgtctttgacacacgtctcaggtgtcttttccatttgtcaattcaccatttatttcatcttttttttggggagtggggacagggtcttgccctgtcacccaggctggagtgcagtggcataatcatagctcaaacactcattactgtgttaaggagtctatatactactactgtgctacagaaaaagcacagacctaaatatgcaatatggggaatgtttgagggactgagggccggctcagctgtggcgatgtaactacctatgcatctggaaaaatatcccaacaaaaatacttcagttaggtggtaatatgcaggcaagttttaaaacgtacttcttattgttataatttttctttgtacaataagtggaaattataaaaatcttaggaacatgtatataaactcccaagtaaggcaaaaatcacgaggcccctcatgttgtcctctgcacgtggaggagcagaggagtcagagagggcagagccgcctctgaggtgggctttccttctcttgggcctaggcactgtggttggcgtggacgagagcactgctttctcatggcctgtgtgtgacatgtgtggcaacgggagattggaacagaggccggaagacaggtaaggggacaggagctgtcctgaaagccctagaactgaaagggcacagaagcaacccagccccagaacctgggccttgctacctcaggtgactccctcgagagctcaaggggcaacctctgcctctgctgagcagcaagggaagaggcctctggggcccagtgggttttccttactgagatttctgctgtttcttgcagctgctcctgttatgagatagatgtgctgggttttgtccccacctcctttattatcagccaggagaattaaaaaaacaggacaaacatgaataagtgaaaaaaacttggtgactgtatagcctagcttttgtgaaaggtgcagacgtttacagagaccacttttacagtgagcagctactggacagatgtccctgcccaccccactatgctgccctccctcagggtctgggccagtgtcagtgcagtctgtccctatgaagtcagtcctccggcctcccaagtgcagtgtcatgtgatagaaagggacaggctcattacttttctgcttcttaaaaagcaaagagactgggcatggtggctcacgcctgtaatcccagcactttgggaggccaaggcaggcggatcataaggtaaggagatccagaccatcctggccaacatggcaaaacccagtctctactaaaaatacaaacattagctgggcatggtggcgcgtgcctgtaatcccagctgcttgggaggctgaggcaggagaatctctcgaaacggggagtcagaggttgcagtgagccgagatcacaccactgcactccagcctggtgacagagtgagactctgtctcaaaaagaaaaagagaaaaaaaaaagcaaagatcggccaggtgcagtgtctcacgcctgtaatcccaatactgtgggaggccaagtggatcacttgaggtcaggagttgaagaccagcctggccaacacggtgaaaccccatctctattattaattttaaaaatacaaaaattagccgggcatggtggcacacacctgtagtcccagctactccagaggctgaagtgggagaatcacttgaaccagggggaggtggaggttgcagtgagccgaaatcgcaccactgcactccaacctgggtaacagagagagagcgagactccatctcaaagaaaaggaaaaaaaaaacacacacaaagcaaagagcaaatgtctccttggcatatctgggctggtggccttacacaagccatcactggactgtgtggaagagatgagcacatgtgcaggcatgcagggtagcacacaacagtggctgtgctggcagctgagagcagactttctcttccgggccagggggcagcctgacccctggcctcccaggccctgacctcccttcctgggaggctcagcatcccctcctctgctcccctcttcggcctccagccagtgctactcgtgctactcgaagctaatgttcatcccttggacaggctgagtccaggcagctgcaggcctctctcagaaacttgattctgagagtaaagccccgttttctagctcagcagacactcatgtttaagaaaatgtctcccactggagctttcctgacttgtgcctcccggggccttgtctttccttggcttttcatataccagaggcgccttttcctgtggggactgctcccgggtggtcacatctcctgttctcaagaggcacctgcaggtcttcctggactgccgctcaagaccgcagtgcagagtgaaggtcaaggtaggagccaggccagagcacgcacgcactcctagctcactccaacatagcgaaggtgagacagagctgaagcaggtgcacgtcctcctgtacgcctgcagaggcgctgggactcggctgggatggcttgcatctggaactccctctaggtcctaggagcttccctaggaaaggtgggaggatgcaccctatgtgaacacagtctctccatgttaaaacacatctttgacctaaggccgtgagactgaagctctgaagacaggtggtttggatataacatgttaattttcgggaatgagtgatttaacttgagcacttactgtgttggagggagtttaacccagccctgcttctgctgttgcagctgttgcagcgcagcatttcctccctgctgaggtttgccgccggtgaagatggggtaagtgcagggggcccagcccagggggccgcacactcagtagcctgcatgagcaactcatccccagaggaagcccccactcccaaatgtgttctattacaacccatcccactaggaagtggtgtagacactcgagagtgaaatgcagatatgtctgccattcagactgataggttcctttcctctgtggaaatgaggttattttagatcattgttgaggtagatgcaggaatctgtcccctggcttttttgtttgtttttgtttttgtttttagacagagtctcattctctgtccaggctagagcacagtggcgtgatctcagctcactgcaacctccgcctcccaggttcaagcgattctcctgcctcaccctcccgagtagctgagactacaggcatgagccaccactcccagctaatttttgtatttttagtagagatggggtttcaccatgctggccaggctggtctcgaactcttgacctcaggtgatcctccaaccttggcctcccaaagtgatgggattacaggcatgagccgctgcacccagcctgccccctggctttgattacagcaccacagtcttcaggttggagtcctactgccaaggtgtcatgttaataggatggaattccccaagatgcttttttttttctttttttaaacactgggtattccagactctgaataactggtaatgtgactgtcctgccctgagagtcactgtggtgaatcttagtaaagcagggtggctcctccaagaaaagccacctaaatatataattgatgggccaaagagtttctgctgtgtgaaatttgacccacataaatgagacatctgtcctagagatgccacctgtgtcttgtgaaagccatttaaaagcaccacaagtggctcatggaatagccacagaaggggaccagccactcagtggcccctgggcacagccccagttcacaagagacatctggaaccagagtgggctccacaaccagggagctgacttgggccacgctggaagggagtgtggtgactggggaggccgatcatgcctggagctctgtggtcagttaaataaggggtctttgtctaatgggtccccatggccagattctagccagaatttttttttaggcagagtcttactctgtcatccaggctggagtgcagtgacacaaccataagctcactacagcctcgaactcctgggctcaaacgatccccctgcctcagcctcccaagtatccaacccacatttgtggtgacttgacctgtcctatggagactcctccctgccccactacccctgccaccctctcacccactgcacctcaggaggggccagcagccccgcaaggcagagcagcagtttgtcctctctcatctaaaccatgtctgtcagagttggattaaattggaacatggataagtctatgagcgggatctttgaggatcacaagtgactatacactagaattacctgcaagctctaaagagtttctgctcttggctgggcatggtggctcatgcctgtaatcccagcactttgagaggccgaggcgggcggatcacctgaggtcaggagttcgagaccagcctggccaacatggtgacaccccatctctactaaaaatacaaaaaagctgggtgtggtggtgcgcatctgtaaccccagctactcgggaggctgaggcaggagaatcactggaactggggaggtagaggttgcagtgagctgagattgtgccatactccagcctgggcgacagagcaagactccgtctcagaaaaaaaaaaaaaagggcttctgctccctcctggcacaacacccaccagctttaaagctcctcagtgaccccgagctccagctcggaattgtcccctgagctgctgcacacagggactgatgctgaggccgggctgtggaggctcatcagcaagtgttccccagtggtgcaaaaggtgagtcatcactacaggccaggaactgagcctcccgcattctcacatttccctgttcaacctcccaatgtcccagcaaggtagagcccatatttccctgctagggggatgagtgcagtgcccaaggcaaagacatcccacagagggaaagtcatcgttacgccacagagtgaccacctgcagagttgggagccagcccaaggagcataatggggaacagcatatgtgcttttctgtccttaaggaagtttaagtgtataacaggcaaccgaccacacagcagtgcctgtcagccaattccttgtctccttgtctgagtcctgggggtagggaggaagaaaggaggaggcagtgcccagaaaggggggaactgcccacagctgaccaggtagaagtttgagtaggtgctaaaggtggcagatctgagttttcagggaacacatcttgatggagaatgttgggagaaagcattagaaacgcccctgtttgagaacgcatgataaaacgaaccaaaacccacaacctcaacagattcaaccaactcttgggcatggcacacagctctccagctgctccatgctactcagaagggtgggacggtgctgtggcagcagctgcctggcatccctggtcaccatccaggaagtctccagcaatggacagtgcttgacacccgttccaatccccacccctctttagagatccagagaccaggaaccctggcagaaatcctccttccttcacttggtttccttctggctaaggtgcttgttcctcctacacatttaacttgtcaactagaatattcccataggtaaaagccctgcttataaagagctcaaaggtgtgtgtacctgagtgcacgtgtgtgcacatttatgcagtatgtgtgcatcagagcacctttgcccatgcccgtgtgcatgtgtatgtgtccacttgactatgctgtgtatgcacatatgctggacacatgcgtacatgtgtgtatgtgtgtgcattgggtgagggccagagggtggcagcagccttagtatcacctttttgggtgctctggtttcagggccaataccagtggactgtggggtaagttccaagcctggaagtagacaacttaggaggctctttactccatgcccagctctattcacagtggctgatcaggtctttactgcggatctggaaagaagctgatagaagatgggtgccagaggggcctgggtagagatgttagctgagagatacccagtatggattctgtcagttttctgggtgagcatacacattcaccaaaattcagagaatcaaattggggctttccacaagaactgtaaaactccattccctggggcaaatgtactgtttcggttaagatacttgagtgttaagttttatgcctttactgtaatgtggtcaagctgcagatgtgaaaacagtaggattgtctgtagttgtgcatctcatttctcaatagtaacattattgtggcatggaacttgaagtttgtttccttagctttcagaaaagttaaaggaacatatatagtgattttttaaaagagagcacattttacacatatgcagacacacattcatatgaatagtgcttgggagtttgctaatatggttgtttaaacctctccatgttaatttctcccacacataaaagatttattacttggacacagtggctgatgcctgtaatcccagcactttgggaggcccagtcgggcagatcacctgaggtcaagagttccagaccagcctggccaacatggtgaaaacccatctctattaaaaattaaaaaattagccaggcatggtggtgcgcacctgtaatcccagctacttggaaggctgaggcaggagaactgcttgaacccaggaggcagaggttgcagtgagccaagctcacaccactccattccagcctgggtgacagagcaagactcagtctcaaaaaaagtaataaaaaattttaaactccatttacaggataatatagccaaacctaacattttacaaataaatgattttttgctggctttttccaagtcagaattgcatacttttactccagaagaccatagggtcatctgtttcacacttgcacaaacatgcaagactaactgaaactctaagacaccagaagggtgtccagcgcatatgccgcctccaccctccctccccgtgcggtgaccctgcttctgcttctgtatcccctggtgtcccctccagtccagcagcctggagactgtcctgctcactgccatctcttcagtgacgggcccacatgggatcataataaaccccatgtgtgagcgagtgagcagctgcacttgccgtccatgccacctcagagcccttgggaaggcctcagcttccattaccaagttccttctctttgcctgtcttgaccagtgacacccacttcccccatcactacattaaaccatcctgttgactttattctttttcaccaaggaagccaaaactcttgacagagcacactgaataggcaccacgcctgtcttacaaatgggaaaatcaaagtccccccacgagttggcgtcagtagcgttcacatcccagactgatcctgacatttatttttacaaaacaaaccatctcaaaacttggtggcatcaatattcattctgtgcacagaactcttgtttggacagggcttcatccggatagctccactgggcattagcgggtgcccccaaggccggtgggagtcacagaaggctcctacgtccaggccacagctctggccggaccccctcacagcatgtgtgtggatcccacgggccagctggaagctgggcacctttcctgaccaggcgtggaacatcacttggtgtcccttccaccgcactgtgttcatgagaagccagacactgaggccagctcaaactcagggaaaggcagtgagactcacacctttgaagggaagggcaccaaggagccacattctacctgctttggccacgttgtctggcttctccagcctcagtctctttggccatgacaccataacgatgggaggggtgagttaatagacaccaaacagaactgctgtagcaactgccaaatgccttgcacagaggaggagtgtggggtgcccatgatattactctgcaagtgacattgccttctagggctttaatctcccagaaagccagagatggaatatctcagtgcttctgagcctttattttcagccctacccgcaacagcattctgcagcttgatctataatggggtgcaccacaccctctcagcctggtcagggatgggggccaaggactccctgtacctgtctcatctggagacgaaactcacctgggactaaccaaaaagaattagaagaaaaagcgaagtctcattacaaaaacacagaggattttagcccagtataactctagaagaaatggaatcctattaaggaaggaagtttggggcaaagcaccaggaaatccctcaaccggaagtgttgctagattgaggaagtgtcctaaaggaagtgggagacagctgtgggcactgtgtgcccagccccggccttcccagcagagtctgtgtgcatcgtgtcccaagtaaaaacaattcagttaccagaatggggtagttccttcacttgctaaaataaatgggtgtgtgggtgtgtgtgtgtgtgggtgtgtgtgtgtgtgtgtgtgtgtagtggctcttcatttgtttctccttcctaccactgttctcagccatttgaggagtggaaggtcgtggactggggaaagggccttccactctggctctctggttttccgtgttgttgggaacagtacgtcccaggctgtttgctttaaccagcgtgccttttatcactgcagagctacgaagtgaagagtgtcctcggaaaggaagtggggttgttaaattgttttgtccagtccgtaaccgcccacccgaccagctgcattggattggaggaaatcgagcttctgagtgcaggaggggcctctgcagaacactagcggttgccgcaggatctgtgaactttgcaatgtggctgcaagggtggtggtggtggtggtgatttggggtagttatttgttaactatggacacagtgaacgtagtttacgatcttgaaatgaaacttagatttttctggggaaatgttcagatacagttttgtgaactgtaaatcaaaatacctttttctacagtttatcttttattttctgcaaatttaggaacatatttactcgttttcacattgaatcttaagtttaagctcttcatttggtatttaggcaatatatgagaaaaaaattttttttgttcatttgtaattttaacaagttgaacattttaccatgattgaacatgtttttattacagtatttaacattcccccaaagaataccctgcaaagtgtaaacctttgtcccatactgtgatattactgttctgctacaataaatgtcaaacctaagcactttgcagttcactacttttgggaaaatgttctagggaactgtatcacaggtgaaactgttacccataaagtgtagctctctgaactggtgtgatcgtgtctctgctgaatggtggtggggatagctggctccaccacacacacctgttttaattaggctgggtaatgtgcacggagagcaaagatcacagactaaggagcagtcagtcggatatttgctttgctggcaaagatttaaaccaagaattaattatctttggacactataaagattttgttcccttccttatagcaatataatcatgacaggccatggttaactacatcagatacacgtagcagccgtgaccaagacatggtgccctaataccaagtgttcttgggttaaaggcaggcggctttttaattaaatcttaaagcactgcaattactggcaagacagctggtcttaagcagttttgtgactgcccttttcatccactacatgactattccggcctttctggagcacttttgaaaatctacttgactctgtccacaagactgaggaaagtgaaagcaaagtcccgggaaagcgggagatgattcagcccggggttctgcccctcgcccctccagcagcctctacagttagggagctcttgaactgttctcagcaggggcccccaaaaagtcaacccttccccaggtctgcgttcttcgggagaacaccttctgctggaaagctgctagcttacctgagctcagccgtgctccacctagcttaggcaagttaaataaggccaggagagagcctttaatgcgttttaaaagcgacagaccctctctcctgagtagctcgggcctg

SEQ ID NO: 45 - DNA, 778 bp, Homo sapiens
atggctcggtgtggagaagggtttcagaacacttctgggaatccgtcattaacagctgaagagaagacgattacagaaaagcaccttgaattatgccctagacccaagcaagaaaccaccacatctaaaagcaccagtgggcttacagacataacatggagctccagtggaagtgatttgtcggatgaagataagacactttctcagttacagagagccaagttctatagaaattttagagtattcatcagatagtgaaaaagaagatgatttggaaaatgtcctactcattgattcagaatcccctcacaaataccacgtgcagtttgcatcggatgcaagacagattatggagagactgatagatccaaggacaaaatcaacagagaccattttgcatacacctcagaaacccacagctaagtttcccaggactccagaaaattcagcaaagaagaagcttttaagaggtggactagcagaaagactaaatggactgcagaatcgagagagatctgctatttctttgtggagacatcaatgtatttcttaccaaaagacactttcaggtgagcgtctctgtgcaccagatgcaggggaacggggaggctggggcgtccctgaccgtcaggctacctcaggagcagtggatgtggtgccccacagtgcagcccacagagtggggtttcctcggtcttgtcgcaagcgtgtagccagaaatctggtcccccacctatttcttactgcttccaggaactcctctgaggctgggggcccc

SEQ ID NO: 46 - protein, 196 aa, Homo sapiens
MKIRHFLSYREPSSIEIYSSDSEKEDDLENVLLIDSESPHKYHVQFASDARQIMERLIDPRTKSTETILHTPQKPTAKFPRTPENSAKKKLLRGGLAERLNGLQNRERSAISLWRHQCISYQKTLSGERLCAPDAGERGGWGVPDRQATSGAVDVVPHSAAHRVGFPRSCRKRVARNLVPHLFLTASRNSSEAGGP

SEQ ID NO: 47 - DNA, 1031 bp, Homo sapiens
atggctcggtgtggagaagggtttcagaacacttctgggaatccgtcattaacagctgaagagaagacgattacagaaaagcaccttgaattatgccctagacccaagcaaggtctcttcacattgtcttctctgtgcatgtctgtctttgtgtccagatttcaccttataaggatttcagtcatcttggattaaggcccaccctaatgaccttatttgaatttgattacctctttgaagaccatgtcttcaaataaagtcacattctgaggtacagaagaaaccaccacatctaaaagcaccagtgggcttacagacataacatggagctccagtggaagtgatttgtcggatgaagataagacactttctcagttacagagagatgaattacagtttatcgactgggagattgacagtgacagggcagaggctagtgactgtgatgaatttgaagatgacgagggtgctgtggaaatctcagactgtgcttcttgtgcaagtaatcagtctttgacaagtgatgagaagctgtcggagcttcccaaggtaagaatgaagtatttcaaaacttttattcactttataacatttgctaatcatagttgtcatttttttttttgttttttttttcctgtccttcctcgagaacaaccacttttgactcttaggggattcttttgttctttactcacttatctctaaataacatgcttgtgctgtacttctcaacatggataaatattgatctcacttctctttcacttcccaccctcactgcacaccgaatgttttttatcctgctattcttccagtgcagatatatcaaagtgctggaattgcacatgtcagccaccatacctgggcaaaaagatacaaatttaaatcagctgtcttccacgagtcctctcccagtggagtcacacagtatatgcttaattcttccagcaaaatgtttagacaacatgtgtgaagtgttatgtaccagggaactcattagagactcagtgcccagggtttgtattaggggc

SEQ ID NO: 48 - protein, 142 aa, Homo sapiens
GTEETTTSKSTSGLTDITWSSSGSDLSDEDKTLSQLQRDELQFIDWEIDSDRAEASDCDEFEDDEGAVEISDCASCNQSLTSDEKLSELPKVRMKYFKTFIHFITFANHSCHFFFCFFFPVLPREQPLLTLRGFFCSLLTYL

SEQ ID NO: 49 - DNA, 3420 bp, Homo sapiens
aaggtattcagtagaagcagatgaacagccagatgaagagatggatagagcaagacatggacattataaaggaattcaatagaagcacatgaacggccagatgaagagatggatagatcattaacagctgaagagaagacgattacagaaaagcaccttgaattatgccctagacccaagcaagaaaccaccacatctaaaagcaccagtgggcttacagacataacatggagctccagtggaagtgatttgtcggatgaagataagacactttctcagttacagagaggtagaaaatctggtgtattaactgtgaaaattttagagctgcatgaggaatgtgccatgcaagttgccatgtgtgagcagttattggggtcaccagccaccagctcctcccaaagtgtggctcccaggcctggagctggcctgaaagttctcttcaccaaggagactgcaggctacctcaggggccgtccccaggacactgtccggatcttccctccctggcaaaaactgattattccaagtggaagttgccctgttattctgaatacttacttttgtgagaaagttgttgccaaagaagattcagaaaaaacttgtgaagtgtactgtccggacataccccttccaagaagaagcatctctttggcccagatgtttgtaattaagggtctaacaaataattcacctgaaatccaggttgtgtgtagtggtgtagccactacagggacagcctggacccatgggcacaaagaagcaaaacagcgcatcccaaccagcactcccctgagggattctctcctggatgtggtggaaagccagggagctgcctcgtggccaggagctggagtccgagtggtggtgcaaagagtgtattctcttcccagcagagacagcaccaggggtcagcagggggccagctcaggacacacagacccagctggaactcgagcctgccttctggtacaagatgcctgtggaatgttcggtgaagtgcacttggagttcaccatgtcgaaggcaagacagttggaagggaagtcttgcagcctggtgggaatgaaggttctacagaaagtcaccagaggaaggacagcggggattttcagtttgattgacaccctgtggcccccagcgatacctctgaaaacacctggccgcgaccagccctgtgaagagataaaaactcatctgcctcctccagccttgtgttacatcctcacagctcatccaaatctgggacaaattgatataattgacgaagaccccatttataagctttaccagcctccagttacccgctgcttaagagacattctccagatgaatgatcttggtacccgttgcagtttctatgccacggtgatttaccaaaaaccacagctgaagagtctgctgcttctggagcaaagggagatctggctgctagtgaccgatgtcactctgcaaacgaaggaggagagagaccccaggctccccaaaaccctgctggtctatgtggcccccttgtgtgtgctgggctctgaagtcctggaggcactcgctggggctgcccctcacagcctcttcttcaaggacgctctccgtgaccagggtcggattgtttgtgctgaacgaactgtcctcttgcttcagaagccccttttgagtgtggtctctggtgcaagttcctgtgagctgcctggcccggtgatgctcgacagcctggactctgcaacacctgtcaactccatctgcagtgttcaaggcactgtggttggcgtggacgagagcactgctttctcatggcctgtgtgtgacatgtgtggcaacgggagattggaacagaggccggaagacagaggcgccttttcctgtggggactgctcccgggtggtcacatctcctgttctcaagaggcacctgcaggtcttcctggactgccgctcaagaccgcagtgcagagtgaaggtcaagctgttgcagcgcagcatttcctccctgctgaggtttgccgccggtgaagatgggagctacgaagtgaagagtgtcctcggaaaggaagtggggttgttaaattgttttgtccagtccgtaaccgcccacccgaccagctgcattggattggaggaaatcgagcttctgagtgcaggaggggcctctgcagaacactagcggttgccgcaggatctgtgaactttgcaatgtggctgcaagggtggtggtggtggtggtgatttggggtagttatttgttaactatggacacagtgaacgtagtttacgatcttgaaatgaaacttagatttttctggggaaatgttcagatacagttttgtgaactgtaaatcaaaatacctttttctacagtttatcttttattttctgcaaatttaggaacatatttactcgttttcacattgaatcttaagtttaagctcttcatttggtatttaggcaatatatgagaaaaaaattttttttgttcatttgtaattttaacaagttgaacattttaccatgattgaacatgtttttattacagtatttaacattcccccaaagaataccctgcaaagtgtaaacctttgtcccatactgtgatattactgttctgctacaataaatgtcaaacctaagcactttgcagttcactacttttgggaaaatgttctagggaactgtatcacaggtgaaactgttacccataaagtgtagctctctgaactggtgtgatcgtgtctctgctgaatggtggtggggatagctggctccaccacacacacctgttttaattaggctgggtaatgtgcacggagagcaaagatcacagactaaggagcagtcagtcggatatttgctttgctggcaaagatttaaaccaagaattaattatctttggacactataaagattttgttcccttccttatagcaatataatcatgacaggccatggttaactacatcagatacacgtagcagccgctttttaattaaatcttaaagcactgcaattactggcaagacagctggtcttaagcagttttgtgactgcccttttcatccactacatgactattccggcctttctggagcacttttgaaaatctacttgactctgtccacaagactgaggaaagtgaaagcaaagtcccgggaaagcgggagatgattcagcccggggttctgcccctcgcccctccagcagcctctacagttagggagctcttgaactgttctcagcaggggcccccaaaaagtcaacccttccccaggtctgcgttcttcgggagaacaccttctgctggaaagctgctagcttacctgagctcagccgtgctccacctagcttaggcaagttaaataaggccaggagagagcctttaatgcgttttaaaagcgacagaccctctctcctgagtagctcgggcctg

SEQ ID NO: 50 - protein, 679 aa, Homo sapiens
MDRSLTAEEKTITEKHLELCPRPKQETTTSKSTSGLTDITWSSSGSDLSDEDKTLSQLQRGRKSGVLTVKILHEECAMQVAMCEQLLGSPATSSSQSVAPRPGAGLKVLFTKETAGYLRGRPQDTVRIFPPWQKLIIPSGSCPVILNTYFCEKVVAKEDSEKTCEVYCPDIPLPRRSISLAQMFVIKGLTNNSPEIQVVCSGVATTGTAWTHGHKEAKQRIPTSTPLRDSLLDVVESQGAASWPGAGVRVVVQRVYSLPSRDSTRGQQGASSGHTDPAGTRACLLVQDACGMFGEVHLEFTMSKARQLEGKSCSLVGMKVLQKVTRGRTAGIFSLIDTLWPPAIPLKTPGRDQPCEEIKTHLPPPALCYILTAHPNLGQIDIIDEDPIYKLYQPPVTRCLRDILQMNDLGTRCSFYATVIYQKPQLKSLLLLEQREIWLLVTDVTLQTKEERDPRLPKTLLVYVAPLCVLGSEVLEAGAAPHSLFFKDALRDQGRIVCAERTVLLLQKPLLSVVSGASSCELPGPVMLDSLDSATPVNSICSVQGTVVGVDESTAFSWPVCDMCGNGRLEQRPEDRGAFSCGDCSRVVTSPVLKRHLQVFLDCRSRPQCRVKVKLLQRSISSLLRFAAGEDGSYEVKSVLGKEVGLLNCFVQSVTAHPTSCIGLEEIELLSAGGASAEH

SEQ ID NO: 51 - DNA, 27105 bp, Mus musculus
  misc_feature (1)...(27105): n = A,T,C or G
gagtaccttgtggcctttgtgtcattaagagcctctttgccccttgtacggattgggaaactgaggcctgtgtgtattctgacttgcccctgcgatatagtggagttagagggactctggcctttgtcttgctggcctgtatcattccccaggttagcaataggtaagggttcttcccctttcttctggaccccgacttgaactgtccagcatggctgagccatccttacttctgggccttccaggtgtatggtcccagcatgtgcctggttctgctttgtttctcccctcacagccgtttaggggtgttctttcacttttttttggtgggccaagacattcccagagatgtgtttgagttactggtagagtggactatcatcagggtcacatttcttgagtccagcctataccttgtcaatcagatttgggctagccaccttgagccaagaaacttcacggataccagggctccttcatcgctccctgcatattttccaggtgtctctaccaatagcgtgccactccacattcagtgactgtcagtcctgcagctagaaatggtggtgatagagggacttagaagggaaagactcttctttgcttggggcccagggagggccctgatctggggattgtggaactgagggctgctgggtgaaatggtggactctgaaatgagtctttgttcttggcagtcatagtgcccagaaaaaaaaaaaagcctttttcgtaagattgtcttggaaatctggcccagtgcctttgtaatttccattaagtagaaaacatgatggagtgcttcagtggggctgttttctgttgctgttttgccaagcagtagttctgattgcttgtgtggctgtccttgctgggtactgttttgggggtgttttacactggttactggatatagagaacacctctgagtgactggtgacccgtttacagaattggctactatcaaccaatgagtggctgttagattttttttttttaacaaagcaaatgagtctttaactctaatactgccttccagacgcctcagttgccctaatatgttggagcttaagaattatctgcggtcattctggttgaaaatgcagagcccccatctctggagagtcttgtgatgttagctggctggcgccccaggagtttgtttttaacacatacactgactgggtgattccggtcttaatgcatatttgtagatttgctgggccactggagcttgaggtggtcactcaagattcttgttgccttttgcttattgctttgacatgtgctagtgtgccattaacaggactttgagataaatagacatatgactcattcctggacactttggctcgcagtagtggggtttttccagtctgaccaatgaggtcattgaggacctgtattagagcagttggattgctgttgtgggtggtgggggtggggctggggggggtgggttgtgttagaagtttcctcttgggatctggagttcctgaaaggttctgatctgtccctacccagcttgccctgtgacgcaggtttcagtaatggccacagcctttaggttgttgtgcaggctttggcagcatgttcccacaaatcccctccctccattctctcctctttatacctgctttccctgactgtctggaagaccttagatatcaaacaggtttgccttgattgagctggagttgacaggtgaggccctggggcttaggatgggctatagaagggagtctccactgtgaacttcaaggtaacttcagctaggtaggcctcttcattgaagacctgtgaatattttaactcccacagcacagtatctcctccccaggttcacaagcggctgaaggagcaggctaggattgtcactttatttttctgccccataaacaacaactttgcatttaatatctttgtgaacagaggacttaatgtgccaggtacttttcttgttgctgtggtagaaatacctggacacaatccatcaaaaggtgaaggggggtatgtcggttcatagttccagggcacaagacccttctggtaaggggcggtggtggcgggagcttgaggtggctgatcaggagtgtcccaccacacctgacctactgcctgggatcacacccagggcttcccatgtgctgaataagcactctaccacctgagccaggccttaatttaaactgttttaaatttgccatgacttgtgttgtatcccaggatgctgtgtgtcttggcgaatgttttagggaaacttcaggaaaaaagtgtgtcctgcggttgtgtggagtgttctataaatttcagtggtcaagtccagtctgtagggagtgctggccgcttgttttctgtgtccttactgacgactttctcttgtcatcaaggagggcagttgcacctgtcaccagtctgttgaagccgagggttctttttctctcttcagatggagtttgagaatgaggcaagtttaactagctccctttgtgtcagctgcacccttcattcttaatattatacctttaggtaagtggcttagcgcccaatgccttgtgttacagctcttgctcagggtgtagggagggaccctcagctctcagtattatctctcagcagcagcaactaactagcagctctcccacagctccagctccctggtctcttgccttttgtagttcctgttcttgctctttacagctcttcaccttctgcagtctgttctccatgtctgtcaccttcccagcactttcccagtccttcatctttgcactcagtctctgtttctggttgtaagaatctggttgaaagctggcggccctgggagttacctgtttttcacgaagtctgctcagctccctctactcttgggcaaggaagctttcttggggctgtgctgcagcattcaggggacagtacagggagcgaggaggtttcccagactgctgctagagagggagagcacacctttcttagctggccagtcagtcctacacgctcactagctgcactagctgtcacaggttggagcagagctcctccctgactgggttgaggatttgctgctatgaggtcccttgtgatgaagtctagggtagtagccatggtcttggctatctgaagggcatccctgtgctgatgtggcttcaagaaaccaaattcccccaagtaaagcctttgttggggtagtggccttgacagtcggatggttccctctggccagagcaaagtccttggggagtggctggcttgggtttcttctgggagattgaagctctgaaaacagcttgattgtcaatttacagaattgtagaactggcgacttgattggcggcttatgcaattttcacaaaaatgggcgttgcttaagttggctgtctctggtaaaacttgaggaatggaggccacagtgttcctaacaaccctcctcagtctgggagtcagggaagattgacagcagcagtttccacctcctctgcccttgcccagcctagggcaagttgttcaagtaccactctgggtaactgcatatgggagtgctgggaaggagggtctaatggttggcaatcaaattctacttacgcctgacatcatctgtaatttaaagggaaaaagttaaatgacacttctagtaaagatctcttataaaataaaattttatttttcttttttgagacagggtctctacatagccctggccattctgggaactcactatgtagatcaggctgtccttgaactcatagagatctgtctgcctttgcctctgcctctttgatgctgggattaaaggagtctcccaccatgctcacaagtcttgtgtttgaagttagggttagtgtagttgaccaagactgccaaggaacactgcaacgcagtgacaaaagctgacaattagaaagtggacaaagtacttgagcaatatttcttcaaagaatatatgaatgaccaaaagtccctaaaaatatgtgtatatcattagtcatcagggaaatgcaaattgaaatcccagtataactctagtgtacttgctgggtgatgttagaaagaggagaaagcgtcagtagtggctcagtcagtagggtgcctcccactgcaagcatgaggaccatgctagggtccccagagcccatgtgaaggctgggcatagtggcataggcctatgttgtgtaagatggagacaggagactctgaagttcattggtcagcccatctagccaaatcagttagcttcaagttcactgagagagcctgtctcaaaaaataaagatggatagaagaaagatgcccaagtctacctttagcgtgcacaaatacacatgcacacaccaatgagtatatatcacatatactacatacatacatgtatgtgcatacaccaataagaatatgcatcacgtataccacacgttcacacacatacatgtgcacatactaataaaaatatacatcacatatgccacacacacacgtacatgtatactcactaataatatatataacatataccacagacacatacatgtacacacaccaataagaatatacatcacatataccatatactcaaacatacatgtacatatactgacgagtatgtatcatatataccacattcttcacacatacatgtgcacatactaataagaatatacattacatataccatacactcacacatacatatatacacaccaataagaatataaatcacagtcaccacaaacatgtacatgagtcgcacactgagtaaaaataggaagtaaatgttaatgagaatgtggagaagtgaaggcgtgtatgttttttgtggaatgtgaagtggtttgcccactgtagaaggcagcacagtgatcccacaacaggtcacttactgtatgacacagcagttctgtttctgtatctgcatagaagaaatgaaaacaggaactcggacagccatttgtgtatgaacacagcagcgctgcttatgatagtcaaaaggcagctgcttccacagtgtctgtgaactggagagtgacatggaatgaagtacatatatcaggcagccagagtccaacagtcttacacggatgaagctcagagacaacatgcgtgaactgtgatgcccagagaagaacaacattttgttttggttttgaaacaaggtctccctgtgtagcccagactggcttggagttcactgaattcctacctcagcttcccagagccctgggattccaggcgtgagccatcacacctgactggtttttctttctagactcgtcagattcactggtggttgccagggtcaggacagaggaaaaaaagtgtgttattcgtcgcgttctcacgaccggccaggaagaacacaacaaccagaatcttctacggcaaagctttattgcttacatctttttggggccagagtgtaagaagcaagagagcgagaagcaagagagagaaaaaacgaaacccctttcctctttaaagagaacaacaattgctagggcgcatcacttccctgattggctgcagcccannnnnnnnnnnnnnnnnnnntaaaattagcattggttccgtatttacgaaccgactcggcaatttccttaatctgtacgtattctaccggagcgtggacacgcccaccctcggctccttcaaagactggaaatgcctgttgtattttcttttgttcctctcggggaatgaatgagtctgcgcactgcctctctgcgcactgcctctctgcgcacctctctgcgcactgcctctctgcgcacctctctgcgcactgcctctctgcgcacctctctgcgcattgcccctctgcgcattgctgacgcactacgcagggcgggggctccgcatagggcggaccttgaaaccgactgccgggaggttgaacagtacgctgactttcgccagccgcttttggcttttttcttgaccaattagctggctggtaatgggctgcttcttcctcccagtctgtttcctcagaggaggattcttcacttgcttcagagctactaagagctggcttcctgagctcatctagtgacgagtatctcctagagacctccgctaatcgatcttttttcttctccctttttcctctttttcttctaatctctctccaggtattcctacctaaccttaacttttcctcgggttcaagacccttggaaaggcctgtatacttattttgtgtaccatacttcctctttgttcctactctctctccccgctttacttctgatagattgtcctgaatttcctctagaattttcagccctatcttaatcacttgatagcatgtgaaaaagaacaaaagggctcctaacaccagaaaaaattcaaggccaaacatactcactggtactctcgttccccagctgaaaagttctgaattcatacagttgaatccttcttaacagtctgctttacgggaacctttatcaccgtcgttccccagctgatgagttctgaattcggcagttgaatccttctcaacagtctgtgttacgggaacctttataaacgtgatccgcagttctggttctgaaatgaagtatccctcctgcgccagtccggagttttttctcgtcccggattttctcgtcccggaattcggcaccaattgttattcgtcgcgttctcacgaccggccaggaagaacacaacaaccagaatcttctacggcaaagctttattgcttacatctttttggggccagagtgtaagaagcaagagagcgagaagcaagagagagaaaaaacgaaacccctttcctctttaaagagaacaacaattgcctagggcgcatcactccctgattggctgcagcccatggccgagctgacgttcacgggaaaaacagagtacaagtagtcgtaaatacccttggctcatgcgcagattatttgtttaccaacttagaacacaggatgtcagcgccatcttgtgacggcgaatgtgggggcggcttcccacaaaagtgttaatatttaatgggtgcaggtgtatcagtgcggtgtcatgaaaagttctggagacagatagattggtaccaatggttgtacaacaaagtaaatgtatctaaatgtcaaaaaccgtacttcaaaatggctaaaacggggatggaaaatggcttagtgttgtggttctcaaccttcctaatgctgcgtgcgacctttaatatacttactcgtgttgtggtgactcttaccgtagaactatcattttggtactgttttgaattgtaatgtaaatatctgttaaaggggttgttacccacaggctgagaaccactggcttcctgggtactggcatctgcctcaaagcctggagacctgactttactgcccaggatctacttgttggaaggagagacccgactcctgcaagttgtcctctgatcttcacacacatactgtggcactgtgcacccacatacattcacacattattaatgaatataaaaaaataaaaatgactaaaatgataggttttataaatattacagttagagagtaaaacttatggcatggttttaaaatcttacagagctttaatattgaaggtggatttcttacaggcagtacacagaagggtgttgcttttttatttttttaataagtcttagaattattgtctttaaaattttttaaattttattttatgtgtataggtattttgcctgcatgtatatctatatactgcttgtacgccagatgcaaagcatccatcagatcccctgggactagagttacagatggctgtgagctgccatgggggtattgggaactgaacctgtatcctgtggaagagcagctagcgctcttagtcactgagccatgtctcccagccccagtgttgccttttgattgggctgtttacctcattcctgtgagagaggctctgctcttcctttcccatcagccccacagtctttgtgcttttctcccatttttgtgatttctcaggtgctgagtagatctcatggcctccttttgcttctatgttggtttatggcaggaacccttctttttagcagttgctttaagcatatatagtgtgcgcttttcatttgtcacagcttgtttcaagggccctgtgcctctttaccttcagggttgaaccttgcactgcatgtctgtgccctgtcacaccccaccccacccccacctccccatctcctgacccctctaccccgcgtcatgctacaaatcccgtagtgctctgcacagttgcattgtgaggagcatagaacagaaaggagaaatctgtctgttttggggtgttctgtgttcctctggagctctgtctccttgcacattcgttcctaatgtcttgcggatttctttgaacattgcttgaacattgcttgcagtctgtcacttgatgggttctttcagctttcagctaagggaagtctttgttgttgctagaagcctcccccaggccagtctctcagttctttacagaagctgttccagtgtccgctgcttgcgttgcttatgggagctgtcgaggccggtcttctgtgcttttgttctccatgtttctttcccacctctagctgatttcttgtcgctaggcctgtggggtttattgttcagttattgtacagatgttctgaggtaccaggcattgaactttgggttcagtacactaggtgagcactgtaccactgagctctgtcctcagacagcagtttaattgtgttgtgctcagcctacttttcttcatggttctcatttggggattcattgtatttttctggatctgtggcttatagctttcatttccagccattaattcttcaaactgtcatcccatccctctcccttcctctcctttgggaattccgttatatacactgagtgcttatggtcatccctcagcattcctgctctttttctcttatcatttcctcttcatggttcatttctgtttctgtttggaaagttgttttgttttgttttgttttcctgcagaatctaatctgctgatgtccactccaatatacatgtaatctcatacagtgttggttttccctgtagaaatcaccctttttctttacataattacagttcaagcctatatttcctgtgctcaaccttttagagcctgtgcttcttgaacataccaaatataaatcgtgtatgtgtgtgtgtatcgcatgaaatacggttgctatgttaacgtccttgcttgctagttctgttacctatatattttatgggtccatttttattagttggtatgtgtcctgttttagtctttctgtgttaaattctgattggagatcagatgtaagttttacctagttgaatattttatttatacatatttttcacatatcttagggttggttggggggaatattgttacttagaaacagaaccttgaaagcctgcgtctaagctttgttagctgcgattagacagctattctcggagctaggttttccccactatggaggtaatgtcttctgtggtactttaacaggctataaacatgaggtcttcccacatatgccagccacattagtgctgattctcttgactggggctgactgggacctgggggacctctgtacattttgggggtttctttctatgtaactcctgtccccatggttctctgctctgtgaatgctggcactcttggtttcctggactcctaaatccctctttctagctccctatgccatcttggagtctgtaagagtaagctggggccaactctagactcactttgtcctgtttccctgagcaccattctgctaagcttcctcacagccaatatttaaaagctcttctgcacttatgttgtccagccttttagttctttgaggtcatgagtgcatgtgtgtgtgtgaaatgtagggggatctactctgaaagtggaaatccctaagtactcattgtgtactggtatgtgttccacattttggaatgcagatgtgagtgatgggcagaaagcttagtttcttactggagaactatgctgttttgttacaacaaatgctgcatggtatttacatagaaccataaaagggcatggattctttaggaggactgagcaaggaaaacctcatagagatgagatatttgaggggtaaggagggaaaacaaggcagggcacacatactgtgaattcctggagggctgctgttattatttattgagtgactgcaagtgtgtttctgtgctgctagaagattaggctgggagagttggttgggatgagcagagcagtccatgggtgggggagggctcagggctagatggaaaggaagttctgggtcagctgatcatcatttgtcaagctaagaagcacagattcgaaacacaannnnnnnnnnnnnnnnnnnnagaactcctagaacattctcctgaggtttctgggcttgtggaggagggctgggaagacggttcctttggagcccactaagttgcttctggagaggctggtttgtgacagtagccaccttctagctttgatgatggctttcatgggccattccagtcagaggtggatatgaggaagttctcactcagtttcttgttttctgtgcctctcctgttatccttagtgaagcagtctgcctgcttatgactctgctcatcccagaagttcctggggctggacttggcactggccagagtaggcgttgtagccaccccatatcttaccagcctggaatggccacctaccgtgatcccattgttgtggatttagaactgaggcaccatggggcccaggccagacctctatcttcatctttctgtaaggggtgattgactgtctgctcagcttgctctgtgtagcctagaggtgagggatgggaggaaggttgccttcacagcttttagagacaatcgttaggacatagcagaaaggaaggaaggaagcctgtgtgtggtcactgcgcacggttttctttcaactcttagccgcaggctaaggaaggaagagacagaagaggccctgccaagtggcttggtgtctctttcagaaacttggaaggactggttgcctattcagacatctgttcatggcaggtctattgactgacgatgaatattattgatctggtcagatccagccgttcagttccatcactctgttgacagatgatgtctctggaggaatccaagtacctgttgttagaggtgtgctgagtggtagaggtatgactgtgtgactgtatgactgggcatcgtgccagcctagccatggtgagccctgtccaatagcagggcagtagacctttcaggcactaacatacttcattctttctaaagccccctctaagggaagaaactaagacacagggagattgtattacctgccaagactccccagccagtaaaggctgctagctagcttcccagaggttaggtctgcctcacagagctgagatctgggggaggaatggccctgggtgatgctgtgccctggctatgcaccgtagcctgagtactgttaaaggattgtgggctccatactgtgtttgttacagattgtgttctgttgggttctgaacataatctaacaggccctgctccttggaggctggctgtaatctgtctatagtaaccatcctttattaagtttgtccccagagcgagacactggtttacagtcacggaaccaagacataggtgtttagccgggtgtggtcccctctttgtcctactgaagatatcacagccataaggaagtagaagagtggggcttggggtggtgcaggccagtgtcagacctaatgtcagacttaggacagtcgtctccaggcttcttcctgcttcggacaagagaatggaaggaggtgactaccaggtccccagggaagccagagaatggaaggaggtgactaccaggtccccagggaagccagaggggctgaatggtgatggagagaggaggttctgagctggagaatcatcttagagcctgtggcagggcagggatgtctggatggtgcttccggagacccaggaagcaagcttgctgggtgggtattgaacgcgaggcccacttctggcctgaagtggcattgggatgactgactttgagaaagtgctgtaagtaagtggttgctggagggagagaacctggggttgggtatcagcagtgctggaggatccagcaggtttgggaggggtctcttcagcacacctctgtgctgtcaacggagagtaaggagtctgccagggactcagcatcgcttgcctttgttggtggggtcctcagccagctggtgacagcccaggtgtgggcaagcctggttgatatcagaagtcattctggaggccccgcacttggcccactccctccagcaatgccttacatggggccctgcctcaggcagagtttctcagtaagccgaaagaacagtgggctaattgtgtaaatatttacatgcaggaggcactttctttcacacagccttatcctgagcgattacatttcggccggacgtgtctacgagcttttatctgtagacttgttcttgtggacttagccagttggagaaagccacacctgattgctctgctctgatacctacctagctggaggcctagcatggctgacaggcagcattttgtaaccataggcgtgaacgtgttgtgtgttgaagtcattgtgtcctgtctagcacctttagaaattgtttgattctcattaaatccttctggccccttgagagccggaagagaacagctgagtaagtccccagcaaaggttctgcacattcgagtttagatgtgttttgctacaaatctctgatgtctttggggacccgtcacacttgaggaagcctcctgcccccatcctagcatcgcctaggaagagtgagaatctgggcaggcaaggtggtcagcaggtaaaaaacgcttgttgcacaaacctggtgacctatttgatccctgagacacacataaaaatgacagaaccaactccaggaaattgtcctctgaccacccctctcacttgcacacactaatacagtttttgtttttttttaaatgaagattaggccgggggcgtttctcagaagtaaagccctttcctaatttgatgattcattttggtttttatcctgaggggatttaggattgccccagaaacaaatctctgagtttgtctgtgagggattatatagattaggttaattgagctgggaagatacatcctaaatatggtggtcccatctcttcgtccatagtgtggatgtctcatgctcttgccagcataccttcctacaatggaccatgtctggagtgagagccagaacccctccttcctgaagagcagtgtcaggtattttgtttcatttgtgacataactaatacagctaatttgtgtgaggccttgggttccatccccaacatggtagaaatggcaatgataaccaaagcccccacagagtttctcttctatggcttatattccagcttttcaaatgacagggaagatccgttccacaatgctgggtctcccctgggaggctgggactccctgacttggggccatggctggagtcattctaggaacaagaagtggagcaggtcaaccagtgtttctgcattaagcagcaggattagggaggtttccaaggcaacaggaggtagctttgctattagggttaggtcaggtctggttcactgtagcatgcactttgtaggttgctatggtagcagtttcttcccgtgctcttggtagatggagggacttatgagaaactgaggggcatcagttctccttgcagtgtgatagcaggctggcaagtaatgttggctggccgcggtgagaggggatgagcccacagagcctcattgtagggatgagttaggattgggcacgcttgtgccttccttctgagcagttctgcagttgcctctgctggggtgtggccagaaataacagtctggttggcctaaatccactggtcctaatctggctatgacctcactatctgggtcatattgtgttgctgttgttcaaagcctgtggaatgatttttgtcaagatatgaagtcaagaaaagaaggtgaggccagcagcagtgtggatggcagcagttgatgcaagacccaggccatcagttcgtccttgtgtccccatcccttccccactaggagcatcagagcatccccctccttctacgatctgtcattcccatttgcatggtcaccaaagggcatggtgtcagttttagattacagaccacagcccctgggttttttgtggcctgtgcatgaaaactgggccttgtagctttcctggggagcaggcaggcctgcacagccatcaccctgtcctgcatttagagtctggggtgcatgactttaaaagggttccatgcttggcctctgacttgcgggcctggccttcgcacatgactgtagctgagacctctagtgaaggtgaagactgcagagcaggcaaagttaaaccaagaaaagtcagggataggatgggggcggggaaagaaaccatgccttttcccttctcagtgcaggctacaggggcccattttcaacccctcctgcgccccgccattactttcccactcactggcaacctgatcatctccgctgaggtgtcagtgtcacctccatgagacctgttaccctgctgtacctgcgacactgcagctgcctccccagctcccagctccctcctagattctgcagtgtcccccacaggtccctcccagcgaaggagtgagcgagctctgctcccccctgcaggtcactcctgtccctcacctgtgctcatgtattcataaggtctgacggctttttaaaaaggtgtttttagaatcaaaccaagttctgtaagaggaagaagaaagttttttttttgttttgtttttaatgtgtctactgaaccaggctcataaaattcaacgttcatatttccttctggcccatgagataggaccgtatggctcttggcattcagtaattgctcaataaatgcctgttccttaaagggatgatggatgcaggaaggcttgagcaagtgggaagctgggctgttctgattcagcaccttgttgaacttgtcttggctaccctggtgtctttcttctcttcctccaccctcgcttggcactttctgaattgcctctgagcaggtctgtgctaggtactgggaagacaaagatgaatgcccaggtccttagccattctcacatggctcccacttcccctcccccagcagccctctccactgtcctgggagtcatccagcatcatggtgccacagtggtcacaggaagggacgtctgtgtcagatccctggcaccaaggcctgaggtgatcggacttgtcagccctctagaaactaaagtctaaggacttggtccctaactaatgtgctatacgccctgctccccatccccagccgtgttacaaccctggtggttctaaccatgttggctggttgttgggagttaggagttgttgctagcagcagggactagccacagggccccaattttcagtagctgttcatgggccctgggcacggtagcttccccttctcacctttcccaaactatggccctggacaagtgcttgttgctctctgcttctctgggtggctctgaaaaacaggtgatacctgacttgtgagagaccagcccctgtagtgtccagtgggtgatgctgtgagagttgtcacagaacagcctgcgccggcctcgaccggggatgtgccgctcctgatagggactaccactagccaggaacagcagccacccaggtaagcagcaccgggttttgtgggcttgtgatctctcacttttggcttggtcttcatcacactctgtgggcagagcaagtgtgtcaaagggaacatcagaggactgccccagggactcgtagctctgctcagggcttgctgaatggacttctctgtggggagaggtcctggcactgctggggttgctacaggtggtactgctaaccagctgtttgtgtgtggttagccagctaccatcctaccaggctgccagtgtctactgttcttggccccaaatgcaagagcagcaggcactgggcatggtgggtggggctgcgctccgtgctgctgctgtgacccagcaagttcttggctgagcctcaccggaggccaccacgatcctgcataatttctgcggtgttgaaatctttggccagcatttgttcttgtgctgatctggtacgttgtgtcactgaacctgtaagggagctgctgccatttggtccatctcattgatgaagaacgtaggctccaggagcttccactgagacgaggacgtagctgacaagaggcagaactggccttgtgctaggtctgcattactaagccagtacttcatatgtttgggtattttcaagtcatatatatttttgagactagacttgaactaactatatagcctatgctggctttgaactgttgatctctggcttcttcctctctggaatactgggatttcaaatgtgtgcaccactgtgcctggttctatcctatgccagggatgcatgttcaacagacaggcactccacaaactgagttacattctcaggccttttgggtttttgttttgttttgttttttttgaggcagcactcatagagtccaggctagtcttgaacttttggtgtcagtctttcaagtgctgggattaagggcatggtgggtctcaggacctttaaagtgctgttcctgtttgccacaggcacagttgggtttaggtggaacaatactgtttctcctcagctttggttcaacacggggcctcttcctggttctgacttctagacctggaatttggggtagcagtgtgaagtatagacatagtgcagggtaggattttggcttccttccttttgggtcttttcattatgaagaatttctctataagaatttcctttcttcctctcacctatgtgtgtgtgatgtgtccatatatgtgcagacacacatacatgtgcatgcatgcatatgtgggtgtgtgttcacatatgtgcagacacacatacatgtgcatgcatgcatatgtgggtgtgtgttcacatatgtgcagacacacatacatgtgcatgcatgcatatgtgggtgtgggtccaaggttgatgttaaaagtcttcctttatcactctctacctcattcattgtggccaggcctctccgtttaacccagagcttaccacagtgggccaggctggctagccaactggctcctccatcccttgactcttatctgtagagcactggaattagaggtcggcagccatgctgaacctgagttcgcatgggttctggggatctaagtgcctggctgaggctgtgtaggttacacagtagttcgatgctcagaatctgttgcacctgcacgatgcaacaagtgtggagtcatcctctttcctagaccagatccatccagatccccaggatggagtctgggtttctgggctctgtcccagcctattggtactgaggcttgggtggggtgggcacgtatctcatgatgcctagctgagctgatttagaggtggggcaatgtgaaaccttcaggggatgatggccggggctgctccctactcaagtagctgctcattagcagtgttcatgctgctcattcttagaacagaaaggagacagatcaggcctgaaccaggctcagcaaagggagcttgtcatcagtgctcattactctctcccttcacccaggggtgccattcccttcccgttacagacagagaaactgaggcccatagacggtggcctctgtctgatcttggctcttagttcccaaatgtcttctaggccgagtcgtcaccttggctcccaggcaagctctaacgagggtagagaacccttaatctctgcagagccagaacttctggaatctagcagctttacaataagaacactcaacatgagtgctctaaaacacctatctcctgtcagtgtgtctgcttcctcctggctgcccccaggcttggctgtgacttgtcatacagatgataggtggcctttgggacagtgacagggcaaggactgctgacccctgctctgtcagagcaattttctgcctggatcagttgggtttttttctcttctgattgcccgtgaagttgatttgatgatttttttttttttcccattccagtgagggcatagatgttctttctgtaacctgtggggaggcctgcagttgcagaatacttagggagacctgaggtcactagaatactaaatataacaggcagggacatagctgggcctgtggtgttgaggcctgtaaagccctttggtggggggtgggggagtggggatgggtgtttaaatcaggttcagacaaaagtagtcatgtaccaaggtctgggtaccaaatttagtctgtatccctgcagcctggcccctctctcatcttttccagccagctccatgccatcttgtgctgtgactgccaagtagttttacagatttctcatctgtcttagggtttgggggacagaaatgactggggcttcatcaaggtgttcccagagaccctcgtgtctccttgggcccctcctgcagaggtattaaattgggtattgctttgtgtttgcaggagaagatggaggggctgaaagacaagaccctgcaggagctggaggaaatgcagaatgacccagaagccattgcccggctagccttggagtctcctgaggtacaaggaagctggcagatgctgccgctgttgctggttcttttgctcctcttcttcttcctccttctctttcttctttaagtaattggtcacttagggtcccttaacaaatttatttcttttactgtgtgtgtgtgtgtgtgtgtgtgtgtgtgtgtgtgtgtgagtggcatatatatgaatgtgcactggtgtgtgcaggaacccagagaggtcatcagaagatgctggactccctggaactagagttactactgtgagctgccatgtgggtgctaggaattgaaccctggtcctctataagtgcaatcaatacttttaactgctaagccatatctccagcctcactcaggtcttttaaatttttattacatttatttagtgtgtttgtgtgtagtgtatatgtgtatagtgtgtatgtgtgtgtctgtctatgtgtgtgtctgtgtctgtgtgtgccaggtataacttgcaagaaacgattctttctttctaccatagggccccagagattgaactcatgttgtcagcttgttggcaagggcctttacccactgagccatcccacccaccctgacaaatgcttgtcaaggattcatgcttagcaggagcttgagccaggattcacctggtgctgtgaattttaccttggcttttactagggcagccctgaggtttcaagccagggcctgggtcctctaggagccctgggaatgatagggagtgctgggtccaccttggactaggacagccagggacccaactggcccaggagtcttcatagcgttccagcgtgggcctagagacagctccctcatgcactagggagagggggggcatcttcccccacagtgatatgctcactcatgtttcatagtgttctccactgcagccagcaccccacctctcagcttccaatcacagggcccttaccaccctgctatctttacagagcttgactcggccctcactgtcattatttcctgtgaccttcctgtgagctggaggtcaggtgactcgatgtggccactcagctagaaatacccataggtacccccagagcagctgcagctggtccttggcctggaagcatctgtttgagggaggggcgggagcacagtaggctcctctgatggtcactcacgtgtgccctttttcctgatgagcagacgtgacgtgtgctctgtgaattcactgtgttaaagaacaggcagttgtccagttagcatcccggtcagcctccctggacccttacccctgcttcatgggtgcacatggtcctgtatccacctctgctgtgctttctgctgccacctgctcccccacctgctccccagccctgctcaggcgtctctgctggattggagatgacccagggttgggttggaaaggcctcctcacggcagggagtaggagaggtctttgtgtgactcaccttgcagccctgaggttggatggcctggtttcagcagcataggagcaaagtcacgcacagctgagtgtcccttaccacaggttcctggggtgtaagctttgcagatttcctacgtcttggcccttgaaatgttttgcatagatttactagttagatatccacaatataaaaaaacccacaaattccaagacattctgaaatccagaattccctgagtgtcacgtaggctttttgaaatctagaacaagagtgtcactgatagctgtctctgcatcttagattttgtgttgctggatgtttgccattgaactccaagggtctcctctttttattgtgtcctatctctgtgcacacacatatctgtgcatgaatgccacatcacaagtgtggaggtcaaaggacagctttcaggagttggttctctcctaccatttggagccaagggttcaaactcaggtcagtcaggcttagcagcaagcatctttgcttactgagccatctttttagccctaagtatttcttcagccaacagtgagcaacaggatggtaaggggttcctagtcttgtccctgaagggagtggagctcagcaaaagcaagcccagctcttgggagttcattgcttccaagctgagcaagccttcagccctatggaaaagcacaacctcctggagatgtaagggatgcagcttcctggccaagggcagattgaaccttctctgtagccatgtttgagcaaatgagttgaattctctgaggggaaaaaatactcactgtgggacagacagaaacaaagtaaggcaagctacttactctctcagaaagcctttagctgtctgtctgtctatctgtctgtctgtcatagctgtaaggcagtaattgtgtcatgtggggctggcagaagagaaaggtggtgggagtgttcatctctgtagagagggagctgtgcagctctcctggcctcatagggtgttagtaagagatgggctccagggtagggagagggtggcacagcacagatgtagtgcttcagacccagggaaaagccgtggacaggtaaggatgccaagggtgtggccaggaagggcaggccctacactcagaggtggccacacaagtgtccctggcgttttctttccttttcttttttaacactgtattttttgttatatgtataggcatgtctggtgtgggtttgtgcatgtttggtgcagtgcctttggaggccagagagtctgttagatcccctggagctgaagtggcagatggtgtgagccacttgacgtgggtcctgggaactgaactcggattctttagatgagcagtatgcgttcttaattgttgagccgtcctccagccaccttggctaacagtcacacatagcagtttctctgctcctgtgccagtgagcttgtccaggggctcaatggcgtttctggctggacagcaggcagtccaggtaaaggggttctaaccctgagcccggactcccttgtctgtgcaggaggtaactggcagcactcctctttccaataggctgcagcctgctgtaactacagggctcgaggccctgagcaggggtcagagcagggtggctcttctggaaaccccttgtccaggatgccccctggcttcctggggctgttctagtgggagcccatctggcctggtgtgccacatgctggccaaggtggaaggagaagctctgtgttgttgatcccttcggtccccgtggaagctggccctgacctgttccctaacttctgtggccagtgctgagccccctctgctggtgccatgtggtactgcgatgcgatggtggccctgtctccagctctcctttcggtgaagcagatggtagcccgctgggcaaggttccaaggctgcttctgcctgactggcagttaacaaggggcctgcatgagggctccattttgctggctagggaagcattttcagcaggcagcattgagggactatctatagctctgtgggctgtttgacctgggaggcggggatatctgtcctgctcagtggcttgggctacagggcctccctccctaatacctttgggacctcagatatttctagcttctggtctggcctgggtcaccttcattctccctagcagcctctcatgtgtatgcatgcatggtgtgtgtgtccatgtgtctttttcacttggggctaatggtggggactctgggtttcatccctcccactggagtggtctccttcagctgtggcctgcacagcacagaaccacttgcaggtacttgtctattgggaagccgtggttaggtggttagccttgctgcctgtttcccatgtgtcattctcacaggctctccggatcaggatgtggtgaggtacctgggtcacaatgcctgcatagcctttaaacccaggcttctgtgactggttgagggctgagcgccaagctgagcagtgagtccaggagcaccccctgctggaggctgaccagttacagttaagctcattgtcagttgtcctgctttccttaggttcaggacctgcagttagaacgagagatggcactggccacgaaccggagcctggcagagcagaacctggagttccaaggtcccctggaaatcagccgctctaacctctcagacaaataccaggagctgcggaagcttgtggagcggtgccaggagcagaaagccaagctgggtagggacagccgaccacagacaagcactctggccatctcccctgctgattgatacttctgttcaaaggaggacgagggaggcagctggaatactaaggatgcttagatacccagaatcggagagggccagcagccattgtagccactgtgctttgcatgtttttacatgataataagcaaataagcaaaagtgtaggtactgtagttagtctaaatgtttgagtatttatatttattgtataccctggtgataattttcatagtattaaaaatgtcctgaacttactatttttatagatgaggaaaacaaggctggagccggccgagggcttgcctgaggtcatcccaccagagtgagatggagttgggatttgcaagcatagcctttaagagctgagcatctctctagccctggaatgggatttgaatctaggcagtcagtatgtttcactgcctctgccaacttagccccgagccttgcagagctgacctaggccctgtgaggtaggaaggcttcctggatggctgtgcccttggcagctgcttggccaagacctgagcttgtccctcagctcctcttcaccaagatggtgaacgcctacatgaaccaaaaggaccccacagaaccagctgcagggactctctctccactggggcctgttgtggctgagtcctgagtgctcacagaaccagcagcagggactctatctatagtggctaggcccaagcacacaaagggcatgtcacatgtcttccctgaaatcagggtcctcagctttaattaaagcagtgcttttgaaatgtcgacctctctgcccttccttccagagaaattttcctcggcactgcagcctgggaccttgttggaccttctgcagatcgaaggcatgaagatcgaggaggagtctgaggtgaggtggggagtggcatcctaatcccttgaacggtggtgggcctcggagtcaggtctcaggtgagaccaagaaccatagagcagaagggtttggagtgcggcttgagtagatggcactggggtgctggtagacacactgatggcaggacaggataggaacacgttctaaggccccggtaaacacttgaaagcagccagcactctcttctgtgtcaacagtctgttttcctgtacacatgcttatgataatatatagtgtgtaaagcaggctcagtgagagcttgacaacagcaaccacaggctggggaggtagtccaggggacagggtgcttgctacacaagcatgccgacctggctttgacccccacacccatgtaaaaatccaggcaaagctgtgcatgctcgcctttccagtgctgggtgggcgggagtcacaggcagacccctggggtttctgcaggcagtctagatgaattggtgagcttggaatagactctgtctcaggaaagaaggtgaacagtgcctgagcaatgatacctgacggtggcctctccactccacatgtatacgtgtgcgtgttcacccttactcatgtgtgttcatacatgcaaacatacacatacgtgaacaggaagtaataataggccagttataacagtatcttataacgaaagttacttaaaacttacagattatttctggaaatttccatgcagtgtttttggaccatcagaggatctctagtatctgaaatcatggttaagggggctttaccacatcaggnnnnnnnnnnnnnnnnnnnnnnnnnnnnnnnnnnnnnnnnnnnnnnnnnnnnnnnnnnnnnnnnnnnnnnnnnnnnnnnnnnnnnnnnnnnnnnnnnnnnnnnnnnnnnnnnnnnnnnnnnnnnnnnnnnnnnnnnnnnngtggtgttacagagctaggccctctcctgggctctctctgctgtctcctccctctggatgtgccttttatgtcagtgggcagagacatctttgtgttttgggtgcagcgcaggggccggcatactagtcactagcataggtccagaaccagacttgtgtgaccaccaaggacctagcacggtgctgggtaggggacagtgtgaccgtggaagacatggtcctgctgttaaggagctggcattttggtgagggagccactctgaatgggggccagggaaggctgcggaaggcctctgttgtcaacagttcttgtgtcctgtaggccatggctgagaaattcctggaaggtgaggtgccgttggaaacgttcttagagtccttttcctccatgaggacactgctgcacctgcgtcgagtccgcgtagagaagctccaggacgtggtgaggcggcctcgagctttgccggagctggctggagatgtccctccaaagcgcccgccacccccacgcccagtaccccaggcgacaccgcctgagactgaagaacagcctccacagccctctgtagtgactccctaccctttgccctacagcccatccccaggcttgcctgtgggcccgacagcccagggagccctgcagccagcccccttccctgtggtggcccagccttcctcctatggtgggcctctgggtccttacccatcacctcatccaggacccagggccatggtgggttactcttggtctccacagaggagtggcccgccccagcctggctatcctacggctccaactagtacctctggtccagggtaccccttagtggggggccgaacccctggtcctggttatcctcagcagtccccctacctcccgtcaggaaacaaacctccctacccaacacaacctcagctcccgggcttcccaggacagcctcaacctcctgtgccccctcaacctccataccctcctgggacaaccccttcctatggcttccaccctccagggcctgcctggcctaggtattagtcctggtctgtgtccaccttcttccttctacctgcaccacagcctttggcctccatttgctgagatttgaggttaacactgacgtggtggtgatgcgccctgaaacgctgggacacacagaagccccgagcctcgagttggaagcacataggcctcctgaaaggccctgaagagtgcagcatgagtccttctgggagctccttctgccagggactgctcagcacatcctgagtggcctgctgggagcccagggctctctggtgtctgcatgaacgggtgtgttcatgtctttgcatagctacctgcgcttgatccctgacagctgaaccaatgtagaataatcttgatgcagggtgaccctgggtctcggaccctgctcatccaggctgtcccttggagcttggtatgtttgatgtggaatcacatgccaagtgatgacagagttctgtctgtccactaaaggatgctctaccttatttaccacggtcgggtcgtaggaaggaacagttacgaaaagtggactttgattcctgaaagccatattttagctgccgtgccaatgtcaggcaagcgtgtcctacgtgctggcagagaccatagcagcagtggtatggtgagagagctggggatgccaagggaaacccaggcctcaaattgtatggttggacgtcctagaggtcaccctggagccccgggctggagtggaggaccagggttacctcccagccacttttcactcctagggccctccacttctggctggctctttctgaggttcacccacccctccactcctttagtgccttgaatcttatttgctagcagccccctttctcttgtttatctccttccttttcccagtgtccccgcagaacagacaccagacagaacacccccatggtgcttcccagacatcatcactacattggggttggtttctctacactctcattctcagaatgtaaagggtagggactgtgagtgcagccccggctctgggtgggctggagcctgcttagtaatgaaagtgactacactagtctacaggggttgcagcaggtgatgcatctgtgtggctggtccagatgtaaatcaggtctcagggcggaccctggagctgctacgggttaggaaattgtatgtgccttgaaacatcccttgcctgggtacccagcctctggtgggccaaggtgctgggggtcaaggaggaaccccatcttctggtgccactctgcccaccggccacgggtgcattaccacatctgcttgcttctcctaaattatttatagcgtggaatcactaatggcgtctgtgagactgctgctgaactggataatgactgcccatttgtttgtgcaattgccacaataaatgttgatgagttccgt

SEQ ID NO: 52 - DNA, 2651 bp, Mus musculus
gagtaccttgtggcctttgtgtcattaagagcctctttgccccttgtacggattgggaaactgaggcctgtgtgtattctgacttgcccctgcgatatagtggagttagagggactctggcctttgtcttgctggcctgtatcattccccaggttagcaatagaggtattaaattgggtattgctttgtgtttgcaggagaagatggaggggctgaaagacaagaccctgcaggagctggaggaaatgcagaatgacccagaagccattgcccggctagccttggagtctcctgaggttcaggacctgcagttagaacgagagatggcactggccacgaaccggagcctggcagagcagaacctggagttccaaggtcccctggaaatcagccgctctaacctctcagacaaataccaggagctgcggaagcttgtggagcggtgccaggagcagaaagccaagctggagaaattttcctcggcactgcagcctgggaccttgttggaccttctgcagatcgaaggcatgaagatcgaggaggagtctgaggccatggctgagaaattcctggaaggtgaggtgccgttggaaacgttcttagagtccttttcctccatgaggacactgctgcacctgcgtcgagtccgcgtagagaagctccaggacgtggtgaggcggcctcgagctttgccggagctggctggagatgtccctccaaagcgcccgccacccccacgcccagtaccccaggcgacaccgcctgagactgaagaacagcctccacagccctctgtagtgactccctaccctttgccctacagcccatccccaggcttgcctgtgggcccgacagcccagggagccctgcagccagcccccttccctgtggtggcccagccttcctcctatggtgggcctctgggtccttacccatcacctcatccaggacccagggccatggtgggttactcttggtctccacagaggagtggcccgccccagcctggctatcctacggctccaactagtacctctggtccagggtaccccttagtggggggccgaacccctggtcctggttatcctcagcagtccccctacctcccgtcaggaaacaaacctccctacccaacacaacctcagctcccgggcttcccaggacagcctcaacctcctgtgccccctcaacctccataccctcctgggacaaccccttcctatggcttccaccctccagggcctgcctggcctaggtattagtcctggtctgtgtccaccttcttccttctacctgcaccacagcctttggcctccatttgctgagatttgaggttaacactgacgtggtggtgatgcgccctgaaacgctgggacacacagaagccccgagcctcgagttggaagcacataggcctcctgaaaggccctgaagagtgcagcatgagtccttctgggagctccttctgccagggactgctcagcacatcctgagtggcctgctgggagcccagggctctctggtgtctgcatgaacgggtgtgttcatgtctttgcatagctacctgcgcttgatccctgacagctgaaccaatgtagaataatcttgatgcagggtgaccctgggtctcggaccctgctcatccaggctgtcccttggagcttggtatgtttgatgtggaatcacatgccaagtgatgacagagttctgtctgtccactaaaggatgctctaccttatttaccacggtcgggtcgtaggaaggaacagttacgaaaagtggactttgattcctgaaagccatattttagctgccgtgccaatgtcaggcaagcgtgtcctacgtgctggcagagaccatagcagcagtggtatggtgagagagctggggatgccaagggaaacccaggcctcaaattgtatggttggacgtcctagaggtcaccctggagccccgggctggagtggaggaccagggttacctcccagccacttttcactcctagggccctccacttctggctggctctttctgaggttcacccacccctccactcctttagtgccttgaatcttatttgctagcagccccctttctcttgtttatctccttccttttcccagtgtccccgcagaacagacaccagacagaacacccccatggtgcttcccagacatcatcactacattggggttggtttctctacactctcattctcagaatgtaaagggtagggactgtgagtgcagccccggctctgggtgggctggagcctgcttagtaatgaaagtgactacactagtctacaggggttgcagcaggtgatgcatctgtgtggctggtccagatgtaaatcaggtctcagggcggaccctggagctgctacgggttaggaaattgtatgtgccttgaaacatcccttgcctgggtacccagcctctggtgggccaaggtgctgggggtcaaggaggaaccccatcttctggtgccactctgcccaccggccacgggtgcattaccacatctgcttgcttctcctaaattatttatagcgtggaatcactaatggcgtctgtgagactgctgctgaactggataatgactgcccatttgtttgtgcaattgccacaataaatgttgatgagttccgt

SEQ ID NO: 53 - protein, 350 aa, Mus musculus
MEGLKDKTLQELEEMQNDPEAIARLALESPEVQDLQLEREMATNRSLAEQNLEFQGPLEISRSNLSDKYQELRKLVERCQEQKAKLEKFSSALQPGTLLDLLQIEGMKIEEESEAMAEKFLEGEVPLETFLESFSSMRTLLHLRRVRVEKLQDVVRRPRALPELAGDVPPKRPPPPRPVPQATPPETEEQPPQPSVVTPYPLPYSPSPGLPVGPTAQGALQPAPFPVVAQPSSYGGPLGPYPSPHPGPRAMVGYSWSPQRSGPPQPGYPTAPTSTSGPGYPLVGGRTPGPGYPQQSPYLPSGNKPPYPTQPQLPGFPGQPQPPVPPQPPYPPGTTPSYGFHPPGPAWPRY

SEQ ID NO: 54 - DNA, 31343 bp, Homo sapiens
ccgcgagcgtgtgtgtgtggcacgatgtcgtggtaactcagaggcgcgcgaggcggggcggccaacggggtcgcggggcgagcacgcgcgccactggggcgccggacgttgcaagggggtcacatccggtagggggcgggcctggcggaccccggaagtgtgggcgcggctgcggtttaacccgcggtggcggcggcgacggcggccctggcaggtgagcggagactggggagggtcccggctctgccgcaggcgggcggggcagaggacgacggtgggggcggcgccggccgtggctcccggagcgcccccgcctgcccgcctcatcttggcagaggccggtgattgggcacgaggggcgcgtgactctcgccgggggccggcgcccctgcccctcgcggtgggagggagggagggagagcgcgaggcgccgccccggctccccggcgggtcgcacctccagttccgccccaccactcaccgccaccctcctttctgcgtctctgcaggccctcgtcccatatgtgagcatcttgcggtcacaattctgatgacattagagccaattagcccattgtatagatggggaagctgaggcctaagagtagggtccgacttgccagagggcacgcgggagacgagtggcagaggggaggttggagggactttgctctgtgacttactggcttgtgccctttctccagggcattgagagatgggagtttcagctttggctttgttcaggactcagacttggacctcccagcatcactgaacatttcttaccccgggaccctctgggcgcaaagggcactgatgtatacatacccattatatgcctggttcctcttcatttcctcctcagccgatgaggcgatttcccactttacggatgggagaaggagttaactggaggtgttttgtgagttactggcagagtggactctacaacctggggttttagtcgctgagctgaggcagtgctttcccagctacaccttgtctgggctcacttaccctgggaatgtcagtcttcagctccagaaacttcccactcatttcccttcgctccagcggtacctcagttctcttgctgcctaaggccttttccaccctctttattggctccaggagtcccatttcctactaatgcaccaagatgctgccaccagactctcagttctgtgacttttggccttagagctggaggtggtggtgaccgaggaactggggaaagaaagactcttactttgttgtccaaagctgcaaccctacagacacctgaactctgtagttccgggtgggatcggggactgttgcaatgaaaatactggacgctaaactgagtctttgttctttgcggtcatagtgcccagaaaagccttttacctagattatcttggaaatgtggttccgtgcctttgtaatttccattaagtagaacattttcattgtagactttctgagcagtttctggccgctgttttgcaggtagcaatagctgtgatttgttgcttggcttcatatgctgggcactgttctagggctttctgaacataccgaattttgcgaacatgtccaaataggtgatgatcccgttttacagatgaagtgagttgcggagatgttagataacctggctagtgtcacacagccagtaagtggccaagtttggattttttttttttttttttttttttttttgagacggagtcttgatctgtcgcccaggctggagtgaagtggtgtgatctcagctcactgcaacctccgccccctggttcaagcgattctcctgcctcagcctcccaagtagctgggattataggtgcccaccaccacgcccggctaatttttgtatttttttttttttatttatttttttttttttgagacggagtctcgctctgtcgcccaggctggagtgcagtggcgggatctcggctcactgcaagcaatttttgtattttttagtagagacggggtttcaccatgttggccaggctggtctcgaactcctgagctcaggtgatccacccgctttggcctcccaaagtgctaggattacaggtgtgagccactgcgtctggccacaagtgagatttgtaacccatcagtctcatttcgaagttaatgtgcttttaactctgtgatactgcctctcagaccgtttagtttcccaaaggtgctggaccttaagaataatttctgatgcttgttaaaaatacagagctccacctctagagattcttgggctattgtctggaggagggcccagaaatctattaacaaatgcactgggtgattcttacggtaaggcaagtttgggaaacactgcctttaagaactttgtagatttgctgggccactggtagcttggaagtgacattattcctgaggattcttgttttctttttgtttattgctttgaaatttgttaatttgcccttaaaaagcctttgggttaactagccatatgaatcatttctggacactcttggccagtaatagtaggggttttccaggctgacaaaattagatcactcaagacctgatttaatggatttagctcttttaatccagctggatctctgttgtgtggaaattctgttagaagtgtccttgaaggatgtggcgtttccacaaggttttggtctgttcccaggtgcttaccgaatgacagagaggtgtctaatggcagcactgtctgaggttttgctagctgtaaaggcatgtttacttagtaggtgctccttccaattcatatctcacctctttatcttcctttactggtttatgtgaaagacttaagcaaatatcaaacaggtttgtcttgatttagctggggctgacaagtaggacccctggggcttaggatgggctggagaggagagagagtctccccagtgaacctcaaacagatagctcaggcaggtaggccctacctttgaagacctgttagtatttttagttccgctgatttatctggtcccacctcaagcaggattacaactagtcacggataaagtcagcattataggattactttattctcctatctggtaaacactgatttctaatttattttcttttaaatagagaacatacttctctattaaatttgctgagacttcttctgtggtctgtcttggtaaatgttctgtgagcacttgagaagattgcatcttctgctattgccgggtcaagtgttctataactttcaattcaggcaggttggcttgtaatgttcaagtcttctgtgtccttactgatttttggtcttccgttctttcagttattgagagagggacattgacacttctgattgtaattgtggattcgtccatttccccttgtagttttatcaatttgtgtttcacatgttttgaagctctgctgttaattgcataaacctttatgagtattatattccgtgtatgaattgaccttctttattgtattgcattagtctgttttgcattgctataaaggaatacctgaagctggataatttataaagaaaagagattcatttggctcacggttctacaggctgtacaagaagcatagtaccagcatctgcttctggtgaggactcaggaagcttttactcgtctcagaaggtgaaaggggaacaggtgtgtcacacagccacagagggagcaagagagatgccaggcccttttaagcaaccagctctcatgtgaactaagagagcaagagctcattactgtgggagggcaccaagccattcatgagggatctgtcctgtgacctaaacatgtctcactaggccctacctccaacattggaaatcaaattttaacggatttggaggagacaaatatccaagctgtatcactgatcatgaaaagacccttttagcccccggaaatagtctttgctctgaaatctactttgtctgatattagtatagctaattcagctttaaaaaaatagtgttaggaattgatttccagagtatgtaaagaacttctactacccaacaacaaaaaacaacccgattcaaaagtgggtgaaggacttgaatagatatttcttcaaagaagatacacaaatgaccaataagcacatgaaaagatgctcaacatcactagtcattatggaatgcaaatcaataccacagtgagctaccacttcacccattaggatggctattgaaaaaaaacaacaacagtaaataataagtgttgacaaggatgtagagaaattgaaacgcttgtgcttttctggtgggaatgtaaaatggtatagccagtggcaaatagtatggcagttcctcaaaaaattaaacatagaattgccatatcatctagcaattccacttctgggtatatacgaaaataagggaaagcagacacttgaacaagtatttgtatacccatgtttgtagcagcattatttacaatagccaaaaagttgggagccattcaagcgtccatggacaggtgaatggataaacaaaatgtgttatatgtattagatagaatattattcagtcttaaaaaggaaagaacgtttgatacatcctgtaatacaggtgaaccttgaagacattatcctaagtgaaacctgccagtcacaaaagaacaaatattgttggattcctcttacatgaggttcctagagtagtccaattcgtagagacagaaagtggaatggtggttgccagaagacgggagaaaaggagaatgggaagttagtgcttaatgggtgcagaatttcagtttagggtgatgaaaatcttctggagaggaatggtggtgatggttgtatgacaaagtaaatgtacttaatgtgaaagaactgtatacttaaaaatgattaaaatggtaaattttgttacgtataaaacagtttttaaaaatagaggatttaaaaattacggtatatctcttaaaaagttttttacttctaaacaatttgtgtctttatattgaaagtgggcttcttgtaggcagcatatagatgggtggtgtttttgtttttgtttttttttgagacagagtctccttctgttgcccaggctggagtacagtggtgtgatcttgactcactgcaactgcctcctcctgggttcaaatgattctcatgcctcagcttcctgagagctgggattacaggcgtgtgcctaccatgcccagctaattttttggtatttttagtagagacgggatttcaccatgttggctaggctggtcttgaactcctgaccttaagttatctacccacccctcccaaagtgctgggtttacaggcgtgaacaaccgcacctggccgggggttgctttttaatccaatctcacaagctgcattttaattggggtgttaagactatttagatttaatgtggttattgatatagttgagtttaaatctaccttcttgctatttgttttcaatttgtcccatgtgctttgttccctttttccttttttatgacttctttgggatcgaataatttttatgattccactttgtttcctttgttggttcattaattcgaacactttttttagtggttgctttaaggtatatagtatgcatctttaatttgctacagcctatcttcaagcgatattataccactttagtgtaagaatcttgcaatagtttactttcatttccttcctcctggactttgtattgttgtcacctgttttacttctacacgtgccataaatcccacaacacattgttatttttgctttaaatagtcaattattttttaaggagattaaaatgtaaagttcttttatatttacttgttcgtttaacatttttggtgctctttattccttcatgtagatccacatttctatcttgtgtcatgttccttctgacttgaggacatccttttaacatttcttgtggtgctggtctgttagtgatggattctttcagcttttgggtgtctagagaagtctttattttggctttgtttttggaaggcattttccctgtatagaattctggattaactattttttttttcagtgctttaaagatgttccagtgtcttttgcttgcattgtttcatatcagtagtctgctatttttctttccttttttcttcttgctttttaagaggcagaatctcactctgtcatccaggccagagtgcagtggcgtgatcatagctcactgtggcctcaaacttctgggctcaagtgatcctcccacctcagggtccctagtagctaagactacaggtgtgtatcatcatgcctgggtagttgttttttaatgattattctttatttttgtagagatagggtcttgctatgttgctcaggctggtcttgacttcctggcctcaagtgatcctacggcatcagcttcccaaagtgatgagattacaagcatgagccaccacacctggtctgtttatttttattttttgctcttctgtttgtaatgtatattttctccttataactgcttttctttctccctgtcctcccgccttttttttttttggagacagagtctcagtctgtcatccaggccagagtgcagtggcgtgatcatagctcactgcagcctcaaacttctgggctcgagggatcctcccacttcagcctcccaagtagttgggaccacaggtgtgtgccaccatgccaggcaaattttttattttttgtagagacagggtctcactatgttgcccagggtggtcgaaaactcctgggctcaagcgatcctcccacctcggccttccaaagtgctgagattgcaggtgtgagccactgtgcctggccctaactgcttttctaactgagtttaaacaatgtaatgatgatgtgcttttgtgtagtgtaattttcttcgtgtgttttgtgcttgggttcattgagttttttggatttgtgggtttatagctttcatcagatttggaaatttttcagtcagtaactctgcaaatattttttttattcccttttccctttcctctctttcggggactccagttacatgtatgtaagggtgctagaggttgttccatagctctctgatcattcatttttcccagtagtccctttttcttttctctctgtggtttgttctggttagtttctattgctctttcttcaaattcactggtctcttctgcattgtctaatctgctgatattacctttcagtatactttttatcacagacattgtagttttcatctctagaagtttgatttgggtcttttaaatatcttccctgtctctaacatgcttaatctttcttttagcttcttgaacatatggaatatagttttaggaactgttttaatgtccttgcctactaattccattatctgtgtattttttgggtctgtttctattgcttccctcattatgagtcttattttcttgattctttgtatgtctggtaatttttattgtatatcagatgttgtgaattttaccttgtggggtgctggatatttttgtatttctagaaatgttcctggcattgttttaggacactgttaagttacttgggaacagtttgattctttaaagctgctctcaaggtttgttagttggaatcagaacagccttaggcccaggcctgatttttcctcactaccaaggcaattctgtccttagtgctttaccaatgtcctgtgaatgatgaggtttttccactgtggctggtgggcacgcaagactatttctgtttcagtttgagctccaaggattgttgccttggactggtatagatcagtaccagctgagaactggagggggaccctctgtaggtttctgggttctctgtgtggccctttcctctctggtactctgccctgtgaactctggctaccctggcctccctggagtgtgaattcctctcctccactgcctgtgtcttgggcccggagtccctctaggagtaacttggagcagctatagcactcaccttggttgtttcccactgtcaggggtctgtgctgtctgatgtccaatgtttacaaactatcattttatgtgttttgtttggctttgtctggctttttagttttttgtggcaggagaataaatctagtgcctctccctccacattagccaaaagtggaagtccctgtccagtcagcattccttggatgcctggtgtattagtccgttttttcacactgctataataaaaagaactgcccaagactgggtaactaataaaggaaagaggtttaattgactcacacttctgcatgtttgggaggcctcaggaaagttacaatcatggcagaaggtgaagtgcgttcgtcttaatggcggcaggtgagacagtgtctgtaggataaactgtcaaacatttataaaaccatcatagctcatgagacctcattcactgtcacgagaacagcatgggggaaccgcccccatgatctaatcacctcccactaggtccctccctccacctgtggggattatgaggattacaattcaagatgagatttgggcaggggcaccgagccaaaccatatcaccttatatgtgcccagtgttgacctaggcgctgggatgcagaaacaaacacgacatgggctgtgcccttggggagctcacactcttgctggagaagcatgctgattcctaaataagaaatgctatgtgctgtgtacagagtaccatggaaggcaggatgaactctttgggaggaagaagcaaggaaagctttagagagttgctggcttttgagggatggagcaggcattttctacatggggaaagtgtaggaaagagtattccaggcagagtggagagcaagagcaaaggcggagaagcctgtgctgcgaattccttgccgggcaggatccctgtcttactgctgtttagagatcaatatatgtcaagtgactggaagtgtggtttttgttctgggactagtaggtagaacagaaagagttgggatggagtgagcaacccatggagaaatagaggctcggggtcagctgatacaaggcgttgtataccaagctgaggagcacaagatttggaacataataccaaatgctggggagccatgggagggccatgggagctctgatagtgttctctcgaggttactggggggtgtagaagagggctggagagggccaaggcgggcttagggcagactttctgtacaaggatgaaaatgagtccagagctcagtgtggtcatggatacagctttgccaccctttgtttgataatggccttcgtggattcctgcctgagtcaagaattgatttgagaaggccctggcttggtttctctttttctgtggctatacctgtctgcctgtggatgattccactggacccggaagttctgggtctggcttatcactggcaggggtagggtctgcagctgccccactttatgtcagcgtaggatggccaaacctcagtgagtacagcggtcttatcatcttgggctttgaacagacacaccttgcatgaccggtgcacactcctggatgtttgtcctttgccttgaccttcctcttgatccctccttaaagggacagttaaatccacttgctcagcttgctctgtgcagattagaagtgggctgggggaggatggacagctgcagattgaaatcctttccgagtcatctgaacagtagggacaaaggagatacaagtggaagttggtgtgaagtcagtatgttttccttttcaagtcagtcatgggccaaagaaagaagaggccttgccgagtggcttggctttactgtcagaaagtttcaaaaaccggctacctattaaatcacctgtttcttggccgtcattttgattgacgctgaatgctgttggtctgattacatccagcctttggagttacgttcctctgttgactgatgccagctctggaggaatcttaaattctctgtcctgcgttgacacgggaagtgcttgagttgcagaagtaagaatgggctgagtgtctgccctcagccacagtgatagaaatcacgagcgactgtttattgatccctgcctgagagccagactttagactttctaggcatgaaactcaattcctccttacaaaagctccatcttatagaagacactgaggcacagagattttaaattacccacccaaggtctccccagacagtaagcaagagtgcagggctgtctgccttacagattcagagcctttaatccctgggtctcccctgcagagctgagtttcaaaggaggcactgctcctgtgctgccggggctcctgggccggtacatctgtttggactttagtctgagggctggtgaaggagagtagttaccactttagtatttgttaggacagcatcatgctgggttctgaacaagatagaacagatcctactcttcaggggtctagttgaagatatccgtaccgatgaccattgatgaagttggtccccagagccaggcctggtgttctgtggatgtagatagacttgatcgaggcagccgagcacagtgaggcgcgtgggccgtgaagctggacgggctctgttgcagttcaggctctgcgtttcctccctgggaaactgtgggcaggcacagaacttcagttttctcctatttaaaatgagaaaagcctgaggatggacagcagcttaggagcggtgaggattaccttagttgctgtgtacggaacacccgggccagcctctggactgtgagcagcctctaaacctcagacacagggcctgtcacagttcctgacactgatgggacagtgaggctctggagggcaactgggcaggaggcggtaaggcctggtttgatgactccccacactctacgctgctggcaagacatcacagctgaaagggagtggaggaggggaccagggaaggggctggtgagggttgggagcagcggggtagggggttagggcggtggtctcaggggccaactctaggtcaagggggaaactgagctgtgagaacagggctccccccgacctgtttgcccagagcatatgtgttgtgaagtgttctgtgcagtagggtttggattaaatgttctgtttggaaaaaaaaaaaaacaaaactcctttgaaaaaggttgaaagtgacaggattaggccaaaccgggcaaatgggcagaggagggaggtgtcttgtccagactggttaggctacttgacccctcccgccgccacccattgacaggtgggggcggtgaggggaggaggggggcaagacagccagccttagggaagcagcatgataggacacattcatccggggagcctggtgggatggttgtgagaaagagaccctggagatgggaagactagtttgcagcctgcatagggcagggatgggtgtgtgtgagagcctttggaacactgactagctaaaacttggtgattggacatcaggggtgggggggacccacatgtctgagctgacctggaagtcagggccaggagctgaagtcactgatagaaacggaagctggggggaaagtctggttgaagagtgagaggagtggagatctaggaatgctggaatgcaggtgtgtgtggaggttcagcaggttcgggaggagtccctttaggggacggactgggtcagcaaagccaagccagcgacctagggggcagggtgtgagtgctgggctctgcagcctgccgcgtgctgatagagcctcccagccggctgagtggcttaatttcctgaagtcttctgccactctgggtgcctcccaccatttggcacagtgaatgggcttattattcttgagtcttctcacttgacggccctgcctctggacaaaggggggtcagatggagtttttcagtggattgaggagcattcagttgttatgtaaatatttatgtaaagatgacagtttccttcatgaagcaatttccctatgagagattgtacattccccctatgtatgcttatgtttgaggactcttgtctagattggtttggagcttgtttggagccacatcctttgcttccgtccaggatcagctctttcagagtcctctggttctagacctagctggccgcctggcacagttgacaggcagcatttcctaacaataagttgtgagggagtgggaattaatactgcctggtgccagacctgctgcttggtggtcttgtttaattctcatttaatccttacaaccccatgatgttggtagtattagccccattttacaaatgagaaacagagaaaggctgaataatgtgcccatggtgatatagctagtgaaaggtcaggatgggattgaaatctaggagtttttatctccaaagcctcttcacttagtcttttttgtttgtttgtttactttgagatggagtctcgctctgtcgccgaggctgggatgcagtggcgcgatctcggctcactgcaagctccgtctcctgggttcacgccattctcctgcctcagcctcctgagtagctgggactacaggcgtgtgccaccacgcccagctaacttttttgtatttttagtagataaatatggggtttcaccatgttagctaggatggtcttgatctcctgacctcgtggtccgcccgccttggcctcccaaagtgctgggattacaggcgtgagccaccgcgcctggcccctcttcacgtagtcttaactatttatccctggtgggtgggaggaatctccaaccccaacccagccccaaccccagcaattccttagaaaggatgaaagccatctgggggcagtggcacaggcctggactcccagctacttgggaagtgaggtggattgcttgagcccaagagtttgaggctgtgaagtgagctacttttgcgtccctgcactctagcctgggcaacagagtgacagagcgagtccttcatctcttaaaagaaaaaaaagaaaactaaaaacgcaaaaaaatgaaaactaaaaacgccttcctctccatggtttacactgtaacttttccacttgtggggaaagtcagttcagtgctgctttggatcaggtgagaagaacttgatgatttgatttttttttttttttttaacctcctgtgggaagtcaggaaacaaaagagtctggtacttggatgcacagctggaatcattccgggaaaagaaaaccagattaggcctgcaaatatttcctcattcagcagcatgattaggaaggtttctaaggcaacagcaggtgtttctgacatacggggtaagatggggccagttcctttttaacatgtgcaggttggactttgcaagttgccctggtaacagcttcttctggtaccataggtggatgtggggaatttgtaagaaaccaagggacgtcacagctcttcttgcagtgtgatttcgggctagaggtcactggcaagtaagtgttgtctggtaaggcgaggggagtgctgggagccgtgcttcagctcccaggtgctggagctggtggaggctggaatcctcctgcacgatctcagcagccatttcacttgacacaagattgcagcccaggggttgcaggagtaacgccaggaggtggaataatttatatttgttcagtgctcaggagtttgcaaagctctttttgggctgttcgcttatctgagccacacagcaacccctaaggtgggattatcatcatggtgccccattaaggaaaccaaggttaaaggacttgattaaggtcacacagttaaagagctgtggagccaaagcacaaactcaaggcatctgttttcaaattccatgtctgcacaggacagaattctgtccagacacacaatctggggggagagttggcatgaaccacttagcggcaaggggtgaggggcagtgcaagttgtctctagggctggcatgccacacactcatctcagtgccctcactgtctagaaaatgctgcattttgcagtccagcttttttttttttgttgaaggttatccttggaaaggatctctgatcagtggaaacgatttgtttttgagctgattagcttgttgaggaaaaccatcattgcatgactttttttttccccgataaaaacagatctggaaggctgccccaagtttgaaccctccccagagttccccttccaccccggtctgctaggaagttctgtggcctccttgctggggacgtggcgctgcctttggcgtaaatccactggccctgtgctatcttttaccagatcgtgtaccctgtgctcaagacctgtgggatcgattttgtcaagatataaagtaatggaaagaagttgagaccagagatcaaagcaacaggtgccagttggctggtccggctgcacccagaaatgctgcttccttggttctgatagcaaagctccagcgagttcagcctgtgcccccaccccaacctcctttcagtgcattgtggcaaatggtggggctccaggattcttgtgggatgtctttatcacctctcccctctgccccacccccttttctgtgatctgtacccttgcacttgtctcccatagaggatatggcatcaattcaggtcacacctgaattgtgggttttgatggcccacccagtttctcacaattctgagttgaaatttaaaaatgggaagatgcacctagatgtagatttctggcttccctttggagagctgatgggtctgggaaagctggcaaggctgcaggaggggcctagaatcaccagggccgctttccagccatacacactctgcctgtcgcttggcctcctactaccagcctggcctttgtaggccactggggttgggacctctggtgggggtgaaaactgcagagagacaactttaaaaagcaaaaggaaaaaacaaaagcaagtgttcttccttctcaggggctggtagtgaggaaccaggggcactgttcctcttctctgtgcaaggaacgcagactggctcacgcatagctttctcaccttgttccctcccagccagatcactttcgagttgatgatatcaccccagaaaaggtgttttctgctgtacctgtgaacctgtgcagccgcctgccccgcagccctccctcctcctcccctcccagccccttggatctgcagtggctcccgcctgggctgtgctgctcctggcatggcatgcgcaggcccctgtggccaagctttccaggcccacagagcggcccatctctcctcctcactctgttggtctctgcctctgttacgctgctctcatctgtattcatgatgaattattgtgagtatttttgactttttaaaatgaaactgagttacttgagagttaggatcagctcttacctgtgaatgccatgtctggctcatagtaagaaccccccaaatatttgctcacatcctgctgcccccatttatccttcctcctttgatgtgggtctcacagtattcttggcaaatgcaattgcttcataagtattgattcattaagggagtggagaaatgcgagcaggcgggggtaaggggaagaatgcccgttctctgtccccacgtcttcagtgacttgttctctccttcctgtctccatcactttttgggcaaacgttattgtgagctatctgacagccagtctgctgggcttgggttgacgaagatgagtgagacattctccttgtcttcaaggggtcgatttattctcaccctcaacaactccctactcgtgcgcagcaaaccctgggggtcactagagcagtgctgcatcctcccgggcatcttggcagggggaggggctctgggccagggctctggtactgaggggcccaggtagttggactcgtcacaccctccagaaacaaaagcccatggactctgggtccccgaaggacatctcaggaaccccctagttctctactttgagacatatgcggtggctggggtcactctgagaagtgtcactttggacttgtcccttgcgttgggtgatggagtcagacaccaccagcagtggatggccaagcttcaagggcaccttcttagcagctctgtgggctgtgggcaaaagactttcctgttctcccttctccatattagggacccagggaagtgcttgctgcttccagcctcgctgatggctctgaggagcaggtgatggctgtggcattggtgagagaaagggacctgtcatttccaggggtgggtgatgctgtggtaaaccccacaaggtggcacttgcctgcccagcctgagatgctgtatgagggcggtgaggtgggcgtccccaacccggaggcagggacagggagggatgggataattggcatgcttgcgtgggctcctaatctctggatctcgggccttatggctaaacaccttatcctcactgcacccctctgatgggcctgccgagcaggtggggcaaagatgttggtgagatgaaaacacccgcacagtggggcagtatccttcctgcttctttctgggattcattttatctctgaaataggaggcacttaagctcatgctggctttacatactagagaggttatgtaaattaacgggagagtttacagagggctttgatctctttatttattgtttcaattaaagaccagtgtgatagtacagagggctttgatttcagaagaaaagagccatgtaagggtttgtttgcccattttacagataaggaaagttgagtcccaaaacgaacatctggcctccagctatttggcaaagttgggagtaaggtcctgagcactcctcatttgggacatgtttgtctggcacatgccagcagtgccttctgaaatgggagccccatgagcagaggaggtagcagcttggtggaggcctccggtctccttcccagactcagcctccgtgtaggggggactcctggcccgttagaagcttgacatcgtggcaggcactgttttcacatgaatctcccctgccgagctggccagagcttgggcactcgtctcatgagctgtggccgtgacgttccgcctcttggtcttgaccgtatgtgacgctgcctccctctgtgatgtgcattgtcacgtcactgcaaatctgaagcctaaatcctggcatgaagacccctgtcttgtgcacctgggtgtcacctgtcccgccgtgcccacacagagccaagccttaggaagtgcccttggggtcctgggggggactcaccctatagaaaaaacactgcctgcgttctcctcctgcttctgcggtgactgggtgacaaggcccttcctcccctggggtctttgcttttcctctgtcagatggggttgcctccccctgagttcccccagagtgttggggaaaggggaaaataagataatagatgccaaactagtcagacccaggtagcctagttaaaatgaaaacttcattaaaaattaagaattggctgggtgcggtggctcacgcctgtaatcccagcactttgggaggccgaggtgggtggatcaccaggtcaggagatcgagaccattctggctagcacggtgaaaccccgtgtctactaaaaatataaaaaaattagccgggcgtggtggtggctcctgtagtcccagctactcgggaggctgaggcaggagaatggcgtcaacccaggaaggcggagcttgcagtgagccaagatcgcgccattgcaccccagcctgggcgacagagccagactccgtctcaaaaaaaaaaaaaaaaaactaagaatcggccgggcgtggtcgctcacgcctgtaatcccagcactttgggaggctgaggcaggtggatcatttgaggtcaggagttcgagaccagcctgaccaacatggagaaactctgtctctactaaaaatacaaaattagctgggcatggtgttgcatgcctgtaatcccagctactggggaggctgacgccggagaatcacttgaacctgggaagcggaggttgccgtgagccaagattgtgccattgcactccagcctgggcaacaagagcgaaactccatctcaaaaaaaaaaaagaattggctgggcacagtggctcacacctgtaatcccagcactgaggcaggtggatcacttgaggtcaggagttcaagatcagcttggccaacatggtgaaacccccgtctctactaaaaatacaaaaattagccaggctagtgtcaggcacctgtaatcctcaagaggctgaggcaggagaattgcttgaacccgggaggtagaggttacagtgagctgagattgtgccactgcactccagcctgggcgacagaacaagactccatctaaaaaaaaaaaaaaaaaaaaaaaaaaattaagaatcctggagattctagagttctaggtctggaggaggattttaggactcagggactccatgaggcacatgttgagaatccctggacctgtaaaggcattttcattccaaactgcatgaccttgggcaagtaacgtcacctctcccagcctcccctgtgaggtgggggtgatattgacgcccactgtctaagatggttgccagggtcctcatagcagcaaatgcttagtggtacttactgtgttccgcacgccgctctgttttacagattgagaaactgaggcacaaaggggttagatgacacagtaagtggcagagatgggttcataccgaggcagtctggccccagagtctcatctcttttttttttttttttttttttttagctattcttttttttttttattatactttaagttttagggtacatgtgcacattgtgcaggttagttacatatgtatacatgtgccatgctggtgcgctgcacccactaactcgtcatctagcattaggtatatctcccaatgctacccctccccccctccccccaccccttagagtctcatctcttaacctctagaccagtggctctcaaagtgtgtttcagggggactcctggaggtttccagagaccctttcaggccatccatgaggttagagtagttttcataatcattctgagacattattttctttcttcactctcttttcttgcatgagtgtacagtgcagttttcagaggctgcatgacccatgatcatgtcatcattctggcagctaatggaaggtagtgtttgtgtattcttgtattttaaaaatttctcttctgggtgtggtggctcacacctgttatcccagcactttgggaggtcaaggcgggaggattacttgagtacaggagtttgagaccaacctggatcaaatagtgagaccccatctttacaaaacatttgaaaaaattagctgggtgtggcggcacatgcctgtagtccggtttacttaggaggctgaggtgggaggattgcttgagtctgggagattaaggctgaagtgagctgagatcatgccattgcactctagcctgagcgatagagcgagaccctgtttgaaaaaaaatttttcttccacttttaatttctaacatggtaaataccgatagctataatccacataaacaaaactctttggagtcctccttaacattgagagtgaaaaggggtcctgagacccaaaagtttgcgatgtgttgttggaggctgtgttaccttattaaaagtgatacttgtcaaacatctggtggcacctcctgtggtaagcagctggaggggagttggtgcctgtcccagggaatctcggctcttctcggggcctccccacatgtggagacctccgtgtatgagactgagtcctgaacctgctgggtgctttcacagatggtggtgctgactgtgctgtttgtgtgtggtcagctagctgcctgcgacagagcttccatcctccacctggctgcacctgcagtgctcagccctgactgcaggagtgagcagatgctcagtggtgggcctccccttgggtggagccgatatgggtgcagctgctgtggccctgcaagttctgttccaggccaggcctggcaccgagccagcaccgcctgtgctatcccattggacctcgcacccgccctgtgagggaggggctgttgtgagtcttattttacaggtgaagaattcaaggctcagggaggttccacctgtgcgaggggcagggcctggacttgaactgtctctggctggctggagcctgtgcccctgatgtgtttcggtatcttcacaatgttgcttctgcttgtggccagctcatttgggtttggatttggggtgtgctgccagtgttcctcccagggttctgctccagcccaggccatctgcaggctgctctttccctgctctagctctagcttttacttactttcttttctttttttttttttgagaccgagtcttgctcggttgcccaggctggagtgcagtggcatgatctctgctcactgtaacctccacctcccaggttcaagtgattctggtgcctgggcctccggagtaactgggattacaagtgtgtgccaccacgccgggctaattttgtattttcagtagagacagggtttcaacatgttggctaggctggtcgcgaactcctgacctcaggtgatctgcctaccttggccttccaaagtgctgggattataggcataagccactgcacctggcccagcttttacttattttcattattttatttcattttacaatttttacaatcagatgctatattgcctaggctggtcttgacctcctggccacaaatgagccttctaccttggtctcccaaagtgttgggattacaggtgtgagccaccgtgtccgacctggctctggggcttttagaccaagggttttggagcggtaaggtgaggtgtggacagaatgcaggtttgaattttggctctgctgtttgctggctgtgactgtaacctttctgataccctgtctgcatatgacatggctgctgctacctctccttgtaaggggagaacagctcagggaaaactgacgttgcatgtactcagaaaccaggggtctccactgtgataggactggcatagagctgtcatcttctcaaaatctggccctggaccaactgtgtcagtctctccaggagggattccggatttccgggccctgccctgacctactaatgcagagctctgtgggaggggctggccacctgtatggtcagtgagctttgctggaattcaggtgcacactgaagtttggcaatccctgcttagaggttgggggccacttttaaccctcaagacataacaaatactggtctcgtccctgtatggatagttctttatcagtggccatatgatttgttgtttaaaccagggcacccttgagtgggtggggggagggtcccctgaggagtgcactgggacttcctggtacatgggaacatgtggtcgtttctcagtcctcctcttacctttctgatggccctaggagatgccgttcgcttcctactgcaaatggggaaactgagacctggagaagggtgcatctgaccacacagctataaccttggtccttgattctagaacgctttctcagctgggttgtcagccttggctcaccctagctgagtgctggtgcaggtgggctgtggaggaccctagatttctgtggtgctggaatcttttgaaaactaacataatctttgtgatgagaaaaaacaacattaaagctatggagctggacatggtggcacacacctgtaatcccagcaccttgggaggccaaggcaggagaattgtttgagcccagtagttcgagaccagcctggtcaaaatagtgagaccctgtctctacaaaaaatttaaaaattagctggaggtggtaacgcacacctatagtgccagctatcgggaggttgaggtgggaggatcatttgagcccaggagatcaaggctgcagtgagccctgtttgcaccattgctttccagcctgggcaacagagccagaccatgtctcaaaaaaaaaaaaaaaacaaaaaagctatggaatgcacctctggaagagatacaaaccagatgaaaatggaggaccctgtcagcagaaaggaagcaggtgccgggtgtatttgtgcttcctctcttcagtccctggggttccctcctgggcctggctgtgacccatctaccacacagacaatcgatggccctctaggcagagtgacagggagagggccgctgacactagctctctgtcaaagcgatgtcctctttgggtcggtcaatttctttccttcctgattgcctgctaggccaaatggctgattttttttttttcctgcttctatgaggatgcgcatatgacagtccattttggtggcacatggagagggctgcagttaaggggaattctggagggaaacctgaggtttctggagcactaaatataacaagcagtgacatagttgaaccagtgatgtcgaagccagcaaagcccccatgtgtggagcttggtgtatttctggttcagacagaaatagacacctaccagagggcatgatggcatcagtgcttgcgggcagccttgggccaaacttagtctccatccctgctgcctggccctctcctcctgccttttcctctctgctccttggggagctccatctagcacccgaggattgtggttttgcttctggctgcaagtactttcacatatcctgttgctcatgagagggtggagggagcagctccttgatctccctggggagggggtgggctgagccgcaggaatgtgctctcagagatttctgcctctcctcgagcctcccggtggagtggtattatcgcaggaaaactccagtttgtttttgataaatcatatgtacaggctcgggggtcccttcgtcttgggctgcctgttcgttactttggtgtcactgtgttcacagggaaggatggagacgctgaaggataagaccctgcaggagctggaggagttgcagaatgactcggaggcgattgaccagctggccctggagtcccctgaggtagagggaggctggtatgggacccaacagaggccagcagatgaggcttgttaagaggcgctttttaaggatgctggcttattggaagttttggccaaattcatctcccttttctgtgaacttcatcctggtttggactcagaggaatccctgaggcttcagaccagttcctgggagttcttgggagtgctggggagtccactgcctcctggtgccttcccaggacccagataccccaggagtccccacactgtcgttccagcccaaatctggaggcagctcctcaaagcactggtatggttttgtacccacttttccccaagagccttgtgcgatcccatatctccaggtgactctaaggcttctaggagccattcttgggctgagatctagctcgtctcccatttgatcctgtttctcctcataactggcccctaatcctctagttcttaatcacagagtccttgaggaaagaaacagaatcctgcctgtgcagagatttacacttaataaaggacattccctgcccctagcatctcctgtgaccctgggatgtcccctgtgagatgggagagatcaggccacacagccagaaatatccacggtcacccattgagtggctgcagctcatccgttgtgctggaagctcccgcttcctatacctaatgtgagggagagacacacacgcaagcaatgccagctcctttgatttgcatttggagtacatgtttacttgcacggatgagcaggtatggtgtgtctcttctgtgaacttgtattttgaaaaaaataatgacgttcccccatccagtgtctccgtgcttccatgccatggggggcgccaggccggtgagtcccctgctcctgtttctgcttgtgctcttgctgcctgctgcctgctctactgcctaagtgaggaatcttaactggggttggaggtgactgaacattgggttgaaaagatctcctggtggggagattgtgaggagaggtggacaccatgggccacatcctaccaccctagggcttttttagtcctcagcaaggacgtggagcaaagcttgcttgtcgaagccccagggctgactcaaatggcttgtgaggctgtgagctctgccagggcgttgctcctgcccagcctggtgctgggcacagtgcagctctgcctgcgttcctttgtcacatattaagcactgtgagcatggtgccatgggaagcccaaggcctgcttctagagtgtgcagagctgagcaggctgacagaatcgtgacaaagcagagaatcatggaaaatgtgagcagaagcgacctcttgggcagaaggcacttgaattttgtggtgtgcagccacacctgtcccatcgatctgaactctctgaggggaaaaaacactcgtggatcaggtagaaatgaagcaggacaagccacttagacttcagaccattggcaaacttttttatcgtgggctataagacagtcattgagtcacagtgggattgtgagaagagacaggagctctctattagttcgggacatggacacggctaggagagaagggagttggcaggggctctctccgtgtagaagagtgtgcatagaggggtgtgtggaggggagctgctttgggttgggggccagatatagaagggaaacaccgtaacttattaaggaaagttagtcaaaatggttttatctcccactttgcaactttttttaatttttgtttttttaggcagggtcttactttgtcacccaggctggagtgcaatggcgccatcatggctcactgcagcctccacctcctgaactcaaacaatcctcccacctcagcctcccaagtagctgggactacaggtgcacaccaccacacctggctaatttctaaattttacatagcaacttttaagaactattagatacttcttgttgagttttgctgtagattcaaagaaaattgataattatctataaaggttagtagcgactccttccttttctagctatatatctgtatgagtatagattcttcctccttatttccaccaaagtaatatactagggcagattgaattcagaagcagcaaaacatgtgaaaacatcttttatttacctatttttagtcttacctcttttcagtgactgggaggacttcacactgaacccctaatatgcatcgatatgcaattttctaaattgatgcatattttgcatatttatggggaagatgagaatctttgttgcatgcatagaatgtgtgatgatcaggctgggcgcggtagctcatgcctgtaatcccagcactttgggaggccgaggtgggtggaagacctgaggtcaggagttcgagagcagcctagccaacatggtgaaaccccatctctactaaaaatacaaaaattagccaggcgtggtggcacgtgcctgtagtcccagctacaagggagcaagggaggctgaggcaggagaatcgcttgaacccaggaggcagaggttgaagtgagccgagattgcgccattgcactccagcctgggcaacagagcgaaactctgtctcaaaaaaaaaaaaaaaaaaaaaatgtgtaattaaggtcagggcatttagggtctccatcaccttgagtatttgttgtttctgtgtgttgggaacattttacgcttcttgctactttgaaatatacaatacattgttgctgaccatagtcaccctactcagctgttgaacattagaacttacttcttctatctacctatatgtttctacccattgacccacttcgtggagaaagatgtaagaaggctgtggagacagggagcagaaataagtagggcaagatttaggggaaaatgatacagcgtcgatttgttggtttagacgcagggaaaaggcagtggacctatagggaggccagaggatccatggggccctgcaagggatgggtgagcaggagggctttaggcctttcactctgggtcagccatgtaagtaaagtttccatggctaataaaaattagattgagagtcacgtatggtggtttgtgcctgtagtcccagctattggaaggatgggatgggaggattgtttgaggccagcctgggcaacgtagggaaaccccatctctacagaaaataaaagaacttagccaggcgtggtggtgcatgcctgtagtcccagctgctggaaaggctgagaagggaatattgctcgagctcaggagtttgaggctgcagtgacctatggtcatgctattgcactcattctggacgacagaatgagaccatgtctgtagaaggcagcagcgtgggctctaggctggacagaccctgggccctacatccctgaaccctggcagccttgtctggagggctcagggagggcaggaagctgtggtatccctctttccaatctggagcacaaagaagaggcaatgggcctaccccagagtgcaggacctcggcccctgtagctgggacagcagagggggtagcctttccccgaggccgcctcttccagaatgcccacgggcttcctatgtctcgtggggcatgagccagtctggcttggtctgtcacatgctgaccatggtggagaagctgcacagagaagctgcacagtgagggcctgacttagagtcagtcttgctgagctgttccctgcgccctgtggcgggtgccgaggcctctcttctggtgccccatgctgctgacagtgtactgtcactgctggctcagcatgcaggtctgactcctcagccctcctcttaggaagaggactccttggcggatgcatggggcgtcacatcacaacagctggcaagggtgccttggcttctgtctcactggctggcagcgacgaagagcctggcagaggggtaaagtgccgcttggcttggggaagtgtttgcagcagggaatgtccagggtggcccctctggctcatctgtgcagcttctctgcaggacacatgtgtggcataggaggcaggtccaggtctctcctaagtcagtggcatggtctggtccagggacctggctctctcacccctcacaataactttatttggggcctcattatatgtcttgcctgtgcatctggccaggaccacctgagcccaccatggtaggtctcttgactctgaagcttggggataagtaattgggacttttgatcccctccctcctggaaagcctctgctttttctcatgtaaattggtccaccccctccttggggctctgcacattccatcatggatatcaatcacatggccttgggcgagctcttcaccttcagcgccaggttcccatgcgtctccacctcgtgggctgtgggttaaggattaagtgaggcgcagagtacttcattcagggtttgaacctggctttgtctgactagttgagggctgagtattgccccaaggatgagcctctccgccccaaggtgagcaatgtgtccccgaagcccctgacccaggctgccaggaggttaagggtgatggacgttttccttaggttctgttgtcctgcccttttaggtccaggacctacagctggaacgggagatggcactggccaccaaccggagcctggcagagcggaacttggagttccagggtcccctggagatcagccgctcaaacctctcggatagataccaggagctccggaagctcgtggagcggtgccaggagcagaaggcaaagctgggtagggtggctcctctgtgaactcagggtccccattcagggttggacggaggcccaccgtgttcccagccctgtgctaagtgctttatgtatattttttcacaacagccatagaagggtgggtactgttgttactccattttataggtaagaaaaatgaggctcagagagattcaataacttgactaaggtcacccagcttagaaataggtggaattgggatttgaattgagacagcctgcatcctttgctgctgccgttacccttggcagctcagcttctatgctttactgagctgttcctgagctgctctgggctctctgtgtcccaggacctgtcacctttgaaggtgggagggtggtccttgtcttgatggtgagaaagcttgacactcaggttaggtaactccccttgctggcaggcagaactgggtcagttgggctctgaagcccaagtcatttcccatcccaggatggcgtagggtaggcttggccaaggtctaggctaggttcattcgggcccttctctgctcaggaaggaactggaccaaaagtgctcatcaagcccacccagaaggaccctttggtggaccctgctgtggtggctgggcctggatgcacacagagggtatgcaaagtgcctttaacactgaatcaggaagcacttttcaaatgtcagtcgttctgccctcccttccagagaaattttcttcagcactgcagccagggaccttgttagaccttctgcaggtggaaggcatgaagatcgaagaagagtccgaggtgagagggcgaggcgacacccctcttccctggacggggtgtcagtccctgcagcaggggcccttggaaggagaagcagatgtctgcaaagcatggaacaagggagctttcgtagatggcagaggtgaaggacatctttagtcctggggaggccttttgggtataaataacaggaacccagtcccactagctgaagcagaaacgggtgacagtggacaagggcagctcgcagccctggatggtagggcagcacagcaggaggcccccaggggctgaggccagctccctactccactctccctgcttcctgcttccctccggccacctcttcagcctctgtgggcaaactggtgctgtccactctgtgtctgggtggaagaagcttctaggccctcccagtccctgggctagtgctcatccaggtgttcagcacatatatgcagtggccactgtgggcctggcatgatgccaaggtgccaggacagaggtgaccacgacagagacagtcctcgccttcaagggactgacattctagtgagggagacagtgcatgtaccatatgtcagctgtgagaaggggcgtatgggcagggaagaggagggggtgcctgaggcggcgtgaggtgggagggctgcagctgaactcagaccctggggaaaatcaagaggccttgatcccagctgcccctgttgtcactggaccttatgtcttccaggccatggctgagaagttcctggagggcgaggtgcccctggaaacgttcctggagaatttttcctccatgaggatgctgtcccacctgcgccgggttcgcgtggaaaagctccaggaagtggtgaggaagcccagggcttcccaggagctggccggcgatgcccctccaccccgtccaccacccccggtgcgcccagtcccccagggaacaccccctgtggttgaagagcagccgcagccaccatcagccatgcctccctaccctttgccctacagcccatcccccagcctgcctgtgggccccactgcccatggagccctgccaccggcccctttcccagtagtgtcccagccctccttctacagcgggcctctgggccccacttacccggcagcccagcttggacccaggggtgctgcgggttactcctggtccccacagaggagcatgccaccccggccgggctatcctgggaccccaatgggtgcctctgggcctgggtaccccttgcggggaggcagggcccccagtcctggttatcctcaacagtccccataccccgcaacaggaggaaaacctccctacccaatacagcctcagctccccagctttccaggccagccccagccctcagtgcccctgcagcccccttatccccccgggcccgcccctccctatgggttcccaccaccgccggggcctgcctggcctgggtattagacacactcctggccctcggcccctccctagtcccacccacgctcaacctttggcccagccatcgccgagattcgagggtcaactggaagtggcgttggtgctccctgtggacttgcgtcggcacccagaggccttggagggacaaggcactgggcggtgtgactggtcatggcacttgctggccttctggccagaggtcctcctggaagcccctcctttcagtgcctggctgcagcggtgctagccaggctggagtccagcacctctcgccggtgtctgtgtgagtgagcgcatgtgcgcatttatgagcatctacttgcggctgcactcagggccatttgaacccagtgcagagttatctctatgaggaggccccgggtctccagccccctccatctcccctggggtttggcatatttgacatggagccccatgccaagggatgcagctgttggtgtctgtccagtccattcaaggctagcctgcccatgcactgtggcaggggttggattggagggagagaacagagttgggaaaaacaacaggtttgagtcctataaagccataatttaactccagtagctgatgtcagacaagcttgtcctatgtcctatttgagtggcagcagcgccagcccagcaagaaggctgggggttgtcaaggttgtccccagaccttgcttgcagtggttggagaacccagggggctgccttgggccctctggccagagggaagcgggcagctctagccctggagattgtggtcacattggggcttgtttaggattggagggccaggtcacctccccagccaccctcccttctctcctctggggtccccactttagggcgactttgcccgaggcccacgcatccatccactcctttagtgccttgaatctcattcacaagcagccccctcccttcccctccccttctcactctgttgatgtaatcctcccacccccagtgtccatcctaagacaggcatcaaaagaggccctaactttacttcccaaatggtgctttttaaaaaacaccatcactacattaggggcaattttttcacacctccctgtcttcagaatgtaaagggtggggattatgtctctgtttaatatgcagccccctgcactgtggggtttggggcatgttcagtaataagaatgaatacaatagacaaagggggtgtgatgagtgttaacttggttgttccagaggtaaaccaggtctcagggaagagcctggagctgctattgcttaggaagttgtacgtgccttgaaatgtccactacctgaggacgcagcatctggtgggcccggggctgctggggccaaggagggaccttgaccttctggtgcctgcccctccccggcctatgtgccatccgcgtgacgctaggtcagcgctgccggttctttaccaaatgtgcttgcttctcctaagttatttataaagagaaatcactaatggactctactggtttgagtgcttctgagctggatgaccgaccgcctgtatgtttgtgtaattaattgccataataaactttgatgagtcacat

SEQ ID NO: 55 - DNA, 2285 bp, Homo sapiens
tccaggccatggctgagaagttcctggagggcgaggtgcccctggaaacgttcctggagaatttttcctccatgaggatgctgtcccacctgcgccgggttcgcgtggaaaagctccaggaagtggtgaggaagcccagggcttcccaggagctggccggcgatgcccctccaccccgtccaccacccccggtgcgcccagtcccccagggaacaccccctgtggttgaagagcagccgcagccaccatcagccatgcctccctaccctttgccctacagcccatcccccagcctgcctgtgggccccactgcccatggagccctgccaccggcccctttcccagtagtgtcccagccctccttctacagcgggcctctgggccccacttacccggcagcccagcttggacccaggggtgctgcgggttactcctggtccccacagaggagcatgccaccccggccgggctatcctgggaccccaatgggtgcctctgggcctgggtaccccttgcggggaggcagggcccccagtcctggttatcctcaacagtccccataccccgcaacaggaggaaaacctccctacccaatacagcctcagctccccagctttccaggccagccccagccctcagtgcccctgcagcccccttatccccccgggcccgcccctccctatgggttcccaccaccgccggggcctgcctggcctgggtattagacacactcctggccctcggcccctccctagtcccacccacgctcaacctttggcccagccatcgccgagattcgagggtcaactggaagtggcgttggtgctccctgtggacttgcgtcggcacccagaggccttggagggacaaggcactgggcggtgtgactggtcatggcacttgctggccttctggccagaggtcctcctggaagcccctcctttcagtgcctggctgcagcggtgctagccaggctggagtccagcacctctcgccggtgtctgtgtgagtgagcgcatgtgcgcatttatgagcatctacttgcggctgcactcagggccatttgaacccagtgcagagttatctctatgaggaggccccgggtctccagccccctccatctcccctggggtttggcatatttgacatggagccccatgccaagggatgcagctgttggtgtctgtccagtccattcaaggctagcctgcccatgcactgtggcaggggttggattggagggagagaacagagttgggaaaaacaacaggtttgagtcctataaagccataatttaactccagtagctgatgtcagacaagcttgtcctatgtcctatttgagtggcagcagcgccagcccagcaagaaggctgggggttgtcaaggttgtccccagaccttgcttgcagtggttggagaacccagggggctgccttgggccctctggccagagggaagcgggcagctctagccctggagattgtggtcacattggggcttgtttaggattggagggccaggtcacctccccagccaccctcccttctctcctctggggtccccactttagggcgactttgcccgaggcccacgcatccatccactcctttagtgccttgaatctcattcacaagcagccccctcccttcccctccccttctcactctgttgatgtaatcctcccacccccagtgtccatcctaagacaggcatcaaaagaggccctaactttacttcccaaatggtgctttttaaaaaacaccatcactacattaggggcaattttttcacacctccctgtcttcagaatgtaaagggtggggattatgtctctgtttaatatgcagccccctgcactgtggggtttggggcatgttcagtaataagaatgaatacaatagacaaagggggtgtgatgagtgttaacttggttgttccagaggtaaaccaggtctcagggaagagcctggagctgctattgcttaggaagttgtacgtgccttgaaatgtccactacctgaggacgcagcatctggtgggcccggggctgctggggccaaggagggaccttgaccttctggtgcctgcccctccccggcctatgtgccatccgcgtgacgctaggtcagcgctgccggttctttaccaaatgtgcttgcttctcctaagttatttataaagagaaatcactaatggactctactggtttgagtgcttctgagctggatgaccgaccgcctgtatgtttgtgtaattaattgccataataaactttgatgagtc

SEQ ID NO: 56 - protein, 259 aa, Homo sapiens
RAAAATISHASLPFALQPIPQPACGPHCPWSPATGPFPSSVPALLLQRASGPHLPGSPAWTQGCCGLLLVPTEEHATPAGLSWDPNGCLWAWVPLAGRQGPQSWLSSTVPIPRNRRKTSLPNTASAPQLSRPAPALSAPAAPLSPRARPSLWVPTTAGACLAWVLDTLLALGPSLVPPTLNLWPSHRRDSRVNWKWRWCSLWTCVGTQRPWRDKALGGVTGHGTCWPSGQRSSWKPLLSVPGCSGASQAGVQHLSPVSV

SEQ ID NO: 57 - DNA, 2899 bp, Homo sapiens
cacgatgtcgtggtaactcagaggcgcgcgaggcggggcggccaacggggtcgcggggcgagcacgcgcgccactggggcgccggacgttgcaagggggtcacatccggtagggggcggcgacggcggccctggcagggaaggatggagacgctgaaggataagaccctgcaggagctggaggagttgcagaatgactcggaggcgattgaccagctggccctggagtcccctgaggtccaggacctacagctggaacgggagatggcactggccaccaaccggagcctggcagagcggaacttggagttccagggtcccctggagatcagccgctcaaacctctcggatagataccaggagctccggaagctcgtggagcggtgccaggagcagaaggcaaagctggagaaattttcttcagcactgcagccagggaccttgttagaccttctgcaggtggaaggcatgaagatcgaagaagagtccgaggtgagagggcgaggcgacacccctcttccctggacggggtgtcagtccctgcagcaggggcccttggaaggagaagcagatgtctgcaaagcatggaacaagggagctttcgtagatggcagaggccatggctgagaagttcctggagggcgaggtgcccctggaaacgttcctggagaatttttcctccatgaggatgctgtcccacctgcgccgggttcgcgtggaaaagctccaggaagtggtgaggaagcccagggcttcccaggagctggccggcgatgcccctccaccccgtccaccacccccggtgcgcccagtcccccagggaacaccccctgtggttgaagagcagccgcagccaccatcagccatgcctccctaccctttgccctacagcccatcccccagcctgcctgtgggccccactgcccatggagccctgccaccggcccctttcccagtagtgtcccagccctccttctacagcgggcctctgggccccacttacccggcagcccagcttggacccaggggtgctgcgggttactcctggtccccacagaggagcatgccaccccggccgggctatcctgggaccccaatgggtgcctctgggcctgggtaccccttgcggggaggcagggcccccagtcctggttatcctcaacagtccccataccccgcaacaggaggaaaacctccctacccaatacagcctcagctccccagctttccaggccagccccagccctcagtgcccctgcagcccccttatccccccgggcccgcccctccctatgggttcccaccaccgccggggcctgcctggcctgggtattagacacactcctggccctcggcccctccctagtcccacccacgctcaacctttggcccagccatcgccgagattcgagggtcaactggaagtggcgttggtgctccctgtggacttgcgtcggcacccagaggccttggagggacaaggcactgggcggtgtgactggtcatggcacttgctggccttctggccagaggtcctcctggaagcccctcctttcagtgcctggctgcagcggtgctagccaggctggagtccagcacctctcgccggtgtctgtgtgagtgagcgcatgtgcgcatttatgagcatctacttgcggctgcactcagggccatttgaacccagtgcagagttatctctatgaggaggccccgggtctccagccccctccatctcccctggggtttggcatatttgacatggagccccatgccaagggatgcagctgttggtgtctgtccagtccattcaaggctagcctgcccatgcactgtggcaggggttggattggagggagagaacagagttgggaaaaacaacaggtttgagtcctataaagccataatttaactccagtagctgatgtcagacaagcttgtcctatgtcctatttgagtggcagcagcgccagcccagcaagaaggctgggggttgtcaaggttgtccccagaccttgcttgcagtggttggagaacccagggggctgccttgggccctctggccagagggaagcgggcagctctagccctggagattgtggtcacattggggcttgtttaggattggagggccaggtcacctccccagccaccctcccttctctcctctggggtccccactttagggcgactttgcccgaggcccacgcatccatccactcctttagtgccttgaatctcattcacaagcagccccctcccttcccctccccttctcactctgttgatgtaatcctcccacccccagtgtccatcctaagacaggcatcaaaagaggccctaactttacttcccaaatggtgctttttaaaaaacaccatcactacattaggggcaattttttcacacctccctgtcttcagaatgtaaagggtggggattatgtctctgtttaatatgcagccccctgcactgtggggtttggggcatgttcagtaataagaatgaatacaatagacaaagggggtgtgatgagtgttaacttggttgttccagaggtaaaccaggtctcagggaagagcctggagctgctattgcttaggaagttgtacgtgccttgaaatgtccactacctgaggacgcagcatctggtgggcccggggctgctggggccaaggagggaccttgaccttctggtgcctgcccctccccggcctatgtgccatccgcgtgacgctaggtcagcgctgccggttctttaccaaatgtgcttgcttctcctaagttatttataaagagaaatcactaatggactctactggtttgagtgcttctgagctggatgaccgaccgcctgtatgtttgtgtaattaattgccataataaactttgatgagtcacat

SEQ ID NO: 58 - protein, 242 aa, Homo sapiens [sequence omitted]

SEQ ID NO: 59 - DNA, 930 bp, Homo sapiens
cacgatgtcgtggtaactcagaggcgcgcgaggcggggcggccaacggggtcgcggggcgagcacgcgcgccactggggcgccggacgttgcaagggggtcacatccggtagggggcggcgacggcggccctggcagggaaggatggagacgctgaaggataagaccctgcaggagctggaggagttgcagaatgactcggaggcgattgaccagctggccctggagtcccctgaggtccaggacctacagctggaacgggagatggcactggccaccaaccggagcctggcagagcggaacttggagttccagggtcccctggagatcagccgctcaaacctctcggatagataccaggagctccggaagctcgtggagcggtgccaggagcagaaggcaaagctggagaaattttcttcagcactgcagccagggaccttgttagaccttctgcaggtggaaggcatgaagatcgaagaagagtccgaggtgagagggcgaggcgacacccctcttccctggacggggtgtcagtccctgcagcaggggcccttggaaggagaagcagatgtctgcaaagcatggaacaagggagctttcgtagatggcagaggtgaaggacatctttagtcctggggaggccttttgggtataaataacaggaacccagtcccactagctgaagcagaaacgggtgacagtggacaagggcagctcgcagccctggatggtagggcagcacagcaggaggcccccaggggctgaggccagctccctactccactctccctgcttcctgcttccctccggccacctcttcagcctctgtgggcaaactggtgctgtccactctgtgtctgggtggaagaagcttctaggccctcccagtccctgggctagtgctcatccaggtgttcagcacatatat

SEQ ID NO: 60 - protein, 158 aa, Homo sapiens
MLKDKTLQELEELQNDSEAIDQLALESPEVQDLQLEREMATNRSLAERNLEFQGPLEISRSNLSDRYQELRKLVERCQEQKAKLEKFSSALQPGTLLDLLQVEGMKIEEESEVRGRGDTPLPWTGCQSLQQGPLEGEADVCKAWNKGAFVDGRGEGHL

SEQ ID NO: 61 - DNA, 2976 bp, Homo sapiens
ccgcgagcgtgtgtgtgtggcacgatgtcgtggtaactcagaggcgcgcgaggcggggcggccaacggggtcgcggggcgagcacgcgcgccactggggcgccggacgttgcaagggggtcacatccggtagggggcgggcctggcggaccccggaagtgtgggcgcggctgcggtttaacccgcggtggcggcggcgacggcggccctggcagggaaggatggagacgctgaaggataagaccctgcaggagctggaggagttgcagaatgactcggaggcgattgaccagctggccctggagtcccctgaggtccaggacctacagctggaacgggagatggcactggccaccaaccggagcctggcagagcggaacttggagttccagggtcccctggagatcagccgctcaaacctctcggatagataccaggagctccggaagctcgtggagcggtgccaggagcagaaggcaaagctggagaaattttcttcagcactgcagccagggaccttgttagaccttctgcaggtggaaggcatgaagatcgaagaagagtccgaggtgagagggcgaggcgacacccctcttccctggacggggtgtcagtccctgcagcaggggcccttggaaggagaagcagatgtctgcaaagcatggaacaagggagctttcgtagatggcagaggccatggctgagaagttcctggagggcgaggtgcccctggaaacgttcctggagaatttttcctccatgaggatgctgtcccacctgcgccgggttcgcgtggaaaagctccaggaagtggtgaggaagcccagggcttcccaggagctggccggcgatgcccctccaccccgtccaccacccccggtgcgcccagtcccccagggaacaccccctgtggttgaagagcagccgcagccaccatcagccatgcctccctaccctttgccctacagcccatcccccagcctgcctgtgggccccactgcccatggagccctgccaccggcccctttcccagtagtgtcccagccctccttctacagcgggcctctgggccccacttacccggcagcccagcttggacccaggggtgctgcgggttactcctggtccccacagaggagcatgccaccccggccgggctatcctgggaccccaatgggtgcctctgggcctgggtaccccttgcggggaggcagggcccccagtcctggttatcctcaacagtccccataccccgcaacaggaggaaaacctccctacccaatacagcctcagctccccagctttccaggccagccccagccctcagtgcccctgcagcccccttatccccccgggcccgcccctccctatgggttcccaccaccgccggggcctgcctggcctgggtattagacacactcctggccctcggcccctccctagtcccacccacgctcaacctttggcccagccatcgccgagattcgagggtcaactggaagtggcgttggtgctccctgtggacttgcgtcggcacccagaggccttggagggacaaggcactgggcggtgtgactggtcatggcacttgctggccttctggccagaggtcctcctggaagcccctcctttcagtgcctggctgcagcggtgctagccaggctggagtccagcacctctcgccggtgtctgtgtgagtgagcgcatgtgcgcatttatgagcatctacttgcggctgcactcagggccatttgaacccagtgcagagttatctctatgaggaggccccgggtctccagccccctccatctcccctggggtttggcatatttgacatggagccccatgccaagggatgcagctgttggtgtctgtccagtccattcaaggctagcctgcccatgcactgtggcaggggttggattggagggagagaacagagttgggaaaaacaacaggtttgagtcctataaagccataatttaactccagtagctgatgtcagacaagcttgtcctatgtcctatttgagtggcagcagcgccagcccagcaagaaggctgggggttgtcaaggttgtccccagaccttgcttgcagtggttggagaacccagggggctgccttgggccctctggccagagggaagcgggcagctctagccctggagattgtggtcacattggggcttgtttaggattggagggccaggtcacctccccagccaccctcccttctctcctctggggtccccactttagggcgactttgcccgaggcccacgcatccatccactcctttagtgccttgaatctcattcacaagcagccccctcccttcccctccccttctcactctgttgatgtaatcctcccacccccagtgtccatcctaagacaggcatcaaaagaggccctaactttacttcccaaatggtgctttttaaaaaacaccatcactacattaggggcaattttttcacacctccctgtcttcagaatgtaaagggtggggattatgtctctgtttaatatgcagccccctgcactgtggggtttggggcatgttcagtaataagaatgaatacaatagacaaagggggtgtgatgagtgttaacttggttgttccagaggtaaaccaggtctcagggaagagcctggagctgctattgcttaggaagttgtacgtgccttgaaatgtccactacctgaggacgcagcatctggtgggcccggggctgctggggccaaggagggaccttgaccttctggtgcctgcccctccccggcctatgtgccatccgcgtgacgctaggtcagcgctgccggttctttaccaaatgtgcttgcttctcctaagttatttataaagagaaatcactaatggactctactggtttgagtgcttctgagctggatgaccgaccgcctgtatgtttgtgtaattaattgccataataaactttgatgagtcacat

SEQ ID NO: 62 - protein, 242 aa, Homo sapiens [sequence omitted]

SEQ ID NO: 63 - DNA, 2848 bp, Homo sapiens
ccgcgagcgtgtgtgtgtggcacgatgtcgtggtaactcagaggcgcgcgaggcggggcggccaacggggtcgcggggcgagcacgcgcgccactggggcgccggacgttgcaagggggtcacatccggtagggggcgggcctggcggaccccggaagtgtgggcgcggctgcggtttaacccgcggtggcggcggcgacggcggccctggcagggaaggatggagacgctgaaggataagaccctgcaggagctggaggagttgcagaatgactcggaggcgattgaccagctggccctggagtcccctgaggtccaggacctacagctggaacgggagatggcactggccaccaaccggagcctggcagagcggaacttggagttccagggtcccctggagatcagccgctcaaacctctcggatagataccaggagctccggaagctcgtggagcggtgccaggagcagaaggcaaagctggagaaattttcttcagcactgcagccagggaccttgttagaccttctgcaggtggaaggcatgaagatcgaagaagagtccgaggccatggctgagaagttcctggagggcgaggtgcccctggaaacgttcctggagaatttttcctccatgaggatgctgtcccacctgcgccgggttcgcgtggaaaagctccaggaagtggtgaggaagcccagggcttcccaggagctggccggcgatgcccctccaccccgtccaccacccccggtgcgcccagtcccccagggaacaccccctgtggttgaagagcagccgcagccaccatcagccatgcctccctaccctttgccctacagcccatcccccagcctgcctgtgggccccactgcccatggagccctgccaccggcccctttcccagtagtgtcccagccctccttctacagcgggcctctgggccccacttacccggcagcccagcttggacccaggggtgctgcgggttactcctggtccccacagaggagcatgccaccccggccgggctatcctgggaccccaatgggtgcctctgggcctgggtaccccttgcggggaggcagggcccccagtcctggttatcctcaacagtccccataccccgcaacaggaggaaaacctccctacccaatacagcctcagctccccagctttccaggccagccccagccctcagtgcccctgcagcccccttatccccccgggcccgcccctccctatgggttcccaccaccgccggggcctgcctggcctgggtattagacacactcctggccctcggcccctccctagtcccacccacgctcaacctttggcccagccatcgccgagattcgagggtcaactggaagtggcgttggtgctccctgtggacttgcgtcggcacccagaggccttggagggacaaggcactgggcggtgtgactggtcatggcacttgctggccttctggccagaggtcctcctggaagcccctcctttcagtgcctggctgcagcggtgctagccaggctggagtccagcacctctcgccggtgtctgtgtgagtgagcgcatgtgcgcatttatgagcatctacttgcggctgcactcagggccatttgaacccagtgcagagttatctctatgaggaggccccgggtctccagccccctccatctcccctggggtttggcatatttgacatggagccccatgccaagggatgcagctgttggtgtctgtccagtccattcaaggctagcctgcccatgcactgtggcaggggttggattggagggagagaacagagttgggaaaaacaacaggtttgagtcctataaagccataatttaactccagtagctgatgtcagacaagcttgtcctatgtcctatttgagtggcagcagcgccagcccagcaagaaggctgggggttgtcaaggttgtccccagaccttgcttgcagtggttggagaacccagggggctgccttgggccctctggccagagggaagcgggcagctctagccctggagattgtggtcacattggggcttgtttaggattggagggccaggtcacctccccagccaccctcccttctctcctctggggtccccactttagggcgactttgcccgaggcccacgcatccatccactcctttagtgccttgaatctcattcacaagcagccccctcccttcccctccccttctcactctgttgatgtaatcctcccacccccagtgtccatcctaagacaggcatcaaaagaggccctaactttacttcccaaatggtgctttttaaaaaacaccatcactacattaggggcaattttttcacacctccctgtcttcagaatgtaaagggtggggattatgtctctgtttaatatgcagccccctgcactgtggggtttggggcatgttcagtaataagaatgaatacaatagacaaagggggtgtgatgagtgttaacttggttgttccagaggtaaaccaggtctcagggaagagcctggagctgctattgcttaggaagttgtacgtgccttgaaatgtccactacctgaggacgcagcatctggtgggcccggggctgctggggccaaggagggaccttgaccttctggtgcctgcccctccccggcctatgtgccatccgcgtgacgctaggtcagcgctgccggttctttaccaaatgtgcttgcttctcctaagttatttataaagagaaatcactaatggactctactggtttgagtgcttctgagctggatgaccgaccgcctgtatgtttgtgtaattaattgccataataaactttgatgagtc

SEQ ID NO: 64 - protein, 351 aa, Homo sapiens
MLKDKTLQELEELQNDSEAIDQLALESPEVQDLQLEREMATNRSLAERNLEFQGPLEISRSNLSDRYQELRKLVERCQEQKAKLEKFSSALQPGTLLDLLQVEGMKIEEESEAMAEKFLEGEVPLETFLENFSSMRMLSHLRRVRVEKLQEVVRKPRASQELAGDAPPPRPPPPVRPVPQGTPPVVEEQPQPPSAMPPYPLPYSPSPSLPVGPTAHGALPPAPFPVVSQPSFYSGPLGPTYPAAQLGPRGAAGYSWSPQRSMPPRPGYPGTPMGASGPGYPLRGGRAPSPGYPQQSPYPATGGKPPYPIQPQLPSFPGQPQPSVPLQPPYPPGPAPPYGFPPPPGPAWPGY

SEQ ID NO: 65 - DNA, 23095 bp, Mus musculus
  misc_feature (1)...(23095): n = A,T,C or G
tgtgttttggtgatgagcgtcaaggctgctgtggtccatgggggcactgggcctccagcagtacgaaagaacatggccctctctggagtgggcaagctgccccagccacctggccctggagcaaagccactagacaccactggcaccattcgaggcccagggaagacagccccatcgcaggttatcagaagacaagtctctaatgcaccagctggggcgactgtaggctcccctgccagcccacaaggaagcaacaggaagactggaagggtggcactggccactttgaatcggtccaatctgcagcgactggccattgcccagtcccgggtgctgattgcctccgggtaggtgtttccatggctgtgacagagcacttaaccacctaagtgatagcaagtgactcacttctgggtcagacagcaagagggacttgccaagacaggcatgtttagtcttctcaggctgagctgtccctggcaggtagaagccagcctggtatgaacaaggaggtctttcatattagggatccaagaggtctggatctagctggggtcttacttctcatttgccttgtggtctgaagccagatccacccatggagctctgactccatcattagtgaaacatagggcatacccattcacattagttcagctcactgtgttctggtttgacagtgttatcatctcatttataatctttataatgactctggtgacactgtcccatttcacagataaaatcaaatatattgtaggagtatggccttataatcctctttcccctttacctcagtacaataggcaccaagcaaagattgcttctttcctggcccattgtagcattctcatgacgtgctggtgctgttggaggtgccatttgtgtttcttatgttctccatctccctcaaccagcaaacaggaatgcccagctccctgcactcagcctttgcctgccatgctgtcttcttgtctttccatcacacccagcagccttccctttctctccagaggcctggccctgctgctgtgtcccagatggttgaaaaggctttagagctggaatgagtccctagactgaaaatccaggctgccctaaggcaatactatagacactcagctgagtctccaaacagagtcttagcatagggacaggaaatgaaagatacacagttgaactgaagaggactgggctggaacagcctctcttccttgcctctcatttgtgtgagccccaggatctttgcaagggtcagtgtccttccttgtatgtcaaatgatagtcccaaatttacagaacctgctcatggaatcactgtgaaaccctccatggatagaggtcattccttgacaagcccccgttgggcttgcccatgtccgcccatttcttttgctgatgcatttaagcatgggcactttgcttgagagatatcttcccttagtggagagaagctggaacacaagcctttgtgcactgttctgtccttgttttggctaaagcctcagtgaaagtgaaggcagcttgtcatgccggccagaggcatgggatgctcatgacttcctccgtggggaagcgcaggacagcggggaagaggcgcctggatcccgctgctactctgcttctctacacggggttgcagcagagtgctgggtgctctagcagatttccagggtgattgccagcccataagaggaggctcagtgtacgtaggggactccctgactcttgagcttgaacccagttctttgctgtgccacttggaataagttttgtttcctctgtcttcagtgttcttagctgttgagcgacattataataggacttcagtgctagggttgtcacgtgggttaaatgaagccttcagttcagagactgcacagagtccaatgggtattagctgccgatggtgatgatgatgatgatgacgacgatctaatgactatacccttgtgttagtgaactcaaggctaagctgagccaatccaacttacacatcatttttgtccccttgacaaatgccccagtgaccccatgccatcatgaagacagatgccccgagatcaccttgaactacaacgagtgtgaggaactcaacaggcttcgtttcttttgtttgttcccctgccaagctggagaagtgagtgcagtccaggcagcacaattcaaaaggggtatagaaatgagttgcttttgcactgtttttctgaaaggggtccctcccacctctctctgtcttccagccctttcttctcaccttttttccacctcctgcattcccattgccatcttcccttgtagcttttcttggccactaatgagcatgtgttatcctctttgtctggaactgccatcaaccttctgtcattacacagccccgtccccatcccctctgcccatgacctcttcaagcaactttcccacaggaaaggggaaaaaaaaaaaaggaagatcaaggatggcaggcaatgtgggatgaagagaaagtattggcaggggacaaaagatacagcaaattattcagacacaagcaggaggttcttaaaaggggtgggaaggtcggtgcagggcagcagtcacccctctccccctcagagtccaggcttcggtacctccagttaggcatggttgctggttgccttagagacaaggccattgtccttcatgaggcttcctgggttggtgaataactcagaaaacactagccttctccgcatgaggtctgcaaggatctctctctctctctctctctctctctcacacacacacacacacacacacacacacacacacacacacacacacacacacacacaaacggcctgttcaggcctcctctctttactgtgtcagttcctctcagttttactttatcaatggaaataaaaacttggatcctccataactgggaacagcccaagaggatgggggaagggctgtcttccgattggccagtgcgtgattaggtcaaagggctttggcttggttgcctggaagatgggagaaggaggcttgctattggaccgctgcttcacagaaggaggggtttgggctcagatagctgaggccctagggcagaggacaggttttctgggattttcattttaaccaggaaccatgggggaagggcaggcaggtgctgcctgctcacagtccccagtactgctaggctttcaactctgccaggctttcgactctgccttttatacctgataccctgtggtcaagattgtgagaaaactggattattaaagcaggaagtggcagaaatcaagcccttcgacaattggaaaaataaaagtgtaaacagttgcccaaatttgcacaaggctcagctgtttatcaactacttgacctagatcctacagcctcacagggaccccaagggagcagacatttatcggaccttgtttacagctgaggttaaaggcaggcagatttgatcacagaacacagaggatctggccagagctgccagaggcaaagcaggcagtgtacagatgtgggcagtcactttccatttcttctcattgtttgctgttggtatttagtaaagcacacagccctgccctccgctgagccccagtgctgcccacagaccagggaccaggttgcccccttcctgacacacagaggaaggttgaccccacaggttgatcccaaagtcttgctgagtgttcaagggttccacaaacaggcttcccctatctctctctctagacgcccccacacgccacaatccccgggctgctctgaggattggagtacttcctggttgaccagagagtgtgtggaaacctgccagtcaggtttgtggaaacaaaggtggcctttgtcacacagatcacagttttttatcagctgtggtaggggccctggagatggtgaaaggaggcaggtgcgggggctgtgcggcacgtgctgtcccctagtggtgaacaggggacataccacaaggggcagactcttctagcctcttcaggtagagtggagaggtgaatctgccctggaagggattcagggcttctgactcacctttctctcaaatagtgtaatgggaaggtgccaaggcgagacattctaaccccagatccctgaggctcaagcagttggctgacttcatgttatttgcagtgcttggttgtttacacaaccaggaatcaaggccgttcccctttccttggtctagtggcttttattttcaagtcagcttttccctcatctccccacatccagtcttgctttattcaggcgacagttgggaaagaaaagtagctttaggtttggcccgatacatagcgtcatatgctttgattagcttcactgcgtctgtcttcacggaaaggcaacagaggaagcgcatcctactggacctggtgtgctccggtagagagacttggctatcaggcctctcttctgtcctgatggtgccttcgtgcattacagtatggggcaatgcagagcacggcatcatgggaggcgcagtgaaaggactctggagccagatagtgtgtgttggactcttgttgcgtctagttggcgtaacctcttgtgtgccccaattttgttacttatgcagcaagattgactgtaacactccttacctagagacctgggaggactgagtaggcttattgttgttgaagagttaggattgcccccagccagatatgagccctgtgaatcatagcccatagaggaagacccatggggtgtcatgctcacagctgcgtctccagcattaaacatgattatcccaaagtagggttcaatgagttcttctcaaatagacacataaataaatattgctttttttccttctgacttcccagcacagccctaccccagctggactctcaggcttccttgatcccagaggcatctatctatctatagacaggcccactggcttctccaagccagctgtggaagcctgggtggcagaggggaatggcacaagtcccatctctatgtgtcttgtattttcaccttcagtgccttcgccgtgggcggcctggcctttcccaggcagctgtgtgggctcctctccagagctggggaggtcagcaaggggaggagtctcggcttgcctttataagtttctgggacaaggagaagtgacagctgtttaggcagtgttttccaaatgctggaccagggattgcaacatctctgctctccggggaacatgggggtggggtgatatggattcctgtggtgcatggatttggggatagggatataactctgatcatggctgaagatctgtattttagccaatagtaagggaatgtaagcggaaacgggcagggtcctggaagaacattgtagggagaggaaacgacattttccaaaggtgcgtaggcaggcatgtgactggcaggggtgaggaccagaaagaacaaaggtaaaacaacgatgagaagaggctggcagaaggctaagaaggttgaggtagaggaattggcagacagtgcagagctgggaactccttgctttgaccgtgggcatcctggacccattcttcattctcaggttctgagtggagggtgtcaagatctgagttcagtttgaacctctcacctcccattgatctcctaagaacccactgcactttggtaggtttaaacactggttcattttgttctgatgtcagagccataatacatctgccctttacttccacagggttcccactgtgcctgtgaaaaacttgaatgggtccagccctgttaatcctgccttggcaggtaagagctcacgaacctgggtttgactgacgtaggctgaaaactcagaatcatggagagactagtgaacacatatttataaagaggggagaatttggatgctaatgggaagaaaatgagatcttaggagctgagtaggaaagctcagtgggtggtgctaaacaccgagcatgccaggggtcttgagagatagctcatttaataaagtgtttgactggcaagcatgaggacaaacattctagcccagaatccctgttcttttttgttttaaaacggaaagagtaatgacaggcatataatcccattgcctgagaggcagagataggcaggtccctggagtttgctgactaccagtttcctggtgaggtccaggtccatgatctcacaaatcaaggtgaccatcccctctcaggttcaggagccagaggagggggtgaggagagctgtcagttctatctcctcagtataacatagacattccagtcatgatcttacattagctgtgactgcctacactgagcctacataataatggcttgccattggtcaggcagggactggggagggcctcagagcatcctgcacatccccgttgaacgagtgcctggtagattctgaagggagggagagttgttgccttcagttatgctgtgctcatgggtggtttcacaaccatggtcacacagaaatccctggacaaaattaatgggtcacaaaacaaaaagatgtgaatgtggaacagcggcttgttcctaaaagtaatttgttttaagtgaggttgttggcttctgaaggacaacttaaaaaaaaaaaaaaaaaaagctgacttccggcatttgcccaccggcacgcccaagcatgcgactgcatatgtgtgcatacagaatgcatgaattatgaggactgtctgctggagaggagaggagatgagcaggagggggtgtgtggggaatcttgggagcgcattcttcagcccgttctcacccctgccctgccccttccaggaatcaccgggatactcatgagtgcagcgggattgcctgtgtgcctcactcgcccaccaaagctggtcctccacccgccccctgtcagcaagagtgagataaagtccatcccaggggtctcgaacacgagccgcaagaccaccaaaaagcaagccaagaaaggtacaggcctcttcttctgattagataactggagtgaaaaactgggcctccagccctggctctgcctgcaccgaggtcaaagccatggcttagcccactggagccatggagagtaaggctcttcgggagctgggtcctcaggaagcaagctaaactgaaggcagaggggaggatcacagggctttatatggcagatatggatctgctaagcaggtctggctagtagactatgatgagtccaccaaagagggttgggtctgggtcagaaagaactacccggagacacagaaacatacaaagcaacaatagcagaagcatgaaaatattaactgttgtaagttagaagagaaacataactttggtgtcagaacagaaacattgcatctagtcccacctttgtcaggagctagttgggtggaacttctgccttcctgtctttgtgatgcctgcaaccagcaggtgtgtgctggaatgtgcctatgacaattgagaaatagccactatttcatgtccctctggagcctctccatcaaccttccttcacaaatcactgtgaacctatccacaatccagctctggagagcgagggcatcttccttgacctcaagggactctgggctggccatccttcttgctgctgttggtcatgaagtgatctgctctcttaagccttcatcgtataaacttcctgtgaagtttcagtcagaggctgtgtgtagcactggcaaaaggcaatgggatctcaattaatagaagcccatttttttttgagagagagagagagagagagagggagagagagagagagagagagaaatggggcagtgggagagaaggccttgcctctccgcttttggctcttgtccactaaactttctcaaccgcctgtcctactttcccagttcatttcaatttctttgcttcagtgaactcacatgcccgttcttagtccaataagtcaggacagggctttacacttctgccctggttctggcactattaatagcacatactgtctctttggcaaactgctacggggctgtgaatccatcagctcattagtggtcaaagcatccattttgtagatactaccaatcttccctatttaatgggtaagaaaacagatggggaaagctagaggaatggcccaaggtttcatggctctccttgctctgtggtttttttttataaagccctgtgatcctcccctctgccttcagtttagcttgcttcctgaggacccagctcccgaagagccttactctccatggctctcagcatgtttcctggagccttactcctttccccactgctggactgtgtctgctggcagcaacagaaggagctaaagccaggaaggactgtcctgaaactgggggtcacaacttcctgctttcccataaaaataatttgactgtgacaccatgttacaaaacttaagatagggctttacgagttgtaaaagaaatgcagcccgtctgactggcagttgtagagcagtgccaagagtttttatttcttttttctcaagggaccaaatgggcacgtctaagctctttgattatcaggaagagaaactcagtttatctcagttaaaatgcagatttgctgaaataggcagacatgtcagacagtgggcaggaagaggtcaagacaggcaggggcatctcatccttcctcaagccactttgaccgagctggaacaacctctgctctcattcatgctccttaaactggtgcaaaataatttgacctccttttctcctatgtgtgcacctgtatgcatgtgtgcttgtgtgtacttgcatgcacgcctgcacataaaaccaaagttcagccttaagtatcatttcttgggtgccatctgccttgggtatgttgttgtttttgttttgttttgttttgttttgttttgtttaaaatcagggtctcttacttgcttggggcttaccacttaggctagagtggctgtcagcaagcccctgacatctggccgacttcaactccctctctctggagttacaagcctgctgtattacacaggtttccagggatcaacttagatcttcattcttgcaaggcaagcactcaaactgagtcacctgtctccctgatccttttctctttgaacttgtctcttactctatcctctctgaagtacctagaatggcaaggtcacttgatcccatctcctctgccttggtgacctagtgactctcctttccccataggtaaaaccccagaggaagtgctaaagaagtacctgcagaaggtccggcacccaccagaagaggtgagttcagggggtatggggcaggggtcactttctccatcaccaagtacatgtcctctgtccccacattctgcaggacatggcaggtactgtttcctaagtcctggctgacacagggcagatttagctgatgttcacttcaaagtttaaggttttgagctgcagttaatggtttaactttccccatttagcagaattctaagtgattctaagttatcttccatgcctgtctgagtttaagtaaaacagtatgccaagtcatgtgaactccctttaggatggatttaatatggactagtggttctcagctgaagtgatttgtccctaagggagcatgtggccttgtgtgggttctgataactgactagggagtgtgctactaacatctagtaggtagaaaccgtaaaagcttctgagcactctataaagcccagaacactatccatagcaaagaatcactctaccacaacatcagtagtgcccatgttgagaaataggccatagatttatttagatataaggcccctctaatacacgtgaagttcaatacctctacaaagtgcaacatgagtttatcatggtatctgttgacaagccactggaaatcattataatgtagttaatgagttcaagctagcctgtatgcatgtatgggaattatttgaggaatatctctgctggtaaattaagacaacactatatttacaattccccctttcctaaacacagcacccttgatttgtgaaatttctagaagacttttctggtgcctccctgggctgagtgacagttgatgcctgtctgttcttcgtttgccaggattgtaccatctgtatggagcgtctcacagccccctctggctacaaaggcccacagcctacagtcaagcctgacctggtgggaaagctgtccaggtgtggccacatctaccacatctactgcctggtggctatgtacaacaatgggaacaaggtcagtgtcagccatgagggcgagcagtgtgaggtcatgactggttcccgagtgtccttgttctcccacacgttgttggaactcgtaacagacactccaagtatatttgctactttattttactgactgctatgacaaaatacttcaaagctgacttaaagaaggaagactttgttttggttcacaatttaagagagcttactgtggtgaaggcatgatgggtaggtgaagtagctggtcatgtttacccatagttaggggcagtcatgtctattcatagttaaggggtggtcatgtctatccatagttaaggggtggtcatgtctctccatagttgggggactgagagggatggatgctggtgctctcagctcagattctcttgtttattcagtcagggcttcagccaatagagtggagctggttggcaatcaagtttaaccttcatcccgggcagcaggaatgaacatgtgtgctgttttcagggctaattagatcccacattgcaaaatctgtcttcatcttcccctttgggtcaagcctccccttgtttctggtttggctatacagggtggtctagcagaggtgagctctgtccattaaggttctgagggaaatggcccatcactgagtgaactgggtccccatcagagaaggctttcatcataatgatgagaaattgtttattcatgatgcagtgcataggttcccaatagcttttatttttcattttttagtggttcaagttgaaatccaccttctctggacagtcaaaacacctttgattgtccctggaaagacatcgttaaagtgcttaataatccctgccttagcatccattgtagggggttgagataaggcttctctccattaactgacataaggtgatgcccctcagttatagttggtttcagaaatctgtctgtctccctaagtgacacttgccctcttcattatctgtgctttttaaagacattgacttgcattcttgcctgtgtctggaaccacctataccctccttctctgtgagcttgaccactactcatgtctctgaacccagctaactttgaaaccaaatatttctgaacttcttgcccaaggacatgtctggatttgggggttgctccttatgtcttgtgtagtggggaagaacggaggcggcatggcgggaagcacgcctgaattgaaaccttggcttatgagctgaatgaccctcaaccttttcaagattttacttttcaggtcaaatatagatatgaagctgtagctgcatgtgtgtgtgtgtgtgtgtgtgtgtgtgtgcgcgcgtgcgcacgcgcgcgcgtgctcatgtttgtgctcatgtttgtacacgtgtaaaaaggagactggaggaaaacttttgtgtgtgtatttatgtttctgtaagtacatttgcatgagaaagctggaggacaacctctggtgccatctctagaacattgcctacctcttttgagacaatggtgtctcgttgctcaccaattaacctgggatggctggccatcaagcacatgggatcatcctgtctccatctctctagctatgcatgccaccacttctggccttcaggcttgtaaacaagctgtttcccatctgtgccatacttctagaccgatggctacctcagagtgttatgactgctatttttcaaaattatatctcttttttggctatggctctcatctccccccccaccccctttatctttatataaccagtaaggttgactggctaaccttgacattttccctggtgtctcagacttggtgaaagattccatgttctttcacagcccagggctgaaatatttcattagagccttacctttttagaggttttatgggggagggaggtcttcagatgtcttaacacgaatatttccctttgtatgactctcttcaaaactgcccagtaactccatatttatatctgtagggctccgagcatgtttcccaagccactgtgctttgttctccctttcagcagtaccgaagcatttctcttctcttaagcacattgaagaaaaacatgggagagaatggactcactcgccccaggtcttgaaaccaattaaggctagagcagaaagcaggagcgtggttgtagaaagcagtgaccatgaatgcgaactattatttgaaaggaaccaagcatgaatggaatcatgcctgaatagtcctgagaggatctcatctcctgcccaaagaactccggtgtctgccaggccctcgttcctagctgagtagcctcacattctacacacatgcttgctgcccatgcgcgctttcttccctacccccctttccttttctgcgaacctgagaattacctttgctgtctgggatctcttgagggttcttgtctgccctacctggtgacacttcacctggtcctgctgcgagactacaagcttttatattactgtctccgtctgcagtccatattcacatcagtctttgtggctatgacataatgcatggggaagcgatagaaaggaaaaggaaagactggtttggttttgttttttgtttgtgtttgtttttgactcttcacttcaggaagttagtctgtggttgacaacttctttgctgtgtgcttatgatgaggcaaaaccgtggtagcaagcatgtgaggtgtgacggagggagtacatcactgagggcaagccttgcatgggtatatcatgtagcctctgcttgtgtccttctttctccacctcttcttctgtctggtccttttcttcctgctcttcacagttcttggctgccttcaggtcactatgtcagtagcttaatctaccaataaggttccagtccccgttattcagtctctctacaaaatctcctcagcaggtagccaagtctttaatccatgagccttggggaagaattctgattcaaaccagtatagaaaactggggagatctgagacttcactggaattccagtgaattcctggctgatggcaagtccttaagcctgtatgttcttcagttcccattacctaaaggggctctcatttccttcccaggtaaagccaatttataactgtttttaagaaccattttctttcttaagaaccattttcttaaagccagtttggttcttttccaacacaggacccaactatttgtctctccacggatagtataagcagcacactagtatcatttagataggacatactgaatattttcgtcatgcatctcacctaactttcactagcccactgaaagaggattacatttcttgtttttacaaggaaacggagacaggttgacttgtccacggctacacggcagagctgagactcaggccgggcagctttatggtagaggtcctactctgaacccctgcacttctcaggcttccagtcctgacacagtagacttgatgcgagtctggggcttagcagttggtaaattgctgctcttgagccgttaccatgtgttgcatccatgtgggcattggctaaaccacaattccctgtgctggcttcctgccctagtcagctcttcccctccaggacagaggtgactcatctgtgtgcctcagtatggaacatgggttattcatgtcattttcttcctgttatcttagagaaagccaaaatggcttaagtagctagagagggttcgggtctgttatccactgggtaagttttccctcttgagaccattttctctggtgctttaggcgggttgaggggaaggtcatgaacaaagcagctttctaatctgactgtactggatttggcttcccaggatgggagtttacagtgcccaacatgtaagaccatttatggcgtcaagacaggcacccagcctccagggaagatggaataccacctcatcccccactccttgcctggccatccggactgcaagaccatccggatcatctacagtatcccccctggcattcaggtgagcctgcccgtggatgcttccattcatgatttcaacttggaatgtgggtaaaatgttgtgctaggagaagcctccttcccatctttgtccccagactgtgcctcccccttcacttccattgttcctttttctctgtgtctttccagcatcccttgtagtactcagtggagattgcatcctcccctcccagttttgcacaaaaagccacatttaggcacattgtttcacactccaaataacaatatgaaccttaggggttttttgttctatgttaatagagaatgtccttattcttatgtctgtgtaataatccattgtatatatatttaattcaacatctccgtttgctgtctatttacattgtttgtaatcttttagtacaacagataatgttacaactaataactaatagtagtcatgtgaccatgtctgtagaataattttctggaagtagaatttcttggtcaaacagttatttgcatttttaacaatttgatggttatgcttggctttgtctttactggcatttcttttttctctggtgtttggaagactgtcagccctcaaacaaatatgaatgataatcctaatgaataaacgcaatgtagctcttccctcacacagtgtggagcctttcctaggtgttgtagggtgcagaccagatttaaccctaagcaaacattggtttgctcacgcttcttcactcccacctgtgccttcttgcttgtcttctgtctgacaagtgtttgcatgtgggttgtgcccgggtttgggttaggtactggtgaaacagagctcaaattgattacatctttgaacctcgaagtccccgttgtggtggggccaggaggatggtaaaataaataatataaatagacaaagtacttccagagcacggcaagttatcagaaagtaaagcagcaacgtgtgatagtccataaaacatgaggtttcttcccttggggcacttgtaaccaggcagagcaagataaatacctctcactcctcgtctggagaacagaaacggatatgcaccactgatgaaagttacacagacaaagggacttgcagggcttcaaagtcttgtgaccctggtcccacttcctggctgtcttcaaggtgcctgcttccttctcctagcttcagatctttttttattcttcatctgtgctgctgggaatctgctaggcagaggtccaaggagtgggaaagtccaccaggagcttcccaggcactattaaggtgcccgggactttgcttcctgctatctgattggctgannnnnnnnnnnnnnnnnnnngaggaggaggaggaggaggaggaggaggaggttatgtgtagtctgtctggaaggtgggaggagacttttctggtgcaaagcattctctagtgaatccctgagagaaatacagaatacacagttagttagctgcaggagagacaaccgtggagaaaaatgcatgctgaagaacagtagaatttattcagttgggaggttggggcctgagacttgcaaaagtcatggaaggaggggacatgataaggatatagggggcaggtcacagaagacgtttaatgctagggccagcgatggggactttgcttaggctctgaggagtccctggagatgattgtctgattaggattacaagacatgtaacgtgtaaatatgctttaagaggccagtatgacttaagaacgggagatgagtggaaataagtctgcagtaatatttcaggctcccgactaaggggaagaccagggtaaaaaagtaagatgtgcttggctcagcccgggagagacttgtagagtgattctggggcagctggctggaatgatacggaagaatgaaaatgtgggagtgggctggcaagatggttcactggtaagggccctgataactgaaagccagttctgataaacagagttcaatccctgaaacctgcatagtggaaggaaaagaactgactccttcatgttgtcttctgatttccacacacgtaccaaacacacacgcacacacgcatacacacacacacacactcgcacatgcactctctaaataaacaagtgtttttaaaaatgaaagagaaagcaagaaagcaagaaggaaagagtccagcaagggtcaaagtagaaccaaatatcaaggtggggcatctgttgacaagaaggccacattttatttaagcctctggagttaccggacatagagagtcttctttgtaagtgtacggaggggtcaatgctgcctatgcagggccctagcacctctagtaacaccctggcttttgaaaaggaaacgcatctctaaatggtcagatgctctgcagactcaccagggtgagtcagtagaaaagtgttctgtgcttgctttgtgaagctccacggatcacggatcacgcaggcctgggctttggtgagaagctgagctcgccaagcactgcttccactgcagaaagtgagtccctgtgggaggagctctgggccaggctgaggcagagtcgtgactgcttcacctggcaacaggcccagaacaaacgagcagccttactgggttggtgccagacctgctgagctggaaacagccagcagcccagggcatcagcaaggcagctggaggcatggtcaggcgtggtccctccatgaaggtgcctggcttggagatgtgtggtcctgaagatgaggcacctttgtagagattttgtctggctgttaagttataactcagtctttccatcccagagaacattagtttcttttagttcacagtgacattgttctatcttttaacatttttctatgatcaaaatttactttgtacataagtagaattctcaaagcaataaataaaaattatactttaaaatttgaatagtttttctctttggcaattttatacatgtgtacactgagtttgtgcattttcaaatgcttttgccccctctcttctcctttccttcttccaaaacactttccccaatgatccctctttcttttctttttgagccagtgaattcaatttcattcattcattcactcgctcactcactcactacaaagccatgatgagtttattgatctgtgagagagcttgtaccaagagctgcataaaattgtcaatattatattctttgcacttacaaagtaaaatctttaaacaaggttacagtctcaagagatgagagatattcaaaattatagacaagcatttgtatgggtggaaagctgttacatcagtcttcataaaccattcaccccttggagcctgtgatagctctgtcagtatgacacaatttagtatcatacaggaagataatcccaatgatgggttcatgggattactggggaattttcttgattctattaactggggtgggaggacctgcccactgtgagtggcattattccttaggaatggggatctgtaatgtgtaagcgtggagacaactagtctgtcatgcatgcattaaatcatagctctctgctcttgactgtgggatgtgattatctgatttgggttcctgccgctttgacttccccacaagaatggactataacctggaatcatgagccaaataaactcctttccctttcggttcttcttagggtatcttaccataatagcaagaagtgagactaagacggacaccaattgggaggcctagtatcttgtgcctttttgctgttgctataacagaatctcagagctgagtgatttacaaagaaatgaggttaatgtggctcatgattctgaaggagggggaatccagcagtcatgtctggttgcactgggcaaggatctcctagtgcctctcctcatggcagcaaataggcaaacagatgtgttcagaagagagagaacacaacaagcaaccttgctctgaaagcaacaggctttcatgacaactaacccgttcccttgagaccaagatgagagctctcaggagaaggcctcatcgcctcttacatttctcagctgcccacaagcctgcagtggaagccaaatttcagcaagagttttggaggggacaaacaacacacagtaccatggtatctgggttccggctcagctctgcttggatgtctttcccactcggtgtcctgagacagcttgtgtcctggagtgttgtgtgatgataactgatgtgtcacgagattttttttttttgtcctgaacattgcaatctatattgttgagtaaggaagcaaaaatccatgaaaacaaaggagaaataccacaagaaatgtgcagaaaattctccctgattgacttggggctcagaaaactttaatattctgagtagttgacttacaagctcatgcctcagggaacctgggcttaagttagttttggcaaagtcagttaacatttttgcagccagttgactttggtggagtgcactcttcatcgttcataaaagagtagaataggtggtgttggtactgtgatgaggaaatttactgtgcttttcccaaatatgggcaccaagctccctgagtgttggtcacatcccatagggtgagttttccaagtcactgtcaccagagaggggaattccatatgatccagcagggagctacagctgcagtccaaacacaggtcacatgctctatgagaacatagactgtggttttctggctttttttttttttttttggtttgtcctttgtctgaactctgtggctgttgttattgtcacaccaaagcctgtactaacttctcatcagaaatgttttgcaagctatctttgttttctttctgctttcagggaccagagcatccgaatcctgggaagagcttcagtgcccgtggcttcccacgacattgttaccttccagacagcgagaaggggagaaaagtaagaacagatgttttgtagtaggcctagatggggcatttaatgctgtttctgcatcccacggaccacaaggaacttgtttcttttaattctgtacatatgcagtaatgaggtcatatttgagtcaaccctaggtaagaatagatatcattacaagttgttttgtctgtctgtctgtctgtctgtctgtctgtctgtctgtctgtctctgtctctctctctgtgtctctctctcactcactctctgtctctctctctctctctgtctctctccctcactcactctctgtcactctgtctctgtctctctctctttctctctgttgcatgagtatgatttctatggcattacatgcacttatgtgccacagtgtgcacatgaaagtccaaggacgactttaaggagtcagttttcaccctgccctcttgtttcttgctgctgcgttgactcctccagactagctagcctgagagcctccaggtgattcttctgtgtctacctcccatctccccacaggagtgccaggattacagatgcacatcacagcatctgacttctaacgtggttctggggatctgaattcaggccatcagacctgcacatcgagtactttcactcactgagccacctcaccagcctgattagaatgtttgtgcaggtggttgggagtggagcaacttttttttttcttctcaaaatcttattggcaataatttacgtactctaggatccttatctagagccctgttattttaaggctggtcctggggaaattccagtgttaactcctaagagctttatagaaactcagaactggaaattgttttatcttcttaggatccctggttgacctgatctgaacacacaccaaagcatacgccaaatgttctgggatcctaattgatgggaaattattttatttgttttcaggattccttgtaattcacgatcagggttctaaattgtgtagttgaagtaactgggctttcagaatcttgcctgatgctaagagggtgaaaaaaccacttgtctaggggaagtgttggggaaatgaaagaggcaagatttagtcagcttcctttccagatctgagaagtttactcaacaaatgtctgtctttctgcatcgcatgttagtggttatgttgctgctgtgggtgaaagttcaagactatgtaagcatatctgagttgttctagcaaactaccacagactgtagtcagagtggttcataaacagcaggtccttatttctcacagtgctcgggtttaggaggtccaagatcaaggtgctggcagattcaggatctggcaaggattcacttcctgctcatagacaaagcctcttctctgtgtgtcctcgccagggagaaagggcaagaattccctttgccagcctccttttataagtgtgttaatctcattcactgacattcattctcatgacctaatagaccccagaaagttccatatgataagactcaatttggaggtgttggtgagaagttcccatgaatttgggggggggtgtgcataagcattcacctgcagactcctcatgtgtcttcctgctatggaagtcaagctgataggtttccaagaagcctgaacaaaactttagggtggtcccaagggacatctgacacaggattcaaattgataaagaaaaccctagaccacagggatacaagaagatagggcatcttcatgataaagaaaattaacaatttgagatacccataaaataggaaaatatttctactcaaggtcgtattgagtatcacgattttaatattcttattgaagagatatcacataaaagaaatagctctgtgtgagcaacgtttacaccaagtgttaatcgtgctggatttcttgattctcagctagccagaggtttcaaccagaagagtgggggtttccattccctccctgtatctcataatacaccctattttctgtcctgcttcaatgtcaaagggtgtggctctgctctgtccttccagggaggcagaggatagtttgtaacaaagaaacagcagtatcaagaaagattcagtagtgctctgttctcaaactaagagtcagaattaaggcaggcagcattccatcaagaaacaaatttctgtgccttagcccaaggtctgcagcctaatgtctccactgtaaatctgctgttgagacttcagtcagagttccattggtagaacacgtgcctgccatgtaagcaaccgtggcttccatctctgacacttataaccaagcaactagcacatgcctgtaatctcagctccgctgttcagggtcatcctttgctacctgttacgtttgaggccaggctggggtacatacgactgtctcaaacaagcacaagaccacattcatgtttgcgagggcttccttagaccttctttatttaacacagatccccaatccttggacttatgcacattcaccatcttgaactcttgctttaagtgcccagatccactcagctcattcctccccctgccctacattctaagccatttgatcctttaataacctctccagaaggcctgacaccatgtcagttatcccaaactctacttctgggataaagctcctttggttaaaagaaattaaaattaaagtttaaaggaacacatccatgtttcagtggcctttccttttcttctttaaaaagtgtgcttgtcttagcagaatattaagaccctcctgagaggtcctgggtcttacaaagatcatatgccccaatacaggggaatgccagggtcaggaagcgggagtgtgtgggttgaggagcaaggtggggggagggtatagggggctttggggatagcatttgaaatgtaagtgaagaaaatatctttaaaaaaacagaaaagaaaagtaaaaaaaaaaaaaaaaggaagaaaaaaaaagaaaaccctccttgcagtacagatttaaaccatctcttctcaccaattcccttagatatgccattattagttagtgttcttcctacccactggtccatgaccctaaactttggctttgttgcaggttgggtataataacaccaagggctttgaagctgggtcatacttttgtttctgccacttattaatgatggtttagtgagagatcctgtttcaaaaacaaaacaaagcaacagggtggagccagtggtcagccagtggtctccaagtacatacacatacagttgtaggcatccatacactcgcacatgcatatactatgcatgcacacaacccttggggtgggtgatagagttgccatttaataaataaacaaattccatgcagatgtttgaatttggcaagagttacccagttattcaatgacagaggtgagattcaatctgtaagtgctaagtgtccaatttcatattgttctcctctgggttgcttagggcatcatgatgaaggaagggttgcggacatcaagtcaaatccaccatctgacaactggtgtgtggctgtgactgaacaacttcctgtggtctctcacccttgttgccctaggttctgaagctgcttctagtggcctgggaccgccgtctcatctttgccattggaacctccagcaccacgggcgagtccgatactgtcatctggaatgaggttcaccacaaaacagaatttggctctaatctcactggccatggctacccagatgccaattacctggataacgtgctggctgaactggctgcccagggtatctctgaagacagcacttcccatgaaaaggactgaggagggagggtactggggaccacagggcagaaaatggagagagtcaaggttgatgccatgcctcctgactccctcatgtcccttcttgtattattcccatctcccatccctctcagtcacagagggcgctggattaagatgatgtcgttcttacacttcatccaaaacgaaccagacacgggatgagggccaacctccttctgtccccatggagtcttcagttctgggtagtcaaggacctgcacctctccccacccctaagcagggagtatgttcagcatatttaatgtatgggcactattgaggtattccatatcctggccttgtgaagctgagatcc

SEQ ID NO: 66 - DNA, 1612 bp, Mus musculus
tgtgttttggtgatgagcgtcaaggctgctgtggtccatgggggcactgggcctccagcagtacgaaagaacatggccctctctggagtgggcaagctgccccagccacctggccctggagcaaagccactagacaccactggcaccattcgaggcccagggaagacagccccatcgcaggttatcagaagacaagtctctaatgcaccagctggggcgactgtaggctcccctgccagcccacaaggaagcaacaggaagactggaagggtggcactggccactttgaatcggtccaatctgcagcgactggccattgcccagtcccgggtgctgattgcctccggggttcccactgtgcctgtgaaaaacttgaatgggtccagccctgttaatcctgccttggcaggaatcaccgggatactcatgagtgcagcgggattgcctgtgtgcctcactcgcccaccaaagctggtcctccacccgccccctgtcagcaagagtgagataaagtccatcccaggggtctcgaacacgagccgcaagaccaccaaaaagcaagccaagaaaggtaaaaccccagaggaagtgctaaagaagtacctgcagaaggtccggcacccaccagaagaggattgtaccatctgtatggagcgtctcacagccccctctggctacaaaggcccacagcctacagtcaagcctgacctggtgggaaagctgtccaggtgtggccacatctaccacatctactgcctggtggctatgtacaacaatgggaacaaggatgggagtttacagtgcccaacatgtaagaccatttatggcgtcaagacaggcacccagcctccagggaagatggaataccacctcatcccccactccttgcctggccatccggactgcaagaccatccggatcatctacagtatcccccctggcattcagggaccagagcatccgaatcctgggaagagcttcagtgcccgtggcttcccacgacattgttaccttccagacagcgagaaggggagaaaagttctgaagctgcttctagtggcctgggaccgccgtctcatctttgccattggaacctccagcaccacgggcgagtccgatactgtcatctggaatgaggttcaccacaaaacagaatttggctctaatctcactggccatggctacccagatgccaattacctggataacgtgctggctgaactggctgcccagggtatctctgaagacagcacttcccatgaaaaggactgaggagggagggtactggggaccacagggcagaaaatggagagagtcaaggttgatgccatgcctcctgactccctcatgtcccttcttgtattattcccatctcccatccctctcagtcacagagggcgctggattaagatgatgtcgttcttacacttcatccaaaacgaaccagacacgggatgagggccaacctccttctgtccccatggagtcttcagttctgggtagtcaaggacctgcacctctccccacccctaagcagggagtatgttcagcatatttaatgtatgggcactattgaggtattccatatcctggccttgtgaagctgagatcc

SEQ ID NO: 67 - protein, 409 aa, Mus musculus
MSVKAAVVHGGTGPPAVRKNMALSGVGKLPQPPGPGAKPLDTTGTIRGPGKTAPSQVIRRQVSNAPAGATVGSPDQGSNRKTGRVATLNRSNLQRLAIAQSRVLIASGVPTVPVKNLNGSSPVNPAGITGILMSAAGLPVCLWPKLVLHPPPVSKSEIKSIPGVSNTSRKTTKKQAKKGKTPEEVLKKYLQKVRHPPEEDCTICMERLTAPSGYKGPQPTVKPDLVGKLSRCGHIYHIYCLVAMYNNGNKDGSLQCPTCKTIYGVKTGTQPPGKMEYHLIPHSLPGHPDCKTIRIIYSIPPGIQGPEHPNPGKSFSRFPRHCYLPDSEKGRKVLKLLLVAWDRRLIFAIGTSSTTGESDTVIWNEVHHKTEFGSNLTGHGYPDANYLDNVLAELAAQGISEDSTSHEKD

SEQ ID NO: 68 - DNA, 34512 bp, Homo sapiens
caaggcgggggcctgtttgcagagagccgggcatttgcatgaagcgactcgaccccacggagcagcggcagcagcagcggaccccggcggcggcggcggcgcgcggtcccagccaggcggccccggtgtcccggccccggtggatgcacggctggggaggagcccatgggccggagctgaggctgcccggggcggcggggcgcggggcagggggcgcggtcgaggcccggaggcggcggcgcaggaggaagcggaggaggtcgggcgctcggggcccgggaggcgggccgcgcagcgccgcagccccgggctcgccatgctcctggcctcggccgtggtggtctgggaatggctgaacgagcacggccgctggcgtccctacagcccagcggtgagccaccacatcgaggcggtggtccgcgccggcccccgcgcggggggcagcgtggtgctgggccaggtggacagccgtctcgcgccctacatcatcgacctgcagtccatgaaccagttccgccaagacacgggtgagccagccgcccctgaccccgccccgcctgctcccaccttcccaacctgccaaggtacctccctccctgtgaacccaccttggccacctagtcggcacttctgtgcagcagtgtcaccaagaggtggtggtgggaggcgattcactccgctgaatcctcgcaggatcctccctcccccttaaacatccatgcaaatagtatcagtgttgtggttttgcaaacccagcttcaacctagtcggtaacaatccactccccacccctttcatgcccccgcttttcagcagttggtggccctaagtctttctatgtagaaattctagggccgccccagactacaggcaatcccagcccttcgcaaaggcttcctgccctcatcccgtggcggccggcaccttggctgacctgaccctgttttgcttcaggcacgctggggcttgccacacgtcccctcacccccgatctcactgcctctgcgtctcctgtgtgggatgcctccccgcagctgggtcctgggtgtgggaactgggggaggaagaagggattccccggaggttctcgctacagtcgggtaagggaagcgccgggctccctgggaggagagactagggctggggtaccctggacgccgcggcattggcgaatgcctctgctacacactacatgcgcggaagcaacaggccggagcagatggagagaggagggggaggctcggggcttcggaatgcatggcagggaagccgctccctttgtctgcggaggaggaggacgcagattcctaaggagaaactgtccccaggcttcctcttgaaaccatagcctgtaaggaacccatggtctcctggagcgccaaactcctatcttttcatgagaatcaagttgtcactgtagccagcacaaacccgcttcccagctgacctgcctttccaggtcagagccaggaagggagcctccaggatggggccttggggggtggggagtgggggtgctgcccaagggagagcaaaactgcctctctttgctcggtccttgcttaatcgatgacccgggaagagtttctgcctccgtcagtgacaggtggggagggggccattgtttctggaattctggctcggctttcccaagagtgcaaccgaggagcctggagaggccggtgtgctggggaggacgtagagaagatgactcggaaaggccctccccagtgaacagctgtttgagcagagtctctctgcttccttggaaagcccccacatcctgtgtgctaattaggattgtcatgggaaaggggtatctttccaccctcatgtccccatctttagtcataactcccagcaacccctttgccaaggactctgcagacactggctgattgaggagagctttctggggagaggattctggaagtgttagaatctggaggggcttcaaccgtgtgtggagctgagggagactgggaggagcagagaatagagaggaatgtggggagattgagaaagaggattaagtgtggctgagggggagggagagaatgtcattgcgcaacttgggtaaaggttgtggaggtgagggtggaggcatcagaaggtgagggtggagggggtgtgtgttgggcggagctgagccacggaggtgggaccagagagagagagagagaccagcagttaaagcatctgacaggggattccagtcctggaaaaaaaaaaaagcaggtgttaccttttctatttcagagtaaatctctacagcatttggaaaaccacccttgtgacagaaacgtctcagcccctttcccacatttggaaagggcaaaggtggaatctgtgtttgggggtacttaggataggcaaggtatctacaaaggttcatgaccctttctacagaagcgaagttgtagagaaaactgggtggaaggaaagaagctacgtttcccaggtctgatcactcttacctgaggactgcctggtggtgagcaatttagtcagaggctggcgctccctggactttaaacctcaggcagagaacttgccctgaatcattttaaaggctgcctcagggtgtgtttatcatcagactgctgtggtttcatccgctcattgctagagtcagtcagccatcctgaatacctctctgctgtgcgccaggccctgtgctgggtgctgcggacactgggctgaattcccagaaaagctgggtctgtcagggcgcttgtcaaagaagaatagaagaatctctgggtttcttagctctgagccccctcctctcccttctccaccaacacactcatagttcctctcaatctcattgatgaggccatgacagggtaggaactttaaaccagtggctcccaggcaacctcagctaagcccttgcaatgtttaattaaattacccaccatccttaagccataattcaaagctgggaaccagaaacatccccataaacaaaagagatctggaagtcccctgcccagaggcgattcctctccttttttgttgcctcctctgtatggggacatttcctgacatgagagctttgtctttttagaagttgcttgctctgctgctgatagagtcctcaggctctccactcgcctgggctcctgacctcatccagcctgtctccagggagatggctgggaggtcccagacacccgtctgcccgcctctgtttgccctgggcccttctccttccccagactgcctagaggtctgatcttatttgcattctatgccagtcttctctaggcattttgggctagagaatctggaataagggtagagatggggtgagatagatgggactggctcttggccacttccaaaagcctcggtgggcccctctccacctgccatcatttaccttgactgggttgtcctttttctgttgtagggcagtgactgaagagctttacttcagcatcactttcccctgtacctttcagcatgcctgaccctaccaactccaggttttcagtagcaggatgcggaagatccaggctgagagtggagacaaacaactgtggctctcattccaggctcactgtttactccgtgaccttgaccaagtctctaaatggtcaggcctcatttttttttttttttttagaatgaagagcaggcttaagatttcttctttccctctttttctttcctcccatcatgcagatcaacaggtgaatgggttggcccctgtgccagtgatgatactgataagcacagggtaaaggagcgttctttccagctctgagttttctgtgcaggttttgccttctttatgtcttttaaagtggtgagaagtgtcagatggagagaaagagcatgggctgaattaaatgatttgacagaagctgagttttagccccgccacaaaaccctctaccctatgttagcatagaagtggaggaggcaggcatcatgatgaccacatgataattacaatgtgcaggatgcaccatgtgtctgcatcatggcaagcaccttgcacacactatcttgtttaatcctcacaacaatcttatgaagaacctattattatccccattttataagtaaggaaacaaattgaaagtgattaagttgctcaagggtttacagctagtcaatggcagggccgagattctgaattaggtgccctatgtcctatttctacattcagtaaatagttatggagcaactatttagcgcagtcactgttccagacatgtgagatatagcaataatagagcatccaaatatttctttgtccttacggaaaattctggtgggcgtgggggatgctggtaagagcggcctgggatttcttggacctagcgcatgccctaacggcagtgagtcacttacatagatgtgtgtaacatgccccagagacctcagtgcatgcctggaaggcatggccttccacttcccagaagctgaaaggttttgggtgctttgtaacgcaggtggaaaatctgtaaaaaactgattttctttctccttcttcatccttagtttatgaacatcctcaatccctatcctactggagcccctttccttgggttacttcacagattatctggtttataatactgattctagaaaagtcgagaactagcacatccaaaatagggtggtctctgaaaataatcagcgagtaaaatcccaccatgtctattgtctcaacactttggttctgaggtctgcatgctatctctgactctctgtagcgttgaattgaactcaacaactttccctccaaaaccagctcttcctcttgacatccctctgacaccattttaccactttcccatggtccaaacccaggattctttgactcattctgtcatttagaatcttatttgggcacctaataggtacaggcacatagaccctgtagcccaacagctgaaatttgagtgtacccatgcaccactcaaggtggccattcacatgcagattcccatgcccaggccctggagatgctggcctgtaggtctcaagggcactgctgattcaattcataccccaggagattctgacggaggcgatcctcaaacctcacttggaaagcattcagctactcatgatcaagtcttacccatttttttctctgtaaggtctctccagtttgtcaccttcttttcattttctatgccaacacctctccactcacctggaactaatggacagagtggctctggtcttgcccctcttttcttaacaaacttcactggctcttcattgattacaaattaaatctatcatagtctgacatttcagaccttccataccctctctggctctaacatatctttccaggattgtcttcttctatgccttatatttccctccaatctgccaaacagaggctacctctatcctcatgcattcctttagagttctctgacacccttcacccccccagctagccttgaggtcccttcttctgaaacactgtcctttgccatttttacctctcaaaattctttttgttatacgagtccatgccatttgttattcatttcttaaaacattctccacaccttgaaatgctttccaaaccatcattacttcatttattgaatcaatattttggagtgcctaggacatgcaggcatagagaatacagccatgagcacataccttgatgcccactctcatggtactcactctctagtgaaggggacagatattcatcaaattagccacacaaatacatatgtaactgcacattgagatgaatgctattaaaatttttttaaaaggaacaagaatttcacctggccaggactgcccagggggcctccttgaagaaataagctcttcctgtgggaagagctatggaaaagatgccagagttttggggaggaaccagcattgtgaagaggcccagaatcagagaagcctggcaatgaggagagattgaaggccagtgtagctgaaatgtgggcagttaggctatgagggggccatgtatgttggtgggtaggggggatttagatttcaacctaatgggaagtcatggaagggatttacgcagggaagggacatggtcaattttcctgccaacatgcattttgttggcattctccttgtgatacgttctgcctcataaatagtcattcacacacttgtcttctaaccctgtttcagactgaaagctaattgaggaatgcttgaatctgcattccccatagcagttaatgagtgctcagggatatgtgataaatgattaaatattaaagtagccagaagtcttcaatcagtcacagcagtttctggagcccttgcaactgccagacactgcattaggcactaagaatgcaaagagctccacagtggcattcctgcacccacttaaggcaggatggtatgaaaaatgttgctgaaacattggtgcacatcagcatagtcaagctacacagctcaggcttcctgagggtggggcctgggctgggagaacattttaagaaatggatggaaaatggcttgagacctgaatggtaaggagaatttcaataggtaaaaatggcaaaagaggccatttcagtagaagggacctagcgaattgtggggaagggagtcagggaactctgggggaatgcatgaggataaaaggggcctctgtcaggcaggaatagaagaaaacacagagactgaggaagacaaacctagaaaggtatattatagatccatggcatagtttccagaagttctgggacaactctcaggcatctccaggattgataacagtattgtgtttaaaaaaaaaaaaaaagtcttttaggcaaatctgtgagggggttaattgcacagtccctgccaccctggagagaatataaaatagtgccatttaaactctctaaacttaatttcctcatttgtgaaaggtatttctaggattgctatgaaatttacgtgggatatgtgaggtgctttgtaagtaataaagattgtgcaaataccaatttgagagcagcagaaggcagccaaatgactaggcagataggggcaggtccccagtgaaacctcactttcaagccaaaaacagcctgaaggctgaaagactggactgctggtccaagataaaacccgcaacccagagtgagaacttctgttcctgtttttgtaccctttcccaattgattctttctgaataatgccttttaaccaatcaaatgttgccttttccagtactacctacagcctgcccctcccctattctgagcttataaaagccccagactcagccacattgcagggactttcccacttttcggtaggggcaccacccctgggtcccctctctgctgaaagctgtttcatcactcaataaaactccccaccttgttcactcttcgattgtcagcatatcctcattcttcttgggtgtgggacaagaacttaggaactggtgtgcagccaaacttggcccaggtgggcagagtgggcgagtcatctcttgccatctcctgcagcaggttgtgtggccgagtgaggcccaggcagggtgttgccagccagaggtccctggcttgaaaagtgaccgagaagaaaatcctgtgtcagttatatagaaactttttctctctctctttcttacaccccctaccaccctacacacatacacacacagacacacacacacacacacaccctcacacaccctgagctaaaccttctccatggtttctccatcctgcttagacatataatagaaaataaattacaaaaataatcaccaattttcattgagctcttgccatggtgacaggtgctatttttgagttttacattcatttcttcatttaatcctcaaatccaccctttgaagtcactacccaggacccaaacagatgaggaaactgaggcttaatcacacagctggaagggacaaaaccacccctattggccccaaagcccatactctttgttccccagcaagctgcgcacttaggaaggaaatggaggcaaaccagggaactattgtctccccctcccctgcccccaccatcctgatacccccatgttccccagcagaggccatggtgatgaataggggattgttctgcttctcccttgtgtctctgaatgttgatgttttgggtcattaaggagcttggagatggggtggggggcaggttatgaccctggcaaaggcctgaatagccattgtttcttttcttccccccttgaatgggattctgtccccagtcttggtgtatccctctgggttggaggaggggtgggtcagaggctggtgaaggcagccttttctcaccactttgatggatagagcttaagctgacagatgcagagattccagcatcccaggggccctccccgacctccccactctgccctgagctagacatctttagccttaatgttgacaccatgaaatgagccctggttgaggatgagtcaggattcaggttttgagtgagggagaaagaggcaacagttacaggttcagttcccttacagtcctgccagttcatatctgctgtaccattaccctgtaataaccctgacctcttcccggccccaaagtgagactctgaaaattaagacaatcctacctttaggagggttttagcttcttaaagaaagacatcagataaatataaaattattctcatgaccattgagaatgttacttttgctactgatataagatttaatgttgggaaatatgagagagttctcccaacctgatttcccttcttctcatagtaacacaccattttttttttggacagcatttataaatgtatagagatccagctccctcacagccacttctgggcagccttcccgcatgcaggcagagtcttccctcagtcctctaggcttccacagccctgtattcttttcctcatgactcttggcacaagagcatttagaggaacagaggagaaggaatatgatcattatgagcacctactgtgtgtcaagggctttacatgccttagtgcattcatagggttcacatgaaatccagaacctcgcatgtacaaatacatatttgctgaataaataagtgagtcatatttagtttgtacaaaaactctaggaaggagttatcctgtttcccaggagggaaagggaggctgagaggttctatattagctagtaaatggaatgaatttgtctgcaaaccaagatgtcccgactgcaaagcaggaggcagtctttctgctaccttaccttatactgccacccatatccttcatgctgtaactcatctgcttctaccctggttggactatagacatcttaaagggagaaatgagtttcattcaaagctggcacttcaggcagtgtcatgcccagtacacagtaggacttgtttcatgtttgccattatggcaatggcatgacttgttaatgtcttgccactcagtgtaattgcatgctgactctgacctctcccctatcccaccctggcaggaactctccgcccagttcgccgcaactactacgacccctcctcggcccctgggaagggcgtggtgtgggagtgggagaacgacaatggctcctggacgccctacgacatggaagtgggcatcaccatccagcatgcctatgagaagcagcacccctggatcgacctcacttccattggctttagctacgtaattgacttcaacaccatgggccagatcaaccgtcagacccagcgccaacgccgcgtccgccggcgcctcgacctcatctaccccatggtcacagggaccttgcctaaggctcagtcctggccagtcagccctgggccagccacctcgccccccatgtccccctgctcctgtccccagtgtgtcttggtgatgagtgttaaggcagccgtggtcaatggcagcactgggcccctacagctgccagtgacccgcaagaacatgccgcctcctggagtggtcaagctacccccactgccaggctctggggccaagccactggacagcacaggcaccattcgaggcccactgaagaccgccccatcgcaggtgatccggagacaagcctccagcatgcccactgggacaaccatgggctctcctgccagtcccccaggacccaacagcaagaccggaagggtggccctggccaccttgaatcgtaccaacctgcagcgactggccattgcccagtcccgggtgctgatcgcctctgggtaagtgcttccacagctgcctcagagcatttactcagggtagagataggctacagcagatcttctggatcagaaggaggggctgccaagacttaagcttctcatcttgtgctgacccctggctgcaggtgaaggtggtgcacctggctgcaggtgtggtggataagggagggtttgatgcttggcctctgatctggactctggttgagactttggctcttcctagccatatgatttaggaccagatccctaacgtcatggagtcctaactttctcatctgtaaatgctggcagtaatacgcctgttagggtggctgtgaggcttaaagaagattgtggccaggcgtggtggttcatacctgtaatcccagcactttgggaggctgatgctggaggatctcttgagcccaggaggtcaaggctgcagtgagctattattgtaccactacactccagcttgggtgacagaatgagattgtgcctactaagcaataataggcaacattaataacattaattgaactcccactatattgtagtttggggctttacatctcatttaatccttgcaacaactctatgaagtaggcaagtaggcattatccccatttacagatgaagacagtagatgttcgcttgttcaagggtacatagctaatcattggcagagaatgggattcagactttaggacatctgacactagagcccagattctgactctgctgtgctcctcttctaccaagtacctaccacaatgcccagcattcagtaggtgcaaaatgagagtttctttcccgtagtctctctggaagccagagaggtgactccaaattggaataccggcctatttttagtgatgacttattatgtgccaggcactttccatacattgtctcagttatttctgtgacaacctgttgatgctgtaggtcctgtttgtattggtttttatgttcttgattttcctgatcataaaatcgaagtgacccagatccatatggtggctgcaacctttgcctgccagcccctggtttcttagcatctcacagccacccaatcttccctttctgtctccagagaggcctggctctgcctgtggcccctgatcccagctgatccggatggttttcaattgcattgggtgcctaagtctgaaagtccaggctgctctaagaaggtggttttggtactcagctgggtccctgcacacagaggtttggcactgggaggaggaatgaaggagggtacaccacagagtgggaagagtgccgagttggaaatccagaggcccagcccctactcctacctctgtcactggggtgagccacagaatctttgcaagatccagtggccttacctactgcatggagttatcgtgaaaacctccactaagggagttggcctcttggcagtgcattctcttactctgtgatctaagtgttaagcacagacatcctgctcagaattgatttcccaaggagaaacagagctcatgtgttatgcaataggggttggaacccaggttttggcctcctgatccactgttcttttggctaaagcccagctcctcattgtacacaaaggcagtttataacaggcaaaatgctggtgagatgcatgagattttcatgacttcccctgagatggcagaagtatttgggagcagagaatggatggctaaaccttgctgctgcttaatttctccccgatttcacacagcaccatcctgggggcctctaacagagttccagggtgattgctagcatggaggagggaggctcctgtgctgggtaagaacccgtcctccagaaactaggactgtctgggcttgaacccaagtgccttgctgtgtcagttggggcaagatttgcatcctctgtcttcagtttcctcatctgtaagatgggatagtaatagtaacttccttttacagttgtcttaagttcaaatgacatactaagtgtatagacttagcacagtgcttgacacataagagttcagtcagtataggctgctgtcattgtgattgctgttattattgttaacaggtgtccatgtaggggaagtcaaagctgagtagggtctgacatcccaccttgtctctggtgcccttgacaaatgccaagtgacttcatttccatcactgagggagaggcacccaggtggctttgaatctcgatgagggagtggagtcagcagctttatctatcttctttatttcctctgcccgctcatagaattggggctagagaatgggtggaggtctgagcagtacagtttcaaaagggctatagaaacaagttgttttcttttttttctctctactctgttttcctgatgagggaggcccctgcctactcctctcgatcttccagccctttgcttttcacctcttaccacctccctcacccccaatcccatcttctcctccagcctttcttggccatttaattagcgtgtttattccctttgtctggcattgccatcgaccttctgtcattgcagggcccctttccccctcctctctctgcccatgacctcttccagcaactttcccacggaaaaaggaagaccagggagggcgggaggagtgggatgaagagaaaggtttgggggcaggaacaaaagatcctgtgaattattcagagacagaagcaggggttttctaaagggaagcaagaagggggctgtgcagtggaggcaagcgtcacccctctagccccctcctctagagctgaggattctctgtctccagctaggcctcagttgccgtagagacaagatccttgtcctgctggaggattcctggactggtgcataactccgagaaaaacactgcttctcatcatggtgactgcagagatatactccctccctcaaaactcctttctctgccaccttgccagctctcttctcttgtcttagttttatgttttagcgacagaaacaaaagaccctccatatcagggaacaggccaactgaatgggggcagggggtgtcttatgattggccaagcagtggttaggacagacagttttggctgatggagttgcctgaaggatgtgagatgcatgcctgccattgggttgcagttttctaggagagctcaggcttttgaagctgaggccccaaaagggtgtgaccagctgggacttcatgggctgttctccaaggtttaaccagtaatagtgggggaggtgagatcaaccgtctcaagtactgcccagcactcaactttatgctggatacccatgacctcgagaatcagaaaattggaatattagagcagaaaacgtctttattcagcccaatgccccttttatacttgggaggtaaaagcataaacagtcacccaaacttgcacagggctcagctgtttacagttagttgacctagttcctaaatcctcacagggaccccatggggcagacatttaggatgccctgttcacggctgtggtaacttagatatggtcaacagaacgcagagaggctgtgcggctctcccaaaggcaaagcaggtcagtgctgagcggggctaaaacaaagactccctgactccagtgcagagctccttccattacacggttctggatttcacaagcaaatataccccttctccccagacccctccttcccagagcccagtgacaagcctacccgccatgtcattcctctcctcaagtggcagggacatgtatctctcccacctgttgaacccatagtcttcttgtgtgtcccaggtccacatgcgggcccttccctccctctctccacatcttgcccctgagttcttgagctgcctgaaatgtgtggtgttctggggattggattatttcctggttggccagattgggtgtggaaacctgccagtccagtttatgggaacaaaggtggcttttgtcacccagatcacagctacttatcagctggagtgggggctctgaagatggcgagggagaaggtaggtgcaggtctgggttctgagtgctgccccctgctggggagctgggagcaggacacaggaagccgggtcttttccccaaacctctccagaaagagctgggcgaggagaatcggccataagtggaggactcagggcttgggtggccatttttttctcagatattggtgggaagttgtcagccagtttccgtagcgtcttctaacccaagaccctcacagttttacagatggggaaattgaggctcagaaaagttaactaccttagcgagaaactcctggcagggatgggacttgcacctgattttcctgactgcccatccaccataccatgcctggccctggggagcaggtcacagagtccagaaacaagtccattcttcttttcttggcccagtggcccttgttttgtattcagctttctcctccatcctcccatcctggtttgatttatcctggggacagtttcagaagaaaagcggctttgggtggcctggtgagacacaaacattcccattcccacatctgttctttcacatccatctcccagcattggtgcacatgtcatcatccctgggaagggacagagccccaggcaggctcaaagtaggttagagctggggaagaacctcccttacaggcatgaggggcagagacagaccccactgcttggcatggaggtcccgttgcagctttccccattcctagtggtgggtttattcattacgctctctgagtttctggtctatgtttgcagtgtgggatgttataaggattacgtaaacacaagagcctggcatagtaaatgggctctggtgccagattttctggcttagctgtgtgatcttaccaagtttccttaacctctctgtgcctcaatgtagttgtctctaaaatggtgttaatgactgcacctcttgcataggatgttggaaggatcagacaggtttatatgctgtgagcagttggagccactgttggggggaggtgagctctgtgcatgttggtaactgtaacatgtgagtgaagaagggccatgagccatgtgttcactgctgacccccagcatcgggaatagcaaacaacacaaagtagggctcaataaacactttttggatggataaatcaatacataaatattctttttttcctcctcttgctttcccagcaccatcctgcccccacagcagagctgttggctttgcaggctgtctgcctcctggagtcatctgtgaccgggtccattagcctctccaagcccagctgcaggagtgtgggtgacagagaggatggcgcaagacccagacccatgtgtcccatattttccaagtcagcgctgtgggagggccgcgcctttcccaggcagctgtgccatctcctctccagcctggctggagttgctggggagaaggacagaaaggggaggaggctttgcctaatatttatatatgtctcagggaaaaggagaagtgacagctgttctagcagtggttccaaatgttaggctggggattgctacatctgcagcttctcaggagctttgggaaatgcagcttctcgtgctccacaggtggatattctggtctggatctgggaccttgtccttctaaaaacatcttaggtgactcttttgtacaccctggtttgaacttgcttctttgttttttcatccttcaacaaatatcaattgaatgcctactagtgcctggctctgaacaaaacagacaaagatattttgccctttgtagagcctagattctagaagggggcataataagcaataatttcttttaaaggatcctaagtagagcaggagtcctggcgtgggatggaggggtgggtagcaatattcaatactatggtctcaggaacctcacctgataggtaggatttaagccaggactgaaggagttgtaggaggaaactaagcagttgtctggtggaagggcattttgggtacagggaacagcatatgcaaaggctctgaggcaggagtgcacctggctccttgagagctgagtgatatgagaggaagcaagatgaataagagaagctgggtggcagtgttggcagatcgtgctgggctctgtaggccttgctaggactttaactttgactctgagtgaactgaggaacatagttctgaggttctgagtggtggcatgacatggcctgacttaggttttgaagatgtcacttcctgctgtctgctgtgttaagcacttaactgcattttattagaattaaatactggtccattttgttccacgtgtcaaaatgacattgtatctgctctttcctttcacagggtccccacagtcccagtgaagaacctaaatgggtccagtcctgtcaaccctgccttggcaggtaagagaaaccccaggatgctctgggttaaggtagagaaatcagagtgatgaaataggtcatgagcatttgtggaaaaaaaggagagaatctagatattaatgaaagcaaatggtgattttaggaattgcatgggaagggtatgaagagtttggaagagaactgattactaaaaggaaagcatgcaattgaagataagtgagtgaatgaataagtttctggggaaagtacagggtagagaatccaggaattatgagaactttctgctggaaaggaggagagtaggttaatggggaaagaggaatttggggaatgttgagagctaagtctccagtctttcctcacccatgccctgccccttccaggaatcactgggatcctcatgagtgcagcggggctgcctgtgtgtctcaccaggccaccaaagctggtcctacacccaccccccgtcagcaagagtgaaataaaatccatcccaggggtttccaacacaagccgcaagaccaccaaaaaacaagccaagaaaggtaccagcctcttgtctcgtggggtactgagagtcaaagacttggctgtcagccctgagtctgcctcaacctccaagggtcatagccacggcttcaccctctgtgcctcaatttctgcatctgtaagtgggcctaaccagtaaatcttgacgattataccacagctgatgtgtatggatcagatggaaacaccttgagaaataaaaatatacaatgcaaaagtatagaaacataaaaatataaggcgtggtacaaagaaaatatgttagaagagaaagatgactttggcattggaaccaaaacagactggattcaaatcgtacctttgtttcttgcaagttgtgtgaccacatggagcccctattttctcatctttataatgaagtaaaaatagtcacaactggtataactggtatccagcaggtatatcctggaatgcatccatgacagttaggaagtagtccctgtcctgtgtccccctagaacctacagaaatctctgctctgaaatcctcctttaggaaccccctcctacctgcaggcaatccggcaaataaggggtcaatatctgtaccttcctagcactgcaggaccccagcttagctctgtggcttgtctttctggtcactggcattagttgttaaatttgaccatctccctaagccccaatcttgcaggcttgtgaagtttaaattggatcatgtgtgtgttgcacttagcccagggcctggcaagaaataggctcttaattactagagcttaattcttacaagagaagcagggcaactggaggaaagggcctgcatcgaagcttttggctgttgcatgatccacttcctcaaacccttgtcctacttttccagtccgtcaagatttccctgcttaaatgagctcaattgccttgctcatagtcttatcggaaataacagcattttacactttcccactcttcctgttattattaatagtgcatatcgggcccttatctggcagagagctaaagggcagtacatccatttgctcattcaattgtcaaagcaaccctttgaggtagtgctattgctcatccccatttcataggtgagaaaacagaagcttagagaaattaagggagtggcccaaggtagcactgatcatttttcaggttatatcatcccatcctctaccttcaggttgggctaccttttaagagtccagtcccctgaaaaaaatccctaaatcattgcagcccatcaggatgcttcccagaggatcacccttcccctgctgcaggactgtgctggctggcagtgacagtgccatccacagccaggaaagattgttctggagtcgtgggtcataacttccttgtttcccataaaaataatcacactttgacaccacattataaattgagactacacttagcaaattgtaaaatgaaggtggtaagactgcctaacatctatttaacgtgtaacagtttgcaaagtgctgttatcaaatcatttgattataaggaagagaaacccactcaactcttctcaattaaaaaagtggtttgttgaaaataggcagagagatgtcagaaaagggactgcaagaaataaagccttctcgtcaaaccatctcactagcttttccacaatccatactctcttccatgttcttaacttaaattgcagaaggaattcctcccctttttgcttttaacttgcctgataacgtccccctctaccatgtctagcacgacaaggctgtttgatctcttacctctgccttggtggcccactgaacctcctgtctctgcaggtaaaaccccagaggaagtgctaaaaaaatatctacagaaagtccggcacccaccagatgaggtgagttcagggttagaagagcgggattcacctctccatcacccacaagcatttcctcttctgctgttggtttctacaggatatggcgggggctgcattccaagttctcatggatacagaactggtcagaactgacactgagggttcaaggtccatggtccagagctgcagctgcacctcaatctctcccgcctcccccttcagcatagtgctggttgtttttaagctaccttaacatgacagtctcaatttaggaaaaacagtgtgataagccacaagaactcaccttaaaatgggtttgatacagaacagtggttctcaaccagagacaatttggcccctgagggaacatttggccatgtctggagacatttttggtcgtcattattctcaggaccttgtgagtagagcagaggccagggatggtgctaaccaccctacaatgcccaggacagtcctcacagcaaagaattgtcctccccaaaatgtaaatagttctgaggtttagaaaccctgttggacatttatttaaatagccgtccctctggtacagttaaaatacaattcctttacattccttaaaaattcaccttaagtaaagctcctcagtgggcttgttgacagtatttgtttcctccataagccgttgaaggacaaaacagaaggacagtgcattgttatagccctcacgattatgataatttagatgatgagcccaagttaatcagtaccaggaattatttcaggacgttgttgtgtaaagacaaaacgatatttagattccagaaagcacttacaccctgatttgtgggtgttttagaagagaagtggtaagagctcatctgacctctgagatcatgtggaaatctcccaggctgagtgagagctgacagcctctctgctgtgtctcctccctccccaggactgcaccatctgtatggaacgcctcacggccccctcaggctacaagggcccgcagcctacggtaaaacctgacctggtagggaagctgtccagatgcggccacgtctaccacatctactgcttggttgccatgtacaacaatgggaacaaggtcagtgccagcctatggggctcctgccacccttcacactgggctctggagtagcaagatggtgaaggccctttagggcccttgctcaagtgatctgggaagtcttagaggttatccctaggcaagagtgatgatcttggctgttctcagcaggatcagttctttactaaattacagtgctggtaagacctgtcttcaccttcccttttgggctgtgctatctaattctccatcttcggtgtcaggtctaagagtggggtaggttttgcccctgagggttctgaggggagtggcccattgtcatggcccattgctaggtgaagtgtgctcccatcagtgagagagaaggaagttcttatcacagcgctagacccatggtgagtattcgttcataccattgtaaatgggtttcccaatcaccctttcttccccagggttagtgattttcagctacaattttctttggacaatttcaaaacacccttgattggcccttcaaaggtactaaagactgttgccaaagtacacctggtaatccctgccctagaatcccactgttggaagaggggaaggctgtttgggatgcttgtcttgtctattatctgacaatgcaatggtatcccctcattagagctggttctttggaatctggaagactccataggtgatcattctctccttacagtgtctgagcatttcctaagtcattgactcatgttctttcgtgtacctgagataacttttactccctatttccatgagtacttatttctccaggccaagcttagattacatcagagtctgagatctccctgatagctcccaacctctcactaagcaagaagtatgtctggattatacgtctgtctggtctggtctatacgtctcttactgtgggaaagaagtagaggtaagagaggtgggagacctgagcttgaatcctggcttattagctgaatgaccttggacaaggttttccaatctctgagagagactttccatctggaaaatggagattaaaactatacctactttatggggtcttatgctattattattcaaattgatatcgcctttgtattaaaggctgtaattttttccttcatcttcatgtagcctatttgattgaagttcccaaagtgctttcttggtgtccctgagagacatgcttatagtggtggtcagtcattgatgggggatgcaaatctggatcacttgctcactttcccaaccctgggctaaaaggattcattgggatcttgcatttcaagaagttattttgggcttaaaggggtttcttagcacatttgttccctatttgatgtctatattcaagaagaatatggtaactctacatttatttccatggggctttcaaaaatgtttctcaagagtctatgctttattctcttttgcactaatactttgaagcatgtgtttttattttatcaaacacatgagagaaaagggcccaagaagaaaggagtgattcaccctaggtcatgaagcaagtcaaggccaaagcagaaagtgggaacctggtttcagagaatagtcaccctgaatacgagctattgctttaagcgagtagactggagaagtccctaaatagctcagcagaggatccctgtcttcccgaggagttggggatgtcctggcaagctttcatcccagctgcgcagcagcacattttacacacgttgctcccagcccatgcgccttccttctctttgcccctcctttttgcgagcctgggaataggattcggtgtccaggccctcctccaggcagcacctcaccaggtcctgcagtgaaaccgtcaccctgtacacccctgcatccagaactgcctcttcccactaatggagccaccgagttgcaatgcaaagctgggggtttaaacagaccccacaccctgacaagcaggaagtcctttaatcttgctgtgcctcgattttcctctctacaaaaaggggctaataatttcttccaggccattgtcagaagctaaagcctaaatgaaacaagaaatattaaactctttatagtatgatttaaagcactataattactggcatcattctctcttctaggtatttgtgcagaccttacactctatccttctaagcaaattcatagctattcttcaaggaccattttcttaaagttatcctcatttactccagctcttagtggccaatttctcttttcatagcagtagtttccaaacctgtatgagcatcagtctttccatggaaattataaaaatgctaataacatttagatacaccacatgctaagatcttcctatagattatctcatttaattctcccaacaacccgatgagacagatattttttatccttctcctataagggaaactgagactcagagaagttaattaatttgtccaaggtcacacagcagtcagatggcagagctaagaattacgtctaggcagtctgattttcacattcacagcctgaaacattatgctttgcagcttcccagttcttactcagtggacccgatgtggtgcccaggcatctgtgtgattaacaagctctgtgggtgattctgatgctcaggaactgggcagttgctgctctccaggtctttctgtctgttccacccatttggtactgagtggctgaataatgactccctgtgtaggctcctgccctagagagctggtcccctcctcagggacaggggcttctcttacatatccctcagcatggagcatgggaccagttgtggaatttacctcctattactttggagaaagcagaaatagcctaggtgactgggctgggagggaaaaactaagatctatcactcaccagggtgcattttgttcccctggcccttcatctctggtaccttttgggactgggtgggaaagttattaccaaaactgtttcccaatctggctcttctggccttggcccctcaggatggaagtttgcagtgtccaacctgcaagaccatttatggggtgaagacaggcacccaacctccagggaagatggagtaccacctcatcccccactccttgcctggccacccagactgcaaaaccatccggatcatctacagcatcccccccggcattcaggtgagcctttctctcaggtgagcctttctgtcaccccttggtttttattgttctatgtgtttgtaggtaaaaagttacatatgaagagtctccttcccacacttttccgccatctacccagccttgcccgctgacactacatcccccgactcaacactattgttctgactttcctatgtatccttccaggattctttgtgcacacacaacagaaaatcgcatccacccttcccttttttttttcacaaacagtgacatttaggcacattgtttggcaccctgcgcttttcagttaacaatgtagtctgtagatctttccacatcagtatagagagagcttcctcgttcttgtgtctgtgtaatcatccattgtataaatgtaccactatttgcattcagcagtctccatttgatgggcatatggattgttgccaatctttggctacaacaaataatgctggaatgaataaccttgtacacatgtgaatatatctgtagaataattttccagaagtggaatttctttgtcaaacggtatttgcacttgtaatttgatagctatacttggctttgattttggtgggcatttctttcctcttttgattctctgaaagacagtcctgaagaacaaatctgaacactattcctgccagtaaatacaaatgtggcaccttccttcacacaatgaagctttttctgagtgttctgggccgttgactgtatgcatttctttagcaaatattaattcttctatcctcttttcctccctcctagttttcttcttccattttgtcttttatttaacaaacatggagtgtggattatggtccagacatgttctagacattggagaagcaatgagcaaagtagacgcaatccttgctccttgaagcccctattctagtggggccaggaaggccataaaggaaacaaatgaataaacaaggtacctccagatagtgatcatcgatgtggaggaaataaaacaggaagttgtgatagcctgtaaaagaagtgaataattcatagttcttcctggaggggcttaccagccagtcaggggaagataaatgtacatcactaataaaacctctgagatgcaacgtagacaaagtgagaacacaggccttcaaagtccaatggacctgggttccccttcctagctgagtctttattagctggtgccttcagcccaggggttcccaaccctcaggccacagaaggggccgcacagtaggaggtgagtgatgggtgagccagtaataccacctgtgctctgcctcctgccagataagtggcagccttagattctcataggaacacaaactctattgtgaactgtgcatgtgacggatctaggtcgtgcactccttatgagaatctaatgcctgatgatctgtcactgtctcccatcatgcccagatgaggccatctagttgcagggaaacaagttcaggtatctcactgattcttcattatggtgagttgtgtaattattttgttatatattgcaatgtaataacaatagaaagaaagtgtgcaataaatgtaatgctcttgcatcatcccaaaaccatcccccaccaccccggtccattgaaaagttgtcttgcacaaaaccagtccctggggccaaaatggttggggacagctgttttagacaacaggcccttgaccttttggagcctgatttcttcacctgcccagccaggagcccaattggcagaggtttggtgagaatgggaaataacgtttgcctatgcatattgaagaatgagcacagtaccaaggtgctcaatacctggtcgtcaacatcattttaggtcctgcttgtcatggtaaagaggagggcttatatctgtctgtctgtctggaagggttagaggagactttctagtgcagggaattgtctagttgagtctagaaagacataaaaaaatggaggagaacatttttagtgggaggaggtaagagggttgtagaggaaaaatttgagtatcaaagggcaagaaggaagggtttaatttggggctcaagactcgcaaggaagtagagggaggaagcatgaaggagatggagggagaagactaggccgtgagggaggttgcagccagatcatagaaggcattgagtaccagggcgggggtcgtggattttaatcatcagttattggatgtgcagttaggaatatggaccattgtgtgaatggaattatgctctaggaaggctagtcaggcaaaagagtcggggatggccagaggaaagaagaccaattaaaaggccactgccacagtccaggccttaggaatggggctcgaacaagggaaggccgggataaggaagagagagatatggttggatatggggtcaggtgagacttctggagtgtctcagaggcaatgagtcaaggtgatacagacatgaatgaaaaaacaggacttgggagaaacagacgatgttctggtgagcagtagaacagactgaagcttgcaaagacaaacgtggggctaccatttcctccaggattaaagagcagagagcccacactaggggatacaggtggtgcatgctgccttgacgggtaccacggtggctcctcctgaaaaacccaagctcgtatcaagggaaatgcagctctccactgttaggatctacattcatccctgagtgtaagtagcaggacactcagtgccatgtcattcaagtttccagggaccacacaggcatgcgcttctgtgaggagtcgagaccttcaagctctgcattcactgcagagaactattcccttggggagaaactctgggttgggctgaggcagagtcgtgactgctccacttagcaacgagctgggagggcacagccgtgttgggtcagtgccaggcaggcgtctgagttggccacacaagcggcagtcgaaggcagatcaggagcagtcagagccgtggttagaactggcctttcagtcaggcaacttgatttagaaacagctggggccatgggaaggttgtaaatttgtagtgatttcctgtaaatgtcaaattcataaatgttggattctgcatctccgagaaggcgttgttgcttctttcagctcacggtgactgctcccttctctgagaccccattgcatttaccatgtcaaaccataggtgatcttgaatcatgttaactatttaagaaaatggaaagccacagaatttcttatcattttggaaccatggtccataataagagaaaaagaaaaatctgggtttttttcttgcagttttttcattcatttgttcttccacactcgttcatttattcaggcaggatgtatttgctgatcatctacgtgagaacttgtgccaagagctgcatggaagtatcagttttatactggttgaatctagaaggggtttttaaagagggttccatccctcagggggtcagggatcctcagaaattatagacaaacctttgtatggggaggaggggatttggtcattgttaccgggagaaaatttgccgcttttcatgagcttctcaaagaggcctgtggactcattctgggcactgattaggaaacctgttctcactcaattgtgcttcagtttttttctcaccaagtggcctgagactgcctacttaatagggtattgggtggcaatagttgaaatgctgttagaagatttttagtcctgactatcccaattcctattgttaaagaagaaaacaaacaaaaacccatgaggacaaaggagaaaatccacaagaatcattcagaaaattctgttggcatggctcatagcttggaggcactttctttattctgagtagttaaaaatccagagtgtgcctcaggaaacctgggcttcaattttagcagagccactaatattacagaagccacatatcttctctgcactgcagatttcttcttttgtaagacaatagatgatgaagatgatggacaatgatgttaaacatttactgagctcttactactcatcaggcaccactcacttaacatttataacagccccataagggaaggactctgcgtcattcctgttagagagatggggaacaaaagccccaagagagggttccagctaatgcagtgggaggtagcagctctgcatccaaacccaggtctaaggacacagaaacacgtgctaaatgaccactcacagtgctttttgggtctgttctctgttgaagctttatgggaattattattgtcattattattgaaattagtcacagcctaaccccgctcttatcagaaatattttgaaaaatgccatttgcttgcttgctttctgctttcagggaccggaacacccgaatcctgggaagagtttcagcgcccgaggcttcccacgacactgttaccttccggacagcgagaaagggagaaaagtaagaccggaagtttccacatagaactaggttttagaatagatcgggcagtttacttctatgtcaaggcctaaagttttgcttcttacaatgcacagaccaaagagaactgtgtctcttttaagtctagatgcacacagtaacaaggtcaaatttgagtcaaccataggtggggtggctacgattagaattaggtgggtgggagtggacatttagtttgtgtattagcctgttctcacgctgctaataaagacataaatgaaactgggtaatttatgaaggaaagaggtttaattgactctcagttccacgtggctgggaagtccccacaatcatggcagaagatgaaaggcaactcttatatggtggcagtcaagaaagaatgagagccaagtgaaaggggaaaccccttataaaaccatcagatcttgtgacacttattcactaccatgagaacagtataggggaaactgcccccatgattcagttatctcccactgggtccctcccacagcatgtgggaattatgggaactacaattcaagatgaggtttgggtggggacacagccaaaccatgtcagtttgtttcctctctcgggtattagtggcaataattcatctattttaagatcctgtgtctagagccctgctgcttaaacgctggtcctgggaccagcgccagtggcaccacataggagcttgatagaaatgcagaaccagaagccacttcatcttaacgagatgcgtagctgatctgacaacacattgaagctggagaaacactggtctgggatagggatcttaatatgtagattattttctttgtatgtactttcatattatttgactttttcccaaaagggcagagaaaacaatcattgggtttctggattcctagtgattcatgattaggcttcagtggttctatgaactctaaaattagaataaaaaatttatgtttgtatttctatggatgaggccagaaaatcattggattttcaaaatctttcccgatctcaaaaggagtaggaaccattgatctaaagggagtattggggggaatattagacaagatatattttagtgagctttctctccaaatttccgctgcttacttcaacaagtatttattcgtcatgcactttgcttgtcagcagctatggctatgctgttgctgtgggtcagtgtcttagtctgttctggctgctgtaacacagtgccatagacggggtgccttataaacaatagacacttatgtctcacaattctggaacctgagaagtccaagatcaaggcacaggcgggtttagtgtctggctaggacttgttcatatgaacccatcctggtttgtaaatggtgccttctcactgtgtccccacatggtagaaggggcaaggggtttctctggggcctcttttataagggcactaatgtcatccattagggttctgctgtcattacctaatcacctctccaaggacccaccttctaatactgtcaccttgggggtgaggatttcaacatagcaatttcgtgaggacacatattcagaccatagcagcagcttcagtcggctccacgtgtcttcctgttctgcaggccaggtggaaggagcagccctcctgtggcccatgcccttcccatggaagggggcagaggacaaacagagaacccaagcggaagtgtgtaatcccatttagagcccctggatgcttgttacttccactcacccttcacaggccccaacaagtcctgggcaagccagataaggggtgggacagtgacctttctacagggaggcactttgggtttcatgtcaaagggtatggatatggtctccccctacaggtggcaggcaggtattttggaagaaatagaaaatcaaccacactgagaagatgtgcgagtgcagtgtccccagattaggggtcaggaccatccctgatactgtttaccttgaagagccagatttctgtgcttgagccctggagctacatcccaactgttggcgaaatgcctccactgtaaagtcctgcggttaaaactagaatcctgttgccaagagctgcttttcttccaggcctccctctttatgttaatgacatattcagagtccctggtacccagatgggcacattaaccttcttggactcctgttcttatccactgcatccatttagctcattcctccctgcactcactgccttccaaaccactagactcctcttctaaccctgccactgccaacatagataagacttcatcttttacctgctaccaggttagtttcaaacagtttctagaatcaagctttttgtgtgtaaaagaaataaaatgaagaaacaacaaagtgcactcttctcagcttgacatataagacctactacagtgtgagttaaaccttctcctcacaccaatttctcatccttatccttcacatttgctgttccaggaccctaaccttgggcttccttgtagattgaagtataattagaggatgggctttgaagccagaccagcctgggttcaagtcccatttctgccatttactagctgtgggaactggttggcttcatgtcttgaagtctcagtttcctaatctgtaaaatagtggtgatgatttgcatctgtatggacaggatgttggaaaaattaaatgaaaatatcatttgtaaaatgcacagcatagtgacagcaattgtaatttatccatgccttgggtttatatttgtttactatgtctatacatccttctctattgatatgcccccaaatccttcccttcctttactactcagctcagaagcaacctccatgaattctagactgattcccatctgagagtcaacagagtggtgattcagaccatgggctatggagtcaggcagtcctgaaatcaatcccttaaccccaccgcccctagccacttactagctataagaccaaggcaagtcttttaccttttgagcctctgtttccttgagagggatgatgagagtccagttttctgtcatttaatgacagggatatcattattattagacagcttcatcatcatacaaacatcgcagagtgtacttacacaaaactagatggaatagcctattacacagctaggcaatatggtatagcctattgcttctaggctacaaacctgtacaccatgttattttattgaatactataagtagttgtataatggtaagtatttgtgaatctaaacattgaagaggtacagtaaaaatacagtataaaagataaaagtggtatatctgtataaggcacttaccacgaatggtacttgcaggactggaagtagttttgggtgaatctgtgagtgaatgtgaaggcctaggacattgctgtgcactactaaagactttataaacactgtacacttaaactacactaaatttattaaaactacttttctttcttcaatcataaactaaccttagcttattgtgacttctccatttaaaaaccttttaacttttttcacttttcacctgtttgtaacaacacagcttaaaacacaaacacattgtacagctgtagaaaaatattttctttaatccttattctataagcttgtttatttttaaaaactttttttttttttacttctgaaactttttgtttaaaatgaacacacgaacatataccttagccttgacctactaagggcagaatcatcagcatcactgtcttccacatccatatcttatcctgctggaaggccctggggacaataacaggagtggaactgtcatctcttatgataacaatgccttcttctggaataccttctgaagaaactgcctgaggctgttttacagttaacttttcttttcgtaaataagtaggagtgcactctacaataatgattaaaagtacagtatagtaagtacagggcaataggaatttctcagctctattgtaatcttgtgagatcaccattgcatatgtgttcagtcattgaccaaaatgtcactatgtgtggcacatgggcatacctatatcatctgattactgtaacgattatatgtcccaatgcccaacactgagaaagtaaacactcaggaaatagcagctcatatttctaatgtctgctttcattactaatactattatggtttcctctcctccagcccataccatgtttacagtagttcagttttcaacccaagacattttcactggatgctttttcttcatgctggacactactctgaccaaggcctggaacagggcattagccactagtcttgctcaacaaacattttttttttaatttaactgatttagaacattctgcaagccccaaaactttctttgagcctcagttttctcacctcgagaaagtcagagtgctccaagatgtcactagaaaaatagtgcacagcttcagctttggataaattaatactacattgaggtagtggtggcagtaatgaagggcagaacttcagaagttctcagatcataagcgccttcaactcctagatcctgtctttcaaaatgcagccgttatgttggcagataacatttatcaattagtgcgttgtaggcactggtgtgaaaatacttttcatggagtgtccagtaagatgttcacaacgtttagaggcagattgtaccattgccatttcataaaaaaattaatgttcagagaggtgctataacttctccaaggtcacacagttattcagtgacagagccaggactcagcctgtagctcccaaactccaagtccaaatctctttctttcccctgggctgcttagggtatcatgatgcaggaagggatggggcccttgggaggattctctaccgtccaagggatagtctttgactgccaattaatgtctgcctttcatgtcccacttttatccctctaggttctgaagctgctgctcgtggcctgggatcgccgcctcatttttgccattggcacctccagcaccacaggcgagtcagacaccgtcatctggaatgaggtccaccacaagacagagtttggctctaatctcactggccatggctacccagatgccaattacctggataatgtgctggctgaactggctgcccagggcatctctgaggacagcactgcccaggagaaggactgaggccagaaaagctttgaggtgggaggggccatggagactgcaggacaggaagtgaggagagtgagtcaatgtagaagaagttggtgtcctgccctcccaactttctatcctcccctcctgccctgtgtccatccctcatccctcccaaccacagtgggagccagactgaatatagcgacatcattcataaatctcatccaacacaaagggagatgggatgagggccatcctgggtctgttcccatggagtttttggtgctgggtaggcaggaatcccctccctaccccacctcccaagtaggggcatggtcagcacacctagggtatgggcagtgcttaggcactccatatcctggctttgggaagccggggtttcttgcctcagccggcttcttgctacttccactctgctttgagactggagtttctgctattctccctctgctggaggcagggagctctcactgtgcaaggttggggggtgggcaaaggggtgaatcactaaactgctgtgacatcagaaactgatgccttggtgtagagcaaggaagcacttcttcccaagagggtcggagaaggaaaagcctctgggagcacattctgctgtcatcacagtccttggcttctctgggccctcctctcctcctcacagctctcacctgtccaaagaggcatctggttctctcatgtggatggatggactctggggttcctctttggagtggcatcccatgatgctgtttctagaccctctctgatcaaaccagagcctgcatcccactgagcatctgaactgtcctcagggagaggagcccacagccttcttcccaactcattctagaccagctcaaagattccatgagtttcatcgagtcactgtgagtggagcccatgctgggctctgtgccctctgtgtctgtgcatgcgcgtgtgtgtgtgggcgtgtgtgcattgctgggccagcttgaagggaaggcccgtcatgtccctgcactctgttttgcaagatgccaaaccccagttctgatggggctccaacagccaggctgtggtcctttgacgttcctcacctgttgccaacctatcccgtagtgaactgaaaccccaatgaagacagaactgtgcctggggagatgcaatgaggtgagggctgaactcatccttttatatttcttttcaagattggatcagagctcatctccatccagtcttgtttctatgaaggcttcaatctgtttccatgcaaatttgctaatcagagcccagagctgctgggtccctcatctccctcatctattatagattgacttacagcagggagagaatctctttagctcattcctaatggagttgggatcacaatatggtctggtccaatctgcatcttgttgtgtcccaagaccctatctcctccccaacattcttattgcctttggctcccagtaaggaacgaattgggggccagggaggagaacaggggggatcaagaagggaaacccaattccccctttgaaagtgggttctttgaactatgtgtttgggggaagttcctctggatactaatttgaatttatatacctcatgttttgggggtttgacgtatatatatatatatatatatgcatatatatttcataatatttggaaggtttttgatgctagaaaaatggaaacaagagaaccttcaaaaatggtacttagatgggaactggaggccaatctttcataaagccagccccatagctgcttgctgttaggcctccagccattttgacattggggtggatagtcgattcacctgcctgtcagtcgattcacctgcctgtcacccagttctgtggatgtgctggtgctgagcctttgctctctttccaaatggtta

SEQ ID NO: 69 - DNA, 4037 bp, Homo sapiens
caaggcgggggcctgtttgcagagagccgggcatttgcatgaagcgactcgaccccacggagcagcggcagcagcagcggaccccggcggcggcggcggcgcgcggtcccagccaggcggccccggtgtcccggccccggtggatgcacggctggggaggagcccatgggccggagctgaggctgcccggggcggcggggcgcggggcagggggcgcggtcgaggcccggaggcggcggcgcaggaggaagcggaggaggtcgggcgctcggggcccgggaggcgggccgcgcagcgccgcagccccgggctcgccatgctcctggcctcggccgtggtggtctgggaatggctgaacgagcacggccgctggcgtccctacagcccagcggtgagccaccacatcgaggcggtggtccgcgccggcccccgcgcggggggcagcgtggtgctgggccaggtggacagccgtctcgcgccctacatcatcgacctgcagtccatgaaccagttccgccaagacacgggaactctccgcccagttcgccgcaactactacgacccctcctcggcccctgggaagggcgtggtgtgggagtgggagaacgacaatggctcctggacgccctacgacatggaagtgggcatcaccatccagcatgcctatgagaagcagcacccctggatcgacctcacttccattggctttagctacgtaattgacttcaacaccatgggccagatcaaccgtcagacccagcgccaacgccgcgtccgccggcgcctcgacctcatctaccccatggtcacagggaccttgcctaaggctcagtcctggccagtcagccctgggccagccacctcgccccccatgtccccctgctcctgtccccagtgtgtcttggtgatgagtgttaaggcagccgtggtcaatggcagcactgggcccctacagctgccagtgacccgcaagaacatgccgcctcctggagtggtcaagctacccccactgccaggctctggggccaagccactggacagcacaggcaccattcgaggcccactgaagaccgccccatcgcaggtgatccggagacaagcctccagcatgcccactgggacaaccatgggctctcctgccagtcccccaggacccaacagcaagaccggaagggtggccctggccaccttgaatcgtaccaacctgcagcgactggccattgcccagtcccgggtgctgatcgcctctggggtccccacagtcccagtgaagaacctaaatgggtccagtcctgtcaaccctgccttggcaggaatcactgggatcctcatgagtgcagcggggctgcctgtgtgtctcaccaggccaccaaagctggtcctacacccaccccccgtcagcaagagtgaaataaaatccatcccaggggtttccaacacaagccgcaagaccaccaaaaaacaagccaagaaaggtaaaaccccagaggaagtgctaaaaaaatatctacagaaagtccggcacccaccagatgaggactgcaccatctgtatggaacgcctcacggccccctcaggctacaagggcccgcagcctacggtaaaacctgacctggtagggaagctgtccagatgcggccacgtctaccacatctactgcttggttgccatgtacaacaatgggaacaaggatggaagtttgcagtgtccaacctgcaagaccatttatggggtgaagacaggcacccaacctccagggaagatggagtaccacctcatcccccactccttgcctggccacccagactgcaaaaccatccggatcatctacagcatcccccccggcattcagggaccggaacacccgaatcctgggaagagtttcagcgcccgaggcttcccacgacactgttaccttccggacagcgagaaagggagaaaagttctgaagctgctgctcgtggcctgggatcgccgcctcatttttgccattggcacctccagcaccacaggcgagtcagacaccgtcatctggaatgaggtccaccacaagacagagtttggctctaatctcactggccatggctacccagatgccaattacctggataatgtgctggctgaactggctgcccagggcatctctgaggacagcactgcccaggagaaggactgaggccagaaaagctttgaggtgggaggggccatggagactgcaggacaggaagtgaggagagtgagtcaatgtagaagaagttggtgtcctgccctcccaactttctatcctcccctcctgccctgtgtccatccctcatccctcccaaccacagtgggagccagactgaatatagcgacatcattcataaatctcatccaacacaaagggagatgggatgagggccatcctgggtctgttcccatggagtttttggtgctgggtaggcaggaatcccctccctaccccacctcccaagtaggggcatggtcagcacacctagggtatgggcagtgcttaggcactccatatcctggctttgggaagccggggtttcttgcctcagccggcttcttgctacttccactctgctttgagactggagtttctgctattctccctctgctggaggcagggagctctcactgtgcaaggttggggggtgggcaaaggggtgaatcactaaactgctgtgacatcagaaactgatgccttggtgtagagcaaggaagcacttcttcccaagagggtcggagaaggaaaagcctctgggagcacattctgctgtcatcacagtccttggcttctctgggccctcctctcctcctcacagctctcacctgtccaaagaggcatctggttctctcatgtggatggatggactctggggttcctctttggagtggcatcccatgatgctgtttctagaccctctctgatcaaaccagagcctgcatcccactgagcatctgaactgtcctcagggagaggagcccacagccttcttcccaactcattctagaccagctcaaagattccatgagtttcatcgagtcactgtgagtggagcccatgctgggctctgtgccctctgtgtctgtgcatgcgcgtgtgtgtgtgggcgtgtgtgcattgctgggccagcttgaagggaaggcccgtcatgtccctgcactctgttttgcaagatgccaaaccccagttctgatggggctccaacagccaggctgtggtcctttgacgttcctcacctgttgccaacctatcccgtagtgaactgaaaccccaatgaagacagaactgtgcctggggagatgcaatgaggtgagggctgaactcatccttttatatttcttttcaagattggatcagagctcatctccatccagtcttgtttctatgaaggcttcaatctgtttccatgcaaatttgctaatcagagcccagagctgctgggtccctcatctccctcatctattatagattgacttacagcagggagagaatctctttagctcattcctaatggagttgggatcacaatatggtctggtccaatctgcatcttgttgtgtcccaagaccctatctcctccccaacattcttattgcctttggctcccagtaaggaacgaattgggggccagggaggagaacaggggggatcaagaagggaaacccaattccccctttgaaagtgggttctttgaactatgtgtttgggggaagttcctctggatactaatttgaatttatatacctcatgttttgggggtttgacgtatatatatatatatatatatgcatatatatttcataatatttggaaggtttttgatgctagaaaaatggaaacaagagaaccttcaaaaatggtacttagatgggaactggaggccaatctttcataaagccagccccatagctgcttgctgttaggcctccagccattttgacattggggtggatatcgattcacctgcctgtcacccagttctgtggatgtgctggtgctgagcctttgctctctttccaaatggtta

SEQ ID NO: 70 - protein, 609 aa, Homo sapiens
MLLASAVVVWEWLNEHGRWRPYSPAVSHHIEAVVRAGPRAGGSVVLGQVDSRLAPYIIDLQSMNQFRQDTGTLRPVRRNYYDPSSAPGKGVVWEWENDNGSWTPYDMEVGITIQHAYEKQHPWIDLTSIGFSYVIDFNTMGQINRQTQRQRRVRRRLDLIYPMVTGTLPKAQSWPVSPGPATSPPMSPCSCPQCVLVMSVKAAVVNGSTGPLQLPVTRKNMPPPGVVKLPPLPGSGAKPLDSTGTIRGPLKTAPSQVIRRQASSMPTGTTMGSPDPGPNSKTGRVATLNRTNLQRLAIAQSRVLIASGVPTVPVKNLNGSSPVNPAGITGILMSAAGLPVCLWPKLVLHPPPVSKSEIKSIPGVSNTSRKTTKKQAKKGKTPEEVLKKYLQKVRHPPDEDCTICMERLTAPSGYKGPQPTVKPDLVGKLSRCGHVYHIYCLVAMYNNGNKDGSLQCPTCKTIYGVKTGTQPPGKMEYHLIPHSLPGHPDCKTIRIIYSIPPGIQGPEHPNPGKSFSRFPRHCYLPDSEKGRKVLKLLLVAWDRRLIFAIGTSSTTGESDTVIWNEVHHKTEFGSNLTGHGYPDANYLDNVLAELAAQGISEDSTAQEKD

SEQ ID NO: 71 - DNA, 8283 bp, Mus musculus
cccctctaccccttcctcccccaatccgttttcattggctcccatggtgagtttatttctctttgccgggagattctaacctactttggaccggtcctggggccgggtggggtggggatgctcccagaacttttagggatccagcaccaactctcttctggccccagctgggagtccctggttcacaccagctgctcacagtggatgtggcacgtctgcttcggtcttgcccacctccagctgtgagggctccctacatctgctgcggctgcactccacctccctgcagctgcggggctcagacccgcgcgatggggctgctgcgacagggacaggtgcgcagcgtgcccacaactttccctgaagcctcactccccaggttttcttctgcgaatgcacattgaggctagagaaagatgatgcgaggtttatgtgacatgtcccttagactccaattcgttggggagatgaagactctcctaaagatgtagtccggttcccaaacccgtcatcattttggaaaagtctcttggaaggggacgcagaggctgactctgcgctatattcctccccccacccccaccccatgttgtttcctttcgatccacacctcccctacacccacaagaatcccaacctttccctggcttccctcagtacgactagggttgaaaggctggtatgtgtgtgtggcactcggattaaatcacttaagtttaactggggtttccgagacctctgagaaagggacctgttacccctaaaccccacctctatgccaaattattaagggctggctctcaatcctttaacagaaaggccaggatccagcgcccttcaatggaccctcagggcatcgtgaaggcctttcccaagcggaagaaaagtcatgcagatctatcttcaaaagcacttgcaaagattcccaaaagggaggtgggagaagctagaggtgagccggtccaccctcacacactggaacgttcagccttcttgttttcagctagagtcagattaacagaagtgacctaacctgtggccaagatcaggttggcctcaaactcgaaaagcaaaacaaaacaacaaaaaaggaagtttgctgaaaaaaacaaaacaaaacaaaagcaaaaacaaaaacaaaaaacccctggggggtatcgctagcaagcaagcctttagcctttaatcccagcacttgggaagcagaggcaggcagatttctgagttcgaggccagcctggtctacagagtgagttccagaacagccagggctacacagagaaaccctgtcttgaaactaaccacccccccccaaaaaaaggaagtttgttgtacgtttgcggtagaattctttgaaggtattttgttctctggatggcaggaaaaggaagggaggtggcttcgaacagttcattatagctctgacctacaactgtaatcccagctcttagaggtcaaggcaggagaatcagaaactcaaggttatcctctgctacatagtcagtttgaggccagcctgggctacatgagaccctatctcaaataatagtgcaataaaattaataataataataatagctatggtgataccacttgaatatcctctccacaggatggctgagctccctgagagcccacattatgcccgctggcattggacgtgcccgggctgaactctttgagaagcagattatccaccatggcggccaggtgtgctctgcccaggccccaggagtcactcacattgtggtggatgaagacatggactatgagcgggctctccggctcctcaggttgccccagctaccccctggtgcccagctggtgaagtccacctggctgagcttgtgcctgcaggagggaaggctgacagacacggaaggattcagccttcccatgcccaagaggttggcagctcttagcctttctcaggtgtttgttgatgatgtttgagtttccatcttgagttattgaaaaaaaaaacactcgtactttttaaattggacatatttggaaaccaaggtttctgtatagagaaagattggggtgggggtgggggacagagacaggtaagaatttgataccctaactctctgtgacctcccctgccctctaggtccttggatgaaccacagcccagcaagtcaggccaagatgcttctgctcctggcacccagcgggatttacccaggaccaccctttctctttcccctcctcacaccagagctgtatctcctcccccaacggcagaaaagccatcaagaacccaagcccaggtgaggagcctcccagcccagggtgctgatcacagaaatggaaggacctggaggttagacagaaaattctaggtctctctcaattatgcacctgtccatctcttcccaacatttttcagttctgcattcaactagttatgtctgccccaggctggggtcttttccttgagtcaaagcaggagacgcctccccaccagacagcgctctcttcttctatttgcagctcagctcagaggatgaaaccagcgatggagaagggccccaggttagctcagcagatctgcaagccttgatcactgggcactaccccactccccctgaggaagatggtgggcctgacccagcaccagaagctctggataaatgggtctgtgcacagccctcgagccagaaggcaactaactacaatctgcacatcacagagaagctggaagtgctggctaaagcctacagtgtccagggagacaagtggagggccctgggctatgcaaaggccatcaatgctctcaagagcttccacaagcctgtcagctcctaccaggtacgtgggggaagggggttgtttcttctttactcagtactggttacagcagcactagtcattaactagtggttaactgtagttaccagtgggtatccgacttagtgcttaagagtttataatgagccgagcgtggtggcacacgcctttaatcccagcactctggaggcagaggcaggcggatttctgagttcaaggccagcttggtctacaaagtgagttccaggacagccaggactatacagagaaaccctgtctcaaaaaaacaaaacaaaacaaaacaaaaaaaaaaacaaaaacaaaaaaaagagtttgtaatggctgggatctacatacagagacaaactgatagaagggggaggggaggaaaacagaccagcattaggactagaaaatgggtgcttaggggcttattacatacactgtttcctctacatctgagtgttttatatgataagtttaaagccaggcgtggtggttcatacgttagactctggggtccattgattatggactctaggcaagttagttactctgtcagttttccaatcactggaaaggaatgaacaactataggccattcacaggggttttgtaaggttggaagatgatctcagtagcacagaatgacatagagtaagccctcaggcagtgtggtgcagggagccttcagtcaggcagtgtggtgcagtgagtccccagtcaggcagtgctgtgaccccaacaggcagtgtcatgcagtgagccccacccaggtcaggcagtgctgtgactccccccaacccccgccccaggcagtgaggtatagtgagccctcaggtagtgtgatgcagtgggctcccagtcaggtagtgctgtgaccccctcccccaggcagtgtggtgcagtgagcctgcagtcaggcagtgtggtacagggagcccctaggcaagcagtgcagcgagaccccacacacacacacacacacacacatacacacacacacacacacacgctgcaggcaatacagtgggcccgcagggagtgtgcatgcagagttgtgatgtggtggtggcagtggtggtggtgatgagcactgtcattttctctacctctttttgtggttattttgttttattttttcttttagagacaagagtctctctccacagccctgactgggctggaactcacagatcctctctctgcctctgcctctgcctcctctgcctctgcctttctgcctctgcctctgcctctgcctctgcctctgcctctgcctctgcctctgcctctgcctctgcctctgcctctgcctctgcctctctgcctctgcctctgcctctgcctctgcctctgcctctgcctctgcctctgcctctgcctctctgcctctctgcctctctgcctctctgcctctgcctctgcctctgcctctgcctctgcctctgcctttctgcctccaggagttctgggatttaaggcctgccaggccattttctctacttcttattgctggtctctgggaaccaaaggacaagctccatatggttgctgggctacctttggggcagatattctgctgaaggagccacattcccctcttctggctctcccttcctagcctcttcctcatcctcctctgtgccacttcctccctaggaggcctgtagcatcccgggaattggcaagcggatggcagagaaggtcatggagatcctggagagtgggcatctgcggaagctagaccacatcagtgacagtgtgcctgtcttggagctcttctccaacatctggggagctgggacgaagactgcccagatgtggtaccatcaggtcatgccagcccgcctgcctcttaaagtattgctgttacagagtctctgcccacaccccttcctgttcacctgcaggaatctgggtccctctgttttcccaccctgggccctcatgggagtgaaatccaactacaaggatgccagagttcacattggtccccctcctgtccccagaacagccatgtagcttagtgtccttgacctgtggacagaaacaataaatacattactctgtcccacacaccagcagggatttgctgttgttatgtttgtgtgtgtgtgtgtgtgtgtgtgtgtgtgtgtgtgtttgtgtgtgtgtgtgtgtgtttgttttaaaaactatatgtcaccatgtagccctggctaacctagaacttactatgtagaccaggctgatctgcctggcttcagcaagggactttctcaggagcccaggctttgggctccatgtctcgaacagtggctctcaaacttggccatgccaagaatgatcttgggagttagtgagcgtgaagccctgacccattttagaccgaggaatgagggaccagcatgcccagatcacgtcccactgaatagaggctggacttgattggtcctgccttctgtcttccatggcagctgctgtgacagccacccatgacttctggcctgtttattagtcctgggtcctcatagcctcttttctggttgctttcttccagggcttccgaaacctagaagatctccaaagcctgggctccctgaccgctcagcaggccattggcttgaagcactacgatgacttcctggaccgcatgcccagggaggaggctgcggaaattgagcagacggtaggcacagctcgagccaacagctcctgaagccctagctgggcaaccccacaggcagcggaagttaagaggtcgacagagattgtgtctaccagagctgtaggtccaggaaccccaggtggggtgggcactgcagtggcagccctctggtctcagggtcactaagcatgaactctgggcactagtcgcctagcatggggcaagcacagcctcaaggcctgagtacaatcaaggcctgagtatgtcgttcagaggtagcgctcctgagcatgcctaagaccctgcccatcctcagcatcacagaaagggggaaaaaaaaaacaaacaaaaaacatctagttggccaagaaatcaggtttagccaagttaaaggttcagcttagagctaggggctgagtctgtaagttcatgtgcagggttgagtcaagagagacggggtataccagatgtctgctatttgtatagtggcattgggagcaggctggtacatgggcaggggtcttggtgagtgacagatgaaccagtctgttagcagaaggatcggagagacctagtgaggaagaataagcctccaccagcgcccacagatggaactatgggaccggtgctggatggatagacccatcacagagctgcggtgctaatgcggacccctgcactcagctacggtgtccgggcacagagaatgccctggtcagccgccagctcctagcccatcagaagagaccggcttccccactgcaggctgcctgcaagcagggctccagctgtagggattccggtgggattgctcaaccagacggcctcttcccattctcctgggaggtccaagaagggattgaagggaccagcagaactatgtcagggcaattggggtgtcctggctgtgagcacccagggcccctgaaactgcagtgtcctgcagagggggcgggctaggtctctcaggtccttctttaacaggccggcctcacccctccaagaacggtgtgggcagctcctggcctccccttcccacaggtgcagtggtatttcgtgcttcattttctcccagccgggttggaggctgtctgccagccacctgctcaggcctcgaccctgagcttccacacagccatcagctacaggctgcttgagctgcatgggcgtggcctttgtgattggcaggcctttcacaggcctggccactggatgtgagtcgggggccagaacccacggagtgtcactcggctcttgcacaggagccttctgctgaggcagagccaatgtcctcaggcctctaacaggcttgcctctccagtgccccggcacgtcccctcagcttaatatgaatcccgggggaaggctggggcgaaggctgggtgctgtcctgggagaggcctcagactctcacccctccctgttcttccccaggtccggatatcagcccaggccttcaaccctgggctgctgtgtgtggcttgtggctcttaccgacgggggaagatgacgtgcggggatgtggatgtactcattactcaccccgatggccgatcccaccggggcatcttcagctgcctccttgatagccttcggcagcaaggtatccattttgactttgggtgagcaggctaccagtgggcagccacctcctagcagtcacttccaagttctcgatttgagacagactgggtgggaaagggctctgcaagaatcctacctctcctggggccaaagacaataaaacaggggcagatctcacctgatgacactgcccgctttccacagatgaggaattgggcccagaggggcgaggccactcaactcaacacacaaataggcacagggtatgctgggaataaagatccttaggcaacctgagaaggtgagactatcaggcctggctccctgccctaccagacatcccttgtgttggaccagggttcctcacagatgacttggtgagccaggaggagaacggccaacagcagaaatacctgggtgtgtgccggctcccagggcccgggaagcgccaccggcgactggacatcatcgtggtaccctactgtgagtttgcctgtgccctgctctacttcaccggctctgcccacttcaaccggtccatgagagctctggccaagaccaagggcatgagcctgtcggagcatgcgctcagtgcagctgtagtccggaacagccaaggtgtcaaggtggggcctggacaagtgctgcccacccccacggagaaggacgtcttcaagcacttaggcctgccctaccgggagccagctgaacgggactggtgacctaggacttggagcaaggggaaccatgttgaatgaactgactcatgtagccatctcccaccctcttagctgtgcctcgctttgtcggttacgcttgccctgagtgaccaagctaggagctttgggcctgcggggaagagccagtctgattctgagagcccgcaagctctctctcctggacaggatttatgctgctgtcccctctcctcccagtgacaggttttcacacggccccttccctgttcaagcagaacaggtggctggtttcaaggcggtttcctgcactgaaggcccgagcttccctttccaccccaagactgatgtagctgtgtggggtcagcaggggctgcaggagagggaagcagctgtgggctcagcgtcttccgtgagccttcacagtagagaaagccatgtggattctctcacccgctcacttcctgtgcagctggagctgctgggggtggcctgtccagaccatgagggtggcttctaagggccctggggcctaataaagtgcttctgacattcaaa

SEQ ID NO: 72 - DNA, 2324 bp, Mus musculus
cccctctaccccttcctcccccaatccgttttcattggctcccatgaaaggccaggatccagcgcccttcaatggaccctcagggcatcgtgaaggcctttcccaagcggaagaaaagtcatgcagatctatcttcaaaagcacttgcaaagattcccaaaagggaggtgggagaagctagaggatggctgagctccctgagagcccacattatgcccgctggcattggacgtgcccgggctgaactctttgagaagcagattatccaccatggcggccaggtgtgctctgcccaggccccaggagtcactcacattgtggtggatgaagacatggactatgagcgggctctccggctcctcaggttgccccagctaccccctggtgcccagctggtgaagtccacctggctgagcttgtgcctgcaggagggaaggctgacagacacggaaggattcagccttcccatgcccaagaggtccttggatgaaccacagcccagcaagtcaggccaagatgcttctgctcctggcacccagcgggatttacccaggaccaccctttctctttcccctcctcacaccagagctgtatctcctcccccaacggcagaaaagccatcaagaacccaagcccagctcagctcagaggatgaaaccagcgatggagaagggccccaggttagctcagcagatctgcaagccttgatcactgggcactaccccactccccctgaggaagatggtgggcctgacccagcaccagaagctctggataaatgggtctgtgcacagccctcgagccagaaggcaactaactacaatctgcacatcacagagaagctggaagtgctggctaaagcctacagtgtccagggagacaagtggagggccctgggctatgcaaaggccatcaatgctctcaagagcttccacaagcctgtcagctcctaccaggaggcctgtagcatcccgggaattggcaagcggatggcagagaaggtcatggagatcctggagagtgggcatctgcggaagctagaccacatcagtgacagtgtgcctgtcttggagctcttctccaacatctggggagctgggacgaagactgcccagatgtggtaccatcagggcttccgaaacctagaagatctccaaagcctgggctccctgaccgctcagcaggccattggcttgaagcactacgatgacttcctggaccgcatgcccagggaggaggctgcggaaattgagcagacggtccggatatcagcccaggccttcaaccctgggctgctgtgtgtggcttgtggctcttaccgacgggggaagatgacgtgcggggatgtggatgtactcattactcaccccgatggccgatcccaccggggcatcttcagctgcctccttgatagccttcggcagcaagggttcctcacagatgacttggtgagccaggaggagaacggccaacagcagaaatacctgggtgtgtgccggctcccagggcccgggaagcgccaccggcgactggacatcatcgtggtaccctactgtgagtttgcctgtgccctgctctacttcaccggctctgcccacttcaaccggtccatgagagctctggccaagaccaagggcatgagcctgtcggagcatgcgctcagtgcagctgtagtccggaacagccaaggtgtcaaggtggggcctggacaagtgctgcccacccccacggagaaggacgtcttcaagcacttaggcctgccctaccgggagccagctgaacgggactggtgacctaggacttggagcaaggggaaccatgttgaatgaactgactcatgtagccatctcccaccctcttagctgtgcctcgctttgtcggttacgcttgccctgagtgaccaagctaggagctttgggcctgcggggaagagccagtctgattctgagagcccgcaagctctctctcctggacaggatttatgctgctgtcccctctcctcccagtgacaggttttcacacggccccttccctgttcaagcagaacaggtggctggtttcaaggcggtttcctgcactgaaggcccgagcttccctttccaccccaagactgatgtagctgtgtggggtcagcaggggctgcaggagagggaagcagctgtgggctcagcgtcttccgtgagccttcacagtagagaaagccatgtggattctctcacccgctcacttcctgtgcagctggagctgctgggggtggcctgtccagaccatgagggtggcttctaagggccctggggcctaataaagtgcttctgacattcaaa

SEQ ID NO: 73 - protein, 563 aa, Mus musculus
MDPQGIVKAFPKRKKSHADLSSKAKIPKREVGERWLSSLRAHIMPAGIGRARAELFEKQIIHHGGQVCSAQAPGVTHIVVDEDMDYERALRLLRLPQLPPGAQLVKSTWLSLCLQEGRLTDTEGFSLPMPKRSLDEPQPSKSGQDASAPGTQRDLPRTTLSLSPPHTRAVSPPPTAEKPSRTQAQLSSEDETSDGEGPQVSSADLQALITGHYPTPPEEDGGPDPAPEALDKWVCAQPSSQKATNYNLHITEKLEVLAKAYSVQGDKWRALGYAKAINALKSFHKPVSSYQEACSIPGIGKRMAEKVMEISGHLRKLDHDSVPVLELFSNIWGAGTKTAQMWYHQGFRNLEDLQSLGSLTAQQAIGLKHYDDFLDRMPREEAAEIEQTVRISAQAFNPGLLCVACGSYRRGKMTCGDVDVLITHPDGRSHRGIFSCLLDSLRQQGFLTDDLVSQEENGQQQKYLGVCRLPGPGKRHRRLDIIVVPYCEFACALLYFTGSAHFNRSMRAKTKGMSLSEHALSAAVVRNSQGVKVGPGQVLPTPTEKDVFKHLGLPYREPAERDW

SEQ ID NO: 74 - DNA, 9354 bp, Homo sapiens
cttcgtccgctctcattggctctgctggtaagtggtctattcctgcccacccccgggtgactagcttggccagtagtcgaccccacccggggaccgactctgggggttggagagactcttggggccggggtcgggcactccagctttcttctagccccgagctgggattccctggcctgcgccagctgcgtacacggcgagtacaccgcacctgcccgggacttcacccgcagctgcgagactcctccattcccggagggctccccacacctgctgcggccgtgccccatctccccgcagctgcggcgctgagcacccccatgtcgagaggctgagaccaggacaggtgcagggcgttcccactcacccccgaaagtcctcctccttcctctgcgagtctgtgttggaggtagagaaatagtatgtggggtttatgtgcaggtcctccccaggctccgctccatcccctaaagctccatttcctagcccagcatcccatttggtaaagcccttcgaagtgggccgcagcagggctgtgctgaatctttagcgcaacccctctgaggaatggtgtcgtttcctactcctcaaaagtacccccgatggcaccagccttcccctcatttcccgtaatactccaacttcgaaaggctggggagtgtgaagctaggctaaaccactgaagtttaaccgggtttgaagagaccccctcccccgacccgcttccccaaactgggctgctacccccaaagcctggtcaggaaagaccctacctccataggcaaaggggttggagggcctcaattctggatttccacgtgcagcagccctgaccaacgctccaataggccgggatccagccatacttcaatggatcccaggggtatcttgaaggcatttcccaagcggcagaaaattcatgctgatgcatcatcaaaagtacttgcaaagattcctaggagggaagagggagaagaagcagaaggtgagctgacccagtctcagaaccctcgtgtgcttgaacccacagccttcatgtgcttcagccctacgttgtttatgtccagaatcagatattggagctgactctgcctgtccagggcctgcaggtctgtttgtatctaccttgtgctaagcttggtcctgggtcttggacaggctatttgctgtgttaccttcttttctacccgaagacctctatccatcagaaaagactccctgggccctcagggaatgaccagtataatttttgccctgaggactgggacagaaacccccctccattacccaggcttgttgttagttgttttgcagccaaattggcaaataaatggcagaggctttggaggcagggttgtcgggtctgtcagactgtaagggcaagaaacgcgctttgttgaaagaataaatgataaaggattcaaagtatggagagaggctgggcgcggtggctcttgcctgtaatctcagcactttgggaggccgaggcaggcagatcacctgtgctcaggagttcgagaccagcttgggcaacatggcgaaaccctgtctctactaaaaatacaaaaaattagccaggcatggtggcacacgccggtaatcccagctactcgggaggctgaggcatgagaatcgcttgaactcgggagatggaggttgcagtgagccaagacgatgccactgtactccagcctgggcgacagagtgagactgtctccaaacaaaaacaaaacaaaagaaaacaaaacaaacaaacaaaaaacaaagtaagaagggaggaggcattcattaaacaaatatttacaggttacttacaatgtgccagacacttctagattgcaccaaggaacaggacgtatgaaaatccttgtcccttacattcaagtgctggcctgtgagaaaatttgctatatgtagaaggaaagctgtctggatggaagggaaatgcttattttcagggtaggggactgtgaacacgtcattcagatcatgttagaagttatgtcgtggccagggggtggcagataaaaattaaaaagttacaacagtagtcatctggatgttccttccacagagtggctgagctcccttcgggcccatgttgtgcgcactggcattggacgagcccgggcagaactctttgagaagcagattgttcagcatggcggccagctatgccctgcccagggcccaggtgtcactcacattgtggtggatgaaggcatggactatgagcgagccctccgccttctcagactaccccagctgcccccgggtgctcagctggtgaagtcagcctggctgagcttgtgccttcaggagaggaggctggtggatgtagctggattcagcatcttcatccccagtaggtgggctgatcccagtctttttttcaaatgttttctagtagcatcttgagctcttttcttgaattattaaaaataactatcattaattaaaaaattagccaggcatggtggggtgtgcctgtagtcccagctataagaggtttaggtgggaggattgattgagccagggaggttaaggctgcagtgagccttgatcgtaccactgtactccagcctgggtgacagagcaagaccctgtctcaagagaaactccaaaaacctcaaaaaactcgttttcttaattggacacactgggaaaccaagtatttcagagtacagaaggactggggacagatacagggtgagacctttggtgtcttaacctcccatcaccatccccacaggtacttggaccatccacagcccagcaaggcagagcaggatgcttctattcctcctggcacccatgaggccctgcttcagacagccctttctcctcctcctcctcccaccaggcctgtgtctcctccccaaaaggcaaaagaggcaccaaacacccaagcccaggtcaggagcctcccatccctcagaactcccttcccctaggaagcagatcacagaaatggggtgggcctggtggctgttcagaaagtcccaggcccctgagagaggagggctctattgtgaagccatttagctcttcccaacactcatcactgctgcatttatctaggccatatctaacacataccactggggatcctagggctaggcactgcgtggagccaaagggaacgtggcctcacacccaaggagatccaagtctgatgcagaaggccccgcctcattcttaggtctgactagaagaccctccccccgcacaaagaagatgacccccacctttaaggatcccttctcttggagaacaagaatttattgttttcttttcttctctatcccaagcccatctctgatgatgaagccagtgatggggaagaaacccaggttagtgcagctgatctggaagccctcatcagtggccactaccccacctcccttgagggagattgtgagcctagcccagcccctgctgtcctggataagtgggtctgtgcacagccctcaagccagaaggcgaccaatcacaacctccatatcacagagaagctggaagttctggccaaagcctacagtgttcagggagacaagtggagggccctgggctatgccaaggccatcaatgccctcaagagcttccataagcctgtcacctcgtaccaggtacccaggggctagagtgggaggaggggtctttactggccagtggttagtaaccccagtggggttcaggtacagtggtgaagattttatggggtctaggacttgcacaaaagaaaaaaaaggaaaattgatgaaagcagattggcaaaatcttgatagttgttgaagctgggagatgtacgatacttgggggttatatggatctctctacttttgaattttttaacataattaaaagttttttatttttaattttgtttatttatttatttattcatttatttagcagagatggtgttttgccgtgttacccaggctggtcttgaactcctgggctcaagcaatctaccctcggctcagccctgcaaagtgctgggattacagccatgagcccttgtgtcccgcctaaaaagttgtttaaaagaagtttggactctgaagcctaacagaccagggtttgaactctggttcctgtcattcactaactgtgtgactccagacaagttacttaaactctcaaagcatcagttttctcattagtaaaaaggggctactattaaatgaaatggtccctgtagcacaggacctgacatagagtaagccctcagtaaatgttagctcttgctgttggaatgatgatgatggtggtggtggtggtggtgactaatatcatcattattttctacttcttactgctggtctccatccttctgggaaccaaaagacaaattacccagccctcattctatccaaaattctcatcttcaactacacccaagctttacacagccacacagttgccaagcagccaggctggcttttatgtcagcatctgctagaggagtcagcttcctttccactggctctacctcttccatctcctcactcttctttcttgcctctgcctcctcctcctctaggaggcctgcagtatccctgggattgggaagcggatggctgagaaaatcatagagatcctggagagcgggcatttgcggaagctggaccatatcagtgagagcgtgcctgtcttggagctcttctccaacatctggggagctgggaccaagactgcccagatgtggtaccaacaggtcacaccctggctcagcccctacttcagttttgctgtgtctcagagttcctgccccagatgtgtgctgtgctctgccccagatccctatgctgtgctctgatgggaatgcacccacagtatagggagaccatttttcaagcggaccaggactcatatagacccctcagctcccagaacagccttgttgcttggtatccttaagaaggagtagacagggacaagaagtatgtttctcagtctccccagaccagcaagggccttcctgaggaggccaggccttgacactgcgtgtctagagcagtggttcccaatcctggctctgcccacaatcaccagggcagcttggtaaggatgaagatgacaaggtccatcctcagactgatggaatcatgaacgagcatcttaggatagtggcagggctggatgatggcatgtttcccatgctccctgcctttcccaagtcctgctgagtacagacccaactgcccctaggttggtcctgcctctagccttccctagagtctggggcgatggaagccttgtgtgtgtgctcactcatgcctcttcattggtcctggatccttacagcttcccatctggctgcttttttccagggcttccgaagtctggaagacatccgcagccaggcctccctgacaacccagcaggccatcggcctgaagcattacagtgacttcctggaacgtatgcccagggaggaggctacagagattgagcagacagtaagcaggtgtcccagagcagtgaggacagccaggtcctgctgtaaggtcttgggtcaaagccaagaacccccaactcctcagctggggaggacagcaggcagaggaaactgtggatcaccagaggttgagcacagagcaagttaagactgaagctccaggcccagaggtgggggtggggagctttgggaggaaagagctgtaacaccagccctctagattctggttctcagtagtcaggcctattaggattggattcaattctagactgattggtgttaggattgggttaatgttagggttagattacaggtgaattatatctgtactgaggttagggtgggtcagggcagagggttttaatattttattttatcttttttttttatttcaccaacttctttgagaacctgatgaaaactgtggactgttttctccccaaaatgcacaaatgtgcaaaggtttatgtctttttccagatgtatggaccttctaaagcccacgcaaggctggctcaggatttggggtagagttggtgtaaaagcacagtgtcagtaggatttggtttggggctggaagaaagctccatcaagatggagttaagaccaggcacagtggcttatgcctttaatcccagcacattgggagaacagggtggacagatcatctgagctcaggagctcgagaccagcctggccaacgtggtgaaaccctgtctctataaaacatacaaaaatttccagcctggcaaacatggcgaaaccccgtctctactaaaaatacaaaaaagttaggcgggtgccgtggctcatgcctataatcccagtttcttgggaggctgaggtgggagatttgcttgaacctgggaggcggaggttgcagcgagccaagattgtgccactgcactctagcctgggcaacagagcaagactctgtctgaaaaaaaaaaaaagattgagttaaagttaggctttaattaggcgtaggattttcttaatgttggttgcttttaagttaagatttgtagttgtccaagaaataagatttgggtttggtttagagttgggttagcgattaggttcatgtaaaagctagattagagagacactggactgcatttagggctagatgtatcatttgttcaatgggcattaggattaggagctgcttgtaataggcaagttttgctcactttggtcagggattctgatagagtgggatcccatggagactggcctagtttgattgaaatcagcccccagctccattccaggccacaaggctatgaggccggtatgagatggatggacaggcctctttgtctgcccatcaccaggccttggtgctagtgatgacaccgtcactcagccatggtgtccgggcatggagaatgcctcagtcagtacccagcccattggaacaaaagaggcttcccacctggcctcctgtgcccccatttaagggctccagccataggagttttgatgggattactcacgtggacctcctccttccattctcttgggaggctcaagaagggagtaaggggattagcggagccctcctgtcaggatacttgaggtgtccggggccccagaattttcagtgtcctggggtggaggcaggaggccatctgcatatgaaagaacctcagtgtctcaggggtggaggctaatgggtttatttttcctcagagggacaatccttcagctggcagttgctgtctcagctccctccccaccaagaaaggatgtgggtgttggctcagaactgccccctctttgctttctttcctctcctttcccacaggtgcagctgtatttctgtgctccactttctcctgggcctgggcctggcgcatgctgccagccacctgctcagtcctcaaaccccagctcacatattccaaacctttagctccaaatcagtagatatctggggctgcctagacctggctgagggctttcagcacctggccccttgtcctaagtggagtttcacagacctgggcacgtgggctggggcaggggcagagagagtctgtgtctccctactcttaaagagctccacagggcaagctcagtgcccactctcagaagcagagccggcaccttctcccgtctctcctcaggcttgcctcctgcacagtgagctttttcttctctcctgtcctagcgaagggaaagaacagcagctcctcagggtggattcccctgggcttgcagcaggcatctggaatgggcataagctgagggtgtgggcccgagtctgggaaggcccttgtactgctgtgggagaggagctccccacgcacagcccctcacctgtcaccgctctctttcccaggtccagaaagcagcccaggcctttaactctgggctgctgtgtgtggcatgtggttcataccgacggggaaaggcgacctgtggtgatgtcgacgtgctcatcactcacccagatggccggtcccaccggggtatcttcagccgcctccttgacagtcttcggcaggaaggtataagctccatctctgggtgagcaggttgacagagggcagcacaggtctgggggccccctcagagggagaacctcagaagttccagtcctgaggcaggaagcaggggaacagtgctttgccagcatcccatctctctatcggggccggaatcctctccagggagagatggaacagccccgccacacctatgtggaggtgctcagtgaaccctgcaggccaagtatctcatctgatctttctgtgacactatgggggagatgggaattactatccatgttttacagaaaaggagaagggcccagagagggtagtgtcacccagctaatacctgggcaagccccagcttagacatcaggagagacctgggaggatgggacagcccaggcctggttccctgccctcccagcagtcccctctgttgggccagggttcctcacagatgacttggtgagccaagaggagaatggtcagcaacagaagtacttgggggtgtgccggctcccagggccagggcggcggcaccggcgcctggacatcatcgtggtgccctatagcgagtttgcctgtgccctgctctacttcaccggctctgcacacttcaaccgctccatgcgagccctggccaaaaccaagggcatgagtctgtcagaacatgccctcagcactgctgtggtccggaacacccatggctgcaaggtggggcctggccgagtgctgcccactcccactgagaaggatgtcttcaggctcttaggcctcccctaccgagaacctgctgagcgggactggtgacccatggctgggggtgctgaggagagccgagttggactggctacccctcctggccacccagtactccctccagcctcagctggctgaacctcgccgctccaaccaccagcttcctcagcgagcagggcccagggctctgggcctgaagcaagagccagcccggctcccagtgtctgcccggctcccagtgtctgcccagccctctcccagacaggagcaggctgccaccccttctacctcaccactgcccctcgaagaattttgcaaatggccccttgccccattttaagcaggagcaggtggctggtttgaagccccaggtatcccccttccctgctatgggaaaggccaagctgctgggtggggacagaagctgcaggggagagggaagcagccgtgctgtcaacatcatccggcaccctctggggtaggagaacagccattccacatgtgttccctctatccgtcctgcttcctgggcagctggtggtgctgggaatggggtgccccagccttggtgaggacagtgttgggaggcccaggggcccagtaaagtgcatttgacattgaacctgc

SEQ ID NO: 75 - DNA, 1692 bp, Homo sapiens
cccctcccccgacccgcttccccaaactgggctgctacccccaaagcctggtcaggaaagaccctacctccataggcaaaggggttggagggcctcaattctggatttccacgtgcagcagccctgaccaacgctccaataggccgggatccagccatacttcaatggatcccaggggtatcttgaaggcatttcccaagcggcagaaaattcatgctgatgcatcatcaaaagtacttgcaaagattcctaggagggaagagggagaagaagcagaaggaggcctgcagtatccctgggattgggaagcggatggctgagaaaatcatagagatcctggagagcgggcatttgcggaagctggaccatatcagtgagagcgtgcctgtcttggagctcttctccaacatctggggagctgggaccaagactgcccagatgtggtaccaacagggcttccgaagtctggaagacatccgcagccaggcctccctgacaacccagcaggccatcggcctgaagcattacagtgacttcctggaacgtatgcccagggaggaggctacagagattgagcagacagtccagaaagcagcccaggcctttaactctgggctgctgtgtgtggcatgtggttcataccgacggggaaaggcgacctgtggtgatgtcgacgtgctcatcactcacccagatggccggtcccaccggggtatcttcagccgcctccttgacagtcttcggcaggaagggttcctcacagatgacttggtgagccaagaggagaatggtcagcaacagaagtacttgggggtgtgccggctcccagggccagggcggcggcaccggcgcctggacatcatcgtggtgccctatagcgagtttgcctgtgccctgctctacttcaccggctctgcacacttcaaccgctccatgcgagccctggccaaaaccaagggcatgagtctgtcagaacatgccctcagcactgctgtggtccggaacacccatggctgcaaggtggggcctggccgagtgctgcccactcccactgagaaggatgtcttcaggctcttaggcctcccctaccgagaacctgctgagcgggactggtgacccatggctgggggtgctgaggagagccgagttggactggctacccctcctggccacccagtactccctccagcctcagctggctgaacctcgccgctccaaccaccagcttcctcagcgagcagggcccagggctctgggcctgaagcaagagccagcccggctcccagtgtctgcccggctcccagtgtctgcccagccctctcccagacaggagcaggctgccaccccttctacctcaccactgcccctcgaagaattttgcaaatggccccttgccccattttaagcaggagcaggtggctggtttgaagccccaggtatcccccttccctgctatgggaaaggccaagctgctgggtggggacagaagctgcaggggagagggaagcagccgtgctgtcaacatcatccggcaccctctggggtaggagaacagccattccacatgtgttccctctatccgtcctgcttcctgggcagctggtggtgctgggaatggggtgccccagccttggtgaggacagtgttgggaggcccaggggcccagtaaagtgcatttgacattgaacctgc

SEQ ID NO: 76 - protein, 294 aa, Homo sapiens
MLMHHQKYLQRFLGGKREKKQKEACSIPGIGKRMAEKIIEISGHLRKLDHESVPVLELFSNIWGAGTKTAQMWYQQGFRSLEDIRSQASLTTQQAIGLKHYSDFLERMPREEATEIEQTVQKAAQAFNSGLLCVACGSYRRGKATCGDVDVLITHPDGRSHRGIFSRLLDSLRQEGFLTDDLVSQEENGQQQKYLGVCRLPGPGRRHRRLDIIVVPYSEFACALLYFTGSAHFNRSMRAKTKGMSLSEHALSTAVVRNTHGCKVGPGRVLPTPTEKDVFRLLGLPYREPAERDW

SEQ ID NO: 77 - DNA, 1323 bp, Homo sapiens
atggaagccttgtgtgtgtgctcactcatgcctcttcattggtcctggatccttacagcttcccatctggctgcttttttccagggcttccgaagtctggaagacatccgcagccaggcctccctgacaacccagcaggccatcggcctgaagcattacagtgacttcctggaacgtatgcccagggaggaggctacagagattgagcagacagtccagaaagcagcccaggcctttaactctgggctgctgtgtgtggcatgtggttcataccgacggggaaaggcgacctgtggtgatgtcgacgtgctcatcactcacccagatggccggtcccaccggggtatcttcagccgcctccttgacagtcttcggcaggaagggttcctcacagatgacttggtgagccaagaggagaatggtcagcaacagaagtacttgggggtgtgccggctcccagggccagggcggcggcaccggcgcctggacatcatcgtggtgccctatagcgagtttgcctgtgccctgctctacttcaccggctctgcacacttcaaccgctccatgcgagccctggccaaaaccaagggcatgagtctgtcagaacatgccctcagcactgctgtggtccggaacacccatggctgcaaggtggggcctggccgagtgctgcccactcccactgagaaggatgtcttcaggctcttaggcctcccctaccgagaacctgctgagcgggactggtgacccatggctgggggtgctgaggagagccgagttggactggctacccctcctggccacccagtactccctccagcctcagctggctgaacctcgccgctccaaccaccagcttcctcagcgagcagggcccagggctctgggcctgaagcaagagccagcccggctcccagtgtctgcccggctcccagtgtctgcccagccctctcccagacaggagcaggctgccaccccttctacctcaccactgcccctcgaagaattttgcaaatggccccttgccccattttaagcaggagcaggtggctggtttgaagccccaggtatcccccttccctgctatgggaaaggccaagctgctgggtggggacagaagctgcaggggagagggaagcagccgtgctgtcaacatcatccggcaccctctggggtaggagaacagccattccacatgtgttccctctatccgtcctgcttcctgggcagctggtggtgctgggaatggggtgccccagccttggtgaggacagtgttgggaggcccaggggcccagtaaagtgcatttgacattgaacctgc

SEQ ID NO: 78 - protein, 246 aa, Homo sapiens
MEALCVCSLMPLHWSWILTASHLAAFFQGFRSLEDIRSQASLTTQQAIGLKHYSDFLERMPREEATEIEQTVQKAAQAFNSGLLCVACGSYRRGKATCGDVDVLITHPDGRSHRGIFSRLLDSLRQEGFLTDDLVSQEENGQQQKYLGVCRLPGPGRRHRRLDIIVVPYSEFACALLYFTGSAHFNRSMRAKTKGMSLSEHALSTAVVRNTHGCKVGPGRVLPTPTEKDVFRLLGLPYREPAERDW

SEQ ID NO: 79 - DNA, 2353 bp, Homo sapiens
cttcgtccgctctcattggctctgctggccgggatccagccatacttcaatggatcccaggggtatcttgaaggcatttcccaagcggcagaaaattcatgctgatgcatcatcaaaagtacttgcaaagattcctaggagggaagagggagaagaagcagaagagtggctgagctcccttcgggcccatgttgtgcgcactggcattggacgagcccgggcagaactctttgagaagcagattgttcagcatggcggccagctatgccctgcccagggcccaggtgtcactcacattgtggtggatgaaggcatggactatgagcgagccctccgccttctcagactaccccagctgcccccgggtgctcagctggtgaagtcagcctggctgagcttgtgccttcaggagaggaggctggtggatgtagctggattcagcatcttcatccccagtaggtacttggaccatccacagcccagcaaggcagagcaggatgcttctattcctcctggcacccatgaggccctgcttcagacagccctttctcctcctcctcctcccaccaggcctgtgtctcctccccaaaaggcaaaagaggcaccaaacacccaagcccagcccatctctgatgatgaagccagtgatggggaagaaacccaggttagtgcagctgatctggaagccctcatcagtggccactaccccacctcccttgagggagattgtgagcctagcccagcccctgctgtcctggataagtgggtctgtgcacagccctcaagccagaaggcgaccaatcacaacctccatatcacagagaagctggaagttctggccaaagcctacagtgttcagggagacaagtggagggccctgggctatgccaaggccatcaatgccctcaagagcttccataagcctgtcacctcgtaccaggaggcctgcagtatccctgggattgggaagcggatggctgagaaaatcatagagatcctggagagcgggcatttgcggaagctggaccatatcagtgagagcgtgcctgtcttggagctcttctccaacatctggggagctgggaccaagactgcccagatgtggtaccaacagggcttccgaagtctggaagacatccgcagccaggcctccctgacaacccagcaggccatcggcctgaagcattacagtgacttcctggaacgtatgcccagggaggaggctacagagattgagcagacagtccagaaagcagcccaggcctttaactctgggctgctgtgtgtggcatgtggttcataccgacggggaaaggcgacctgtggtgatgtcgacgtgctcatcactcacccagatggccggtcccaccggggtatcttcagccgcctccttgacagtcttcggcaggaagggttcctcacagatgacttggtgagccaagaggagaatggtcagcaacagaagtacttgggggtgtgccggctcccagggccagggcggcggcaccggcgcctggacatcatcgtggtgccctatagcgagtttgcctgtgccctgctctacttcaccggctctgcacacttcaaccgctccatgcgagccctggccaaaaccaagggcatgagtctgtcagaacatgccctcagcactgctgtggtccggaacacccatggctgcaaggtggggcctggccgagtgctgcccactcccactgagaaggatgtcttcaggctcttaggcctcccctaccgagaacctgctgagcgggactggtgacccatggctgggggtgctgaggagagccgagttggactggctacccctcctggccacccagtactccctccagcctcagctggctgaacctcgccgctccaaccaccagcttcctcagcgagcagggcccagggctctgggcctgaagcaagagccagcccggctcccagtgtctgcccggctcccagtgtctgcccagccctctcccagacaggagcaggctgccaccccttctacctcaccactgcccctcgaagaattttgcaaatggccccttgccccattttaagcaggagcaggtggctggtttgaagccccaggtatcccccttccctgctatgggaaaggccaagctgctgggtggggacagaagctgcaggggagagggaagcagccgtgctgtcaacatcatccggcaccctctggggtaggagaacagccattccacatgtgttccctctatccgtcctgcttcctgggcagctggtggtgctgggaatggggtgccccagccttggtgaggacagtgttgggaggcccaggggcccagtaaagtgcatttgacattgaacctgc

SEQ ID NO: 80 - protein, 567 aa, Homo sapiens
MDPRGILKAFPKRQKIHADASSKVLAKIPRREEGEEAEEWLSSLRAHVVRTGIGRARAELFEKQIVQHGGQLCPAQGPGVTHIVVDEGMDYERALRLLRLPQLPPGAQLVKSAWLSLCLQERRLVDVAGFSIFIPSRYLDHPQPSKAEQDASIPPGTHEALLQTALSPPPPPWVSPPQKAKEAPNTQAQPISDDEASDGEETQVSAADLEALISGHYPTSLEGDCEPSPAPAVLDKWVCAQPSSQKATNHNLHITEKLEVLAKAYSVQGDKWRALGYAKAINALKSFHKPVTSYQEACSIPGIGKRMAEKIIEISGHLRKLDHESVPVLELFSNIWGAGTKTAQMWYQQGFRSLEDIRSQASLTTQQAIGLKHYSDFLERMPREEATEIEQTVQKAAQAFNSGLLCVACGSYRRGKATCGDVDVLITHPDGRSHRGIFSRLLDSLRQEGFLTDDLVSQEENGQQQKYLGVCRLPGPGRRHRRLDIIVVPYSEFACALLYFTGSAHFNRSMRAKTKGMSLSEHALSTAVVRNTHGCKVGPGRVLPTPTEKDVFRLLGLPYREPAERDW

SEQ ID NO: 81 - DNA, 2683 bp, Homo sapiens
cattggctctgctggtaagtggtctattcctgcccacccccgggtgactagcttggccagtagtcgaccccacccggggaccgactctgggggttggagagactcttggggccggggtcgggcactccagctttcttctagccccgagctgggattccctggcctgcgccagctgcgtacacggcgagtacaccgcacctgcccgggacttcacccgcagctgcgagactcctccattcccggagggctccccacacctgctgcggccgtgccccatctccccgcagctgcggcgctgagcacccccatgtcgagaggctgagaccaggacagcagccctgaccaacgctccaataggccgggatccagccatacttcaatggatcccaggggtatcttgaaggcatttcccaagcggcagaaaattcatgctgatgcatcatcaaaagtacttgcaaagattcctaggagggaagagggagaagaagcagaagagtggctgagctcccttcgggcccatgttgtgcgcactggcattggacgagcccgggcagaactctttgagaagcagattgttcagcatggcggccagctatgccctgcccagggcccaggtgtcactcacattgtggtggatgaaggcatggactatgagcgagccctccgccttctcagactaccccagctgcccccgggtgctcagctggtgaagtcagcctggctgagcttgtgccttcaggagaggaggctggtggatgtagctggattcagcatcttcatccccagtaggtacttggaccatccacagcccagcaaggcagagcaggatgcttctattcctcctggcacccatgaggccctgcttcagacagccctttctcctcctcctcctcccaccaggcctgtgtctcctccccaaaaggcaaaagaggcaccaaacacccaagcccagcccatctctgatgatgaagccagtgatggggaagaaacccaggttagtgcagctgatctggaagccctcatcagtggccactaccccacctcccttgagggagattgtgagcctagcccagcccctgctgtcctggataagtgggtctgtgcacagccctcaagccagaaggcgaccaatcacaacctccatatcacagagaagctggaagttctggccaaagcctacagtgttcagggagacaagtggagggccctgggctatgccaaggccatcaatgccctcaagagcttccataagcctgtcacctcgtaccaggaggcctgcagtatccctgggattgggaagcggatggctgagaaaatcatagagatcctggagagcgggcatttgcggaagctggaccatatcagtgagagcgtgcctgtcttggagctcttctccaacatctggggagctgggaccaagactgcccagatgtggtaccaacagggcttccgaagtctggaagacatccgcagccaggcctccctgacaacccagcaggccatcggcctgaagcattacagtgacttcctggaacgtatgcccagggaggaggctacagagattgagcagacagtccagaaagcagcccaggcctttaactctgggctgctgtgtgtggcatgtggttcataccgacggggaaaggcgacctgtggtgatgtcgacgtgctcatcactcacccagatggccggtcccaccggggtatcttcagccgcctccttgacagtcttcggcaggaagggttcctcacagatgacttggtgagccaagaggagaatggtcagcaacagaagtacttgggggtgtgccggctcccagggccagggcggcggcaccggcgcctggacatcatcgtggtgccctatagcgagtttgcctgtgccctgctctacttcaccggctctgcacacttcaaccgctccatgcgagccctggccaaaaccaagggcatgagtctgtcagaacatgccctcagcactgctgtggtccggaacacccatggctgcaaggtggggcctggccgagtgctgcccactcccactgagaaggatgtcttcaggctcttaggcctcccctaccgagaacctgctgagcgggactggtgacccatggctgggggtgctgaggagagccgagttggactggctacccctcctggccacccagtactccctccagcctcagctggctgaacctcgccgctccaaccaccagcttcctcagcgagcagggcccagggctctgggcctgaagcaagagccagcccggctcccagtgtctgcccggctcccagtgtctgcccagccctctcccagacaggagcaggctgccaccccttctacctcaccactgcccctcgaagaattttgcaaatggccccttgccccattttaagcaggagcaggtggctggtttgaagccccaggtatcccccttccctgctatgggaaaggccaagctgctgggtggggacagaagctgcaggggagagggaagcagccgtgctgtcaacatcatccggcaccctctggggtaggagaacagccattccacatgtgttccctctatccgtcctgcttcctgggcagctggtggtgctgggaatggggtgccccagccttggtgaggacagtgttgggaggcccaggggcccagtaaagtgcatttgacattgaacctgc

SEQ ID NO: 82 - protein, 567 aa, Homo sapiens; identical to SEQ ID NO: 80

SEQ ID NO: 83 - DNA, 2099 bp, Mus musculus
gtgttttgtactcgttcgggattcaggctgtatatgagttagtgaggactgaagagaggagagttaaacaaacaagcaaacaaacaaacacacagggcaagaaaacaggacccaacagcagacgctgacaccctcccgacctgcagtgcagagtgattccaagaaccgcgcgcgacattccgtgtctcaggaaagatggtacccacactaagctcagccaagaacggcctccgcgcccgcttaattttccgaacctgttcttgtggtgctgatggggagggtggccgggaagagaggagagaccactgatcaagttgctgtttgtatattggttgattgctgtttgctgtttgtttattgattgattttttttttattggcccctggccgaggatgagctaagaagccttttgcataccttgacctgacctcacttatccttccacacttctacacccttttccttcctgcgcagggtcctgagcaggtgattcaggcccacattctcgtcattcccgcctcgctgctcagcccctttccttggcctgcatttcctattggtctgtattgtgtactgaagcagggtgttccaacagccagctcagagtctctaggtgttctgggaaggtagacggctcagtttctagtgtgttctgacagagccaggcctcagagtatagctactggggcttacccctgatgtgagggctgagggtaggggaaggaggggtgaagagcagaggaaaatccctggggctcatgttccttcctgggtataatcttcatttctcactgccccaagcagaggaatgaaaattgagaacgcccatgtccacagacgccacctagatgaactctgagttctgactgtaatctgtaacaaggttagccacaaaccagaaccacagggtgacacagcccgggctgtttgtgcactcccctgacccccaacacacaccctaaattatttgcctaggaaagtggagagtccagtccctttacccagtaagcatttttttttcttcaaactggagaatgccaggcgaccagccaaacataaattctttggttttttgttttttttttttccaggtctaaatcaagcagtgcttagagcctcccacaacgggccttcaaccatatttggaagaaaagaaggaatccagagaggaaatggttacctgtgcttacaggcggtctgcaccacaagcgctgactcagcaagagggaactctgcgtacccctgtcccgaaagccccttgagcaaggacgtcagaaagagactaaaatggagggacagcctccgagggccctggagcagggtaacatgagatctatgactatctagtcattcgctacctgcatttgaaagcatatgcattattatggttgtcaccatttatagtagtatacttagacgttgtccatcaaatctggacgcatactcaatttgaaactaaataaaacctaaaggaacataggtgaccatgagggactccagggaacattctctgggacggaactctgtgaagagtggagaagaggcctctaggatcaagctattcatcatggatacagcctcagatccaggacctccaccctctggtgcagtatttccaggatattagtgggggactgtggaccattcaagccttggaacaagtctagcccaaccactgtctaactttgctgctgacggaagcctgacccagccctgacctcgtagaccttataggaatatgttctcagctcactgctccacatttctggccctgtgacctcaccaaacaaacacctgcctatctcagagcattgtatctattcatgttgatttctgtctcttccttattagtctcttgcacaaaccatgaactggatgaaagcaagaacgggatcgtttgggttctgtgggtgacatcaggacttgactgtggacttgacttgcatctggcacagcctgctcgccagctcctgttcccttgcccacctgttctttgaccttgaaccccaacccctttttcttggcatcagtatcgtcctctctaagagcagagattaggattaataaatctatgacgtgcttgtcacagggactaatg

SEQ ID NO: 84 - DNA, 1205 bp, Mus musculus
gtgttttgtactcgttcgggattcaggctgtatatgagttagtgaggactgaagagaggagagttaaacaaacaagcaaacaaacaaacacacagggcaagaaaacaggacccaacagcagacgctgacaccctcccgacctgcagtgcagagtgattccaagaaccgcgcgcgacattccgtgtctcaggaaagatggtctaaatcaagcagtgcttagagcctcccacaacgggccttcaaccatatttggaagaaaagaaggaatccagagaggaaatggttacctgtgcttacaggcggtctgcaccacaagcgctgactcagcaagagggaactctgcgtacccctgtcccgaaagccccttgagcaaggacgtcagaaagagactaaaatggagggacagcctccgagggccctggagcagggtaacatgagatctatgactatctagtcattcgctacctgcatttgaaagcatatgcattattatggttgtcaccatttatagtagtatacttagacgttgtccatcaaatctggacgcatactcaatttgaaactaaataaaacctaaaggaacataggtgaccatgagggactccagggaacattctctgggacggaactctgtgaagagtggagaagaggcctctaggatcaagctattcatcatggatacagcctcagatccaggacctccaccctctggtgcagtatttccaggatattagtgggggactgtggaccattcaagccttggaacaagtctagcccaaccactgtctaactttgctgctgacggaagcctgacccagccctgacctcgtagaccttataggaatatgttctcagctcactgctccacatttctggccctgtgacctcaccaaacaaacacctgcctatctcagagcattgtatctattcatgttgatttctgtctcttccttattagtctcttgcacaaaccatgaactggatgaaagcaagaacgggatcgtttgggttctgtgggtgacatcaggacttgactgtggacttgacttgcatctggcacagcctgctcgccagctcctgttcccttgcccacctgttctttgaccttgaaccccaacccctttttcttggcatcagtatcgtcctctctaagagcagagattaggattaataaatctatgacgtgcttgtcacagggactaatg

SEQ ID NO: 85 - protein, 57 aa, Mus musculus
MLISVSSLLVSCTNHELDESKNGIVWVLWVTSGLDCGLDLHLAQPARQLLFPCPPVL

(The sequence listing continues in the following parts.)

What is claimed is:

1. An isolated nucleic acid comprising at least 10 contiguous nucleotides of a sequence selected from the group consisting of the polynucleotide sequences of SEQ ID NOS: 5, 7, 9, 11, 13, 21, 27, 29, 37, 39, 45, 47, 49, 55, 57, 59, 61, 63, 69, 75, 77, 79, 81, 92, 94, 96, 98, 100, 106, 108, 110, 116, 118, 120, 122, 124, 126, 128, 130, 132, 134, 136, 138, 140, 150, 152, 160, 166, 168, 170, 172, 174, 176, 178, 180, 190, 192, 194, 204, 206, 208, 210, 212, 218, 220, 222, 224, 230, 232, 234, 240, 242, 244, 250, 258, 260, 268, 274, 282, 284, 286, 289, 297, 307, 315, 317, 319, 321, 327, 329, 337, 339, 349, 351, 367, 369, 378, 384, 387, 390, 392, 394, 400, 402, 404, 410, 412, 418, 420, 422, 424, 426, 432, 434, 436, 438, 446, 448, 450, 452, 454, 460, 462, 464, 473, 475, 477, 483, 485, 487, 489, 491, 499, 501, 503, and 505 shown in Tables 1-49, or its complement.

2. A host cell comprising a recombinant nucleic acid of claim 1.

3. An expression vector comprising the isolated nucleic acid according to claim 1.

4. A host cell comprising the expression vector of claim 3.

5. The polynucleotide according to claim 1, wherein said polynucleotide, or its complement or a fragment thereof, further comprises a detectable label.

6. The polynucleotide according to claim 1, wherein said polynucleotide, or its complement or a fragment thereof, is attached to a solid support.

7. The polynucleotide according to claim 1, wherein said polynucleotide, or its complement or a fragment thereof, is prepared at least in part by chemical synthesis.

8. The polynucleotide according to claim 1, wherein said polynucleotide, or its complement or a fragment thereof, is an antisense fragment.

9. The polynucleotide according to claim 1, wherein said polynucleotide, or its complement or a fragment thereof, is single stranded.

10. The polynucleotide according to claim 1, wherein said polynucleotide, or its complement or a fragment thereof, is double stranded.

11. The polynucleotide according to claim 1, comprising at least 15 contiguous nucleotides.

12. The polynucleotide according to claim 1, comprising at least 20 contiguous nucleotides.

13. A microarray for detecting a cancer associated (CA) nucleic acid comprising:
at least one probe comprising at least 10 contiguous nucleotides of a sequence selected from the group consisting of the polynucleotide sequences SEQ ID NOS: 5, 7, 9, 11, 13, 21, 27, 29, 37, 39, 45, 47, 49, 55, 57, 59, 61, 63, 69, 75, 77, 79, 81, 92, 94, 96, 98, 100, 106, 108, 110, 116, 118, 120, 122, 124, 126, 128, 130, 132, 134, 136, 138, 140, 150, 152, 160, 166, 168, 170, 172, 174, 176, 178, 180, 190, 192, 194, 204, 206, 208, 210, 212, 218, 220, 222, 224, 230, 232, 234, 240, 242, 244, 250, 258, 260, 268, 274, 282, 284, 286, 289, 297, 307, 315, 317, 319, 321, 327, 329, 337, 339, 349, 351, 367, 369, 378, 384, 387, 390, 392, 394, 400, 402, 404, 410, 412, 418, 420, 422, 424, 426, 432, 434, 436, 438, 446, 448, 450, 452, 454, 460, 462, 464, 473, 475, 477, 483, 485, 487, 489, 491, 499, 501, 503, and 505 shown in Tables 1-49, or its complement.

14. The microarray according to claim 13, comprising at least 15 contiguous nucleotides.

15. The microarray according to claim 13, comprising at least 20 contiguous nucleotides.

16. An isolated polypeptide, encoded within an open reading frame of a CA sequence selected from the group consisting of the polynucleotide sequences of SEQ ID NOS: 4, 20, 26, 36, 44, 54, 68, 74, 91, 105, 115, 149, 159, 165, 189, 203, 217, 229, 239, 249, 257, 267, 273, 281, 288, 296, 306, 314, 326, 336, 348, 366, 377, 383, 386, 389, 399, 409, 417, 431, 445, 459, 472, 482, and 498 shown in Tables 1-49, or its complement.

17. The polypeptide of claim 16, wherein said polypeptide comprises the amino acid sequence encoded by a polynucleotide selected from the group consisting of SEQ ID NOS: 5, 7, 9, 11, 13, 21, 27, 29, 37, 39, 45, 47, 49, 55, 57, 59, 61, 63, 69, 75, 77, 79, 81, 92, 94, 96, 98, 100, 106, 108, 110, 116, 118, 120, 122, 124, 126, 128, 130, 132, 134, 136, 138, 140, 150, 152, 160, 166, 168, 170, 172, 174, 176, 178, 180, 190, 192, 194, 204, 206, 208, 210, 212, 218, 220, 222, 224, 230, 232, 234, 240, 242, 244, 250, 258, 260, 268, 274, 282, 284, 286, 289, 297, 307, 315, 317, 319, 321, 327, 329, 337, 339, 349, 351, 367, 369, 378, 384, 387, 390, 392, 394, 400, 402, 404, 410, 412, 418, 420, 422, 424, 426, 432, 434, 436, 438, 446, 448, 450, 452, 454, 460, 462, 464, 473, 475, 477, 483, 485, 487, 489, 491, 499, 501, 503, and 505 shown in Tables 1-49.

18. The polypeptide of claim 16, wherein said polypeptide comprises the amino acid sequence encoded by a polypeptide selected from the group consisting of SEQ ID NOS: 6, 8, 10, 12, 14, 22, 28, 30, 38, 40, 46, 48, 50, 56, 58, 60, 62, 64, 70, 76, 78, 80, 82, 93, 95, 97, 99, 101, 107, 109, 111, 117, 119, 121, 123, 125, 127, 129, 131, 133, 135, 137, 139, 141, 151, 153, 161, 167, 169, 171, 173, 175, 177, 179, 181, 191, 193, 195, 205, 207, 209, 211, 213, 219, 221, 223, 225, 231, 233, 235, 241, 243, 245, 251, 259, 261, 269, 275, 283, 285, 287, 290, 298, 308, 316, 318, 320, 322, 328, 330, 338, 340, 350, 352, 368, 370, 379, 385, 388, 391, 393, 395, 401, 403, 405, 411, 413, 419, 421, 423, 425, 427, 433, 435, 437, 439, 447, 449, 451, 453, 455, 461, 463, 465, 474, 476, 478, 484, 486, 488, 490, 492, 500, 502, 504, and 506 shown in Tables 1-49.

19. The polypeptide of claim 16, wherein said polypeptide comprises the amino acid sequence of an epitope of the amino acid sequence of a CA polypeptide selected from the group consisting of SEQ ID NOS: 6, 8, 10, 12, 14, 22, 28, 30, 38, 40, 46, 48, 50, 56, 58, 60, 62, 64, 70, 76, 78, 80, 82, 93, 95, 97, 99, 101, 107, 109, 111, 117, 119, 121, 123, 125, 127, 129, 131, 133, 135, 137, 139, 141, 151, 153, 161, 167, 169, 171, 173, 175, 177, 179, 181, 191, 193, 195, 205, 207, 209, 211, 213, 219, 221, 223, 225, 231, 233, 235, 241, 243, 245, 251, 259, 261, 269, 275, 283, 285, 287, 290, 298, 308, 316, 318, 320, 322, 328, 330, 338, 340, 350, 352, 368, 370, 379, 385, 388, 391, 393, 395, 401, 403, 405, 411, 413, 419, 421, 423, 425, 427, 433, 435, 437, 439, 447, 449, 451, 453, 455, 461, 463, 465, 474, 476, 478, 484, 486, 488, 490, 492, 500, 502, 504, and 506 shown in Tables 1-49.

20. The polypeptide of claim 16, wherein said polypeptide or fragment thereof is attached to a solid support.

21. An isolated antibody or antigen binding fragment thereof, that binds to a polypeptide according to any one of claims 16-20.

22. The isolated antibody or antigen binding fragment thereof according the claim 21, wherein said antibody or fragment thereof is attached to a solid support.

23. The isolated antibody or antigen binding fragment thereof according the claim 21, wherein said antibody is a monoclonal antibody.

24. The isolated antibody or antigen binding fragment thereof according the claim 21, wherein said antibody is a polyclonal antibody.

25. The isolated antibody or antigen binding fragment thereof according the claim 21, wherein said antibody or fragment thereof further comprises a detectable label.

26. An isolated antibody that binds to a polypeptide, or antigen binding fragment thereof, according to any of claims 16-20, prepared by a method comprising the steps of: (i) immunizing a host animal with a composition comprising said polypeptide, or antigen binding fragment thereof, and (ii) collecting cells from said host expressing antibodies against the antigen or antigen binding fragment thereof.

27. The monoclonal antibody according to claim 23, wherein the monoclonal antibody is prepared by a process comprising:
(a) providing a hybridoma capable of producing the monoclonal antibody; and
(b) culturing the hybridoma under conditions that provide for the production of the monoclonal antibody by the hybridoma.

28. A hybridoma that produces the monoclonal antibody according to claim 23.

29. The antibody according to claim 21, wherein the antibody is a humanized antibody.

30. A kit for detecting cancer cells comprising the antibody according to claim 21.

31. A kit for detecting cancer cells comprising the monoclonal antibody according to claim 23.

32. A method for detecting a presence or an absence of cancer cells in an individual, the method comprising:
contacting cells from the individual with the antibody according to any of claims 21 or 23;
and detecting a complex of a CAP from the cancer cells and the antibody,
wherein detection of the complex correlates with the presence of cancer cells in the individual.

33. A kit for diagnosing the presence of cancer in a test sample, said kit comprising at least one polynucleotide that selectively hybridizes to a CA polynucleotide sequence selected from the group consisting of the polynucleotide sequences SEQ ID NOS: 4, 20, 26, 36, 44, 54, 68, 74, 91, 105, 115, 149, 159, 165, 189, 203, 217, 229, 239, 249, 257, 267, 273, 281, 288, 296, 306, 314, 326, 336, 348, 366, 377, 383, 386, 389, 399, 409, 417, 431, 445, 459, 472, 482, and 498 shown in Tables 1-49, or its complement.

34. A kit for diagnosing the presence of cancer in a test sample, said kit comprising at least one polynucleotide that selectively hybridizes to the sequence of a polynucleotide sequence selected from the group consisting of the polynucleotide sequences SEQ ID NOS: 5, 7, 9, 11, 13, 21, 27, 29, 37, 39, 45, 47, 49, 55, 57, 59, 61, 63, 69, 75, 77, 79, 81, 92, 94, 96, 98, 100, 106, 108, 110, 116, 118, 120, 122, 124, 126, 128, 130, 132, 134, 136, 138, 140, 150, 152, 160, 166, 168, 170, 172, 174, 176, 178, 180, 190, 192, 194, 204, 206, 208, 210, 212, 218, 220, 222, 224, 230, 232, 234, 240, 242, 244, 250, 258, 260, 268, 274, 282, 284, 286, 289, 297, 307, 315, 317, 319, 321, 327, 329, 337, 339, 349, 351, 367, 369, 378, 384, 387, 390, 392, 394, 400, 402, 404, 410, 412, 418, 420, 422, 424, 426, 432, 434, 436, 438, 446, 448, 450, 452, 454, 460, 462, 464, 473, 475, 477, 483, 485, 487, 489, 491, 499, 501, 503, and 505 shown in Tables 1-49, a fragment thereof, or their complement.

35. An electronic library comprising a polynucleotide, or fragment thereof, comprising a CA polynucleotide sequence selected from the group consisting of the polynucleotide sequences of SEQ ID NOS: 4, 20, 26, 36, 44, 54, 68, 74, 91, 105, 115, 149, 159, 165, 189, 203, 217, 229, 239, 249, 257, 267, 273, 281, 288, 296, 306, 314, 326, 336, 348, 366, 377, 383, 386, 389, 399, 409, 417, 431, 445, 459, 472, 482, and 498 shown in Tables 1-49, or its complement.

36. An electronic library comprising a polynucleotide, or fragment thereof, comprising a CA polynucleotide sequence selected from the group consisting of the polynucleotide sequences of SEQ ID NOS: 5, 7, 9, 11, 13, 21, 27, 29, 37, 39, 45, 47, 49, 55, 57, 59, 61, 63, 69, 75, 77, 79, 81, 92, 94, 96, 98, 100, 106, 108, 110, 116, 118, 120, 122, 124, 126, 128, 130, 132, 134, 136, 138, 140, 150, 152, 160, 166, 168, 170, 172, 174, 176, 178, 180, 190, 192, 194, 204, 206, 208, 210, 212, 218, 220, 222, 224, 230, 232, 234, 240, 242, 244, 250, 258, 260, 268, 274, 282, 284, 286, 289, 297, 307, 315, 317, 319, 321, 327, 329, 337, 339, 349, 351, 367, 369, 378, 384, 387, 390, 392, 394, 400, 402, 404, 410, 412, 418, 420, 422, 424, 426, 432, 434, 436, 438, 446, 448, 450, 452, 454, 460, 462, 464, 473, 475, 477, 483, 485, 487, 489, 491, 499, 501, 503, and 505 shown in Tables 1-49.

37. An electronic library comprising a polypeptide, or fragment thereof, comprising a CA polypeptide sequence selected from the group consisting of the polypeptide sequences of SEQ ID NOS: 6, 8, 10, 12, 14, 22, 28, 30, 38, 40, 46, 48, 50, 56, 58, 60, 62, 64, 70, 76, 78, 80, 82, 93, 95, 97, 99, 101, 107, 109, 111, 117, 119, 121, 123, 125, 127, 129, 131, 133, 135, 137, 139, 141, 151, 153, 161, 167, 169, 171, 173, 175, 177, 179, 181, 191, 193, 195, 205, 207, 209, 211, 213, 219, 221, 223, 225, 231, 233, 235, 241, 243, 245, 251, 259, 261, 269, 275, 283, 285, 287, 290, 298, 308, 316, 318, 320, 322, 328, 330, 338, 340, 350, 352, 368, 370, 379, 385, 388, 391, 393, 395, 401, 403, 405, 411, 413, 419, 421, 423, 425, 427, 433, 435, 437, 439, 447, 449, 451, 453, 455, 461, 463, 465, 474, 476, 478, 484, 486, 488, 490, 492, 500, 502, 504, and 506 shown in Tables 1-49.

38. A method of screening for anticancer activity comprising:
(a) providing a cell that expresses a cancer associated (CA) gene encoded by a nucleic acid sequence selected from the group consisting of the sequences SEQ ID NOS: 4, 20, 26, 36, 44, 54, 68, 74, 91, 105, 115, 149, 159, 165, 189, 203, 217, 229, 239, 249, 257, 267, 273, 281, 288, 296, 306, 314, 326, 336, 348, 366, 377, 383, 386, 389, 399, 409, 417, 431, 445, 459, 472, 482, and 498 shown in Tables 1-49, or fragment thereof;
(b) contacting a tissue sample derived from a cancer cell with an anticancer drug candidate; and
(c) monitoring an effect of the anticancer drug candidate on an expression of the CA polynucleotide in the tissue sample.

39. The method of screening for anticancer activity according to claim 38, wherein the CA gene comprises at least one nucleic acid sequence selected from the group consisting of the sequences SEQ ID NOS: 5, 7, 9, 11, 13, 21, 27, 29, 37, 39, 45, 47, 49, 55, 57, 59, 61, 63, 69, 75, 77, 79, 81, 92, 94, 96, 98, 100, 106, 108, 110, 116, 118, 120, 122, 124, 126, 128, 130, 132, 134, 136, 138, 140, 150, 152, 160, 166, 168, 170, 172, 174, 176, 178, 180, 190, 192, 194, 204, 206, 208, 210, 212, 218, 220, 222, 224, 230, 232, 234, 240, 242, 244, 250, 258, 260, 268, 274, 282, 284, 286, 289, 297, 307, 315, 317, 319, 321, 327, 329, 337, 339, 349, 351, 367, 369, 378, 384, 387, 390, 392, 394, 400, 402, 404, 410, 412, 418, 420, 422, 424, 426, 432, 434, 436, 438, 446, 448, 450, 452, 454, 460, 462, 464, 473, 475, 477, 483, 485, 487, 489, 491, 499, 501, 503, and 505 shown in Tables 1-49.

40. The method of screening for anticancer activity according to claim 38, further comprising:
(d) comparing the level of expression in the absence of said drug candidate to the level of expression in the presence of the drug candidate.

41. The method of screening for anticancer activity according to claim 39, wherein the drug candidate is an inhibitor of transcription and further wherein the nucleic acid sequence is selected from the group consisting of SEQ ID NOS: 5, 7, 9, 11, 13, 21, 27, 29, 37, 39, 45, 47, 49, 55, 57, 59, 61, 63, 69, 75, 77, 79, 81, 92, 94, 96, 98, 100, 106, 108, 110, 116, 118, 120, 122, 124, 126, 128, 130, 132, 134, 136, 138, 140, 150, 152, 160, 166, 168, 170, 172, 174, 176, 178, 180, 190, 192, 194, 204, 206, 208, 210, 212, 218, 220, 222, 224, 230, 232, 234, 240, 242, 244, 250, 258, 260, 268, 274, 282, 284, 286, 289, 297, 307, 315, 317, 319, 321, 327, 329, 337, 339, 349, 351, 367, 369, 378, 384, 387, 390, 392, 394, 400, 402, 404, 410, 412, 418, 420, 422, 424, 426, 432, 434, 436, 438, 446, 448, 450, 452, 454, 460, 462, 464, 473, 475, 477, 483, 485, 487, 489, 491, 499, 501, 503, and 505 shown in Tables 1-49.

42. A method for detecting cancer associated with expression of a polypeptide in a test cell sample, comprising the steps of:
(i) detecting a level of expression of at least one polypeptide selected from the group consisting of SEQ ID NOS: 6, 8, 10, 12, 14, 22, 28, 30, 38, 40, 46, 48, 50, 56, 58, 60, 62, 64, 70, 76, 78, 80, 82, 93, 95, 97, 99, 101, 107, 109, 111, 117, 119, 121, 123, 125, 127, 129, 131, 133, 135, 137, 139, 141, 151, 153, 161, 167, 169, 171, 173, 175, 177, 179, 181, 191, 193, 195, 205, 207, 209, 211, 213, 219, 221, 223, 225, 231, 233, 235, 241, 243, 245, 251, 259, 261, 269, 275, 283, 285, 287, 290, 298, 308, 316, 318, 320, 322, 328, 330, 338, 340, 350, 352, 368, 370, 379, 385, 388, 391, 393, 395, 401, 403, 405, 411, 413, 419, 421, 423, 425, 427, 433, 435, 437, 439, 447, 449, 451, 453, 455, 461, 463, 465, 474, 476, 478, 484, 486, 488, 490, 492, 500, 502, 504, and 506 shown in Tables 1-49, or a fragment thereof; and
(ii) comparing the level of expression of the polypeptide in the test sample with a level of expression of polypeptide in a normal cell sample, wherein an altered level of expression of the polypeptide in the test cell sample relative to the level of polypeptide expression in the normal cell sample is indicative of the presence of cancer in the test cell sample.

43. A method for detecting cancer associated with expression of a polypeptide in a test cell sample, comprising the steps of:
(i) detecting a level of activity of at least one polypeptide selected from the group consisting of SEQ ID NOS: 6, 8, 10, 12, 14, 22, 28, 30, 38, 40, 46, 48, 50, 56, 58, 60, 62, 64, 70, 76, 78, 80, 82, 93, 95, 97, 99, 101, 107, 109, 111, 117, 119, 121, 123, 125, 127, 129, 131, 133, 135, 137, 139, 141, 151, 153, 161, 167, 169, 171, 173, 175, 177, 179, 181, 191, 193, 195, 205, 207, 209, 211, 213, 219, 221, 223, 225, 231, 233, 235, 241, 243, 245, 251, 259, 261, 269, 275, 283, 285, 287, 290, 298, 308, 316, 318, 320, 322, 328, 330, 338, 340, 350, 352, 368, 370, 379, 385, 388, 391, 393, 395, 401, 403, 405, 411, 413, 419, 421, 423, 425, 427, 433, 435, 437, 439, 447, 449, 451, 453, 455, 461, 463, 465, 474, 476, 478, 484, 486, 488, 490, 492, 500, 502, 504, and 506 shown in Tables 1-49, or a fragment thereof, wherein said activity corresponds to at least one activity for the polypeptide listed in Tables 1-49; and
(ii) comparing the level of activity of the polypeptide in the test sample with a level of activity of polypeptide in a normal cell sample, wherein an altered level of activity of the polypeptide in the test cell sample relative to the level of polypeptide activity in the normal cell sample is indicative of the presence of cancer in the test cell sample.

44. A method for detecting cancer associated with the presence of an antibody in a test serum sample, comprising the steps of:
(i) detecting a level of an antibody against an antigenic polypeptide selected from the group consisting of SEQ ID NOS: 6, 8, 10, 12, 14, 22, 28, 30, 38, 40, 46, 48, 50, 56, 58, 60, 62, 64, 70, 76, 78, 80, 82, 93, 95, 97, 99, 101, 107, 109, 111, 117, 119, 121, 123, 125, 127, 129, 131, 133, 135, 137, 139, 141, 151, 153, 161, 167, 169, 171, 173, 175, 177, 179, 181, 191, 193, 195, 205, 207, 209, 211, 213, 219, 221, 223, 225, 231, 233, 235, 241, 243, 245, 251, 259, 261, 269, 275, 283, 285, 287, 290, 298, 308, 316, 318, 320, 322, 328, 330, 338, 340, 350, 352, 368, 370, 379, 385, 388, 391, 393, 395, 401, 403, 405, 411, 413, 419, 421, 423, 425, 427, 433, 435, 437, 439, 447, 449, 451, 453, 455, 461, 463, 465, 474, 476, 478, 484, 486, 488, 490, 492, 500, 502, 504, and 506 shown in Tables 1-49, or antigenic fragment thereof; and
(ii) comparing said level of said antibody in the test sample with a level of said antibody in the control sample, wherein an altered level of antibody in said test sample relative to the level of antibody in the control sample is indicative of the presence of cancer in the test serum sample.

45. A method for screening for a bioactive agent capable of modulating the activity of a CA protein (CAP), wherein said CAP is encoded by a nucleic acid comprising a nucleic acid sequence selected from the group consisting of the polynucleotide sequences SEQ ID NOS: 5, 7, 9, 11, 13, 21, 27, 29, 37, 39, 45, 47, 49, 55, 57, 59, 61, 63, 69, 75, 77, 79, 81, 92, 94, 96, 98, 100, 106, 108, 110, 116, 118, 120, 122, 124, 126, 128, 130, 132, 134, 136, 138, 140, 150, 152, 160, 166, 168, 170, 172, 174, 176, 178, 180, 190, 192, 194, 204, 206, 208, 210, 212, 218, 220, 222, 224, 230, 232, 234, 240, 242, 244, 250, 258, 260, 268, 274, 282, 284, 286, 289, 297, 307, 315, 317, 319, 321, 327, 329, 337, 339, 349, 351, 367, 369, 378, 384, 387, 390, 392, 394, 400, 402, 404, 410, 412, 418, 420, 422, 424, 426, 432, 434, 436, 438, 446, 448, 450, 452, 454, 460, 462, 464, 473, 475, 477, 483, 485, 487, 489, 491, 499, 501, 503, and 505 shown in Tables 1-49, said method comprising:
a) combining said CAP and a candidate bioactive agent; and
b) determining the effect of the candidate agent on the bioactivity of said CAP.

46. The method of screening for the bioactive agent according to claim 45, wherein the bioactive agent affects the expression of the CA protein (CAP).

47. The method of screening for the bioactive agent according to claim 45, wherein the bioactive agent affects the activity of the CA protein (CAP), wherein such activity is selected from the activities listed in Tables 1-49.

48. The method of screening for the bioactive agent according to claim 45, wherein the bioactive agent is a modulator of an activity selected from the group consisting of: G-protein coupled receptor, nucleotide binding, nucleic acid binding, calcium binding protein, apoptosis, cell cycle regulator, chromatin protein. transcription factor, transport protein, signal transduction, nuclear receptor, growth factor, protein kinase, protein phosphorylase, peptidase, electron transport, thioredoxin, semaphorin, signalling, and motility as shown in Tables 1-49.

49. A method for diagnosing cancer comprising:
a) determining the expression of one or more genes comprising a nucleic acid sequence selected from the group consisting of the human genomic and mRNA sequences outlined in Tables 1-49, in a first tissue type of a first individual; and
b) comparing said expression of said gene(s) from a second normal tissue type from said first individual or a second unaffected individual;
wherein a difference in said expression indicates that the first individual has cancer.

50. A method for treating cancers comprising administering to a patient an inhibitor of a CA protein (CAP), wherein said CAP is encoded by a nucleic acid comprising a nucleic acid sequence selected from the group consisting of the human nucleic acid sequences in Tables 1-49.

51. The method for treating cancers according to claim 50, wherein the inhibitor of a CA protein (CAP) binds to the CA protein.

52. A method for inhibiting expression of a cancer associated (CA) gene in a cell comprising:
contacting a cell expressing a CA gene with a double stranded RNA comprising a sequence capable of hybridizing to a cancer associated (CA) mRNA corresponding to the polynucleotide sequences of SEQ ID NOS: 5, 7, 9, 11, 13, 21, 27, 29, 37, 39, 45, 47, 49, 55, 57, 59, 61, 63, 69, 75, 77, 79, 81, 92, 94, 96, 98, 100, 106, 108, 110, 116, 118, 120, 122, 124, 126, 128, 130, 132, 134, 136, 138, 140, 150, 152, 160, 166, 168, 170, 172, 174, 176, 178, 180, 190, 192, 194, 204, 206, 208, 210, 212, 218, 220, 222, 224, 230, 232, 234, 240, 242, 244, 250, 258, 260, 268, 274, 282, 284, 286, 289, 297, 307, 315, 317, 319, 321, 327, 329, 337, 339, 349, 351, 367, 369, 378, 384, 387, 390, 392, 394, 400, 402, 404, 410, 412, 418, 420, 422, 424, 426, 432, 434, 436, 438, 446, 448, 450, 452, 454, 460, 462, 464, 473, 475, 477, 483, 485, 487, 489, 491, 499, 501, 503, and 505 shown in Tables 1-49, in an amount sufficient to elicit RNA interference; and
inhibiting expression of the CA gene in the cell.

53. The method of claim 52, wherein the double stranded RNA is provided by introducing a short interfering RNA (siRNA) into the cell by a method selected from the group consisting of transfection, electroporation, and microinjection.

54. The method of claim 52, wherein the double stranded RNA is provided by introducing a short interfering RNA (siRNA) into the cell by an expression vector.
